United States Patent Application Publication US 2007/0083945 A1 - sequence listing, part 22

SEQ ID NO: 148719 - DNA, 256 bp, Glycine max
accttaaatctcagctctgggaaagatggactctcacattgaatattttatcaacgttcacacgcactggtaatcgattaccaaacacattgtcatcgagcatagctttttgaaaataattggaacgttgtgaatacaatgcgaaaactgtatcagaacaatcgtgctactggtaatcgattacacaatttggttatcgatggccagagagtaaaaactctctggtaaacagtattgtcataaactcatgtgctat

SEQ ID NO: 148720 - DNA, 410 bp, Glycine max
agcttcggaagagagtgatgaggttcaatccctataggcagagcttgaaagagcccgagtagtcgaagagaagttcaagtccatagccatcaaaagtcagaaaagagtatgatgaactaagggacgtcaatatggccaccgctgaagccttggaacgagaaaccaagaaggcccgaaaggaagaacacgtgccagcaaagttttgaggggctttatagggcagcaatagtgagctcaagctccgaagaggtgaaaggaatcatcacgggtcaaaggcatgatcttgaaggacgagctaaaggcttaccttatgtcaaaaagaaatttgtcccaacagttaagcaagactgaagggaatatgtgggctgtcatcgatgagtgcaaagagaagctaaatctagcggcgactc

SEQ ID NO: 148721 - DNA, 365 bp, Glycine max
  unsure (1)..(365): unsure at all n locations
tgtaatcgattacacacatactgtaatcgattaccagtatagtttttcataaaacattctcaacagtcacatctttttgtgtggttcttgaatggctatcataggcctatatatatgtgacttgagacacgaatttgacaagagttttgaagaacaaaaaggtcttatcctcttaacaagaaaaattgttttatcctcttacaaattccttggccaaaacacttgttatttaataaggaattatttgagtgctcaaattgttcaatctatctctttcaagagagatatcttcttttcttcttctttattctgaaaagggattaagagaccganggtctcttctcgtgaaagaattctaaacacaa

SEQ ID NO: 148722 - DNA, 336 bp, Glycine max
  unsure (1)..(336): unsure at all n locations
agcttncagatgtggagaaggaactagttctccgcctcctctcgcagaacctacccaccaattcccctcccctaaaccctaactcccccgaatgtcgcaactgcctacggtacgcccattcgcatactctccagccgcctgacaccgttcaatggcccggacgccgccagcatcggcgactccatcaagcgccggctcgctacccacggcctctcctacgaagccctctacttcggcgacctcttcttgaaattctcctccaaagcccaaaggcgtaacaacagattcggcgtcatctacgtccacaaaatcgtctccgaagatcgcctaacggcc

SEQ ID NO: 148723 - DNA, 131 bp, Glycine max
cacatatccaaaggatccactttccttgaaccatttctaccaataacaaacatgctaatgcatgtgaatagcgacgaacacaacaagccattacttaacacctaaagcaacacccactatacaatgaaata

SEQ ID NO: 148724 - DNA, 373 bp, Glycine max
  unsure (1)..(373): unsure at all n locations
agctnagagtagagcattgtggtagagtttaaagtggtagngatcaatacttgtaactcgttgaagttagtataacttggtaattagtcaataactggatgtaatctcgatggtatatacgaaccactataaatttttgtgtcctatgtgttttttcttttgaattgaattgtgttatgaaaactttttatgtattgaaaattctattttcattgtctaaaagtgttaggcgaaaatatgttatctgacttaataaagcctctcttcagacaataatttggttacttttgaaacagttgttaaaattttttcaaaatcacaatttatttggcctttctcatgatatttacctttacagggtggaatccaagct

SEQ ID NO: 148725 - DNA, 398 bp, Glycine max
  unsure (1)..(398): unsure at all n locations
agctaagcacagagtgggagacctcaaattgcagctncctatggtgctccactactgaggatcctgaatcctattcctcaaccctggccaataacgctcgagactatactccttgtgagccctaccaggcgacttccactcccccaccctgttcagtcacaacaaaggcccatatggaaaaccctatgagggcagctataatgagcgccatgatcaccaagtatatcgaccatgcccatgccacatgagagcatgcccctattagacccgttggcgaaatcacaagcacaacctagcctatgaccaatagtggggtttggaaaaaattctccatgttacggtgctgcctgcatcctagacccgctccatgatgggtatagtacccacagcgtgaagaa

SEQ ID NO: 148726 - DNA, 294 bp, Glycine max
ggcttctatccttcattgtggctacgagaccagtttcctgaccacatttgattgatggaaataatctcatataacatcctacttacattggatacacacgggtcatggaacaagcaccacttttcatgcacgtgagtttttcatttataattaactaattctcatgcattatgggtcttgctaagaactctctttaatgagaaaaataagatacatgcgtatggtatggacataatagcttatgtcttcaaaattttatatgtttatacaacttgctgttgttgtgaaagccaa

SEQ ID NO: 148727 - DNA, 363 bp, Glycine max
agcttctaaactttgtacaagaatgaatctctgataccacttgttagacaagtggcctcaaatatcttaagaaaggggggttgaattaagatattccaaactgtttcccctaattaaaaatctatttcactttttactcaagttatgaattcccttaatgacaatcttcttaaatattaattcaaacgaagcaacttgaatatgaatataaagcaataataaataaaagagattaagggaagagaaaatgcaaactcagttttatactggttcggccacacccttgtgcctacgtccagtccccaagcaacccgcttgagagttccactaacttgtaaattccttttaacagttctaaacaca

SEQ ID NO: 148728 - DNA, 295 bp, Glycine max
tgtcttcttattaaacaaatgctttgaattatgtaatagactatttgctatctgtcattatagaagtattattgtcaaaaatattctttaagagattgtcctcgtatttgcttagtcattgatttttctaattttatccttggacgaatattattttcgttccttcaaattaatgtattaaacgactcacataaacacgagaaacttactgaaatacctattcctcaataattttataaaggtatatttaagtctccaatataaacttgacgtttgttcgagacttttatttttt

SEQ ID NO: 148729 - DNA, 397 bp, Glycine max
agcttcagtgctatgctgatattgacatgttcttaaaatgtgaattgggttgtggaatatgagtggatttgatgcttaatgatgttactcttgttgtattggtcccaaaaattttgtctatacaaattagtttccaaagggatgaactttggcaagttgagaatttggggagagtgaatttgatagcaagttgagaatttgggtagagtgaatttgataggaagttgagcatttgtgtagagtgaatttgatagcaggttgacaatttgggtggagtgaatttgtatagaaaattgaggatttggctagagtggatttgatatgaagttgacaatttgggtagagtgaatttgatagctagttgacacttttgatgactaattttttacacagaaac

SEQ ID NO: 148730 - DNA, 358 bp, Glycine max
  unsure (1)..(358): unsure at all n locations
atgggattattgtcaacagcaccacanaagtgagccgattgaccatttacactgaccccgctgttctacacactacttttatcatcctgggactatgtgtacaaagaatactgattgatagcatatcgcttccaagttggaacattcatatttggacccatagctagcaatcttaatgtgtatgaagcactgtcatctgtgaagaatgtttgtctaaacctggatatgaaagttctattgttctcttgcaacaacctcatcatgttcatttttgagttaataccactaacatgttgtttgtgagcatctatgtaagggaatacctcaattgtgttgtgttatacatataaaatagctt

SEQ ID NO: 148731 - DNA, 414 bp, Glycine max
agcttgatgttcacatcaaagctgcaattaacaagttttatattataagtcatttaatgtattctaaatgtggatacataaatagttttgtcctcatttgtacatccaaatctttctatgcagtgcattgaagacattaaagactacttctgacggtaaaattgatcaacctacacatctgtgattgaagtgaaggttagtcatacaatcaatggttatttatgactgttgatgttgtgtaacatctgaattgtaagattgaattatttttcatattgaatgtagagtcacgttcaaagcggaggccatgagtgtggctattatgtcatgcattggatgtagaacatagtgagtggggagttgaagaatgaatggagcatggtatatttacttttgtataaaaattacttgagt

SEQ ID NO: 148732 - DNA, 268 bp, Glycine max
atcattagcgcgctctatgagactgttgactttctcaacaatagaaccgctgaacctgtatgataataatacagatacctcgtttatatactatgagagcatatggttcacgcatattaccccctatttgtgggagtgggactaattgggatgcagcgaaagagattaagcatcagcacacataacacataagttgtgttattaagaatagagaacataagatgagattaaagaaaaagaatgcggtcaaaggaaatgtgtgctgatg

SEQ ID NO: 148733 - DNA, 414 bp, Glycine max
agcttagtgatactagatgacttatgattatttttatagatcaaagaaataattagagaaatgatagaagtaattttataaagctaatcctattactaatattaaaaaaactaaaataacacttattagatacgttgaaaaagtaattaatattacattaatattttaagtgtcaaatcaaattttacaaagtgactcagccagcacgataacttgttgcatactgcatcggtattttttggttcttcaaacaataagcttaaaccataatacaccatcttcaacccatgcaaaaccactaaaccgtagtgcatacagcataagcttaaagaatacagacaacacaaatatcatcgtgaatgatgagaagaatatccaaacaaccagccctctctggccagttgatgggtcttt

SEQ ID NO: 148734 - DNA, 413 bp, Glycine max
  unsure (1)..(413): unsure at all n locations
taagcttgtgatttagtttttgatgtntaaggtggggaaaacatttttttatgttgattaaaacaaacaattgatttagtaacacacgctccaataagagtatagtgtcattatgttaaaaagtgattgaaaagtatgttaacaaattggtatactacatatataaacaactctaaaagtttagagatttgagaatgtaacaaaagatatgaatctaatcttatattttcattctcttcactcatatattaacttgagtgttagagtctttacccgaggtcattactaaaattgtttgtataattggtgtgtttatatgatcatcacgatatgtgattactagtaattttgtccgtaaccaacattaaagattcttattattggaaagagaatcaatttgacaaaaattcatc

SEQ ID NO: 148735 - DNA, 415 bp, Glycine max
  unsure (1)..(415): unsure at all n locations
agcttgcaaccattagaagagagagaacatgtgattagtagtatgactganaatgttagtcagtttgtcagattaattgtgaaggactgcattaaccgtatcccagtgagagtgtgatccataaattttgagagaaacaactatcatttattactgacttttgcatgaatctctgaagtatggactgaatgcatgaaattgaggatgatgaaggccatgtttgattgtgatagccacttagccaaaaagctgaccatgtgcttgaatgatttatcccttgcacccagttttgagctgaatgattgattgattgattgaaccttgagcctatacagttttatctcctgcaaccttgtcttaggttgtaggagagcatcatccacagaaaagcttggttcaagacataattgtccca

SEQ ID NO: 148736 - DNA, 326 bp, Glycine max
ggttctagttttcaaaattaagttgaaggtttataatttgtagtttctaaagcattagaaattagaaaaaaactgtcttgatctattataatcccaatttttgtagttgaataaattggttaaactattgtattgattaagaaaataaataataaagaatttatagcacacaaatttttatatctgtgtatattcttatgtgtactctctttatatagcaaatgtaagaaataatgataaattacttacttcaagatgcgttcttcaagtttgcttaaacagatgtttgatgtatgccatcttgatatcattggcaaccttgaatc

SEQ ID NO: 148737 - DNA, 442 bp, Glycine max
ttaagtgacctgccgcatgcaagctttaagccagggccagactctcgtgcatgtttaggcttcttcaagaaaaactccaaactcgctttgcaaatctgatttcaggcttaaataggtggccttgtttgtgctcgtgcgcttaatgcacgtatggatcgcttaacgcactttagtgatttttggctcagcgcacttctctcacttagcggatgagctgaagcggtgtgcttgatgacctggagcaatgcgctcagcgaacctgacaggtcatcttcttctggattcttcctcgcacttagcgaatgctcgctaagccagcatattggcttatcgagaaggtgaaaataacacttttgccaatttgcctaattaacctgaaattgagagaaattgattattaaacacacacaacaaaagtataaattatctatcacctatattt

SEQ ID NO: 148738 - DNA, 242 bp, Glycine max
acgtaatttatcaaaattcacacaccctaagccgagcgacaaattctattctcaccgtccatacttgttagctcataatacagaaatggtcacgatatgctcacgagcgaagagagggcttatctacataaactattacatccttgcattgagtcggcaacgtagcaaaatctctctgcctctgcatactatctgatactctcttcaacgtctgaacctaaatctttctatctctcacacac

SEQ ID NO: 148739 - DNA, 407 bp, Glycine max
agcttaggttctaggagagcattcatccatagaataaccttcattttttttattcattccttccccatacttgccctttttcttaggcacttagctttcatacctaaatttatagcatacagacgtattaactttatttatacttacatttttttttaaagaacagaagcagtgtgtatatattattttctttaaccatttcaatccttacccagtgcctcacctaaatttgaaacaaatttaccttgataatacctcccccaaatttgggacaaatttgccttgaaccatcttctgtggatgatgctctcctacaacctaaaataaggtagcataagatacaacttaataggctggtggtttaatcaatcaatcaattcattcaactcaaactgggtgcaagggat

SEQ ID NO: 148740 - DNA, 318 bp, Glycine max
  unsure (1)..(318): unsure at all n locations
ctcagcttaggtccgaggtgcattacagtttgtaatcatgtgtttttgtactgatgctcttgaanactgttggcaatctaattacatgtccgaggaacattacagtttggcagaagtgtggtttgtggtctcgtatcaatccgttgctgcttaatattgaatcttttaaagagttggtgtgtatcttatgttgctcactcaatgaagatcaatctactttgtttgttatgactatgtggaaccttcggaggagtagaaatgagattctttggaattcaagtgatgatcaagatattggagttttgaatagagctagat

SEQ ID NO: 148741 - DNA, 400 bp, Glycine max
  unsure (1)..(400): unsure at all n locations
agcttgtaatttattactaaccttggagcccctctttcttgttctgaagcattcattacatgaaatccggaacaactccaaggagacttagacagtctagttaatcctttatctaaataatcttggatttcttttttacaatattctaagtattgttgattcatttctaattggtcttgcttttgttgggatatccttctcattaaattcttcttcataaggtaatgaaacttcatattttttccaactccaaaaggctatgggatttgtttcacaaatttctttttctattttttcttcaaattcttttactattttttgaatattagaagtgtttcgnntgtcttctattctcttatattgtatttatttatttagaatatttatgtgtttttgcttc

SEQ ID NO: 148742 - DNA, 435 bp, Glycine max
  unsure (1)..(435): unsure at all n locations
cttgacaganaaaatggcttgtggccagagaagacacatatggattgatgatatgtatggttcatacagattaccaatccgtatgggttttatttactttataaaattatttgaaatgttgtttccttttatttttggtaaaaaaaaatgtagttattattaaaaataattattgttattattaaaaaaatttagttattattaattttttttaaaagtttattttgtgttgtggccatacgaatcactaatctgtatggtatttttttaaatttttttattaattcaaaatgataaactgaaattttctttaaaaatttccatatggatcactgatccgtatggtatgtttttataataaaaagttgaaacttgaaattatgttaagtttttttttgttgaatatttttaaaaaaaatttttgagctattttaa

SEQ ID NO: 148743 - DNA, 377 bp, Glycine max
ttgtttctcgagggaaattctataaatagacctcccatctttaatggagggggttaccactattggaaaacccgcatgcaaatctttatagaggcaatagatctaaatatttggaaagccatataataaggaccttatgttccctctatagtggtcgaaagtgcaacaatagaaaaacctagagcatattggactgaggaagaaagaagattagtacaatataatttaaaggccaaaaatattattacatctgccctaagaataaatgaataatttatggtttcacattgtaaaagtgctaaagatatgtcatataccctacaagtaacacatgaaggcacaacagatgttaaaagatctaggataaacacattaac

SEQ ID NO: 148744 - DNA, 318 bp, Glycine max
  unsure (1)..(318): unsure at all n locations
actcaagctgttgtaaggatcctgaatctcgacttcttcgattacatgtttatgactgggacaaggtttttcgacgacttttttctagttacttgttgaattttgatagacaaaattaacataanaatcttagctatagtagttatcattgactaagctcttaaggtagtcatgnttgaaaggaagttcatcatttttcctttgaaaaatttacgtacgatcaacttatgtggtctaaatgcccatttcttttaaagtttcatcaacaaatctgacataacaggtatattgctagcagcaaacaacatggtacacaaa

SEQ ID NO: 148745 - DNA, 405 bp, Glycine max
  unsure (1)..(405): unsure at all n locations
agcttccttgagaagctagagtgtatcttctctttctcaataattaagctcacctcctagagaagcttccttgagaagtttcttagagaatttagagcttagctacacacacccctctaataactaagctcaactccttgagatgagaagctagagtttagttacacacaccccttataatagctaagctcaccccatggcaaaatacatgaaaatacaaaaaagtccctactacaaagactattcaaaatgtcctgaaatacaaggctaaaaccttatactactagaatgaccaaaataaaaggcccaaaagaaagaaaaacctattctaatatntacaaagaaacgtggacccaaccttggcccatgggctcagaaatctaccctgaggttcatgagaaccct

SEQ ID NO: 148746 - DNA, 326 bp, Glycine max
tctcagcttgtgatgatgggactaatatggctgcatgatgttttgcctacaatatgaataatgagctatgatgtagaaattatgaaaaactgttatgtattgagggttaagaccaagtgagtgtgtgatcacttggcaatgaatgttgcatgattatgaatttgagctttacattatggattatgtctaggggtatttgcccttcaacaaagtatatatattgtagagtatgattgatgttgaataaggtgtgtgtgctctttcgtgatataaaattgaagtacaaattctagagtggtgttatctagtgaaccacatttggcatt

SEQ ID NO: 148747 - DNA, 353 bp, Glycine max
  unsure (1)..(353): unsure at all n locations
agccctgaaagcagtatgaaattaaagcttccctcatcattccagacaagccttctgccaccaagacaaacaacaagggggccaaaggatccccttgtctcaaacctctttggggcttaaattcagaagtacggcttccatttacaaggataaatatagaagctgaactgaagcaccccttaatccaacttatccatttatcatggaaccccattcttcccatcatgtnaagcacaaattgccatgacacggagacgttaacttctttgaagtccactttatacaccatacagagcctgttagacctactatcctcctcaaccacctcattggcaattaaaacaccatgaaac

SEQ ID NO: 148748 - DNA, 358 bp, Glycine max
tgtctaccataatattcacgacgatcgaaacttatgactctctcagtaaaggttccaatcacgagatacctctatttgacaccacgtgatttctgaaattatgagcattcaatatatcttgcaaatggtgggggattgtgagagattttcaagctgaagggctggactcttccccacgacatgaaagtgcctcccaccaaatctgtgaaaaagacctctcatccaagtccaaaacctctctctttaaagactaaacccttcctaagacattgaagggtttatattaactactctctccaaaaacacaatttcccccccccagttttttcccattcattccttttcctggtggaaaaaa

SEQ ID NO: 148749 - DNA, 406 bp, Glycine max
agcttgcctgtccgatgctgcagtaatgatggcccgggttatgttggggaacggttacgaacccggaatgggtttaggcaaagacaatggcggcataactagcctgataaatgccaaaggaaatcgtgggaaatatggtttaggctataaacccactcaggcggatataaagagaagcatcgcggggagaaagagcggtggtcaaagctcgcggttgagacaagaaagtgaaggaggcccgccctgccacataagtataagctttataagcgcgggtctgggagacgaaagtcaagtggttgcgatatacgaagatgatgttccgagtacattggatttggtacaaccatgccgtcctgatttccagctgggaaattggcgagtggaggaacgccccggcatttac

SEQ ID NO: 148750 - DNA, 353 bp, Glycine max
tgaaatgaggaagtgtggaagggtgagacttccttcttttattgttgaccacagagtgatacctggagatatgtcgcgggggtcaggagaccttggggacgtcaggtggggtgctattgcccaaaaccaagcttgacctatcccgacccaacccgggcatagtcagtcagtgagaacctgtgatgtacctaaacaggcgagctcttggcagtcaacagataaaaggaacaaagaccacaaagcaagaaggcttgtgtggtggctggccagctgtgaactttgattgatatatgggatatggcctctggtaatcgattaccaagggtgggtaatcgattacagggctttaaaat

SEQ ID NO: 148751 - DNA, 361 bp, Glycine max
  unsure (1)..(361): unsure at all n locations
ccaaaaactcaccctaatccttgtttaccaatgcacgagaaacctcttttgaaaaaaagaaggaaaattgcaaggaaaaagacaaaagaattaagcggctgtaaaatgttaatgataagatcttctaaagaatggacctttctatataaaatgctccaatttcaatacctaagctagcactaatttgatacccncactgcaatattcatggaaaaataaggagaaaattgagttaataaattcgcaaactttagattaaaaagaaatcatgaggaaccaacccattatgcatgacctccctattggtatcataagcattaatgtaagaaatttatttttttagaaacaacataatatgctt

SEQ ID NO: 148752 - DNA, 318 bp, Glycine max
ggacacttaaatctcagcttctcaccagcggtgaggaggtttcatcctttgaacaaaagcataattttcattggtaaaggttttggaaacttgaaacttgaagtgtgatgttgattaagaaatgatcagtgatgcctttctgacttcctgaacaaaatcagtcaccacaagctttcttcagaactttaagtccaaacatcatgtggaatctattgacaatatatgaacgatggtgttccattggccctctataacatatttttttctaaaatggagcattagcaacttagctttatctgtttataatataattgtaaa

SEQ ID NO: 148753 - DNA, 300 bp, Glycine max
  unsure (1)..(300): unsure at all n locations
caacccttgcgacaggtacaaatttctgattcaaagccaactgggttaccaagttgaccaacgcatccagtttgccttcaagcttcttagtttcagatgatgcagatgggtttgtagctacctcatgcactcctctaatgactatggcatcatttctggcactaaactgctgggagttggaggccatcttctcaattaaatttttggcttcagcaggagtcatgtctccaagggctccaccactggcagcatctatcatacttctctccatattactgagtccttcataanaatattgga

SEQ ID NO: 148754 - DNA, 376 bp, Glycine max
  unsure (1)..(376): unsure at all n locations
tgaagttctgaactntatnttgaagtttaattctcaaagtcaagatgtcataccctaatttcgttcggggaccattgtatgatggcatgtaacctttgtttgaccgcttcgaggtacttggcacccttggttgcacaatacgtgaagttttgagacatgcctgaaatcaaaaggaagcattgttacgcaatccgtgaaattccgtaacatgccgaaaatcaaaaggaagtattgttacgcaatccgtgagtttccgtgacattccgaaagctaaaaaaggagtaattacatgacccgtaaagttccataaccttacggaaagaaaacaagtattgttacgacattcgtaaaggttcgtaacgttattgaaaaagaa

SEQ ID NO: 148755 - DNA, 415 bp, Glycine max
  unsure (1)..(415): unsure at all n locations
cagcctcttatatcaaggttaatctgggtggtaaacctccttcttccatggcttatcccctagtggatggcgccacctcttacctctcctcctttatcttcccgtgcatctccatggtggaaaatcaccattaaaggacctcattgaagctcanagatccagcctccatagaagctgcacaagcaagcttccatcaagttcgatattggctgagtaatgatgtttgttgagctggtaagggattttctatttaggaacgacagtcgcagcatgggtttctccttcattctcacccttttcatttaccccagttttctcattcctctaagcaagatgattaaatttgcctcttttcaaacccgctgtgatcctttacccgacgaagaccaaatccgcaaagcttaaaggtgtgtag

SEQ ID NO: 148756 - DNA, 367 bp, Glycine max
  unsure (1)..(367): unsure at all n locations
tcatgatgatgaatcaagtggattcacgtggtgttgatgatgatttagatgatgacaaaagcccaacgaatggatttgagattgagtcaacatgttcaagatcaagattaatttctagtttcatgagaagaagtcacgaagattcaagagtcaagagaagtttgatttcaagattcaagagaagatgaattcaagattcaagagaagcaatcatgaagacttcacaagggaagtattgaaaagatntttcaaaaaacaaacatagcacaattttgtttttcaaaagattatttatcaaaagtttctaagttaccagagtttttacttcttggtgatcgaatacccatttcctgtaatcgattaccag

SEQ ID NO: 148757 - DNA, 421 bp, Glycine max
tgcagcttttaaatggtttaaaatgtttaaaatagcttgttttctattacacatgacttgtaatcaattaccagaggtttagaatgttttaaaacagcaataagaaatttgaatttaaatttcaaagttgagtaatcgattacagtaagttggtaatcgattacagtaagttgataatcgattactagtgtttaaatattcaaatttcaaatgaaaagagtcataactcttcagaagtaactgtgtaatcgattacaccattattgtaatcgattaccagtaaggagttttgaatataactcccaacagtcacatattttcaaatgtttttgaatggccatcaaaggcctatatataagtgacttgggatacgaaaattctagagagttttgcttggttcaaatgtcttatcctctcaaat

SEQ ID NO: 148758 - DNA, 376 bp, Glycine max
  unsure (1)..(376): unsure at all n locations
atgctcaccactactagaggagaagcctttatgttatttcatataaaccttcttctctaaatcaccattaagaaaggttgttntcacatacatttgttgcaactccaaggcaaaattagccactaatgccaagataatacaaataaattttttcttatatacaggagaaaaagtctctgtgtagtccattccttctttttgagtaaagtccttagcaacgagtcttcccttgatctctcattgttgcctaatgaaacttntttggtcttaaagaccattttacaaccaattgccttgccccattagacaactttacaagattcaaactccgtactttgcatggaatcatctaatctcattggttatacctaaaatt

SEQ ID NO: 148759 - DNA, 407 bp, Glycine max
  unsure (1)..(407): unsure at all n locations
agctntgaaaagtgttgtttttcaccttctcgttaagccaatctgctggcttagcgagcttccgctaagcataacactcatgggctaagcgcgaggaagactctggaagaagatgagctgtacaggttcgctaagcacacctcttcatctcaccaagcgcatcactttagttcatccgttaagcgagaaaagcacgtgctaagccaaaattcactaatgtgcgctaagcagtccataattgcgctaagcgcacgagcacaaacaaggccacctatttaagcctaaaatcagattttagagagggagtttaggctgggattcaaagctttgcatgtctagagtttctagagagagaaaggtccaagttccagagagttttgagagattttgctgtgtgatgatctgca

SEQ ID NO: 148760 - DNA, 303 bp, Glycine max
  unsure (1)..(303): unsure at all n locations
tggtcttcgctggcaaaatgatcgaagtgggtcttaaaagaggcaaatctgatcatcatgctttgataaatgcaaaaactggggcaaatgaagagggtgagaatgagggagaaacccaagctgtgactgccattcctatatggccaagtntcccaccaacccaacaatgtcattactcagccaataacaacccttctccttacccaccacctagttatctacaaaggccatccctaaatcaaccacaaaatccacctaccacacaaccaattgctaacaccacctttagcacgaaccaaaaca

SEQ ID NO: 148761 - DNA, 407 bp, Glycine max
agcttgtccatcaaacaactaggaacagtatggattctaatcaatcaattcatatttcatttttgcttatccactttggacttttctttttgtggccttttaaaaggaaatgcagaaaggattttcctgtgcactagtgaaaaaagaaacatattctcaactcaactacccaacaaaagggataagagactgtccgttgagacttgagaaggttctttctattgcatttttcctaccctgaatttttctatgattaccacgttacctttgcctctttgaagagcccaagcctggagagggaaaatgtcatttaacttaacccatgccttacatgataggtcacaaaatttctagaggccattatacaatgagactttggcacaatagaaaaatcacttaccatatca

SEQ ID NO: 148762 - DNA, 274 bp, Glycine max
aataaccttcatgttttttatgcattccttccacatacttgccctttttcttaagcacttagctttcatacctaaatttatagcatacagacgtattaactttatttatacttacattttttcttaaaaaacataagcagcgtgtatatattattttctttaaccatttcaatccttacccagtgcctcacctaaatttgaaacaaatttaccttgataatacctcccccacatttgggacaaatatgccttgaaccatcttctgtggatgatg

SEQ ID NO: 148763 - DNA, 380 bp, Glycine max
  unsure (1)..(380): unsure at all n locations
gacactattaatctcagcttaggtccgaggtgcattacagagtgtaatcatgtgtttttttactgatgctctngaaaactgttggcaatctaattacatgtccgaggaacattacagtttggcagaagtgtggtttgtggtctcgtatcaatccgttgctgcttaatattgaatcttttaaagagttggtgtgtatcttatgttgctcactcaatgaagatcaatctactttgtttgttatgactatgtggaaccttccgatgagtagaaatgatattcttttgaattcaagcgatgatcaatatattggagtttttaatatagctagattggttctagcagattggaagttgtctcatgcttgcaccacagtggcaatt

SEQ ID NO: 148764 - DNA, 409 bp, Glycine max
agcttgtcaagtgcactgtttaatgaatcttgatccatgctgggtagaaatttttcttcacttaagatagacaaaatccttaaagcaagttctgtggtaatcagctcccttccatgctgcccaaaactctggaagacaaggaatcatctgtcaaaaacaccagaataaccaatttgagataactatccactacatgccaaattataactttatctaataagaatgcctagttataatcatattatcataatttttacccttttattacatacaattgtttgcaatattaaatgccttgccacatgaaagttttatcattaacacaaacaaatgaagaaagcttacaagaagaatccgaagcttcgacctctcatcattgtctttcttttccttgcataaataaccactg

SEQ ID NO: 148765 - DNA, 401 bp, Glycine max
  unsure (1)..(401): unsure at all n locations
ntaaaggttgtcatgatctatctctctgttccccagctttatgatttgctttcatcaaagatccaaagtttgtgtccaacaattactgggaacgtttgttgtacagaagctcagtttgaaacattaaggacgcaagtccaacaggtcaaattttctctctgtctctctctttctttttttcttttttaattatagatgcatattcgtcatgtttaagatatgagttgatctcacagactctctctctctctctctgtgtttatatattttatggaattatggatacttatatattgattgactaatcacagtttgcctttacatgtttatacatctttctagttgatatgccacaattttataaattacgtgcgcatgccttttacacacagtacattatt

SEQ ID NO: 148766 - DNA, 412 bp, Glycine max
agctacttgaagaatacgggctgctttttagctttctcagaactcaatgaagaaggatgatacatgtttctttcttcaacaagagacccctcattacaatgaaaaagttgaagttgagttgcatccattacccggaaaccaattatcttctgccgcgtccgattatgttctgagattcttgtcaaactcaacaagagtcttggcttccactaaagggttgattctttgtaatcacgccacgagccacacaccaattgaactcttcatttgtaacccataaacaaaaacttggttacccattcccaccccaaaggaagttcaaaaaagatatgatgctggtgatcccacaatggtgttgctagaatcatcctacgacggctgtgatgatgagtacatggtatctcaccttgaa

SEQ ID NO: 148767 - DNA, 432 bp, Glycine max
tattaattgtcagcaatacgcgagtgagtggtggcacctctctataggccatttgcaccaccatttggtccgtatagcttatgtccacatatatggtcgtcaatatgctctagatacttgccttgtcattagctcttcattgacgagacatgccctcttaattcattttatcttcttgtgagatagtgtatccaaatagaacctatgttgtttacgaacaaaaaactaattacgaacaatcttgttgattccttcctcactctgtagtataaaaattgtttctatacaattttacactcttcagaataattctcatcaaatctattaattttcaatcatctctcctcatgatggactatttgattaattcactactaccattaaaattgttttaaaaaacttaattgttatttgcacctaagccattttttt

SEQ ID NO: 148768 - DNA, 413 bp, Glycine max
  unsure (1)..(413): unsure at all n locations
agcttgcattaaaaattaatatacatatattactacgaaaaattagttttgataaataaaatataatactaaaaaattaaaagaatttcactcaattgattgagtaaagagcatgagttattataaatttttgatacctatccttaatatttatgaatgaaaaaaatatgtaattacatatttaacatccaacttttattattttgtgaataatatcctctaaattttatttttatgaatcttattatctaaattttttatttttcattcattttactgatgttaatgtgacactaaaaaaattattttgtataaaatagtgtcgttttattaccaacaacatgataataaaatgtgtaaaattaagaacttataataataatattcactgaaanaaaacttggatgatgaaa

SEQ ID NO: 148769 - DNA, 279 bp, Glycine max
ctcagctgatggtttaactcagagaagaaagctgtatattccttgagatcatcatccagcgtatactttcacttttatcattagtagccatttgattcctgtatacaattgattttattcttagtgttgactcttgactcattttttattctattgttgttctccatatcttctgtttttaaaattctattgatcattatttaaaaaaaagccatgcaatccttaaaaaaaagcaaaaataaagtctgccacatttatagcacgatttataaagcatct

SEQ ID NO: 148770 - DNA, 424 bp, Glycine max
gatcttaagcaccgcggctgcagcttgagaatgactcttctttaatatagaatgtatctcttaaagaatccataatttctaatgcaaatgaactgagattgatgaaaattataccccgacttgaaagtgcttacttttccatgagatccaaaattaagcttcctgaaacagatactgcaactcacccagataaagatatactgataaatcatgacaattggtgtggagctcaaaaagacatggaacaacataaagcgacagatgctttaggagctttctttgacagtttgtgcaagtatgcacgttatagcaagtttgaagtgcggggcatactaagaaatactgattttaataatcctgcaaatgtaatatgctctctgagttttgatagggatgaagattactttgctgctgctgggatatc

SEQ ID NO: 148771 - DNA, 278 bp, Glycine max
  unsure (1)..(278): unsure at all n locations
cctctcacatatactcttgtaatattngtacacaagaaaatttgatgaaggcttacagcggctttgggtgcaggaactgattattaccatctgtctttcccactgaacttaatgtttctgctacagccttttttacaggagcggcattttcagactttgcttttggtttcatagcagttcccttctctatttgcttttgtccatgaagaaagagagagagagcattttaagcctatcacttcctggtatgtatcattctcaaatcgatgtacctacat

SEQ ID NO: 148772 - DNA, 393 bp, Glycine max
agcttgattcgtatgataaaatattttgttttatttcttcatttccttttaataacaaaaatttcatattacatttattttaatttttattttaaaaacttgggtaagaaacactaaaaatataaataacagcctttcacattttcttatacacacttttaaaaaaaatatataaaatcaaaataatgtggtgcttttgtaattaaaataaaaaaataaaagtaaaaaataaagaaacgatcctacttatatatatgtatgtattataaccaattaaaagggtgagaatattacatattgatatttattgttaatctttcttctttttaacatctatttattattttacatcattttaatgttatatagaaataaaaaactttttaaccccta

SEQ ID NO: 148773 - DNA, 371 bp, Glycine max
  unsure (1)..(371): unsure at all n locations
tctaaggaagctacctagtctataaatagaatcatgtgttacacttgttgtaactttgatgaatgagagtcttgtgagacacaactcaaagttcaacttctcttcccttttcttccttcaatgtcgtgctcccccctctctctttctctccctctttcttttcctccattgaagcatcctctccaagcttcttatccaaggctcatcttggtggtgaagctccttcttccaaggcttattccctaatggatggcgcctcctctcacctattctcctttgtcttccgctgcatctccatggtggaanatcaccattaaaggacctcatagaagctcaaagatccagccaccatagaagcccacaagcaaagc

SEQ ID NO: 148774 - DNA, 358 bp, Glycine max
  unsure (1)..(358): unsure at all n locations
agctttntggagtagaaaacatgggacctactcattttatttcaaaaagtggtatctagtcaaggtctgagagaccatacaagtttcctagcgatttctaattatgtgggccattaagtctatcatatgctaacaatagccgagaagcccatgaatttcttcgggggcggagtaggtgtctgccatcgccttggccttggctaacaatcggggaagttcctgactcccgttcaaggtaagagcaaaccgatccatcaacatggttgcctcttggtgtaaagagtcgatcacccttcctctagcctctttttccgcgtatacttgggcatactcgtccgcgatcctgtgctcgtgggcc

SEQ ID NO: 148775 - DNA, 458 bp, Glycine max
gacactattaatactcagcttcttatcaagacactttcttgatggtgaagcttcttcttctatgacttattccctagcggatggtgcctcctctcacctcttctcctttattcttcgctgcaactccatgactaaaaatcaccattgaaggacctcattgaagctcaaagatccaaccttcatagaaagcttttaagcaagctttcaccataccgcgagcaagattagtgtttgacgcaatggattgaaagaaacccatgatctctggtccaagacagaagaaaatagcattgacacatttggaatgaggatcatatccttttccacacattttaaattttggaaatagtgtattaagaatgtgggatgaataaatgttgcttatctattaaatcatattaataattattccatattaaatattttgatctaatgaatattaattggaataagtattt

SEQ ID NO: 148776 - DNA, 409 bp, Glycine max
gctaccgctggagctgatccatcaactgccctaactcttttagactggtgattcctaggctcttgaccttgacttgataaaacctcttattaagcgaaggcgtttgacttgatcccatgttttactaaagtgaaacaaaatctaacgcgaatcaaaactctgacatctatcatgggtggaatggatgaatgcatgaagaaatacgtatgatacatatgcaatttatgaacacgggagcccgggaaattctctccttcttagatacaacgtcttggggtagcaaagtgctcgacgtatgtatttaagaaggtgacacggaccctctgttggtttgccaaagagaggggatcaagacagaacccgtgcgtgatgcatatgcgaaaggcgcaacacgggaatgtacatagta

SEQ ID NO: 148777 - DNA, 295 bp, Glycine max
gtttggttcaagatacacaggacgccccacattggttacatgacacacactgcgacatgatgtataggaaactatatgcaaaacgttgacatgcatgcatctatgctgacactcgagcgtaaattcctatggccatgtgacagctagggctcaggatggatttctctatctataatcaacgcactgtgaacaaaatatgttcatatatcgatcactgcatctatgccactccatctgggcgttcaggaaatttcacatgatgcacggccgggcgtatacacattttcgaaaaaat

SEQ ID NO: 148778 - DNA, 414 bp, Glycine max
  unsure (1)..(414): unsure at all n locations
cagcctcatgaagaattcagaatggatccttagatgttttgatgataacaaaggtgatgacaaaaagctcaaaggtcaagaacacttcataataacaaacatgatgatctcaagaatcaaagaatgagttcaagattgaatcaagaacacttcaaggttcaagaggaaatttcatttcaagaatcaagtttcaagattaaagttccaagaatcaagatcaagattcaagaatcaagagaagactcaattaagataagtattaaaaagttttttcaaaaattgagtagcacatgaatttttctcaaaaaccttttaccaaagagtttttactctggtaatcgattaccagattattgtaatcgattaccagtagcaaaatgtttttcaaaaagctttcaactgaatntacaatat

SEQ ID NO: 148779 - DNA, 248 bp, Glycine max
gcatgtgttactcttcatgagactctgatgcatgacagatcgaagaaacatacatcctatgtctaactatagaccctctttaaattcctatcaagttttactgtctctgcctcctctgctgtaatatctccgggctttctcttcactcattgaatcatccttcgagactatgaggcatggtcatctggatgaacaccacttaacaattgcttatttcctagtggaacgcgcctcccttctcctatatt

SEQ ID NO: 148780 - DNA, 420 bp, Glycine max
agcttgatgtgagatagcgtggaagagtcattcttcctacttttatttgttgaccacagagtggtacctggagatatgtcgcgggggtcaagagacattggggacgtcaggtggggtgctatttcccaaaaccaagcttgaccaatcccgacccaacccggacatagtcagtcagtgagaacctgtgatgtacctaaataggcgagctcctggcagtcaaccaataaaagaacaaagtccacaaagcaaggaggcttgtgtggcggctggccagctatgaatcttgagtggtatctggaaaatggcctctggtaatcgattaccaagggtgtgtaatcgattacagggcttataaataaagacaggaagttaaaatgtcctctggtaatcgattgccaagggtgtgtaatcgattacaag

SEQ ID NO: 148781 - DNA, 205 bp, Glycine max
aattatccacaacagaacaattatgacctctccagctacaagtacaatcctgcgtggaggaatcatccccaccttaaatggtcgaatccttcacaacagcggcaactaccacaactacaacaacaaccttattttcagaatgctggtggcccaagcagaccatatgttcctccaccaatccagcaacaacaattacaacaaacag

SEQ ID NO: 148782 - DNA, 404 bp, Glycine max
  unsure (1)..(404): unsure at all n locations
agcttgattaatacctaatatcttttgtcctatcaagccattgctagctctcaacaaaatagaatagatttgtggttgaagtttgatcaaagattaaatctagaatcgttttccagatagatatacaaatcaatgcttagtttttttctctcagtgtgttcaaggtgttttgagagctttttctaactttacaagaatatacaaaaggcttttgtagaaataaagatgaatgtttttcatgcaaaattcttctttcagtcttcaaagcttctagtttatataggcctcatcttcaagtgtctgttgtctcacaatgagtagatatcttaacttgatctctgtctgatgaaaatggtcattgggggcatttaatgctancattanatgcatgtcttttcctcatg

SEQ ID NO: 148783 - DNA, 359 bp, Glycine max
aaatctaagcttgtgtatcgttacactgatttgggatcgagtaccagtgattgtttctgaatagatcaaaagatgtaactcttcaaaggtttttgactgtttcaaattggttttaagtttttctaaaagttataactcttctaaatggtcctcttggcccgacatgaagagtctataaaagcaaggcgttggtttgaattttattcattcatcaacaatcttgaacactattcaatcatcctttcagccttgaattcattgacttcttcttttcttggccaaagctttccaagtttctggtttctaaccttgaaacttttgtatcaatctttcatctctctccttgcccaaagatttgc

SEQ ID NO: 148784 - DNA, 411 bp, Glycine max
  unsure (1)..(411): unsure at all n locations
agcttctccataacctgaaatcggcatatgcattagttaaaaataagtttttggagaagctaatatgaaagatcttctacaaattagctttatgcataagctaattttaacttatgattcatttaacttctctgtaagcacttataagagaaggaaatacaaaggaaattgaattgaacttttcttgtaagctaaaatcaacttatacatatagacatttggagaagttagatgagaaaactaatataaaagttaagtacataaaattgattttattatacattatagtttgtgattaaatgacattgttcaaaccatggtagtttgtgattagatcacaatgtgaaaaccatttgcgcaatcaacgcatacactatntattcttatgaattctaagtggttcaatgaaag

SEQ ID NO: 148785 - DNA, 302 bp, Glycine max
atacattggtacgccccacggctccggaagtatttactctcaacaacttttttttttgggctttttgttccccaacacgcaaccatggcttcttaaacggtcccaggaaacttgctcaatggttggactgacagcttcaactgtgacttactttcaacatggcccacaggactgtgagtttatccacccaattgccacatcaaattatacataacacttgacaatttaaaaattacccgatattttcatagtcaaatttcacttgctttccaccaagtccaaccttttgtttaaattcttaa

SEQ ID NO: 148786 - DNA, 415 bp, Glycine max
agcttatcaaagtgtaagagaatatttcttatatcctctcaaaagatcataaacaacttcaaaggaaaaatagttttttagaatttttcacttaggagcatgttgtctttgaagatcctaaactaaagactacaaagctccatcttgaaaataagaaaatttgtaaagaaaagtctgactttttggaagatcttcagaagtcggaaaaccaactagaagacttacaagttgagttgaaacaactcaaagaacttcatgatcacctacatgaagaaagatatgatctatggagagagtgttacaaactcatcatgattatgaaaacatggatgcaagtaaacatgatctatggattgaatgggagaattacaagaaaactatgaaattcttgaatgataagcttgaacagaatgag

SEQ ID NO: 148787 - DNA, 316 bp, Glycine max
  unsure (1)..(316): unsure at all n locations
ctatggacgctggatctatgatcttcaatgaggacactcnatggtgattttccaccatggatatgcagcggaggacaaatgataagatgtgagaggaggcgccgttcactatgtgaatagccatggaataaggagcgttaccaccaatatgagccttggataataagcatggagagggtgcttcaatggatgaaaaganagaaggagagaaagatagatgggggagcacgaaattgaacgaataatatggagagaagttgaactttgatttgttcttacatgactctgattcatcaaagttacctttagtgttaca

SEQ ID NO: 148788 - DNA, 411 bp, Glycine max
  unsure (1)..(411): unsure at all n locations
gatccttaatcaccgcggctgcagcttattgctacaatttttatctcttatggcatgaactntaggctattgatttggttggtccatgtacatactggcagctagcttgagccccatttggtcaagagctgggttaggttctttctaatgttcaagaagcctatatttttaagattgcctcttgacatatcccttactaagtattttactatttttgtcaacgtattgatacaatttttttataggtataattatattttttacttctaaagttttacaatattataaattttgtttccaatttttttttcacaaatcttgccctacattttatcaaacattatgaatttttcctcctcctagaaattctgacataattaatgaaaaaatcatcacaaaattgtcttaatt

SEQ ID NO: 148789 - DNA, 358 bp, Glycine max
  unsure (1)..(358): unsure at all n locations
tctcactaactaaggaccacttgtagttgaccttgaatcgttcatagaatagctatgcttatcattgtgtactatattgtattgaatgtccaagttgtgaaggctttgagtgaccccaattgtactaccatggccacacacactttcaataccccacgatcaaattaattcattccacaaaatgttaccatgcatactatcatcatggatgtatatatgaatcgaattaccggtttttcgatggcagcaacattatggagaaatgaacaatggctaacaagaacgatattgttgggtgggaaagacttttttgaccttccacatntcataaaaccctaaccctctaacatggattgga

SEQ ID NO: 148790 - DNA, 410 bp, Glycine max
  unsure (1)..(410): unsure at all n locations
agcttgtggaccataggactggcatgatgttgtgctnttgnatcaaatatcccttcgtaatgatgatatttcatgcttttgcttcatttcctttcctttagcacatttaggcatggacatatacagttatagggtttttctcttttaaatttaattagtatatatatatatatatatatatatatattcttcatttatctttcaactacttttaaaaatcacctacaatcacgagtagttattggaccaattatttaaatatatattttaaaataaatatttatttaaataaaataagaaactttatatttgttatagtgtatttgtctaaactatgtcttcttaaacaaaaattnttttgcttattttattttaagaagaaaatcttatctacttgttaaaaaaggact

SEQ ID NO: 148791 - DNA, 415 bp, Glycine max
agcttaaatgtactcagcttcacaggtttacatatcaactacatattgcttttttgaactccaagaaattggggcaccacaaagtagaaacacataactagaagtagatcttctctccattttatccccacaccagtctgagtcagaataagttgtgaggtatagctcacctttttctttctgatgaggaaacaatatgccataattaagtgttcctttgagatatctcaagattctttttgctgctaccaaatgagactattttggattactcatgaatctgctggcaagaccaactccatatgagatttctggtctactgtggcagacgaatcttaagcatcccactagctgcctgaacaatgtggcatctactgaagcttcatgatcgtctatatatcagttcagatttcct

SEQ ID NO: 148792 - DNA, 451 bp, Glycine max
  unsure (1)..(451): unsure at all n locations
accataaaacacagggaatattaattctggtatacatagtcctctcctacaattgtcaccgaccaacctcataaggaaaaatgcataaattcagtgtgtatttaactatttatatattataaaagagatcctaatatctacggtgttaaacttatctgatattagtgatttcacacatattttccacatttcaaacccgttgataagaacaaagacaattatattcctatagtccaaaagtgggggtcctttaattcctgtttttgacacaatacttaacgaagcatcttttcagttctcacctactaatcaatacatgatggtctaccttatgaattatacaaaaatgtttcataaccgtcaatattctnttaaagacatttatagagagagaggaaaattcattacgcaaacaaaattttttaatttttattttaaaaaataaaattaa

SEQ ID NO: 148793 - DNA, 406 bp, Glycine max
  unsure (1)..(406): unsure at all n locations
agctttgggcttgaatccataattggccttggacttgaagagggcaaactattttattctacaaaattttatcttatctagactttatcttatctagatattatttagatttgatctcatctagatattatttcatctagatcttatcttatcttatcttatctagatttgattttattttatttatgggcttggatttaaaacagatttgtaagctttggggctggaaaactatataacaacaccaaggttctagtttaggccctttctctcttctcttttctctccctcttctgtctctcctattttcgtttttaagtttaggcttttcttaaacactttntcattttgcaattccagttttaattttcgttttacaataaaattccgtcttcatctatatttc

SEQ ID NO: 148794 - DNA, 314 bp, Glycine max
aaaagttcatcaagtcaagttgaagcatggaagaaaccatcttgcaaaaaaaattggggcaaaagatggatcgggttacatcgctgcttcgtctactgccaaacacatttatgactgttaatgtccttgttacttccagtttcaccttgacaaagatgtcatggaccatgttgaaaatctaaattgattcaaccccatatcctgcgtaaagattcgcaatacttcaactgtgcatcattcgcatacattcatgttgttcattggattctttccttgaaatagaacttaatcattgttataaaaagaaaagaaca

SEQ ID NO: 148795 - DNA, 399 bp, Glycine max
agcttgagcttagctacacatacctgtcttatagctaagctcacctccttgagatgagaagctagagcttatctacacaccccctataatagctaagctcacccccatgacaaaaaaagatgaaaatacgaaaaagaagtccttactacaaagactactcaaaatgccctgaaatacaaggctaaaaccctatactactagaatggccaaaatacaaggcccggatgaaggaaatacttattctaatatttacaaagataagcgggctcatacttagcccatgggctcgaaatctaccctaacgctcatgagaaccctagggcctttccttggatctctagccctagcgctgttcgcctatcctgcacgctcaactcttattcagagacccatgagttg

SEQ ID NO: 148796 - DNA, 431 bp, Glycine max
  unsure (1)..(431): unsure at all n locations
ctgaatgtagttccatccctccttggaggtgactgcaaattgagttgagaatgagcgagataggttatcaacgttagtggaataaacattatcaaagttttatgagtaggagttgtggttctattggacaacgactggggtgaagaaccacacacactctggacattgatgctctattatccacatctctagtatagatagtgagactcccaaaaattgggttctggatatttcttgatctttcaaatacgtcctctgcacaccttcccaatgtgttccacaaccacaagttctaatattatgatttagaataattggtgaatgaagatattatcattattaaacgattaaattgaatgatcataatctaaaagtgaaggctgctagtcatagttntaaatacatcttttctatatttactgtcataccct

SEQ ID NO: 148797 - DNA, 361 bp, Glycine max
  unsure (1)..(361): unsure at all n locations
agcttctcgatatattatgcacatgaattttacttccgnttgaaaatttatgagcatttgaatttctcgagagcattcgttggtcaattttgagcggctcgatatattatgcaccagaatcggacttccgtgtgacaagtgatgaccatttgaatttctcgagagctttcgttgttcaattacgagcgtctggatctattatgcgcgtgaatcagacctccgtgtgacaagttatgaccatttgaatttctcgagagcttgcggtgttcaatatagagcgcctcgatatttgatgctccagaattggacttctcgggtgacagttatgaccatttgaacttctcgagagctttccttgttc

SEQ ID NO: 148798 - DNA, 275 bp, Glycine max
tctaatatattatgcgcctgaatcagactttcttgtgtatatgttacgaccattgactttctcgagagccacctgtgttcaattacaatcgtctcggtatattatgcgcctgaatcatactttcgtgggacatgttatgaccatttgaatgtctcgagagcttgtgttgttcaatttcaagcgtcttgatatattatgcgcctgaatctgacttccgtgtgacaagttactaccatttgactttatcgagagccactcgtgttcaattccaagcg

SEQ ID NO: 148799 - DNA, 346 bp, Glycine max
  unsure (1)..(346): unsure at all n locations
tagccttctggaggaatcttctggagggcccaagtgggcctggttgctatttgcacccccttttttactaagtgcacccccctttctattttttggtaattctttttccgtaacgttacgaaactttacgaatttcataacgatacttattttccttncgtaaggttacgaatccttatggattatgtatttactcttttttagctttcgaagaagttacggaaactcacggattgcgcaaaaacacctcttttcgacttccgccacattacggaattccacagatcgcgcaagcctacttncttttaatttctgagacgtctcgatacttcatttattgtgcaac

SEQ ID NO: 148800 - DNA, 295 bp, Glycine max
aacttacaagatgcagtaaaaatttcttttcttaaggattggcgtgttatgagatccatcatctgaatttctcataggcatgaatcactaaaaagggaaattgatgaggagcatgaaaaactcaacttaatcatttgactttgtccacttgaaaacagttaagacctactttgacactctgggtcttcagctcaaaaacaaaagaaattacaaggggtcgacactctcactccgtaaggcacttcaatacaaccaaagacagccgcaatcgactacagactggaagaagtgtcac

SEQ ID NO: 148801 - DNA, 311 bp, Glycine max
  unsure (1)..(311): unsure at all n locations
tttgccttccgctgcatcatcatggngaaaaaggacctttgaaggagcaccatgaatctgtgagagacgcccttcttctaagcttcacaagcaagctttcatcaggtggcattagagcacaagagctncaagtaagtgctccttaaacctccattaattatttttctataccttctcttccattgtagatacttcattttnctacatgtatctcctcacatagtcttgttctatatgctgttaacatgattctttatagtttgcaccgattgaacatgctatataagctagatatgattatctatggttca

SEQ ID NO: 148802 - DNA, 379 bp, Glycine max
  unsure (1)..(379): unsure at all n locations
tgcagcttgtaaaactgggaaaatcatttctttctttactcacatcgntcacgtgtatgatatccactccacaaggtttgaagtagaggagaacttcaaccttataacgcaacgtggcggacaaaagtgggcagttaacttgaatggtcatcattgtcaatgcggaaggtattctacgcttcactgtccatgttcacacattattgcagcttgtggttacgtgagcatgaactactaccaatatatagatgttgtntatacaaacaagcacatcttaaaagcttactccgcacaatggtggcctcttgggaatgaagcggctattcctncttctgatgacgcatggacacttatctctgacccaactacaattcgtgcg

SEQ ID NO: 148803 - DNA, 367 bp, Glycine max
  unsure (1)..(367): unsure at all n locations
agaatgncttcttcagcctctcagccctatttctctctatttttcgcatagcaaggcttggctagactttggttgatgtaagctccattggagcttgtaggcctaggatcttcttcatcaatggattcctttgcttcttggaagatgaatggcagcggaatgcagaaaggaagagagagaggagacgccacttcaaggagaagatgagtctagaagaagctcaccaccatatgaggccatggataagagcttggaggaagaaggagatgaatgaatggagaaggagagaagagaaccaaaatttatgctctacatgagctttgcaatctaaagtttaatattcaaatgatcaaaagtcacaaaaatg

SEQ ID NO: 148804 - DNA, 279 bp, Glycine max
ttcgggaggatcaagcgatgccttatgaatcctcctttgcttgtgccgcccgtgcttggaagacccctcattctatacatgactgtattgaatgagtcgatgggatgtatgctggggtagcatgacgagtctgggaagagggagcaggccatctattacttaagcaagaagttcacagcatgtgaaatgaactactctctgcttgaaagaacatgttgcaccttggtatgggcagcccaccagctaaggcaatacatgttgagctacaccacttggctg

SEQ ID NO: 148805 - DNA, 328 bp, Glycine max
  unsure (1)..(328): unsure at all n locations
aaaaaaacttaatggctgagtgtaactgaaattgtggccaccaaaagtcacccccaacagccaacaagtcagccaccatttggtctcccaaaaggctgatgcctangtttgccaatgggcccttattacaacttgaactaaacctaactaaagcccttttagtttgataacccaaaacatatntttggtcagccaactttacaaggattgggccattatttatacaaactaaacactctaaaattgaaacaaagtggtgtcatttaatccctctccatttgngccatgatacaactcacaaccttggacttttcttcttgaaactggc

SEQ ID NO: 148806 - DNA, 288 bp, Glycine max
gagtgaagcaaatcttctctacagtagaaaaatgtatacaaaggcgaaaactctatgttctaatcaataacagagtggtccgaatcgattacagcaagctatctgaaacttaaagggttaagtctcatatcgggttaatcgattacgatgatattataatcgagtacattgatgtttgagacagtgactgatgtttcacgagtctctgctttcatcaatgactaggtggattaaacaattacttctctctggtaaagtgtttagaggtgaacaataccacttatcgat

SEQ ID NO: 148807 - DNA, 301 bp, Glycine max
  unsure (1)..(301): unsure at all n locations
ctcataagactatcattcatcangattaaaacaagcgtgacacatgcttgtatgtatagactacgcagcttccatgagaagctttcttgagaaaacttccttgagaagctcctttgagaagctagagcttatctacacacacccctctcataactaagctcacctccttgagaagctgtcttataaagattcctaaagaagctagagctacacacctttctaatagttaagctcacctccttgagatgagaatgtagagcttatctacacacccctataatatctaagctcaccctatgcc

SEQ ID NO: 148808 - DNA, 348 bp, Glycine max
  unsure (1)..(348): unsure at all n locations
tagtncagcagccttgatgaggtccatgaactccttgcaatccaaggcattccttctcagctctcttgctaaagcaagccttcgctgatatacaaatttccacctttcaacattgccaatggagtggaaagaaatgtcgtccaatggaacatcaaggacatttccaggcacctttttccctgatctcttggcccgcttgatgtcgagaacatccggttcgacatcatcatctgaatcagatgaggaaatttctttcctcttcttggacgggatcgcaactttgctccatccggatgtgcgacgagtgaatggagcgcctcttttctgtgccatatatttgattcgcgc

SEQ ID NO: 148809 - DNA, 208 bp, Glycine max
ccctctattaactaaaataaccctccttaaaataaattccgattgaaaatacacaaccaataatccaacattaaacactattactaataatttatatatatatatatatatatatatatatatatatatatcagggtgttacacctactgcggctagcgagttcatcttttgaggatgaacactcatcctctcgctgggatgcctgtg

SEQ ID NO: 148810 - DNA, 282 bp, Glycine max
ttccaaccgaggaaccactaggactatctggacttagtaaaaaaactgcggcttctatcctgacaatggaaatttattttgaccgccgctcgaatctcatgtgtctgaccactgtcgtccgtgaacaacgtatgcataaaccagcgtatgacaagtctattgtgcacaagcgactacctcattatgtacatttgtgaacgaatacaactaaaatgttgtctcgcagcatctatgataaggactacctcaactgcgatcgtggaatcatatatatagactctt

SEQ ID NO: 148811 - DNA, 442 bp, Glycine max
  unsure (1)..(442): unsure at all n locations
gtgaattaggaagcatcaattagaatctagcccacgttattgtgcaagcaatcaatggggaaaaacacaccaaatgattatgatgatggatggctcaaattctcacaaatgtaaactcatcacttctcaattgagctgtgaacactatcatgacatgttcatgagaatcaaagatttcaagtcacaaaatgtcaaatacttttatttctaaaacaattacccatttcttgaacatatcctataattcaaagaaaaacatgcaaagttctacatgcacacagaattgacccaaaatattaaactagaaatccgacgaaactaacaacattaacaaattaccacatctaacaaattaacaaaaccgactaaactatcaaaaccaaagaacactttcncccctcatacttaaacaacacattgtcctctacgtagcacaattaat

SEQ ID NO: 148812 - DNA, 459 bp, Glycine max
  unsure (1)..(459): unsure at all n locations
actcagcttaaacttgaaatgatagttcgcatcccatttcatcgnataatcatagacaatcaactcagaagaagaagagggggaggagtgttcaaatgcaagaagtcatggaagaaggcgaataggcaaaccaagaagtgataatcatttggggagcattaagatgacaatccctacatttcaaggtaaaaatgatcctgaattgcaattggagtgggagagaaaggttgaacatgtgtttggttgtcataataaaaaggttaaactagatgctgacgaatacactgattatgctagtatgtggtgggatcaacttgtgactagtaggcacacgaatggcgaatagcctattagttgatgggaagatatgaagactgtcatgagaacgagatgtgtcctagccaatatcatacggatttgcacagaatattgcaaactctaactcaaggttccatgagt

SEQ ID NO: 148813 - DNA, 466 bp, Glycine max
  unsure (1)..(466): unsure at all n locations
tgcaagcttgcttgtggggcttctattgttgcttgatncttgagcttcaatgacgtcctttaatggtgattttccaccatggagatgcagcggaagacaaatgagaagatgtgagaggaggagccatccactaaggaataagccatggaagaacgagcttcaccaccaagatgagccttggataagaagcttggagaggatgcttcaatggaggaaaagaaagagggagagaaagagagaggggcgagcacgaaattgaaggaagaagaacggagagaagttgaactttgagttgtgtctcacaagactctcattcatcaaagttacaacaagtgttacacatgcttctatntataaactangtagctcccttgagaagttttcttaagaaaacttncttgagaagcttctttgacaaaatttcctcgagaagctagagcttagctacacacacccatctaataac

SEQ ID NO: 148814 - DNA, 347 bp, Glycine max
ggacactataaaactaagcctggaataaattataaaggaatgattaattgtctaagttttgagctcatattgacctagcgtctaaaggacacatcgtccaatggcaacttagttagtgcattacatgtgcttcttaacgattagcgcccaacatatggataattttactctaaaagtaggcttaatactcaatttgctcccttagtttattagtttattttaagtgctcaattaggtcccttagttttgagtatgaaattgggtccttttgtcttttgagtatgcaacaaaaaatctctcagtcaatggcgcagaggcaccatcggagcccaacgcatcgaagcaat

SEQ ID NO: 148815 - DNA, 474 bp, Glycine max
  unsure (1)..(474): unsure at all n locations
agcttgtccccctacacatagtgacacattcttatggattaactattagcaattgttgtttatgtatcataacatgatctttaccaaagacatggattttctctagaaatcaaaacatactctnttagtgttttggagaacacattaagaacttcggacgtggacgtggatctccaatgcattgacacacaccatttatgagtgtgacttagacaatgaaaaactaagcatatatttttcattcgttttgacaagtgtcaagtagctctcgacacacataatctttgaaataattatgagttatttatgcaccatttattaatgtgacgtaaaaaatacaaaattaaatacattttatacgttaatatctctatctgacatctacacaattataacaaaaataaatgcccattctatgtgtnttaattcacaccgacacaataacgtaagtcattgaagtaactattaattatt

SEQ ID NO: 148816 - DNA, 456 bp, Glycine max
  unsure (1)..(456): unsure at all n locations
gatactcagcttagccttcctggtagggtccacctttcagctacaatttcggttttataaagtctaatatagatnacacagcggtggggatgtctcctccacctctaggaacctacaaattaccctaaaacctaagatcctcttgaaagctgggggttttggtgctcccttgcctctttcacataatgcacaattgttctcccagactaaagactctcctctaagcacacattctttttacgccaacttcaactttaaagggctttctgacctcgaaggctcacttagcgccattctcgctctaagtgcgagtaagtgacttttggcttagcgagccaggcacgctaagtgccagaagagacaaactactcgttaggcgagctgatggtgcactgagcgcgtgcatgcgttgcagaatctcttcaagattcccttgactcactaagcgagctgatg

SEQ ID NO: 148817 - DNA, 384 bp, Glycine max
  unsure (1)..(384): unsure at all n locations
taacataaagtagcatgttcaacactctatacaaataatatagaaatcgatgttccaatatcatattctatcagtgtaacactctctatcccgacatacatttaaatgaataaaacatataaaaatatcgatcaactaattcacatggataaaaggttcacattcacttcaatattaccaaatagaagttattaacaacatatccggctcagaacaaggccgtcaaaanttacaaaagaaattttgttaaattagtgcagtaaaataaaataatagaacattatccaattaaaataagagcccatcttcaatgtcacatcctatcagaacatcatgtcctagcgtcctctacacgaggctctttaaagcatcccttatcatatg

SEQ ID NO: 148818 - DNA, 429 bp, Glycine max
aaacaaggcactcaatcaatcattattttcctctcataaaaaagtaggcattctaaccaagcaacccattcattttaatcatagggacacaaacagaacaaattcaaattcaattgattataacaatattttaaattttaaagttacatacaaagtagcaaaagaaatcatatatacgcaacaagaaaaaaactgctaaaaagaaaataaagtcctagacagagtaaaaataagatttacgagcattataatgacaatagtttgaaataatagaagaaattgaaattgacatacagcaaatgggtttgcttccttccatgtgccttgaaggtttatatcatgtgaatggttaattccaagatgatacaatccagactggcagaaattctcaaatgatgtatgacagtaatttttagttgaatattatat

SEQ ID NO: 148819 - DNA, 168 bp, Glycine max
catggaccgagacgaaaataatcatgaggaagcggtatgtgccggcaagtaactcaagggactggaaaatcaaactccaaaaactaacccaaggcaacaaggggggtgaggagtattcaaggaaatggatgtgctcatgagtcaagcaatattgaagaagaaaggagg

SEQ ID NO: 148820 - DNA, 458 bp, Glycine max
  unsure (1)..(458): unsure at all n locations
gcttccgaaacataggaattgttataataattgacatacgacaganaattactgttaatcatgagaggctcagttgatcaactttcgagaatgctatccgaaaacttcacttgcttggatttgaccccctttaatggggaaaataattagtaagttataaagatgaatagacctaggagtgtaacaccagtgcctttttgattttatttaaatataaataaataaataaaattagttctatcatttttctcattatataaataaatttttaactccagagtagtaaaattaggtcatcagtgccttttgatttataaatntttaattgatgaactctttctaattgaatatttgatatgttaaattgagtgtaatatntattatcctaaacatctaagattttgttactggatattgcatattattttattgaagccgcctgatactatcaggattat

SEQ ID NO: 148821 - DNA, 323 bp, Glycine max
tctagcttgttgggttacaacactagctggatacaaattttgcttctttgcgcaagttcagagagaaaaagatgcactcttattgaaaagtgtggatgaggttttttatgctcttgtcactatattgctatgcttcatgatcacaaaatgcgcactttgaagagatcaaatcatttacatgtttcttggaatgaattttctagctgcaaggctgaactaaatgttttttgaatagaaattctataatttgaagttaaatgcagtaaattatctctcttcggaaatgaatgtcagattgaataaaacgtgtctttttgattgtg

SEQ ID NO: 148822 - DNA, 421 bp, Glycine max
  unsure (1)..(421): unsure at all n locations
gccgactcttaggttattatgttctatttncttacaccttatggttattnctttagccttgtattttggctgttattgcttcgtacttttgttacggctgtcttagatgtttaccattatgttttggtttgtgttnggctattttcgactttgctttggatgattaagacttgtttggtttattctatggattgaatcagtttatggataaattgtgccatgattttaatgttgtcttactttccttccttcagacgttcttgcctttttgatgtctccaaagggggagagaacaacggtagaatctatcatgaacttaggcataaattctaatcttaagaaggagtataggttgtgagcacgccatatcacattgtgtatctcttacttgattcagattatagcatcactcaaaggggga

SEQ ID NO: 148823 - DNA, 330 bp, Glycine max
tcagccacttatgatagccgccgatgatcccattactgcttcccctaagctctctgtcctttcttcacaccgcatcacatgccttgcgaactccttggagtacctttgcattgtggtcactgaaaccccgtgtaatgaaaggcgtgatgctttcgactaatggcgctcctctcatggggtagccaagctgtcttatggcgatgacaggattattatttatacaaccccttgttcccattaagggaacatttggaaatgcttcgcatgaagatgaatcctgattcttccttccttctagtgagggaaccaatacacagacgcccctctatg

SEQ ID NO: 148824 - DNA, 485 bp, Glycine max
  unsure (1)..(485): unsure at all n locations
aagncacctgcggccttgcaagctttcgcacagcatacagttttatctgttacctattcctggcagaagtctccacagaggccattgcctccctcgcccagtattatgatcagtcattgaggtgcttcacctttggggacttccagctatcacccatgatagaagaatttgaagagatcctatgatgccctctagggggaaggagaccatacctcttctcagggttctatcccccattagctagaatttctaagatagtccaaatctcggcgcaggaattagaccacagaaagcaagtcgaaaatggggtggttggaataccgagaaaatatttggaggcaaaagcaagaatcttggcaggtaaaggtgaatgggccccgttcatagacattctcgcactattgatcttcggaggagtcctctttccgaatgtggatgggttggtggacctagcagcgatcaacgcttttctcgcctatcatgac

SEQ ID NO: 148825 - DNA, 299 bp, Glycine max
gttctcagaatgttcaaaatcagaatgttcaaaacaataatgctcgaaatcaccgaatacatgaatgctcaggatgctcaaaaggtactaaatgatgtctaactaatctatgacatgtcttatctatctcaggatcaaagggttgtaagtcagatggattgcctctagtcatacactatattcagcatgcacaactagttgccttcttatgtaaataacactgtaagttagaactacaactacgctcaaatgatatccaaatgacttgaaattgtgtgagcaaccttataaaatgatga

SEQ ID NO: 148826 - DNA, 445 bp, Glycine max
  unsure (1)..(445): unsure at all n locations
agcttgtgccaatctcacatagcgttacctttactggtctccctatgattntacttagtgggagtgacttgacatacccattgtatggtgtgtcttgttatgtactcctaagcgcctaagggtggtttttcactgatatggtaccacattgcatataggcttgagtcttagcataactattgcatacgcttgctaattgtttattatgaaattgatgtgttattatgtcttgaccagagtgtgtgattcttgtgtaatgtgattgatgattgaaaagtgaattttgaatgacaaagtggcggaattacatgagttatgtcgaagcaagttttattttgtttatatgatatgtatatctagttgccttgcttctctattagttaggaatgtgataactcactccctgtgtgctatttgtgttggatcctgtatgatctgaacttgt

SEQ ID NO: 148827 - DNA, 341 bp, Glycine max
tgcttttgaagcttctatggaggctggatcttttatcttattgaggtccttcaatggtcattttccaccatgaaaatgcagtggaagataaaggaaaagagatgaaaggaggtgccatccactatggaataagccatggaagaaggagcttcaccaccaagaaagtgccttggataagaagcttagagaggaagcttcaatggaggaaaagaaagagagagagaaagagaaaggggggagcacgaaattgaaggaagaaaagagggagagaagttgaactttgaagtgtgtctcacaaaactctcattcatcaaagttacaaaaagtgttacacatgcttc

SEQ ID NO: 148828 - DNA, 384 bp, Glycine max
  unsure (1)..(384): unsure at all n locations
taatcagcgcggctgcagctcgttgggttgaagattattatacttgatttatgacttgtgggatccaatttgagcatcattggatgtgggctcgatggatctccaaatctgccctattatgcagaataatgatgctgaattgtgcagcggatttcttatgtgtgcacaacaaaaatgcttgtgcattgctggttatgggaaaggtantacatatagggttctagacattatctagcagatcccaacggtccatacgtatatttatgtactaggaacctccagctaaattttcaagtcggtcgaatggttaacgaatcggaacgaagaacatgttactgcgatatatgagtaacgaaagttctgatatgtgaatgtgttttgggc

SEQ ID NO: 148829 - DNA, 445 bp, Glycine max
  unsure (1)..(445): unsure at all n locations
ngcacttgcattgnngtgggttttgttcctcaatnggattcttttaattatccttatcagaagcggaatacaaataacaatttttttttacataataaaagaagcaatatatacggttttctcttttaacactacaaggtcctattcatataagtgttatgttatgctaaccttggcatgctaaaactaaattttgaagccttctcttggataagttaacctgaatgtagtgaacagatcagacatccatcaaattggctcttggatcctttttttcctctaatccatgatagaatttcagtgtattatccactgagttaaatntactagttgtttatctttctgcaaatgtgtttatatctttttctaacaagttatggatctttctgatgtttgaagtatcgctatcaaattaattcataaatgtgatagaaattgatgttgt

SEQ ID NO: 148830 - DNA, 474 bp, Glycine max
  unsure (1)..(474): unsure at all n locations
tcacctgccgcatgcaagctgaagattatggagtacccatcatatgtggtactacgnggcggnccggcgatggtgcacaacaagttttccacatccacaatgcgcgcataaacccaccatcctctggtgcccacctccaactgagctcacgtactttcacgtagcccatatcctcgtttctctcaacaccgggtccccatcaatcctcccaagcttccacaacatccaagcaaaacaacattcaaacagcacaagctatcgcggccaagcaaaacagagcaaaggcagaaaactctgccaaaacaccaaccaaatcacaacttttctcacttaaagaccccaataacaattccttcgatccaattcgttaaccggtggatcgacttcaaaatattactggaagttatagtacatgaacctacactgttgaccgtgggatctactaacacacatccagaactcattctgtactac

SEQ ID NO: 148831 - DNA, 337 bp, Glycine max
gtgcctgtatattgatgcacgtgaatcggagattcgaggaaaaggtataccatttgaatttgtcgagaacctcctatgtttaattatcagcgtctcgatatattattcgcctgaatcgaagcttagggtgaaaagttatgaccattcgaatttctttagagcatccggtgttcattttctagcgtctctatatgtgatgcaccttaatcagacctccgtgtgaaaagttatgaccatttgaatttctcgagagcttccgttgttcaatttgcagcgtctacacatgttatgcgcccgaatctgacatccatgggaaaaggtatgaccatttgaattt

SEQ ID NO: 148832 - DNA, 363 bp, Glycine max
tattgaaaaatttgtctaatcacttttcatagagattttgctcttaactacgtgatccaagtttaattccacctaaatcaactgtttgatgctcgtttaaataaaagtttagaaaatacttttgaaaatttcaatgcatattcaaatagcaatatgggtagttaattagttattcctttaaaaaaatcctatatgtcccaagtctttgcaatggtgattacaaacttaacgaaattctttgattatgggtttcatcccattctaatagcaatataaaatgatatccaattgaaatgtctaaatgcagagttaatcagataatcagaatattttctcatagacagcataatatgacacaaagca

SEQ ID NO: 148833 - DNA, 415 bp, Glycine max
  unsure (1)..(415): unsure at all n locations
tggcttatcttaatcactcaattttgactcatgaatgactcttggcagcccatggaaaccgaatacatcaagcccacaattggtatgatttcctttcaaattttctactaaaaatggctaaagtagagttttgccaaaaatgggtattcttacttttcacctaaactagtaaattatatcctaaatgccttgattattgtgctaatctccctataattacatgtaactagagtgaacctcacatagagatcactttcacacatagcttaattacattgccactcaatgtacaatgtaattttgttacaatattcttattcttaaagattaagaaccataagctaccatcttttgcttcctgcatgccatgctcatggatccacctgtntggggaattgcttgcttatctctatta

SEQ ID NO: 148834 - DNA, 305 bp, Glycine max
caagtcatctagtttctcactcaataacttattttacctttttacgcctatagaaactagattaaatatgattttaattattaaatataataaatttaattattattcaaaaatattttataattctatattataaaatttagttttttttatggtaactatgtactcggaataataaccttattaaaaaaaaaattgatacgtgcaaatattttattataaaatggagactgtataaaattaaatactcactattattcgcattgaataaccctaaattatgattatatgcaataatatataag

SEQ ID NO: 148835 - DNA, 492 bp, Glycine max
  unsure (1)..(492): unsure at all n locations
atccttgagtcacctgcggctgcagcttctaagcaagcttccctcaagtggttattagagcacaagagcttcaagtaggtgctctntaaacctccattaattntaagctctaccttctcctccattgttgttacttcagtttttctccatgtatctcctcacatgtcttgtgctaaatgttgttaacatgattatttagaatttccacctatttaacttgctatagaagctagatttgattttctatggttcanatttcttgttcttgttcttgaaccatgaattgtgttgagtttaagttcctttgagctgaaatatttaatgagttttatagacacctgtaacaaaattagaaaaaaagaaccaagtgatttggaaaaaaggaaaaaataagaaaaatcacacaattngatagaaaaatcagttttcaggtaaaaaanaaagtgaaagggaagtcgtgcttgttgtttggctcacaatttgtctataatt

SEQ ID NO: 148836 - DNA, 415 bp, Glycine max
  unsure (1)..(415): unsure at all n locations
cgaagaggatgctntaatggaggataagaaagggagaagatgggagcacgacatttatggaatacaagagggagagaagtgtgactntgaagtatgtctcataagactattattcatcagagttacaacaagtgttacacatgcttctatttatagactacgtagcttccttgaaaagattgctatagagaacttccttgagaagcttctttgagaaaacttgcttgagaagctagagcttagctacacacacccctctaataactaaactcaccttcttgagaagattcctaaagaagctagagcttatctacacaccctctatgatagctaagcttacacccattccgaaaatacatgacaatacgaaaaataagttcctactacagagactactcataatgccctgatatac

SEQ ID NO: 148837 - DNA, 464 bp, Glycine max
  unsure (1)..(464): unsure at all n locations
caagctnntgtgtgaaaggatgtgactcttcacatttgaatntgaatttcaacgttcaaaggcactggtaatcgattaccaaaacattgtaatcgattacaactttttgaaatcaattggaacgttgtaaattcatttgaaaactttttcaaatccattttactactggtaatcgattacaataatctggtaattgattactagagagtaaaaactctttggtaaacatgttttgagaaaaatccatgtgctactcagtttttgaaaaaaccttttcatacttatcttgattaagtcttctcttgattcttgaatcttgatcttgattcttagaagcttgatccttgaatcttgattcttgattcttgaaatcaactctcctcttgaatcttgaagtgttcttcaactctcctcttgaatcttgaagtgttcttgattctatcttgaacatcttgaactcattc

SEQ ID NO: 148838 - DNA, 407 bp, Glycine max
tactgaagaactgtttgataatggaacatggagcctcaatccatggtatacattctctaacaaactgtagtactctcacacactgacatccctatctatcgctctatgacgataacgggaccaacatacccagaggacaaatgacagggcatatctacactctctaatacccctctctgtcattatgagggcgtggtttgtacttattcttgcagaaatagactccatacacacatgacagaaacacaagagaggcttcaacgctagctgtctctgaaagctccctcttatgaggcctggctgacaacaactattttctacaaatcatgtgcatcttgactcgcgaccccttatatcagagctatgaaagctttctactatccatcataccaggatgtcatgtcata

SEQ ID NO: 148839 - DNA, 329 bp, Glycine max
  unsure (1)..(329): unsure at all n locations
atagaggagaccttcaatcttattatgcaacgtggagggcaattaacttgaatggtcattattgtcaaatgcggagagcattatgcgcttcactatccatgttcacataatgttgcaggttgtggatacgtgagcctgaactactaccaatatatacatgtagttacacaaatgaacacatcttaanagcttactccactcattggaggcactttgtgaatgaagcgcctactactgcttctaatgatacatggactcttatccctgactcaactacaattcctgcgataggtcaaccacaatcaacaaagatattgaatcacatggat

SEQ ID NO: 148840 - DNA, 443 bp, Glycine max
  unsure (1)..(443): unsure at all n locations
gcttctcgtaatcttgtgtcatggtcatatagagacacgngttggtttatcccattgtgtgactnnccangaatcagtttttttagataaaattgccctcatatagaaagggcaatggcactctgcgcttntattaaagcaacaaacgacatacttattcgatttgctttcaaccactttgaaactatgatgcaccttcatagcatattgtttgactgcattcttgaccgcatctttactatcaaaatccatgccaacatataattcttggccaacattaaaactcgatgacatctccaaaccacaaatgtcctcctcatcaggatgactccagttgatattattataatgcaaagcatcattccaaaatggattttgaattccttgtacacctaatagtccaaaaaaattcaatcatcatatttgcattaatcaattgcatc

SEQ ID NO: 148841 - DNA, 424 bp, Glycine max
  unsure (1)..(424): unsure at all n locations
gaagtcttgcatcaccttagtactgagagtccccttgtgttgggctctacttctcttactcaagcattacaaagtaaaaaatatttgaagtaaaattgtaaaagtaaaatagtaaagtttgatcctaaccattaattttaatccaacggttataatttgttaaatggagattctacatttttttttataaatgaaagagatccattcccggtatgtaattggtaagatagtgtacctaattctttttaatgtgttcaaagctctgctggggaaggaaatcaaaccaaaataaatgatttttttatttaaatttatataaataaaataaaataaattactcgagtgttcaagttttaactattacactaaatatcctacatgntgagccctaagaccaaatctcctagatttctcatatatgaca

SEQ ID NO: 148842 - DNA, 385 bp, Glycine max
  unsure (1)..(385): unsure at all n locations
tgaggacacgtgaggatcatatgggtactggtggaccgttgtnactacttgatcattgagaagcnggatgttcatgaatacataatatacttcttgattaagaaagcttcaatgaagtgtgcttgctcaacaatctatgcaagccttcactttgatcagtgagctttattttaggagtatcttgttaaccttcatagtagcattgacattccttggctttagttgggagacttcaatgaaatcaccaatccttctaaagttcgtggtggaaaatttttcaatagttgggctctcctcctctgatcactcatggataggtgcgatctaattgacttaagagtcataggtaatgtctccacttgatatctagggaagatatgatctc

SEQ ID NO: 148843 - DNA, 445 bp, Glycine max
  unsure (1)..(445): unsure at all n locations
agctntgcgagattcctcacggaaaacgttacggattcttttctgaagcgcctcggcttagattttcttcacggaaacaatttttccaagcaaattcgaaagagagagaagtgcctaaggggctggacccattccttcttgctttcctcccctatttatagcaaaataggggaggtggttgccgcccagctcgcccaggcgagctcagctcgcccaggcgagcagggttgcttcctccagaagcaaccgccttctggaggaatcttctggagggcccaaatgggcctgggtgctatttgcacccncatttttactaagtacacccccctctgctcatttttggtgattcttctttcgtaaagttactgaaacttacgaatttcgtaacgatacttgttttctttccgtaatgttaccgaaccttgcggatacataatcatcccct

SEQ ID NO: 148844 - DNA, 442 bp, Glycine max
  unsure (1)..(442): unsure at all n locations
cttgagcacaaatcctgactcaccatacaccttgacccagtgtgataatgtcaatctcttaccctcagaagcaaaaaaagggagagggaaaatttccaatcttagagaaagcaaaaaaggaaagaaggaaaatntcctatctaaagaaaaaagagaggaaaggaaattcccaatcaaagaatgggagaaagcaaagagaacagaaagaaaattcccaatcaaagaatgggagaaagaaaaaagagaatgagaagaacgaaagaaagctcctgatcaacgatcgaaagataacagaagacatgtgcagagaggtctctggaccaaacaatatctgaacaaatacggaattgtcaccaaatgaacaaaagacagaaaaggaaaccctaacctataagtggtcttctccctttgattaccaaccaaaatcctgtgcgtcggtgac

SEQ ID NO: 148845 - DNA, 487 bp, Glycine max
  unsure (1)..(487): unsure at all n locations
tgatactctanagtgcagctgtccgcatgcaagctngctcgaaggttgaaagttatttgtttatattgattcattgaaagccaatctaactgaactggaatcacgtcatagcaataattatcctgaggaagagttacattctgataattactggttttcttgtcctctagaaggttgagatgttttttatattcatcttgatttttaatttataacacacagcaaataaagatgttgacatgcatgtggcgctatggcagtaaaaaagttatctaaaaagttacctcccatacaagaagcaccaaagagttatactccatatatcaagtacaccaagcttcaatttaaggtatggaaactatatggtttttggtatatagagtggaaaagataaaagatactgcatacagtaaggttgatattgtttntatatgttatgaagatcaagacagagtttaagagaaagaaagagagacctttaatattg

SEQ ID NO: 148846 - DNA, 471 bp, Glycine max
  unsure (1)..(471): unsure at all n locations
tttgcaagctgacatcatttatcctatctccgactgctcttggatgagtcccgtccaggtcatcccgaagaaaaccggcctcaccgtgataaaaaatgagaaggaggagttgattcctactcgggtgcagaacagttggatagtctgcatcgactataggagggtaaaccaggttaccaaaaaggaccattttcccctgccattcattgactagatgcttgaacgcctggcaggtaaatctcactactgtttccttgattgtttttctggttatatgcaaatcacaattgctcctgaggatcaagaaaagaccatattcacctgccccttcgacacttttgcttataggagaatgcctttcggcctgtgcaatgcccctggtaccttccagcggtgcatgattagtatttntagtgattttttagaaattgcatataggtatntatggatgatttcactatatatagatct

SEQ ID NO: 148847 - DNA, 323 bp, Glycine max
tagtggtacctggagatatgtctcgggggtcatgagaccttgtggacgtcatgtggggtgctattgcccaaaaccaaacttgaccaatcctgacccaaccctggcatattctgtcagtgaaaacctgtgatgtacctaaacaagcgagctcctggctgtcaacatattataagaacaaagaccacactgctcggaggcttgtggtggctggccacctgtgaaacttgattgatatgtgagatatgggctctcgtgatcgattaccaaagagggtcatccattacaacgcttaataatgaagacaggaggctaacatcgtctct

SEQ ID NO: 148848 - DNA, 450 bp, Glycine max
  unsure (1)..(450): unsure at all n locations
tatcatctataccttgctgcatgcccctttangaaaattctaagtntatctcaaacatcacaataagggaatcttcagcacagtcaatgaaggtccatgttatagatnttggcatcttttatggtttccaatggccaacttttatacagcggctttcatggagagcaggaggaccaccaaagctacggataacaggaatagacttcccacaacctggtttcaggccagcagaaagaattctagaaacgggacgccgcttggcagcgtatgctgaagcctttaatgttccatttgagtacaaagccatagcaaaaaaatgggacacgattcaacttgaggaacttgagattgcagggatgagttccttgttgtacttgtttctatagaggaagaaccttctggatgaatctgtggtagtggacagtccaagaaataatttcttaccctgat

SEQ ID NO: 148849 - DNA, 491 bp, Glycine max
cttaagtcacctgccgcatgcaagcttgtaggccttggatcttcttcatcatggagtcctttgcttcttgaagatcaatgacagtggaatgcagaaggaggaaaggtgattggagatgccacttcaaggagaagagagtcaagaacaagttcaccaccataggaagccatggataagagcttgaaggttggagaacatgagtggagggagagggagagaaggggcacgaaatttatgcctcgaatgaggtctaaaatttgaagtgtaatttctcaaatgatcaaagtagaaataatgcacacaaaaggcctctatttatatcctaagtgtcacatgaaattggagggaaatttgaatcttattcaaatctcacttgaatttaaatatgtggagctaaatttggagcctaaagttcactaattatgattagtgaatcttagctatggtttacgccactaatccaagatcaagttcaagattctccactgagt

SEQ ID NO: 148850 - DNA, 451 bp, Glycine max
  unsure (1)..(451): unsure at all n locations
tatgctgcanatatttacaatagacctcctcaactctcattttcttaatcaaccacagcagagcaattatgacctctccagcaacaaatacaaccctggatggaggaatcaccctaacctcagatggtccagccctcagcaacaacaacagcagcctgctccttccttccaaaatgctactggcccaagcagaccatacattcctccaccaatccaacaacagcaacaaccccagaaacagccaacagttgaggcccctccacaaccttccctcgaagaacatgtgaggcaaatgactatgcagaacatgcagtttcagcaagagaccagagcctccattcagagcttaaccaatcagatgggacaattggctacccaattgaatcaacaacagtcccagaattctgacaagcttgcttctcaagctgtccaaaatcccaaaaatgtcagt

SEQ ID NO: 148851 - DNA, 363 bp, Glycine max
  unsure (1)..(363): unsure at all n locations
gctcgcgacnggtccctttcttcccttcgcaacttgagttcattattgctaccccatagagctccgcgaaatttgttccggccatactcttccttgcgagccctcttggtctcttgttcaagggctcttgcggtaattgcattctcttcccgtaacccggcgcactctttccgaacgtgtgtagcagccaacttgaacttctccttggcgagttttgcctttcctaactcgctattgagagcttggacttcttcgtcctcttccggtgcttcaaaattctcttcgctgacgacttttaactcggcgagccaatctanacctcgtatgcgaactttcagccattcgtggtacccaccaatgatg

SEQ ID NO: 148852 - DNA, 325 bp, Glycine max
agaggacggaaaaaaagtggataagtaaatgctgtggtttccttcatatactacttggctctagttgactgagagcaacattgaatttgatacactgaataatgttactacctcattgacaaaacaggattaatagcagcagcaagtgaatctaggaggacaatcatggtgccaagtaatggtcacgccaagttaactaatggaaatggaatgtgcaatggacactcaccaaaactgaaagcacacctaagaggaaatggcttcaattcatccaatggttccttacatggtatatataccaatggcaatggggtgtatgtggatg

SEQ ID NO: 148853 - DNA, 415 bp, Glycine max
  unsure (1)..(415): unsure at all n locations
cttgagaaaacttccttgagaagctagagcttagctacatacacccctctaataactaagctcacctncttgagaagcttccttgagaagaatcctaaagaagctagagcttagctacacacacctctctaatagctaagctcacctccttgagttgagaagctagagcttagctacacaccccctataatagctaagctcaccctcattccaaaaatacgtgaaaatacaaaaaaaaaagtccctactacaaagactactcaaaatgccctgaaatacaaggctaaaaccccatactactagaatggccaaaatacaaggcccaaaagaaggaagaacctattctaatatttacaaagaagagtggatccaaccttgacccatggtctcaaaaatctaccctaaggttcatgag

SEQ ID NO: 148854 - DNA, 463 bp, Glycine max
  unsure (1)..(463): unsure at all n locations
ctggctgctgctggccatggaccctctgatacactngcttccattcatgctgagctcttatgtcacccgacaaataacataatgtctacagtggaccaaactaccctactgcgagcatgaatacaggggctaaaacattcccatgctggacatgctgtggcatatggtcagcctcttgtaaagagtccttcgaacattggcaagaatttctctccatctatcttgactgtaaatgatacgtcatcaagatatggcgcatggctgtcatctaataatacaattggtttattgagacccaataatagtgctgaaagggtgggtattcacaataacaacatgctgatattagagcaccaacaaaggcaggagtcccagcataaacaacagcagcaacagcaaaagcaacagcaacagctgcagcagcagtcattgatacatgatcgatnagtgtcaatcaatgttc

SEQ ID NO: 148855 - DNA, 389 bp, Glycine max
tggctgcttgtagatctgaaggtgtcatcgctggatgggttgcttttgttggattgatatcttcatttactctgaatggtagatcaacaaagtattctttgtttttccataaaagatatggatggttgaaatcttgtttgcgcatagggaggaaattttttgtttaaactctccaacttctggcggggcttctactaaagagaagagccttgtaattcctgaaaaaaggcttcaattctcttttgaaattgatcccggccgtatgtattttgagtttattggcagccgtatatacatccattcctataaggaggtctctatcacgccattttgcttcaatgactttggtccagatgatacaatcacgggaaaacttgatgtctatctga

SEQ ID NO: 148856 - DNA, 388 bp, Glycine max
agcttagctctcactgaacaagtggtatatgttggattgcttactaagcacccctcaatcattcataatatcaatatctatcaggcactccaaggagctccaaagatcaggcctggatatcaccctgctacctggatgctggaggctactatcttcagtgaagaaaacagattgtgagtggacttcgcacaaatccacagaaaatcaagtctatatcagcatgcacatcttttggcggtaaatttcgtacatgatgtttttattgatataaacataccatgtttttcttcagatataaccaacagttggttgaaaggttgaacaagcctagtggtaatctaaaagaattgcctattccaaccgagtattgccgggcatattttgagca

SEQ ID NO: 148857 - DNA, 359 bp, Glycine max
  unsure (1)..(359): unsure at all n locations
tcattgccgaaagtgatggagtttttttgatcttactactatttacaatcgcgattccaatgtatttaggctttacagctgctttagctaaaagctcatcaatggcaccaaacatcacggtctcggcttcttttctagcttctttcattgaaaggttgggaggaatgttgaagactgcctcatgaaggtaagtgttctccccaaggccagatctctcaagaatcttccgctggaattcaagattntcctccgtgaaagaactggtcaaccgggactgctctataaatatttttttcgtgcactttcgagattcttcaggcttgtaacaggagaaattgacaaggtacacaggtcgagga

SEQ ID NO: 148858 - DNA, 442 bp, Glycine max
acctgcggcatgcaagcttctcttgggttgaaacaattgcagcttactttgattagggacagtggccatacaaatcatttgcatcttgtggaactaattttaagctatgtaagctaaaataaaccattagcatgtgtgcgtatgatatcttcataaattaggttggtgacctttattttgcatgatttggcaatgtctcactataagttgtagatcatccattaattaaaaggactgaaaggataagatgcactagataattattttaagtcatccatgatttgtcattcatataatgtttctattttctttttataaaacaagttgttgacttttcttatcttcaaataaatctagatgaagctaccatgagttataaaaattttgaggcatgtttcctttatgatatttttggaagaaaagtgtacttcctgatgatatt

SEQ ID NO: 148859 - DNA, 404 bp, Glycine max
tactaagctgtccctgctctacagcatcatcacacaatagggattctacttaatcccttttctacccttaagcataatctcaaaggtaagttggcctcatgattcttcttttgggcttttcctcaatctgcaccttggtatgatctgcttgcacctctgctgaatattctatttgtacccctgctctgtggtctgtggtttccctatcatctcgcggcccttgggaaatcaccttgtcctcaaggtgatagtcatggcaaagagtggaccaatcctcccaagatgtatcatctggggataagccatgccattgaaccaagacttcccaagcgttcaaaggggttctgcgataatccacaattgctgccggagtgataataagttgatcattgtgaaattggtct

SEQ ID NO: 148860 - DNA, 419 bp, Glycine max
  unsure (1)..(419): unsure at all n locations
tgcagcttatgatgttaaaagagactatgtttatctatatgttttctgaacatgtaccttgtaatggctgaagttcgtgaattaagctatcagcccctgtatatttgttgaattaagtntgaacacagcaatttttaacaaatacttcacatgtatgataaattaagtctgaacacattaaaatttgataattagtcccttaattatattttaagatttaacttcggttcttaattttataatgtacgcatgtatgataaatggttgtctgagttgacaacacattgtcaaatgcatgcatattaacatacagcgtggcaggacattgtaagacttgacaacacattctaatgacagataaagcatgagacgacattgttgtacttgacaacacanacacatatcatctgcacacatct

SEQ ID NO: 148861 - DNA, 404 bp, Glycine max
  unsure (1)..(404): unsure at all n locations
tgcaagggtgtatttagttcaatttttagagtgnnaagaatgtccttgatatngttatctatgncaanggtgaagcaaaaaaaggtatatataatgccacaagctagctacataactaatactactttgttatttttgtttctagtatctgttgtcaaataataatgttatgtaattatgtaacaataatgttgacaatctagtgacatattgtgttatcaaggagtttgaccggatacttccgtgtaatcttttctagtatactatgtgttaatatttattatttgttaaaaacaactaatgatgtcagacaagtttgaaaacgattaagaacataattaaccaagtgattggatacaaatgaataatgcactaacgttaacgttgaacagtttggataatac

SEQ ID NO: 148862 - DNA, 438 bp, Glycine max
  unsure (1)..(438): unsure at all n locations
tcaaatcatttngatatgatttccatctcctcagttatggtcacctcagcctcacataacccttgatctgaaaaactgagtctacgccaaaaaatgtggattgtctctattggtatggagccaacaacatatttagacaactcacatgcacatgaaagaccatgggtagtcctcatgacacatctacaacgtgaagggtttttgtctgcataagttacacgttcatactcaacagcaatttcatttaaagcgtaccttgataccatgccaagtaatttttttgtacaaggtaactntaaacacatgtccactgacgtgcgtacttgtctcaaaagatgctttaattcgggtgtgttgaagtgtcatcatgttcattgcttcccaaacactgcatatgtcaccaanactgtnttgtagaagtctctttaatgaccaatg

SEQ ID NO: 148863 - DNA, 472 bp, Glycine max
  unsure (1)..(472): unsure at all n locations
tgtcatcatgagacatgagagacaagtaatctaatagatgtgtatatgtataattcacctgattgatcaagaaaaataaaaaaataatacatcttatgcgcatgctangtcctaacattatcatctcattaaattccctattaattcttttgtcttatattatttcctttgtctactggtatctattatttagttactattttttttactcatcttttaccttatcttatcttttcctcttataaattcgaaattatccaacgcaagtacaaaataaagtccatgtcaaaatcgacacttaactttcgagtctttactacttggacatttggtacacttgtcaaaccattgacagtcaccttgtcatgcaaaggcaactcctccccccatggtgatcagctcgagtctcaaggaaagttcaaatcgagtgacacgtcccggtgtacaagtatnntccctcatgaaaaactat

SEQ ID NO: 148864 - DNA, 486 bp, Glycine max
  unsure (1)..(486): unsure at all n locations
agcttgtgactctcggaaatntctttaaaactagtcacttagaaagttgtgacttttgaaaaaatcttcagaaacaagtcacttgttgaattgtgacttttggaaatgtattttttgaaatcagtcactggtaatcgattaccactaaggtgtaatcaattacacatcaacagatgtgactattcattntgaattntgaaaattaaaacgtttagaagctctggtaatcgattacaagtattgtgtaatcgattacacaagtttaaaatactgtaaaactatttaaacataagttataactctcgaaatttaaaatcttaacgttntaaaacactggtaatcaattactaccttctggtaatcgattactagagagtaaaactctttggtaatgattntgtgaaaacttcttgtgcctactcaatgtntggaacaactttttagtacttatcttgattgagtcttctctcgattcttgaatcttga

SEQ ID NO: 148865 - DNA, 413 bp, Glycine max
gctgagatgagcaagtgtagaagggtggaaacttctgcttttattcgttgaccacattgtggtacctggagatatgtcgcgggggtcaggagaccttggggacgtcaggtggggtgctattgcccaaaaccaagcttgaccaatcccgacccaacccgggcatagtcagtcaatgagaacctgtgatgtacctaagcaggcgagctcctggcagtcaacagataaaaggaacaaagaccacaaagcaaggaggcttgtggtggctggccagctgtgaatcttgtgtgatatatgggttatggcctctggtaatcgattaccaagggtgggtaatcgattacaaggcttaaaaatgaagacaggaggctaagatggtctctggtaatcgattaccaagggggtgtaatcgatta

SEQ ID NO: 148866 - DNA, 463 bp, Glycine max
  unsure (1)..(463): unsure at all n locations
tcagcttagttggggattgtttagatgcctgatcattatggtcttctatggntttgcaacttgcggtacgtgatcatttgtaaatattttatgcttaagcaagatataagtaaaattacactggtgtatgtggttcaattagtaaaattatgctttctagcgtgtgtgagtgcatcatatcccgcatcgtgcgtaaagaatttattttagtcttatttgttcaacctttttttatattatgtacgaaatacttatactcgtttaatatattttaaatgacttcaaaattaagttgtgaatttctttacatgtttaacatcattttttttacttttgttctcttaatttatagtagtgtacctaagttttaatattattntatagttntcgaatacaatgaactgtngatgtcgatatttgtctgtaataccaaattacattttcatgattgtcatacccctaa

SEQ ID NO: 148867 - DNA, 315 bp, Glycine max
  unsure (1)..(315): unsure at all n locations
ntgaatgctctattcaatggagttgacaagaatatcttctgactgatcaacacttgcacagnggccaaagatgcatgggagatcctgaaaaccactcatgaaggaacctccaaagtgaagatgtccagattgcaactgttggctacaaaattcgaaaatctgaagatgaaggaggaagaatgtattcatgacttccacatgaacattcttgaaattgccaatgcttgcactgccttgggagagaagatgacagatganaagctggtgagaaagatcctcagatccttgcctaagagatttgacatgaaagtcact

SEQ ID NO: 148868 - DNA, 317 bp, Glycine max
agagctgtatttataaacaaatcctaatgagctagcgatattctgtgagacactttttttcccccccctacaaacctcttctctataatgcactatagtggaaattctcggttgttgtgagtggtacgtccaacataggcataatcattgaatgaaactcaccagaatgagtgattcttaatacatctcgagcaatcatacgaagagagtcgtccggatacagcgtcctccctatcattcgtggaaacgatatgtgttcgcagtgccaatactacgtagccactggtgttatacccttccccaattagagattatgg

SEQ ID NO: 148869 - DNA, 458 bp, Glycine max
  unsure (1)..(458): unsure at all n locations
tagtcngattgcatacgtagatgagggcgnncattcttctcatttactttatgatactagnnaatttatcgatgatagatctaggcagacacatgtgagagcattatcttgcatttttttattttttaaaatgtttattatatttatttaataataactgtctatgaatgataggaagaatttgaggctagactatctcaagttaagtctaatgttgcatcaagtgttggtaagtcacaaatcactcctttagaccttgttgaagaacaaagacttaagactcggggttgggttgcgactgtgggaccaaagcgtaaaggacacctttacggtattggagatcttgctcatacttataaatgtggagataacaacttcatgcaacatacataaggatcttccagttgtcctcaagattcagcggagaataactgactaatggaggaactatgtcaatc

SEQ ID NO: 148870 - DNA, 323 bp, Glycine max
  unsure (1)..(323): unsure at all n locations
agagacgggggagcaccaaaccgaacgaagacaacggagacaacncgaactttgacctgcgtcccacaagactctcatccatcaaagttacaacaagcgctacacatgcctctatctatagactagggagcttccccgagaacgcttcttgagaaaacttcctcgagaagcttctctgagacaactctcttgcaaagccagagcttagctacacacacccgcctaacaactaagcccacctcctcgagaacgctccttgagaagattcctaaagaagctagagcctagctacacccaccccccataatagctaagctcacccc

SEQ ID NO: 148871 - DNA, 340 bp, Glycine max
atgctccatacttgtggtcgtataaatagattgtcataatgtagatagtctacgaagcaagaccttgttgatgtagaagtaataccgagatggtcttgttaagagtagaatgacacggagtaatcttaggtttgatttcaacctgattgaaggtcttgtcacagatctagtggggcttccttctgttttgtggagcttttcccctgatggttgtgagaagatgtgtttgaattgcccctggttgaaagtcttgcctaaccagtatggggatatgtcgcttgacctattgtgttcctcttctaatggttatgaaggagtagtgtgagctacacctgattga

SEQ ID NO: 148872 - DNA, 119 bp, Glycine max
gtagttttttggaagacatctcgcggcgtcattttgatactccgacatcggattgctgggtttggaaactagaacctagtggtcaatactctacaaagagcgcttatcgtatgttactg

SEQ ID NO: 148873 - DNA, 454 bp, Glycine max
  unsure (1)..(454): unsure at all n locations
tgcaagaataaacaaatcgcatgagcttatcaaccttgatttatttaatcaaagnttaatggccgncgggtgcaggtacatacgtatgctcaatggttatggtccatctgcattctaatctagtccgcagttacaactacagatgtaatgtatcaacttcggtaagacgccattcagttttacagcaatctaatctagttcacaagatgaacgatttcagacacggtacaaaacaatggaagcattttcttttttctttttcttttcagctagtgttgttttccttgtatcaaaatagcaccgccaagaaggcaattgaattcacgggatggcaagagttacaggatgcgcatcaatactaacggnggcaaaaggtatctatttgtcaactaacaaacaaaagggcatggatgggagagcctattatgcgttactataccacctaccatgtaca

SEQ ID NO: 148874 - DNA, 430 bp, Glycine max
  unsure (1)..(430): unsure at all n locations
agattctgatattattattncaacattagaaactctcgctgctcttgtaaaaataaatccttctaagcttcatggaagtgcaaaaatggttggctgtggttcaataaatagctatctcctgtccctggcacaggggtggggaagcaaggaggagggcatgggtttgtactcttgtattatggcaaatgagaaagtccaggatgaagcactgtgtttgtttccttctgatgctgagaatagtagtgaccaatccaattactgcataggttctactctttattttgaattgcatggacccattgctcaaagcaaggaaccaattgtagatacagtttcctcctgtttgagaggtatacacataccggatatgcatttacgcanagaagatgatttgtcaatgttgaagcaatgcatcgagcagtataatgtt

SEQ ID NO: 148875 - DNA, 455 bp, Glycine max
tggtatataactacccagtatctatagaatactccccctcttattacaaaaaccatccctgatattactggaccagtaatggaaaggtaagtcaaatcctttttccaggtttctaagccatgtccagcaaataaatatagcatcctgcatcaatttgttggcactgaaattttcatttgagaagacaatcctattcctatggtgccaaatgctcctagtcagcgctgcatcctggtacccgaaagccagcaggaggaaatggtgccttggagtttgcaggaaagctcccacgatatttatccaagacatcaattcccaccatagcggcatgaccttatcacaggaaaagaatagatgtgctgcatcctcttcaaaattcctgcagaatggacacatactgtcattgatttccacatttctcccttgacgtaaatggtatttgtaggcaatctgta

SEQ ID NO: 148876 - DNA, 339 bp, Glycine max
  unsure (1)..(339): unsure at all n locations
agctntacaccgttaaagagaagcagaagctcttatttgaataatacccggttcttccaggtgttgattttaaacagctttcatctgataggagctttcttcaaagatgagattaaatctgtatggagttgcgatgaagataaaagccccggtccggatggctttaatttccccttctttaaagcatgttgtggtgtcttgaaagatgagaatattggaattgtttaagagtttcactcatcaggtattttgctgaaggctgtaacatcctcctttattgctttgatcccgaaaaaggataatcctcaatctttgtanaatatggaccaatttcgttga

SEQ ID NO: 148877 - DNA, 382 bp, Glycine max
  unsure (1)..(382): unsure at all n locations
ttatggaattataaatgacaggatgaagtggcataaagtgcttagagagttcacttgcatgtgaaaaattttcaaaaagaaaaagactcaagttaaaagaataatgcaaccagattaatacttccaaagaaaagaatatnttgtgaagacattttcagacaatttaaatatttttatttggctatattagtataaaacatctctaatccatatatttttttaatattatgctctttttttcattctcttttgatatactttgtgttttaacaacttgaattcaatatgattttgtttatcaattatttttggatttgtacattacttatacgaaaatntataagtttcttttttttagctagtatttcactagggtttaaaa

SEQ ID NO: 148878 - DNA, 278 bp, Glycine max
  unsure (1)..(278): unsure at all n locations
cataatctcttcattctctgatgaancttactttgaaggattatattccaaacaggcttttaccttactcttatcacatgtatttgctacgtgaccatcaaacttttctttttcttgttcctagagttactttcttttcttcagctatgaacatttagccttcattttgttatgctctctacactcaaagaaaatgatctcatcactcttctccttaatcttctttttaaaccttgaattttatcgtctttatgagtgttgacactttcctttttctt

SEQ ID NO: 148879 - DNA, 291 bp, Glycine max
gccaacggggtagcgtgctgcgccacatctatactaaaaagcgccatccaacaagggccttcgtaccgagattatctgtatgtactttcaaggtgtattggctacctgcaggacatgcgttaccatggctaaagttacatacatgcatactcaaagcattctggctaccaaaaattgcacacctgcacactctggtatttctaatacctattcatataccaactttgtgatgaaactttggtttctacacaataaagtgcgacatttcatgctttgttaagagatttacta

SEQ ID NO: 148880 - DNA, 415 bp, Glycine max
gttcaaaggcactggtaatcgattaccaaaacattgtaatcgattacaactttttgaaattaattggaacgttgtaaatgcaatttgaaaactttttcaaatccattttgctactggtaatcgattacaacaatctggtaatcgatcaccagagagtaaaaactctttggaaacatgttttgagaaaaaccatgtgctattcaattcttgagaaacaccttttcatacttatcttgattaagccttctattgattcttgaatcttgagtcttgaatcttgatcttgattcttgagatcttgaaccttgaatcttgattcttgactctaaactttttctttgagtcttgaattcttcttgattctatcttgactcttgaattgtcttgatcactcgattgtctctgatgatcttga

SEQ ID NO: 148881 - DNA, 411 bp, Glycine max
  unsure (1)..(411): unsure at all n locations
ttcacccgacgaagacactgacaaaaacttatcttctcattcttggacaaagtatggcaggctgggggcaagtaaattttcttcccatcagaccttggatgcaactgtgattgtatacccatatcatctagatcttgacgggtattcaagccatccgtcgtcttgccttgaatgttaaggagcgtcccaatcacactcacaaacatttttctccacatgcataacatcaatacaatgtctaacgtcaagatcacaccagtacggaagatcaaagaatatggaccgtcttcttcatatgcaactctgactnttatcccttttttgggtctcccaaatacagtattcaggtgttgaacccgctgatatacctactcaccaatcaacggtatcggtgcaatatcatgctcttga

SEQ ID NO: 148882 - DNA, 416 bp, Glycine max
  unsure (1)..(416): unsure at all n locations
agcttgagccaaatcctgactcaccataaaccgtgacccattgtgtgattgtctattcttaccctcggaagcaaaaaagaatataagggaaatttcctctcatacaagaatataaggaaaatttccaatgaaagcaaaaaaagaaaagaaggaaaattccccaatcaaagagtgggagaaagcaaaaagaatagaaaggaaattcccaatcaaagaatgggagaaagtaaaaaaggaagaataagaaggaaagaaagctcctgatcagggatcgaaggaaaaacagaagaaatgtgcagagaggtctttagaccggacaatatctgaacaatacataattgtcaccagatgaacataaagaaggaaaggaaaccacgacctanaatggtcttctccctttattaccaaccaaaatc

SEQ ID NO: 148883 - DNA, 381 bp, Glycine max
  unsure (1)..(381): unsure at all n locations
atcgacacaaggntacattatcataatntgaatttgagaggcaatcttaatgcacagtcataaatatggttttgcatatagatattccacaagggctgattgtgtcatgcatcttggagcggatatatagataaagcacacaatatatactaaatattatggtaagtcactcattggttcttctcttatttggttgttcgttttctttttctcttccgtgcacggtgcatcttgcgggtactgcagctagtatttgctagcagttgctagtgttgcacgcactcaatatttattcagagacaaatttctcagaaacttgatttcgtcgacagtcatttaatgtccatagctctttccttgtcctcaaaattctgccaaaat

SEQ ID NO: 148884 - DNA, 372 bp, Glycine max
  unsure (1)..(372): unsure at all n locations
taagcattataccagttntatagacgatagaccttactcttattctaccagttnttaccaaaaaatttaaaccatgtagatttaaatcatctccctttagacaccaacaaatatatagccatttctcaaagggcaagcaagcaaccacattatttcacagaagatggtaccattgaaaaactacaattctcaaatatggagacaagagttaaaacacagcatgtgtagcatgcacattgcaaatatatgcaaaacaaatgagttcaagttattgcagcaaatcaacaatgttatattctgaatatgattccaattaatgttaacaagcagactagttaacacgaaacactctgctgcgattagtatataaca

SEQ ID NO: 148885 - DNA, 216 bp, Glycine max
cccgcaacctacaaaatcagaatctgaacagcccgttagatataaggaggtacctatgggataccataaacctacattgggagtgccctaaagcacttaatgatcctcttgatagctataaacgaagaacccctaggattagctcgatacctcgcacacaagcaaacactaagcaagatatctggtctactagccaaccatacctctatatcttga

SEQ ID NO: 148886 - DNA, 249 bp, Glycine max
  unsure (1)..(249): unsure at all n locations
aagacactctnccatgatttgaccgttgggatcttcgagaagatgtctggagtatgcgtgaagctctcattcccgagagcatttctcatttgagcgtgtcagcctttgctttcgtgtagcttatgaaaaatgccatttcttttccattctgccttccaaaaccatttctagcgttccaaacactttctccatcacccacaaccaccattagccaccacaaatcgtctttgtcccccgtgaaaccccaca

SEQ ID NO: 148887 - DNA, 359 bp, Glycine max
ttccaaacgccaccaaggagacttttctactatcattaatgcaataccatttttattgctttttcctgtgctttatgtattgtatgtctgatcatccatgcacctgtgatatgcattgtgaatgtttatttataaaaactgggaaaggctctaaaaaatcattgctgggatgtgtgatattgttacctatgcatacattttaaacttcatgcaatttattattttatctttgcaagggattatgagaaatatacaatcttgtttaaggatattggaaggacaaggtgatatcatataatggcgtgaaactgatagtttatataatatccatttcttgcattaggtagtagcatgtttgc

SEQ ID NO: 148888 - DNA, 413 bp, Glycine max
tccatcgttgcgccccaccatgagagaggaggtttgaatcttattgattcctaaccttgcgcattcaaatctccaaacaaagacacaaaggcccttctctagtactggtagtggccagtgggtttcttttcttttcaaacacttgctcaactatatttactatttcccaattgagaagcactgcactttcgtaacctagccgacatttatatcataattatgccctcctaaattgttgtcttttgctcgtctattgctttgcgtgtttaggtatcttgaatattatattgtccaagctcttttcacctttttctttttatatgttttttgaagctgactatctattcaaatcattcactcgagtttcccttcttatttgatccgtggatggtttaaaatatcaatttttaact

SEQ ID NO: 148889 - DNA, 478 bp, Glycine max
  unsure (1)..(478): unsure at all n locations
actaagcttaagatggtcataactntntcaagaggaggggttcatatttctgnttttttgaccctatctntctgggacttctgtgctttatagtccatgccagagcatatcataaatataactagcatatgtatcttgccttaacatttgaaacacacgattttggcagtctcatggataggcttcctgaagcacgaattgcctttatcggagatggaccctacaggtgacttgttctaacgtgtctttgctttcttttatctatgctaattaaacttttcaataagtacctacaggagaagaaactaagaggtaaagtgaatcacactttttccataagttaaaataaacttatgcatctcaatttttggaaaagtagacgagagtttctaagaaagttaagtatttaagttgattttaacatacaagagacgattgagtaatatatcttcgtatcttcttctataagtacttcctt

SEQ ID NO: 148890 - DNA, 446 bp, Glycine max
agcttaaagtatgcccgagtcattcatccttatgttatgttgttgaagtattggcgatcagaattgccattccttggattatagggttgaaccaagctcatgcttttacaaaaaggttcatcaagtcaagttgaaatatggaagtaaccgtcttgcaaaattggggcaaaagatgaatcgagtcacatcactacttcgtctactgccaaacatatttaggattgttgatgtccttgttacttccagtttcaccttgacaaagatatcatggaccatgttgaaaatctaaattgattcaaccccatgtcctgcgtaaaaattcgcaatacttcaaatgtacatcattcacatacatccatgcttttcattggttgcattgctcattgcattctttccttgaaaaataaaataaaataaaataaaatgaacttaaaagaaaaggacac

SEQ ID NO: 148891 - DNA, 346 bp, Glycine max
  unsure (1)..(346): unsure at all n locations
tggtcctggagatattccgggggtcaaggaccttgggacgcaggtggggtgctattgcccaaaaccaacttgacaatcccgacccaacccggcatagtcggtcagtgagaacctgtgatgtacctaaacaggcgagctcctggcagtcaacagataaaaggaacaaagaccacaaagcaagggggcttgtggtggctggccagctgtgaaacttgattaatatgtgagatatggtctctggtaatcgattaccaagggtgggtaatcgattacaaggcttaaaaatgaagacaggaggctaagatggtctctggtaatcgattaccacngngtgtaatcgattacc

SEQ ID NO: 148892 - DNA, 473 bp, Glycine max
  unsure (1)..(473): unsure at all n locations
taagtcacctgcggcatgcaagctnggcctctcaattatgcaacatctatttctttcttacaccatagnaagggactaagaatgaaaattgattaaatcaattntggtgctagtagaactaacaaataacttgtttttcctattgaaccttctttatgggatctcccatcacaaaggttaggttaccatcagaagatgaccatatcatacaaggattggcacgagatgctacccttcgcattacatggttatcagacttttgtatatacatctactagggcaaccccattctctttggtgtacgggatggaagttgtgctcccatttgaggtggagatttcttctttgagaattctagtagagtcgagattggaagaagcagaatgggccaaggcatgtnttgactaattaaatctaattgaggggaagagaatggctgccatgagccatgggcgactataccaaagcatagt

SEQ ID NO: 148893 - DNA, 456 bp, Glycine max
taacttagtgagttagaaacttagtaacatctattgtattatgaagaagcccttcagcatcaaaggccaatagcatcaacaagtagtcaacgggcagctgtagctgttgcaaaggatgttggggatacggataatgctactgtcaagccttataaggagcctcacaatccagctacagaggatgtagttggtgattcacatggttttccaaacgggcaccaagatacatcaatgttgacgaattatgcttatcatgtggcatccacaaggagagttgtcaatgccaacataattcactcgctctaactcaacaacaatctggtttaagcatatcttgatatcatgttaattagtctcttgtataaggtaattttaaaaacatgtctgaccacatgtgtgcttgtctcgaaatatgccttaatttcagtatgttgcagagtgatcatgttggtcatg

SEQ ID NO: 148894 - DNA, 242 bp, Glycine max
cccactcgcggaaagggaagtgatagcgccacgccgacggcaacaaaccaaaagaccgggccccaaatccaaaagccgacggagaaaaccgaagagcccccttccaccacaggcgcgaccaagagggacccgagaaagcgcgggggcagaacccagggaacaagcgagcgcaagcccaaacaaccgggcaaaccggccacccggcaagcaggcaggaaaccggaccaccaacagcaaccccc

SEQ ID NO: 148895 - DNA, 419 bp, Glycine max
  unsure (1)..(419): unsure at all n locations
cctctctctctttcaatntctacgacggcctgattgattttctcccctctttccctncgcgacactcttctttgcctcgaaattgccgctgagaatgttcaccaccaccacgttcatgacctctcctacatgacatccaaccacacgtcctccatggtggtttccattttatggaagggtgagagtatacgcgatggacaccattttcgaatcatcttctcctcgtaatggtcacaaatctggttaggacaattgcacttgcagcgctgtgagtgagtgagtgatatggaaacaaagaagaaagttgagagagagtgaaagacaaagaataggtcgatgccgcacaaagcgaccagaaagggctgcgatggtggctcatgaagttttctggcgacaacatgtttccccttttcttatat

SEQ ID NO: 148896 - DNA, 445 bp, Glycine max
  unsure (1)..(445): unsure at all n locations
aagatggccttagcatattctttatttccagaagggaattctatcaatagacctccaatctttaatggagagggttaccactactggaaaacccgaatgcaaatttttatcgaggcaattgatctaaatatctgggaagccattgaaatagggccttatatacccaccacagtagagagagttcaatagatggtagttcatcaagtgaaagcataaccatagaaaaacctagagatagatggtctgaagaggatagaanacgagtacaatacaacctaaaagccaaaaacataataacatctgccctaggaatggatgaatatttcacagtttcaaattgcaagagtgctaatgaaatgtgggacactcttcgataacacatgaaggactacagatgtaaaagatctcgataaatgcctactcatgatatgaatattagaatgat

SEQ ID NO: 148897 - DNA, 370 bp, Glycine max
  unsure (1)..(370): unsure at all n locations
aaatatttggccctcaaactttcacctttttgaagaaggtttattgacagttgggtagccatgaacaaccaagccttagaaacatctcagatgtagctttataagctactcctgcattgctagccttctccttctacacagtntccaccatttgagtgtcatctcctttagaaccactaacacttgaatctttcaaaatattagcagcattagggacaacctttaaggattcatctttttcctccttaacaagaatttgagcaacataaacctaaacaacaatctttgacttcttattgttcaccanatgtgtttctataaaanaaaggaaaacaacaagaaaatcatgagaacaagttagaaatataaa

SEQ ID NO: 148898 - DNA, 314 bp, Glycine max
  unsure (1)..(314): unsure at all n locations
cgcgcatttctattctctgcttgcttactttttataccccctgttgacgtgcttaaaccattctacttaagttcgttcccgcttaacttaaaaataaaatctattcccaccgaacgtttgaatngtattatccattaacttctgctaaaataagttccgaccgtacggtcgtgccgtaaccaccttggaaatcaaaaaagaggtcaacaactatataataatctaaaacattctttttagttaaataaagcggaaaatccatccgacgctttctctttgggatttctcattcttaatccaattgatctaatact

SEQ ID NO: 148899 - DNA, 318 bp, Glycine max
  unsure (1)..(318): unsure at all n locations
atccactcattgagggttactgaatacttgtattcattcaaactactatttatgaatgctacgagtggcttagcgttaaacaatacttgggtattcttagattcaataggagtttaagatagtaccaaaagtggctataagaatacttgtatagccagaagtgacaagatagaatacttgttntgtaatcaagttttttattagtgaaatagtaaaagagaactgaacatacctctgtttgattgaaccagtctaaataaaatgtttccatgtctcttctttaacggctttattaagaattctcttagtgctttctat

SEQ ID NO: 148900 - DNA, 302 bp, Glycine max
caaatgtggctctacaacttgtactaatggatgaactcacctctgtggttggggactgtattcctttgtgaatttgaatcaatcctgctgaagtactgaatttcttgcattatgaatgatgcaactgtgcctcgggttcctatttccgctgagggaaattcagccttatcttttgtgtcctttgagtcaagggtagtggatttgagcatgcttttgttggttggtgttggggagaaagcaaaatcttttgattgaagggaggcttgtgggtttgatctatacgggaaactgctcggactctg

SEQ ID NO: 148901 - DNA, 336 bp, Glycine max
  unsure (1)..(336): unsure at all n locations
tgcatgactgatgaaagagattgtgtggctttagcagcaacatcacgttcatacagatgaggacgggtctgaaggtggttgataactcgggggagaaaaaagtaacgtgcattcaagcattgaaagggaagaaggtgacacaataatagcatcagtgaaggaggcacatgcaaagggggagggtgtgatggaagtgaggtcatagttgatgacaagcaaggccaacccattgggacttagagttttgggccagtgcctcatgaactcaggcagaacaaccatgtcaagattcttactntggccggccatattgcttaattcagcttgcattttctt

SEQ ID NO: 148902 - DNA, 425 bp, Glycine max
tgatgaagctgtggcaaagtttcatagaatggagtttgatcaacctcctgaagactctctttctaatccatattacaagccttaaccccaacagtcaataaatgaggtctttaagtttaacaacttagtggatgattagattcaaaaagaaataaagtctttcctcaatatcttcaataattctgtcgaagctcatcaattacatagtcaacacactattgatattgttgaaattgagtcttctacagaacaagatcgaaacaagtaaatccaagctcgagaataattttaaaaggccaaagagaatcttatgttaatacaaggaccaatcgaagaaaggagcaatctaaagcagatttggtcaagacagaaaaagatctcttggtgagacttacacccattcaagatgagcttcgttgcacaca

SEQ ID NO: 148903 - DNA, 425 bp, Glycine max
  unsure (1)..(425): unsure at all n locations
gcttttctaaaagctngaagccccgcagggaggatcttttgtatccccacaagcagaaattgagtttgatggacaccgtttcttaagcgaggagcatcagtgccatttcgaagcgattaaggattggtctttcctcaaagaaagttgagtccaactagcagaagaagagtacatagaatttcaggcgaaggttgccagaaggcattggacccaactaacagagcccatgactaagtatgaccctgagataatcatggagttctacgcaaacgtctggcccattgaagaaggagtcatggataagcattcctaggtgcgggccaatggatcccatatgatgaagatgctatcaactaattcctgaggcatccgttgatcttataagaaggcaacattgtgaatacgttgaaagaagaagccaagtc

SEQ ID NO: 148904 - DNA, 246 bp, Glycine max
gagccacaggcacgtatagcaggtgctatgagaacttaaccactcaacatgatgaacttgaagacctgacccttaatttgagaaaccatgagagcattgatgaacgccgactatttgttatgtctaaaagagagaatggaatgcctaaagagtggttgatatacacgcacaactcatctgaggctcagattgtttcaattcacacaggtgaaatgaaagaagtggattgttctaatatgaaatttc

SEQ ID NO: 148905 - DNA, 471 bp, Glycine max
  unsure (1)..(471): unsure at all n locations
tcacctgcggcatgcaagcttattggatatatgtgcgggatacattattcacacgacagcacgaanaacgagcttagccaggccaaagatatatagataaatctcaaaggaatataccgagtggtatctacccaacccatgcaaaggagccacgtgtccagtgattagcctaacgaacgttatcaatcttggataaagcaacgagtgattcttcccttggccaagtggcagctcatccatttcaataacatatattccactcacctcatgatatatataacaaggaaattttgtggaaagctctcacccatcatcctcttggactttggctcattatcgataccaatccgtacgtacaaattaagatatcaaccttatataaatcgttttgcagaacaatgtctcagccacatatttctctttgctttttaatttgctattcttttcagatcaataaattcatctgcaatt

SEQ ID NO: 148906 - DNA, 357 bp, Glycine max
  unsure (1)..(357): unsure at all n locations
tcaaactaagcttacgtctgctttatacatcagatggngtacttttttgaatgtttactataggataattatattcaccaagcctcaaattacacctcaacttcaataacatgacatcgatttattcttagacaattcttacaaaaaaagaagaatattggtgaatttccaacaataatccacacacagcataaatatatcttccagcagacaacattaaaaaattaaattcaacaaataaaaacctttgaactataatttattacatgccatattgaatatgctcttactatatatgctcagcttcagaatgtgacccatctattatctacaaacagaaatacctacatattctat

SEQ ID NO: 148907 - DNA, 428 bp, Glycine max
ataagaattgcacgaaacatttatggtgtaacatgaacaagaagggcatttattattacctgatttcatgatatcatgtcatgtaaaatgaagacaggaattgtttctagtggacgaggaagatgaacacagcgcttctccaatgttggtatatcttttcttttctttattttgggtatatcttctccaatgttggtattattagtgtattattacgtgttcaatcgtgcacatttcaatcggtccattcgatctaggctttcttaaagtacactgactctatttttaattataagattattttaatttatttatattctcttagacaataattattatattaacattaattatttgtatcttaattctaaaattattcatttgttttctattcacttacttatttgtcattattatttagagagaaa

SEQ ID NO: 148908 - DNA, 468 bp, Glycine max
  unsure (1)..(468): unsure at all n locations
ttaagtcacctgcggcatgcaagcttctccccctatttgctataaataggggaagaagtgaagaataaaagggttcagccccttaggcacttctctctctctctcgaaatagctgaggaaaattagttccgtgaagaaaattcaagccgaggcgcttccgtaacgtttccgtgagtaattacgtgaagattctcgaccgttcttcaagattcatcgttcattcttcgttttcttcagtcttcaacgggtaagtatctcaaaccaagcttttcaattcattctatgtacccgtggtggtccacattttgattcatgtatttttgttctcgttttcattcactttttatacccctttttgacgtgcttaagccatttatttaagtcatttctcgcttaatctaanaatgaaataaatttccaccgatcgtttgaattgtatcatacgttaattctggttaaaatgaattc

SEQ ID NO: 148909 - DNA, 429 bp, Glycine max
  unsure (1)..(429): unsure at all n locations
tactcgtggcttctttgagaagcattctcaagaggctactttgagtatctagatccttatctatccacccctctattaactaaattaacttccttaaaaataattactgatgaaaataacaaagcaaatattctaacatcaaacataattactaatcatatatagatatatatatcagggtgttacacccgacatgtggcagaacttcacggattgcctaacgatgggtgttaagtacctcgaagcggtcaagcgaaggttgcatgccaccaaacaaatggtcccggacgaaattatggtatgacaaaggagaaacatgacatcttaaagacataaacganatgagaccggagttctgaaatgcttgaacacactcaaacatttcgtcagaagagaactgcatgttcatgaacttatgatctataattg

SEQ ID NO: 148910 - DNA, 465 bp, Glycine max
  unsure (1)..(465): unsure at all n locations
agctggagcttggataaccccatagtgtttgattataagttttgaggcccaatgattctgacaacacctcatgtagatcaatgactctggcgtacttatgctatgcatggccaatgatattatgacatggagatgcccgacatgacatgctttcctaggtaaccgtgcatgagctaccatgttcaatcatgttggttaagagaaacatgtctatgatcccagcatggttggctcatggtacctaacacatgcgactaataatgcggtgagaattgccacgctctctccttctttgttatctttgtgcacaggaaaacgcctggatatgcatgatatacatgataataaaggtatgcataatgcttgtgagatgangatgctaggtgatgaaatgacttatgataatgcattgcataatatgatttgtgcatatgcaggaactatatgtgcttactatgccatgag

SEQ ID NO: 148911 - DNA, 380 bp, Glycine max
  unsure (1)..(380): unsure at all n locations
tgatggcatgacaacaaacaatggtgtttcgtggttgtcatttttctttgatttctccttgtgcgtngaagacgaaaggcaactctgtaagggaaggtgttttttatttgtttagccagattttgctgatggccttcattttcgttacatttctccccatggccatcattttcgttagatttcttcttgtttttttgttattgcagacaagggattaatcatgtgttagggtttgttgatgatgctctatttcgggtataaacatgaataaattttattactaattcaatgatgcttacgttccttcttcttgtgactttattttgtgtgttccttctaaaagaaaaaaaacattgtgattagtgaaaaatctaaaggag

SEQ ID NO: 148912 - DNA, 433 bp, Glycine max
  unsure (1)..(433): unsure at all n locations
ctctatgcttgattntcacttcattntcttggtttattctcacttgtagtttcaaaaccttactttgcactcttgaagattgaaaacttgaatataaaatctctcattcttccttctaaattttgtggagactaccaaaggtaagggggtctctctaactcttgaaccatatgcttgttgttgttgttgaacttccttgaacatgttcctttgaaatttttgagcttgccgtcatgtcctgaatctgtgtgctgagnttgtttccttgagtttttatgccaaaaagttctttgcatgttgaaacatatagttagcctaaaatttacgcacattggagtttcctagcaaaagttacaaaaagaacaagtttaaggacctttagtanaatgaatctttttatgaatttggaatgagagttacaacagtatggact

SEQ ID NO: 148913 - DNA, 341 bp, Glycine max
tctagcttataatggtgtaaaaggcttttaatggtttattattatagttatgtgaacactaccagtttgaatatggatagccaatcatgttataatgaaaagctttatatgttgaacagccctatgctggtacagcgttaagtagttctttaaaaagactttctaagaaaagggatactctttttataagaaaaatacatgatatttattagttaaattatgtgagatttatttggatccctatgatattggcaggaattttatgacatgcaagtgagttgaatgcatgatggaaactatttttttggatgcaataaacaacaggatggatttgcagtatc

SEQ ID NO: 148914 - DNA, 353 bp, Glycine max
  unsure (1)..(353): unsure at all n locations
atgcattatatngagatggaagagggcccacatgaatacctttggagaatccgcctacaaccaccagtattgtggtgtttcctttatatgacgacaatccgacaatgaaattgagtgataagtcctaccatggccgagtaagaacaggtagtggagataacactcctgttggtttcctggtcacatatttggtgtgttgacaatcgacgcactgtgcaacataattgcgaacgtcttatcgaatagaattccacgggaagttgttctatactctagccacagtttttgtcacactcatatgaccgcctgtttgtggggagtggaattcatgccacataattctaatgaagttc

SEQ ID NO: 148915 - DNA, 388 bp, Glycine max
  unsure (1)..(388): unsure at all n locations
atatatngaaaaaaaattattatataattatcacagtcaaatatttttcttaaaatttattttatgtctcacttatcgtttgaatcggctggagtgagagctaacttatatgagtatcaccaagattttaataagttatagtccaaaacttaaattgcaatttacaatcataacatcaaatttttggggattttatagtcacatagcgtttgcaaaaaattgtttgcgattctatataatgtaaaaaaaaatttaagaaagtttgcagaattgcagttttacaattagaaaccatgagtttcacataatattagtactttgggcgactntaattctttttggtgtttgtacaatctaatgtagcggggtaatttcttctctttggtgg

SEQ ID NO: 148916 - DNA, 419 bp, Glycine max
  unsure (1)..(419): unsure at all n locations
ctcgcccaatcgagacattcttgcctatgtgactataaaactccaggatgaagaaagcttgggccacccaagctattgattcttgcctcagcgaatcttggatagagagtacattcgtccaagcgggtcattcttgcctaagcaagaaagcccactgggtgaataccttgtttcacatatttcattcgccaaagtgactctggtctcgcctggacaaagaaacaaggcattttaaaactccaagtacttagtaatcaactcctcattgctccaagaatgctttccacttcttccaccttgcttccatcatataaaaatctttaatctacaaaatttgcacaagacaaagtttggtaaaccttcaaattataaacaaaacacttaaactatcanataactcanaattaaaggaagtttct

SEQ ID NO: 148917 - DNA, 464 bp, Glycine max
  unsure (1)..(464): unsure at all n locations
tctntgagaaaacttncttgagaagctagagcttatctatacacacccctcttataactaagctcacctccttaagaagcttccttaagaagattcctaaagaagttagagcttagctacacataccactctaatagctaagctcacctccttgagatgagaagctagagcttagctacacaccccctataatagctaagctcaccccatgacaaaaaacatgaaaatacaaaaaaaagtccttactacaaagactactcaaaatgccccgaaatacaaggctaaaaccctatactactagaatggccaaaatacaaggcccaaacgaaggaaaaacctattctaatatttacaaagataagcgggctcatacttagcccatgggctcgaaatctaccctaaggctcatgagaaccctanggccttcccttggatctctagcccaatctacttggagtcttcta

SEQ ID NO: 148918 - DNA, 459 bp, Glycine max
  unsure (1)..(459): unsure at all n locations
gtcagctgtcgcatgcatgctagttccgtcgcggcaagtgttctggatctcgtatatagtataaaatcgtaagaactgagtatcgaactctcggggaacttgtgttacttggtaaagctacttcagtgaataggtgtctagtatgaaaagaaatgtatggattatgcacaggtatgtaaactaactattaaaaggaaaatcacgtgagtaatgatgcgtaaagacaagtagacaacacattggtcttcctaataggtgcctgatgttaagaggatattctctacttaaaaatgttcatgtgttctatggtgtctcctgaaatgctaaaccttgattcctcataatagtttagcctaatcccgatcaagcatcgtcctcagattcctcttgtatgactaaactcgaccaaaaccgcattatgacaaacatacaaacaactanggtaccgtaccccgattc

SEQ ID NO: 148919 - DNA, 469 bp, Glycine max
  unsure (1)..(469): unsure at all n locations
ntgcggatttggtctntgccagtgaaaggatcaatgtgtgtctgaanatatgaaaatntagtcatcctgcttggacgaatgagaaagctggggcaaataaagagggtgaggatgaaggagaagcccgtgctgtgactgccattcctatacagccaagtttcccaccaacccaacaatgtcattactcaaccaataaccaaccttctccttacccaccgcccagttatccacaaaggccatccctaaaacaaccacaaagtctacctaccgcacttctaatgaaaaacaccacctttagcataaaccaaaacaccaaccaagaaatngaatttgcagcgagaaagcctgtagaattcaccccaattccagtgtcctatgctgtcttgctcccatatctacttgataattcaatggtatccataaccccaaccaaggttcatcaacctccatttctccgagaatacgactc

SEQ ID NO: 148920 - DNA, 365 bp, Glycine max
gtctctctctatttttagatttggaagccaatcccatgcttgtgttcggactctcagccacttatgatagccggcgatgatcccatatactgctcccctaagctctctgtcctttcttcacgccgcataccatgccttgctaactccttggagtaccctcccgttgtggtcactgaaaacccctgcgatgaaaggtgtgatgctctcatctgatggcactcctcctatggagtatcccagctggcttatggcgaggacgggattataattaatacgaccccttgttccatcaagggaacagttggacatacttcgcatgaagatagaatcctgattcttcctttcttctatcgagggaaccaatt

SEQ ID NO: 148921 - DNA, 381 bp, Glycine max
  unsure (1)..(381): unsure at all n locations
tcaccatggagatgcagcggaagacaaacgagaagaggtgagaggaggcgccatccactagggaataagccatggaagaaggagcttcaccaccaagatgagccttggataagaagcttggagaggatgcttcaatggaggaaaaaaaagaaggagagaaagagagaggggggagcacaaaattgacggaagaaaaagagagagaagttgaactntgagttatgtctcacaagactctctttcatcaaagttacaacaagtgttacacatgcttctatttatagactaggtagcttccttgagaagctntcttgagaaaacttccttgagaagcttctttgagaaaacttccttgagaagctagagcttagctacacacac

SEQ ID NO: 148922 - DNA, 350 bp, Glycine max
tggatagcattgctaaaaaaaccatctacggtgccaatgtagatccaatgagagccatttgtaatggttttgtgaaggggtacatataactgcttcatagtagtgatgacgtaccaattcaccggatgccttgtgtattggattcaatattaaaaatattaaattttctataaaactaccaggtaattgacacgattccgattttacactatctattggattgcatatggataaattcttacgttagcatgttttcataaatgtaggactactgatcgacatcttatttaccatgatgatatactcggcatcatacaatatgtctatatgttcaaaagtcatacaatata

SEQ ID NO: 148923 - DNA, 428 bp, Glycine max
  unsure (1)..(428): unsure at all n locations
tgccatgccatccncatttcggcctagacccattctaggttcatatctatcccttaacataacccgagccaccatcaaagtagcaccagataagcgtggctgcaccggaggagattccacataagcactgctcacaatttccagtgcttggaatgatgtttccaacgactcctctacagcctcaacataaggcgtagaagacggacaacttaccagtatgtcttcctctcctgatactataaccagctgtccttcaaccacaaactttaatttctggtgcagcattgacgggaccaccccaaccgagtgcatccaaggccagcctaacaaggaactgaaggcagagcttatgcccattatttggaaggttatctaacacatgtgagggcccaattgaattgggagatctatctnctcccttacatccc

SEQ ID NO: 148924 - DNA, 419 bp, Glycine max
  unsure (1)..(419): unsure at all n locations
cttggccataagcttgattaaatactcaaaatgctagatcaaagatctatattatagacgattctactntagctacttttttttggcccatgatgttagctaatgataaccccctacaaaaaccatctcttattatttgggcttaactggctntataaaaatatgttagtagttgctgatattttatttttattaactaagcacgtgaagggtaaatgaccattatttttattaactaatcactgctagttgttttcatttttatgctctctacagtgttattataagcaagatacgcaactgtacatctttatattatgttctttataattaatacaatgtatcctatataactcttaattgggtaacctaatttgtctatagctaagcaaagaatttcgtatacggcatgtattgat

SEQ ID NO: 148925 - DNA, 449 bp, Glycine max
  unsure (1)..(449): unsure at all n locations
nntacgtttgggcagntcatccggaaatgtccaaatttttcacagaaatgacattngncattnttcttctggatcttaatagaggacttgacaatccttaatggtcctttgtcctttccatgtttcttattgactntctttccaactccctgattattcacatgatgaacggagtggtttccttgattcttaagtctggtttcctcctgaactaacatactatgcaattcatgcacattccatttgtctttcatggtactatagttcatttggaattgaccatactcagacgataatgagttcaaaatgaactgcacaagggaaatttcatccactgctattccaagagaacttaagtttgctgcaatatttgtcatctcaatgacatgttcatacatagtacaagaaccatcaaacttcatgggtggtaaagtactcattaatgtccc

SEQ ID NO: 148926 - DNA, 187 bp, Glycine max
ctaaccattgcattagcagcctctcgcattttcttatgctcacgattcacctttacctgtaaaatctacatactgcggtgcatttcgaatattcttatagcacataatgtaataaattaagaaacgatgctacttatatgtatgtgtgattataccctagtgcaagggtgagacctgtccatcatga

SEQ ID NO: 148927 - DNA, 296 bp, Glycine max
tgacgaatgagagacatgcgagacacacgctctcaggcaacgaaactccctttctcttgcttcagactcgtgctagccgctctatatgacgagcactctatcgtattctccaatgaagcatacactacaagcttattattcaatgctcatggtggaggagaaccgcctacttgcaaagacaattacctaatggatggcgccttactatacctatcacacggtggcttacacagcaactccatagtggacaatcacgatggaacgacctcatgaaaagctatagaggcagccaccat

SEQ ID NO: 148928 - DNA, 428 bp, Glycine max
atctataaattataagccaagctgttgtgagacaatttaaataaacttattaaccaaagcgattgacgaaatagtttaaggatatgttgcattaatataagtaaaaatcatttatttatgaagagaaattatgtgtgatttttatcgtgtaaaattttctcaaattaataataattattcattgtaagtattagtgagattagtctttgatttggtaagttaaaagacattcatgttgtccggcatataaaaaaattataaagtatttattgaagaagacaaataaaattaatagaactctcgacgtaaattaaaataaatatttatatataaatatcttgcggaactttgttctttaactgttgtataacacttcttccataactcttctataaataccatatttaaatatataagttgcatcatcc

SEQ ID NO: 148929 - DNA, 418 bp, Glycine max
  unsure (1)..(418): unsure at all n locations
tgtaaaagaaccactaancatcttcttattactgagattttaatctctcatcaccaaaatgagaatcataccagacaggtctaaaacagtctccacattggggttcatgcactgaacagaaaacatatctacaagcccttcaagttcccttcctaagtcaaattctgcatcttctaggaccagttttccagattccacctaaaagtcttgatactattaggaagatnttggcagaagtgcagtggtgaagaaactcggaattaagttttaattattcttgaacaaaatattgagctaatatctcaccttactcagatccaagatgttattaagaagacggagcagagcatgtgaacattntcttatttgagtgactgttgaatattggtcatttgtgagacagtcatctgatatgaga

SEQ ID NO: 148930 - DNA, 459 bp, Glycine max
  unsure (1)..(459): unsure at all n locations
agctttgaatgctctattcaatggagttgacaagaatatcttcagactgatcaacacatgtacagtggctaaggatgcttgggagatcctaaaaatcactcatgaaggaacctccaaagtgaagatgtccagattgcaactattggccacaaaattcgaaaatctgaagatgaaggaggaagaatgcattcatgacttccacatgaacattcttgaaattgccaatgcttgcactgccttgggagagaagatgacagatgaaaagctggtgagaaagatcctcagatccttgcctaagagatttgacatgaaagtcactgcaatagaggaggcccaagacatttgcaacatgagagtggatgaactcattggttcccttcaaacctttgagctaggactctcggatagggctgannagaagagcaagagtctggcgttcgtgtcanatgatgaacgaga

SEQ ID NO: 148931 - DNA, 417 bp, Glycine max
  unsure (1)..(417): unsure at all n locations
actaagctntgatgatatggtcttcaccgacgaaaggatcaaagngggtctaaaaatatgcatatctgaacatcaggctttgataaatgccaaaaagactagggcaaatgaagagggtgagaatgagggagaagcccatgttgtgactgccattcctatacagccaagtttcccaccaacccaacaatgtcattactcagccaataacaaaccttctccttacccaccgcccaattatccacaaaggcaatccctaaaattaaccacaaagcctacctaccgcacttccaatgacaaacaccacctttagcgtaaaccaaaacaccaaccaagaaatgaattttgcagcgagaaagccttataattcaccccaattccaatgtcctatgctaacttgctcccatatctacttgataa

SEQ ID NO: 148932 - DNA, 443 bp, Glycine max
  unsure (1)..(443): unsure at all n locations
cacctgcaagcatgcaagctttcagcanggaagctaagtgtgaagtatgctattctgcacaggattggagctgcaaactgggttcccaccaatcatacttccactgttgccacaggtttgggtaaatttctgtatgctgttggaaccaagtccaaatttaattttggaaactatattcttgatcaaactgtcaagcattcagaatcatttgctgtcaaattacccattgccttccctactgtattgtgtggcattatgttgagtcaacatccaaatattttaaacaacattgactctgtaatgaagagagaatctcctctatccctgcattacaaactgtttgaggggacacatgtcccagacattgtctcgacatcagggaaagctgctgcttcaagtgctgtgtccaatgatgctctgattgctgaactcaaagacacatg

SEQ ID NO: 148933 - DNA, 422 bp, Glycine max
  unsure (1)..(422): unsure at all n locations
tgtgtgcaaaactttacaatctaccattgccttatcaactccatttcttcgtatatggcagctatagaagctgtgaaagaagctttatggcttaaaggtcttattggtgatcttgaagtaagtcaaaaagacattatggtgttttgcaatagtgaaagtgcaatccacttaaccaagaaccagatgtatcatgagaggacaaagcatattaatgtaaggatgcatttcatttgtgatgtcataacatgaggtgatacgttggtagagaatatngctacttctaataatccatcagaggtaatgacaaaggctcttccatcggtaaagtttaaatattgttggagtttanttggtatcacaagtgctagttgacactaagttgatcgagcatccactactaaaagatgaaaacaaaatggctt

SEQ ID NO: 148934 - DNA, 487 bp, Glycine max
  unsure (1)..(487): unsure at all n locations
aagtcacctgcagcatgcaagcttcaaagtaccatgaataccacccagatgtcattctgataaccaataatgagtattatcatttactccacctgctgcttacgttatgtgaataaaataactggtgcacaaataagccattttccagtcccattatgcctcacaagagtcaccaataccaagacttgtactaaacaaggaataccatatctgttggacatatttttaaatagaccattttttggaccaagggttgtcccagtcaggtgcctagtatactatatttccagtctgacaacccanaattcataaatctaaaccactgggtttgacagaaataaaaatattgggttatgtattaaaacatgtttataatatctctaaaaacattctactgtgtaacatgtacatagntcggggaaatatatatatatatatatatatatatatatatatatatatatatgtggggagaaatatatcacac

SEQ ID NO: 148935 - DNA, 376 bp, Glycine max
  unsure (1)..(376): unsure at all n locations
agctgccgtccgtcccgacaacgacgccctgctccttcgtttttatgtaacccccctatcgctgccttgcctcttnctcctncgacgaccgcagtgccggcgccaaatgcagcggctaggactccgtgctgcaccagttttccgaggtcaccaaccgagtcgattcctactggaagtcccttgggagcgccgccgctgtcgatcgcgtccgcgtcggcggtggcgacgaggattgggattatgatcgctggcgccgacatttcgaggaaatcgacgagcaagagcgcctcctttcaattttcaaattacacggatttcaattgcgtctttcacgtgctttaccgaagtttttgtgtaagcattattctgaatcgat

SEQ ID NO: 148936 - DNA, 431 bp, Glycine max
  unsure (1)..(431): unsure at all n locations
atataaatatattgcggaagaatcatattgtggaagtaaatgctatttaagtagataaagatattagtgccagttattggcagaaattaagaaaattgcgtattattaaatgtgcgtattattaccaccaatcacgtagatttgttttaacaaccaaagatttcgaattgaagtataaaaaatgtgtgtattgttttattacgacaacttctattatttagtgtgcttaaatcttaaattctaatgttctgtcgaaatggttttaaaaaattaaattgtgggtttctctcaagatacaatctagaatataaagtgttcagttaaaaaaatctacttgaattacttncaagttttttaactatcctttagctcttctgtaacttccgtattctcataaactttaaatttctttaaatcgactataagactaa

SEQ ID NO: 148937 - DNA, 363 bp, Glycine max
  unsure (1)..(363): unsure at all n locations
nttggagaagcgaccaggcacgcgtttgttctaggttttgttaaagctcaccaagggtggaccttgggtttgacgagcctttggagacgcgagactcaccaagggcgaaccttgggtttgacaagcctttggagaaacgagacttaccaaggatggaccttgggtttgatgagcctttcgagaagtgagactcaccaagggtggaccttgggtttgacgagcatttggagaaacaagacttaccaagaatggaccttgggtttgatgagccttttgagaaatgggactcaccaagggcagaccttgggtttgacgagcctttggagaagcgagactcaccaagggcggaccttgtgtttgacg

SEQ ID NO: 148938 - DNA, 455 bp, Glycine max
  unsure (1)..(455): unsure at all n locations
agcttatcaaagtgtaagagnatatttcattatcctctcanaagatcataaacaacttcaaaggagaaatagttttttagaaattttcacttaggagcatgttgtctttgaagatcctaaactaaagactacaaagctccatcttgaaaataagaaaatttgtaaagaaaagtctgactttntggaagatcttcagaagtcggaaaaccaactagaagacttacaagttgagttgaaacaactcaaagaacttcatgatcacctacatgaagaaagatatgatctatggagagagtgttacaaactcatcatgattatgaaaacatggatgcaagtaaacatgatctatggattgaatgggagaattacaagaaaactatgaaattcttgaatgataagcttgaacagaatgaggctctcaaagggcatcctcaagatgttgttaaacttcatta

SEQ ID NO: 148939 - DNA, 472 bp, Glycine max
  unsure (1)..(472): unsure at all n locations
cgcttgtggggcttctatggaggctagatctttgagctttattgangtcctttaatggngattntccaccatggagatgcagcggaagacaaaggagaagaggtgagaggaggcgccatccactanggaataagccatggaagaaggagcttcaccaccaagatgagccttggataataagcttggagagggtgcttcaatggaggaaaagaaagagggagagaaagagagaggggggagcacgaaattgaacgaaaaaaagggagagaagttgaactttgagttgtgtctcacaagactctcattcatcaaagttacaataagtgttacacatgcttctatttatagactangtagcttccttgagaagctttcttgagaagcttctttgagaaaacttncttgagaagctagagcttagctacacaccccctattatagctaagctcacccccatgacaganaaaacatg

SEQ ID NO: 148940 - DNA, 459 bp, Glycine max
  unsure (1)..(459): unsure at all n locations
agctntatatgcttacaaataatttagcacatagtggcatgaactttacgctattgatttggttggtccatgtacatacgggcagctagcttgagccccatttggtcaagagctgggttaggttctttctaatgttcacgaagcctatatttttaggattgcctcttgacatatcccttactaagtattttactatttttgtcaacgtattgatacaatttttttataggtttaattatattttttacttctaaagttttacaatattataaattttgtttccaatttttttttcacaaattttgccctacattttatcaaacattatgaatttttcctcctcctanaaaatttgacataattaatgaaaaaatcatcacaaaattgtcttaattgtggtgatttaaaggaaaaatcaccgcaaaatatcttaattgcggttatttntctacatggagc

SEQ ID NO: 148941 - DNA, 463 bp, Glycine max
  unsure (1)..(463): unsure at all n locations
tctcactaactaaggaccacttgtagttgaccttgaatctttcatagaatagctatgcttatcattgggtactatattgtattgaatgtccaagttgtgaaggctntgagtgaccccaattgtactaccatggccacacacactttcaataccccaggatcaaattaattcattccacaaaatgttaccatgcatactatcatcatggatttatataggaatcgaattaccggtttttcgatggcagcaacattatggagaaatgaacaatggctaaaaagaacgatattgttgggtgggaaagacttttttgaccttccacatttcataaaaccctagccctttaacatggattggaagcaagttttcgagtcgcgatgtgaacctggaggcaaccttctcactaactgaggaccacttatagttgacctttgcatgattatagaatagctcctatagaatc

SEQ ID NO: 148942 - DNA, 401 bp, Glycine max
  unsure (1)..(401): unsure at all n locations
ttcccctgcctgttttgcctagatgactanaacccaaatctataaagttattaactctatatctttcctcctttttcatttgaatacttttcaagagctaaaaagagagagagcaaaagcatcccttgctatcaagtcacttcgacaaaagatggaagacaaactgaagatagaactagaacaaaaggtgcacatttagtttttntgttggttttacacgtactgttttcccactttctcaacatgtatgctgtcaatgttattagttactatatagtatctgttaaataaaatgtatcgttggtaatggcagganattgaaactgatttgaagttgaaacaaacttacgaattagcaaaggaatacttaaatgcagccatagcaaatgagaatgcagctc

SEQ ID NO: 148943 - DNA, 471 bp, Glycine max
  unsure (1)..(471): unsure at all n locations
ttagtcaagtggctttcaaaacaataatggctttaattatatccacatttattcatttcattctaaaattcagagattgatacaaaaatcattgctctatgctagtcgttctcttaacaattaagttcacactctcaccgggttatggttcaagcttttctttctcaatcaatctgtccactgactaacatttctaattgtgatcctaatttcttgttctttctcatctacatacatgctcattcaaaactcatgatttcaacacatgcttcaccccttcatgcaatcaattcacaacacccatttcaaaaataaaaataataatatgtttgcactgcatactcagataatcaagtcaaactgttcagtatgctttaagacatgcatactgctatccacaatcaaaagtaaccaatatcacaacaaaaagtgtactanagacantangtatataattataaaatattataa

SEQ ID NO: 148944 - DNA, 133 bp, Glycine max
ggggaatttttctgatactaggatgcctaaaattgcgctcataatttaatttactttctctatgaatttatataaatattttttttttaattcctaaaccacgagacataattaaaattggtttttttttttt

SEQ ID NO: 148945 - DNA, 370 bp, Glycine max
  unsure (1)..(370): unsure at all n locations
tttattctacaacattntatcctatctagactttatcttatctagatattctttagagctgatctcatctatatattatttcatccagatcttatcttatcttatcttatctagatttgactctattttatttatgggcttggatttaaaacagatttgtaagctttggggctggaaaactatatcactacgccgaggttctagtttaggccctttctctcttctcttttctctccctcttctgtctctcctattntcgctcttagttctaggcttttcttagacactttttcattttgcaataccagctttgaattttcgctttagcaataaaatttcgctcttcaatctatcatttcgttctctattg

SEQ ID NO: 148946 - DNA, 383 bp, Glycine max
  unsure (1)..(383): unsure at all n locations
tgtgctnnttacgaaaagttcatcttgtctatttgaagtatggaaganaccatcttgcanaaaaaaatggggcaaaagatggatcgggttacatcgctgcttcgtctactgccaaacacatttaggactgttaatgtccttgttacttccagtttcaccttgacaaagatgtcatggaccatgttgaaaatctaaattgattcaaccccatatcctgcgtaaagattcgcaatacttcaactgtgcatcattcgcatacatccatgttgttcattggattctttccttgaaatagaacttaatcattgttataaaaaagaaaagaacacgctttatggggcctttaccaaacccgtgctagaactagagtaatgggtgaagta

SEQ ID NO: 148947 - DNA, 385 bp, Glycine max
  unsure (1)..(385): unsure at all n locations
taattagtgtggaacttaccgaattgtagaaacaagtgcatcttcaagtgagaacagtttgaccattgaagattgatggatgatattttgtttgctatttggtcttggactaaggggtattcacctttnttttctccctcttatattctatggatagctaacccgactacatgcttattggacctgaataatgctatggttcaacatatacatttgaatgtttttgttacaacttatggtatgtacgacactttgtatggtggggttatcttttgtgttggaaagtttaaaactcatttatgagtttgcgatattgtatacttcatgatccgtacagatgatatgagtccgatagatatcatatgggttgggaccttatatcctc

SEQ ID NO: 148948 - DNA, 395 bp, Glycine max
  unsure (1)..(395): unsure at all n locations
gaaaatagtgaggaaacaagaagaaaaggaagattaaaagtctcttaccaaagctttgagggaagaagtctcaagaccacttgtatgaagcttgcaagaagaagaagaaacagactcctctcctcttgaagaacttgtgcataacaattgagaatgaaggttccaagttcgattttaggagaaataaggagataaggcttaaggttagttgacaagatcaaattgacaacatgaatgaccatttgatagccagggtggacttgccaaatgctgccatatatgcatatnttgccttttgaatntttaatcagaaatggctaaagtagacttaagccaaaatggtaaaaattactttggctganattgtaaaacttatcctaatcttctagattagt

SEQ ID NO: 148949 - DNA, 251 bp, Glycine max
  unsure (1)..(251): unsure at all n locations
cgagagctttcgttgttcaacttcgagcgtctcgatatatcatgcaccataatcggacttccgggagacaagttatgaccatntgactgtgtcgagagcatccgttgttcaaattcgagtgcctggatatattatgcgcctgaatcagacctccgtgtgacaagttatgaccatttgaatttctcgagagctcccggtggtcaatgcagagcgtctcgatatgtgatgcgcctgaattggacttctgtggg

SEQ ID NO: 148950 - DNA, 447 bp, Glycine max
  unsure (1)..(447): unsure at all n locations
agcttaaaggaagtgaaagaattagtatggtcttaaatgtctccgcattgattgttaaatttgttcccgaaatccctgaaaaatgtaaagatccaggtacattcaacataccttgtattatagggaacagtaagtttgacaatgccatgctagatttaggagcttctgttagtgttatgcctctgtctattttttaattctctatctcttggtcccttgcagccaactgatgtggtaattcatttagctaataaaagtgttgcctatcctgctggtttcatagaggatgtcttagttagagttggtgaactgattttccctattgatttttatattttgaatatggaggagggattttctaaaggatcagtccncaccattctatgtagaccttttatganaactgctagaactaagatagatgtatatgcacgcacactatctatg

SEQ ID NO: 148951 - DNA, 462 bp, Glycine max
ttcgtaggtgaaatcaggtgcagccatttcccttatagttctttcacggggtggaggttgtgccatgttctcagaatggtcaaaatcaaaatgttcaaaacaataatgctcaaaatcaccaataacagaatgctcaagatgctcaaaaggtactaaatgatgtctaactaatctatgaaatgtcctatctatcttaggatcaaagggttgtaagttagatggattgcctctagtcatacactatattcagcatgcacaactagttgcctccttatgcaagtaacagtgtaagtttgaactacaactaccctcaaacgatatccaaatgacttataatttcgtgagcaacgttataaaatgatgagaagatatctacaaatatttcaaacaaaaattcaaagtctaactatggatagctaaaatgatatgttaaaaaaatagagaattattcttgcgaaataa

SEQ ID NO: 148952 - DNA, 439 bp, Glycine max
  unsure (1)..(439): unsure at all n locations
agcttttgaaaaagacaacatgaattagatcttcttgtataaggccaggagttcgaaagggctactntatttgtcgtcatattcttcactaatcttggattattactatgtcttatatgtcacacacacgttaatttaaagaatagcagagtctttgaaccttactaaagagaaattaggtgctatggggacttctaattattctcatcaaattccacccgaacagttctacttagtacttatacaatcgcattttagatttataccacctttatatatgtacatatattgttaggcgcttctactctactgactatattgagctaaaggtaattctcttcttgctgaattttattcatatcacgtatttataataagtaaaagataaagatatgagcaaaacccacaggtgggccagcttctgaaacaaaccaaaagt

SEQ ID NO: 148953 - DNA, 447 bp, Glycine max
aactacggctactaactcaagagcgtgtgttggataatacctttcatgtatcttaagctgtcgagaagcataagccactacctgtccccgttgcataagcactccacccaaacccatcttggacgcatcacaatacaccacacaagattcactcgggttaggtaacactaaaactagtgcagtggttaacctttccttaatggtacagaaactactctcacattgggcatcccacacaaaaacttgacccttacgagtaagcttagtcaaaggtaaggctagcttagaaaaaccctctatgaatctacggtagtatcctgctaaactcaaaaagctcctaatctcaaacactgacttaggactgtcccaactcatcaccgcctctaccttggaaggatctactgctatccctcccttagatataacgtgccctaagaagctcacctt

SEQ ID NO: 148954 - DNA, 323 bp, Glycine max
  unsure (1)..(323): unsure at all n locations
attcgntgaccacagagtggtacctgtagatatgtctcgggggccacgagaccttggggacgtcaggtggggtgctattgcccataaccaagcttgaccaatcccgacccaacccgggcatagtcaagcaatgagaacctgtgatgtacctaaacaggcgagctcctggtggtcaacagataaaatgaacaaagaccacaaagcaaggaggcttgtgtggtggctggccaactgtgaatcttgtgtgatatatggcgtatggcctctggtaatcgattaccaatggtgggtaatcgattacaaggcttaaaaatgaagacagg

SEQ ID NO: 148955 - DNA, 478 bp, Glycine max
ccatgaaactcagctcttaatgctgacaactgcagagattttggaagtttttttattttaacatcgcaggtaatggaaagcttaagaactgccaaagatgttgggggaaactcaaatttggttctgaaacttaactttgtgttgattgtcaacttttgaacattgtgcatagaagcatatttcatgaccctatttaggagtttgggctcaaccaaaccatggcgcttgaaatcaagactaagaagggaaatcgagtcatctcgactgaacagaacccaagatacaaattttctaaatttgttcagcttactaaagtgtgaagaattgaatgcaaaattagtgagacgtttccaaaggtctttctcctctttactatctcttcctcttcatcttcatcaccaacttcccctctcttccttttcctacctatatatagcccaaaatagtctctaaatatttcatctatagatattatcga

SEQ ID NO: 148956 - DNA, 447 bp, Glycine max
attaatttttattttctaaggtagccctaaaaatttgtgaagatgaaaaaatccaaatacaattagccaaagaaaaagctcaaacgaaaagggacttaggttctttctgcgaacaatttggcctactagcttgtccaaaacaaaagagaaaacaaacccctaggaaagaaatccatgagaataaaccagtccacaaaaagagatttccaagaagaaaatactcggacaaaccttcaacaagtaaagaaatagaaaacccccgaaaaaaattaaaataaaaaataacgtgttacaattgtggaaaacaaggccgcattagcaaatattgtaggttaaaaaagaaattaagaaatcttaacctacaacccgctattgaagagcaaataaataatctactcatagaaactttagaggaagaaacagagacttcatccttcatgctctctg

SEQ ID NO: 148957 - DNA, 141 bp, Glycine max
aaaagagaaaaaaaaaaagagaaaaaaaaaggagaaaagggagaaaacgaaaaaagagaaagaaagaaaggaaaaaggaaaaggaaaaaaagaaaaaggggaggaagaaaaaaaggaaaaaaaggaaggaaaagaaaaaaa

SEQ ID NO: 148958 - DNA, 304 bp, Glycine max
gagacttattttttattttgtggccgcaacctctacgctcacgaagttcccaaagattctcataagaactttctcaaaaagcgtttaaggaaccacctatttataatagatcatgtgttacacttgtttaactttgataagagagtctgtgatacacactacagtcaactccctcccaacacttcttcggcccccccctctcttcttcctctatcttcctcatgaacatactctcaagtcttatcatatacttttggcaaagaatctctcggccaactatggaacccctctttacattaacatg

SEQ ID NO: 148959 - DNA, 310 bp, Glycine max
ctataatatcttgggaaggccatatgaaattagggcgcttatatactccaccatcagtaaaaaagagttttcaatcacatggtattctcagtcaagtgaaagcatatccatataaaaacctatagatagatggtctgaataggatacaaaaccagttctatacaacctagataccaaaaacataattacatctgccctatgaatggatgaatatttcatggtttcacatttgtagagtgctaaagaaatgtgtgacactcttctatttacacatgaacgaactacatatgttaaaagatcttcgataatg

SEQ ID NO: 148960 - DNA, 405 bp, Glycine max
  unsure (1)..(405): unsure at all n locations
ggtatgtgaaatgaaattatggctgagccatgttggttcgctggtttaggaagtgtcaaatgatatttgctagcagttctctagactaggaccactgttaaaccttacaacaacttctagactttgaaaaatcacatgatttaatgccttgtttcttctttttctcttataatttacacattgttttggagctagagcttcatgtatttcaactttgaattagagagagaacaaggaatgaccattacttttagtgcttttcccccctgattggtttttcaatttctcagacattntctacttcactaacttcaacaagctatacaactggaattatgtgctttattacttgaacacttctgataaatggggttaatggacagcctaatgactanggaacaacaa

SEQ ID NO: 148961 - DNA, 466 bp, Glycine max
  unsure (1)..(466): unsure at all n locations
cgcnggattatgggacacccggcatatggggttcttttggtggcaacccggcgaagggcacaaataactcttccactttcagaaattagacatgaacgcaccatacccaattgcccaccttcaactgagctcacatactcctacgtagcccttatccttggtcctctcagcaccgggtccccatcaaccccttcaagcttccaaatatccaagaaattcaatttccaaacatcatgaactaccctaaaccaagaaaacagggcagaggcagaaaactctggccaagacacattcacatattacaactttccttactcaaatactccagtaacattctcttcgttccgattcgttaaccgttggatcgacttgaaaatattactggaggttcctagtacataaagatacccttttgaccgccgcgatctgctagaaaatgtccaaaacccaatatgtactacctttc

SEQ ID NO: 148962 - DNA, 443 bp, Glycine max
  unsure (1)..(443): unsure at all n locations
tgttgaaattgccatgtttggatgagttggacattcttattctgttttanggtttttgtgatgatgtttgtgatgtttatatgctgaaattacttatggaaaactgttagagatgaaaggtagagttaacctacggttagaaagtgagaatgtgatgttatgagtggaaaaagagtgaggctttgagagttggaaggttaagtctgaattctgtggtaaatggaggttaaagtgagttaatcctagcttgaaatgtcatttaagacttataagaaagcttggactatgctagagagaaaaacaaatgaccaaagtgaacaaagagccatttctagggcaaatttgggtgttgaagagtcaaattctgattcggtgagattttaggtgtaaatccagtctgaacaagtctaaataaatgttatggactggtgtgaggtgagagt

SEQ ID NO: 148963 - DNA, 340 bp, Glycine max
aaatagataacgaaaactctatatgaggattatataaaataaataccctaggctttcttggggcataaattacgaatattgcatggtaaactgactctacaacacttccaaatgtgctaatggttatgagaatgacggcagcttcccttatgacgaatgcatacaataatcaaagcattgctctgtacagcgcaacaacataaggaagtgactggaacccttcagagtattttctttgatatttagcaaaaggttggccttcacacgcatatatttataattcatgaaattagccttcttaaggaaaggactggaacctttgagtggattttttacacag

SEQ ID NO: 148964 - DNA, 352 bp, Glycine max
aaattggatgattctactaagacgactgagaaaactggggcaaataaagagggtgaggatgagggagaaacccatgctgtgactaccattcctgttcggccaagtttcccacctacccaacaatatctttactcagccaataacaaactttcttcttactcaccacccagttatccacaaaggtcatccctaaatctaccacaaagtctgtctaccgcacttccaatgacgaacaccacctttatcacaaaccaaaaaacacctaccaagaagtgaattttgcagcgagaaagcctgtagaattcaccccaattccagtgtcctatgcttgactgctcccatatctacttga

SEQ ID NO: 148965 - DNA, 375 bp, Glycine max
aattttctggagggcccaagagggcctggatgatatttgcacccccatttttgctaagtacaccccctgcctttttttggtgattcttttttcgtaaagttaccgaaacttaccaatttcgtaacgatacttgttttctttccgcaatgttacggaaccttgcgtattacataatcatccactttttgacttacagaatgttacggaacctcactaattgtgcaacgatgcttccatttgatttccggtgtgtcacggaaccttacagattgtgcatcaatattttcttttgttttccggcatgtctccgaatttacaaattgcctaatgatgggggccgagcaccacacaaggaccacacaaagttgcatgtca

SEQ ID NO: 148966 - DNA, 380 bp, Glycine max
  unsure (1)..(380): unsure at all n locations
tgggtctgaaaaaaggccaatttgatcatcctactacgacgactgaaaaaactggggcaaatgaaaagggtgagaaagagggagaaacccatgctgtgactgccattcctatacgggcaagtntcccaccaacccaacaatgtcattactcagccaataacaaaccttctccttacccaccacccagttatccacaaatgccatccctaaatcaaccacaaagactgtctaccgcacttccaatgacgaagaccacctgtagcacaaaccatataaaaaaaaaaaaaacactctcttaaaggaattttgcagcaaaaagcctgtaaggttcaccccaaatttcgatgtcatatgctaaacttgatcccatatctacttga

SEQ ID NO: 148967 - DNA, 400 bp, Glycine max
  unsure (1)..(400): unsure at all n locations
tgaaaagccgatcggaaggaaattctgttctgaaacccacactcagtctctctctctaaaaaataaacactctctttctctctctagaaaatagagagaagtgaaatgagtgtgttgtttaaagagtgtcttattggaatggtgaaattaccagtgccacgctccctggtggacgcggttactactctaccatgacatgctgcccatgtntgatgttgtctaataatggagtgcttattatgttatatgtacctgtgcattcttgtctttgtccccgtgttacaacaggtcaattatttgtcaaattagcatgtgttcttgcataaatagcaagtacgatccttcccgtgtgtgttgtctggtgaaataaatactggattagtgacaaagacttccgatg

SEQ ID NO: 148968 - DNA, 397 bp, Glycine max
  unsure (1)..(397): unsure at all n locations
agctntaacctcatcgtccctacagtctttatattggtagccaatccaatccttgtgttcggactctcagccacttatgatagccgccgatgatcccattactgcttcccctaagctctctgtcctttcttcacgccgcatcccatgccttgcgaactccttggagtaccctcgcgttgtggtcactaaaaccccgtgcgatgaaaggcgtgatgctttcgtctaatggcgctcctctcatggggtagccaagctgtcttatggtgagaacgggattataattaatacaaccccttgttcccatcaagggaacatttggaaatgcttcgcatgaagatagaatcctgattcttccttccttctagcgagggaaccaattaacagacgccctcccatg

SEQ ID NO: 148969 - DNA, 463 bp, Glycine max
catgcgcatatttccttacgaacgttcacttgcacatgattttctattaactaagaaaaatgcacccatatacaatcaaggcaacttcgttacctagattatttacatgtacttccaaggtgtatttgttacttacatcacacacatttcttttgctaaattcacatacatgcatactctaagcactttggctatcgaaaattgcatacgtgcacatcctggtatttctaatacctatacatacacaaactttatgataaaccttgactatctactcaataaggtgttacatttcatgcttcttttttcaagttctttttttttactacctaaagccgcatgcaaactcaagtatattttcttttgctcactaaaattgtattcaaaaaaaggtatctttgtaatgtatttcatgcaacatatttatagatttgtgtgagacattttgatactcaaaatccta

SEQ ID NO: 148970 - DNA, 360 bp, Glycine max
gccatagcaagacatggaattcatggattgtatacgttgcatactatagctgtaggtagcaatcatttggtgaatggaaagaacaccatctatttgacacagtcaaaaggcataagtcctttcatgggagttatgtatgactatgtccgcttagaaagacctccaattaaaagtacttgactgtgccgagaacttgtagaggaggaagatatataaataataagcgtgactctgtgcataagtattctctcatcgtgcaatttgcatacaagcaagcattgcagaatttttgctacaaagtagaaattatgatgaaagtattaagccagtataaaaatattttttattggtttattctaa

SEQ ID NO: 148971 - DNA, 262 bp, Glycine max
gtagtttgattactaatgtcatgaattaactagatccatacacacacagtattggaaatgatgtgatgacacataggctggtcatttagagatcgtaaatataaaggtgattattccaggctgaataaatgcggccaatggtcgaaccttcatatattgattcgcctattgtttacagacggagagaggaaagaatttggttgtgttgccaagatacactgattcataataggttcttacgggactgctgcatagaaaaatc

SEQ ID NO: 148972 - DNA, 445 bp, Glycine max
  unsure (1)..(445): unsure at all n locations
gacttgagttatcaagagatatatttatgtggtcatgacatgaattncaagaatcaattatctgtctntcaatcttttctcatcatcattcaatatctntcaactctttctacacaattttctgattcatttctcttcatctttctaaaagtttttgttcaacactttctcttccgagaaaagttctttgttcaaaaacttgtgctattcatctttttcattctcttcttcctttgccaaaagaacgaaggactaactgcctgaattcttttgtgtctctcttctcccttacaaaagattcaaaggactaacagcctgagaattcttttgattattcccttccccttaagcaaaagatttcaaaggactaaccacctgagatagtctttgtttcctcttacaaagattcaaaggactaaccgcctgagaatctttatcccccaca

SEQ ID NO: 148973 - DNA, 458 bp, Glycine max
ggccaagacaacgcacacgtcctctttattcaggttcttttacttttgaatatatatcattggtccaatcagtagaatcttgcgtgctttgtaaatattgcgaactctctgcttcaaccattttcttttttagttcatcctacataaatacaccttataaattattatcatacatcaatatcctgaatacttcaatatcactaaacaaaactcatctccacattagttactccccctcaccccataaccttctattagaaaattgagcaaaacaaagaaaaagtattgaaataaaaattaaaattcttacaattacaatagcagccttttcagtaacaatgcttccatcttttcgagttcgagtgtcaatataaatttctgccctagaaggttgcactcccttagcctttgtagtctaacattagttaaaaagatcaatcatcctatttgtattaagc

SEQ ID NO: 148974 - DNA, 383 bp, Glycine max
  unsure (1)..(383): unsure at all n locations
aaatacaatacgactgagagcttttntttgctctttatanataggngaaaagatatatttaacgtctcaacttttatcaacgtattggttctttgattcgtttacatgcggagttaagtatggataatgtttctttcttcttttcaactttttcccttttgcatgcacccttcattctatgatacagattcgaattaacatatgatcatcaagcttgatggggaaagtcattaataataataatactaataataatgaatctcataaaaagaaaatgatatggctctatgttattaaatgcatattccgaatcaccaaaaaaagaacttcaaaaatgatgatggagtcctggatacgataccaagaggagtatatatcatgtg

SEQ ID NO: 148975 - DNA, 359 bp, Glycine max
cttgtattttgcaattccaagatacaagtgatatttttttataagtgacattcccacttgtgcttttcctatctagcttatatcttgcgaagtcagaatttgaaaagccaattagactcaagaagatacccttgggatatcacaaaccaacattggttgtgcccctaaggtacttaataatccttttgacaacaattaaatgtgattccttgggattttcttgatacctcgcacaatagcaaacactaagcatattatcgggtggacttgtagtcaaataaaggagtgaaccaatcatacctctgtactttggctcatctaacaagttaccttttcgtccaaaggagataaatggatgc

SEQ ID NO: 148976 - DNA, 311 bp, Glycine max
  unsure (1)..(311): unsure at all n locations
aaactaagctngctttacacatggggtttattagaattttttttatttccctgtgntaatgaattaaagaatgcaggtaggtgatgttgtgagcttgcacttcaggacgtgcaatgctcgtccagaattatggtactgagttgcttgaataatcctcaacggtgatcctctagggttgcacgtctgacatgatagcggcttctcgcaattgagtaacagattcccttaatgatggtggatcacgtgataatgagtcagaaaaatgagtttctttcgcaagaatggatgcaactgctatgtcttgcagaagt

SEQ ID NO: 148977 - DNA, 371 bp, Glycine max
  unsure (1)..(371): unsure at all n locations
gatcttaagtcacctgccgcatgcaagcttntaatatctaagagggatgggtcttattatactcatgtaacaaatatgcatgtatgcagtgtggtgctaaaatatcaccacccagctgcataatttcatcctcatttgtagccttagtacctctggtacttttcaatatatataatattatacttttgtggattagttgaccattgattaaagtgcactccaaaatctttctctgtagtcttaagccatgtccagattagaagtattgcatcctccgacagcttgcttccattgaatgtctgattngaaaagactatcctgtttctatgctgccagatagtccatgttaatgcaacccacccacactttca

SEQ ID NO: 148978 - DNA, 364 bp, Glycine max
gctgcccttatctcactctgatgcatttgtttattcctcccatcattcctgtctctttgcaagtgcccccacaccttccaatacctatgcacctttacctgcaaagggagatatataaagttggtctagtggtgaaggaagaagttaatgggagagaattctcaagttcgaatcctcttgctctcgaaaactaaaaatactaacacctaaaagttgccgatataaaaaaataaaaataagaactttacctgctcaagaaccacaaacactaacgaggtgctaagggacaccatggagggaagccaccacttgtgacaaacacttatgtgggctttgtgctgggctatggcccaatacgtgaaaa

SEQ ID NO: 148979 - DNA, 448 bp, Glycine max
  unsure (1)..(448): unsure at all n locations
agctttcaacanaattcttcacaaatatcttttctttgcataaacctagtagaactacccatcatatctcccaaaacccaatacccacgaaaatcatgtgagaaagaagtctacccaaacctgaaatttgaagtcccacaacgtagggatgcgcttcacgactccgaaaatggcttccttttgcgatttagagcagaaatggtgagcaaagtttggagctttgatggagacttcaatggtgaggaagaagaaaggaatagcaacgtgagagagagagggagaaaagcttctgaactttttggctgagtgaggagagagaacatggctctttagtttaaaaaggcttcctctnttcttttttcttcttttttaaaaaaggcatgccacatgtcttcttttgagtggagcaaaaaggggtccactttttctcttgatgtgactcatactc

SEQ ID NO: 148980 - DNA, 467 bp, Glycine max
  unsure (1)..(467): unsure at all n locations
tagtgattcgaagtagatacaacacagagattacttttatgcttgaaggagaagttttgggagagagagagcatgggaagagaaattcttgcgaatgggagtgtaattgatgttacccccactaagcaagtttcgactttctcgctaagcggcaaggttcgctaagcgggcgagcgagacatttggtttttcaaggcctatcgcttagcgaagcctcgtgcttagccaaacttcaaattcaattttttttagagatttacagttaggcttagcgtgtggatcggaccacttagcgagatctgtagatcagaaaacctgcaactctcgctaagctgggctttgggctcgcttagctaaaatcatgcattttgagtgcagaggagtaggcgctgagcggacaatanaatcgctcagtgctaagactaccgcaagcatttgagcttagctgctgtcgcaacctacccttt

SEQ ID NO: 148981 - DNA, 452 bp, Glycine max
  unsure (1)..(452): unsure at all n locations
ngtaatcgattaaaccaatatgagacataactctttttcttaaaacaacttgtgtaatcaattactgtaaggttatgattgattaaaacagaaagttttgccttctgaataaattttctaactttagaaattttctccttactcacacatgatgatgcatgatgcacaaatgatatgatatagactaagatacaacatacaatataacaatcaatacaaatgccactcaagagagttgggcatgtaaaagatagcacttcttcaagctcttcttcaagattcaaggctaagtcttcatgctgctcattttgctccccctgtctctaacaagtgattttgtcaaaccattataactgtgcactccgaccagaagatgactagtgaatcctatatggcaagccttaggttatgtcctcatgaaagggaggaagccccataagccatccactatg

SEQ ID NO: 148982 - DNA, 448 bp, Glycine max
  unsure (1)..(448): unsure at all n locations
gaagtgaatctgattaaaagccttatttccttctactgngtatggggaaattgagaaaagggtagcataacttgagttcaaaaagtctggaaaggatctcagagcccttaaacagattcttgaagcaatgcacagacataagtattcagtagacattgctagaggtcaggctttaaattctccatctaacaataggaataatactaatctcaacgaaagctcaaaaatacaaagcccactagtgagacaaaaagacacatcatctgtaacggctgagatgtcaaattcaacccatggtagtaaattgccaattgtcatcatgaaaccagcaaaagttactaggaaacccaataatctgtcgtttacagaatcggcaaattcatggtcacaggaaatgtttctcctagaaatcgcaacaaatggaagattggttgacaagcnaactgct

SEQ ID NO: 148983 - DNA, 413 bp, Glycine max
  unsure (1)..(413): unsure at all n locations
tgcttggggggcttctatggaggctggatctttgtgctttaatgaggtcctttaatggtgattttccaccatggagatgcagcggaagacaaatgaaaagaggtgagaggaggtgccatccactagggaataagccatggaagaaggagcttcaccaccaagatgagccttggataagaagcttggaaggatgcttcaatggaggaaaagaaagagggagagaaagagagaggggggagcacgaaattgaaggaataaaagagggatagaagtggaactttgaagtatgtctcacaagactctcattcatcaaagttacaacaagtgttacacatgcttctatntatagactaggtagcttccttgagaagctttcttgagaaaacttccttgagaagcttctttgagaaaac

SEQ ID NO: 148984 - DNA, 366 bp, Glycine max
  unsure (1)..(366): unsure at all n locations
aacaccttgaggagagtgatgcctttatgaaatactttaccaagttgctgatgaactgaaaagatcgccacattgtanagatctatattcatgaggaggatatgagtaggtgaatttatgtggccaaacacgacttatgatttccacatgcagagacttgacgaatagggggcacatatcatgcggtcctaactgctacgattaaagccactgtttaagagacctttggacgggattaatggtttctataagagctcgatatcctgaaagaccaataaatgatagtgcctggatagtgtctgctcacgagacatgatagaagagaagtgattatctaatgcctaacccttatgcatgtttgaactg

SEQ ID NO: 148985 - DNA, 437 bp, Glycine max
  unsure (1)..(437): unsure at all n locations
ttgtacattatcaaaaannaaaaaattttattnggttttgaacttngcatttgaatttacctcagcttgttgttgcctcaggcgctcggcgcgccaaacagggtcccaccacctctgctcgccgcgtccaccgcgtcctccgctgccaccgccacgtncaccaccgncaccacggcggctgccgccgcgagcggcggaagaggaggctccactgccgccgccgcctcggtagttggggcggtaggccatgacggaggaggagatccgaaggtgagtgggggaaagctcgggtgcgggcgggtgtatgaaggtgagagggagatgagtatgggagtagtagaaagtagggcggtagagacagcgaggcatntatataggggggacgctggggaagtggaagtacatacgcgaacaacgtgtttgtgcaacacttgaaa

SEQ ID NO: 148986 - DNA, 225 bp, Glycine max
tgaagcattattgaaggctggaatgtttggaagtgaaccctgtaattggttgtacgatatatcaactgatatcaagcttaccatctcttcaaggctagagagatcccctgaaagattattatgagagagattcaatgtttctaagcttttcaactctcgaagcaatggtgctattgctccactcagaaagtccttgctaagatcaagacttctaagatattctac

SEQ ID NO: 148987 - DNA, 303 bp, Glycine max
gatgctcttatatactacaataccctgtgccctgctgcaaataaaggagcacttattaaagtgctgcatcacacatcgggaggaaagattatggtcactttgattctttcacacactctttacataacatgcaacaatataatgtatgactggactacataaaacatgcggtactagatgcttcacttaatgccactgcataagacataattggtaggattagagggaagctactagagtccaagattctcaattactatcaagtgacaaggcaatgtcatgctcaagttctacgatcttgca

SEQ ID NO: 148988 - DNA, 327 bp, Glycine max
attccccagatggggtcctgttggaactaattctgacatggtgttctttcttacgttatatgcatgcattactcatgcaaaccgccattgccaataacgatttggctgcagcacgacatgtgtctgggcaaaccgccaacactgtgggcgacttcatgtggaagggcatcttgccacttgcactggcgagttcatcactgctgctgaaaccgcaggtttgactggcgagtctcagatatggcatgcctatggtgcaggacgtgcacgtgcaagttgctttttgacttcctgggcttagggggagctgccacttgctctggcaactta

SEQ ID NO: 148989 - DNA, 287 bp, Glycine max
tatcaagcatacgcatgacatgtcttatgccatatccggcaaaaaaaaaataattagagaaattgaaaaacaatgtcagcgtccaattctagaaccacaccaacctggtcaagagagcgcctctgaaatcctaatggtaggattaaagtgacaaacactatgaaatgccaacaaccaaattatgaccgccttacataaattttttgctacgaaatcaaagacagagattgatccatgcagagccatcaaattgtgattacttcacataaaaatcctatgcaaataag

SEQ ID NO: 148990 - DNA, 463 bp, Glycine max
  unsure (1)..(463): unsure at all n locations
aagtcacctgcggcatgcaagcttntattcatggcttcctatggtggctgactngttttaactcatcttctccttaaagaggcgtctccaatcaccttttctccttctccattccactgccattgatcttcaagaagcaaaggaatccattgatgaagaagatctaaggcctacaagctctacattgagctacatcatgtcctccatatattgaactttgtgagtgtgtgttaaattccagtggatgatatatcattggatgacatatagagattaagtcaaccattaatagagatcattctaacttgactttttaacaaaatcaattgttcttcagttaatggttttgtaagaacattagcaagttgatcattagtgggtacaaattataagtccactgtctcactttgaacattctcttttataaaatgatgttaacttctatatgctttgctctggaatg

SEQ ID NO: 148991 - DNA, 363 bp, Glycine max
acaccccatgtctactcgtcactaatttagctagctctcttgccaattcaaaaaataaaaactaatcaaggagacctgacaattagttccccacacaaaattttgtaacatggcgataaaacaatacaaattgattacggaaatttcctgtcggatctcaaaaagaaaggcgggactcgtacaaataaaaatcattcaataaacatataatagaacatacaaggaaaagatacaaaaaagaataaacaattaggaattgcatgcaaattacaactttcagaaaatgctgtgattgcacatagcaaataactaagaccatgctcgacgatggaatgataagaaaaggcggaattaccttccata

SEQ ID NO: 148992 - DNA, 471 bp, Glycine max
  unsure (1)..(471): unsure at all n locations
tgtgatatcttggcccaatctttcagttaaaatactccttttattattgnnnctaccttctagtatatttcttgttggtagtgtattgtaatctgaattctcagcttcacaatgactaaacttttttcttgtattgacagagcaatgaggatattaaccacacgcttgtctgtgccaagcttgaactgatagcagcaaaaatggaagccaatgctaagataaagaaatatgaggagacagttaaacacttgtataaacttttaaagaaagtttgccaggaaagagatgaagcaagagaccagcttcaattgataaggaatttccaagcatctactccagctgagacaagcagtactgttccacaagttgatcatcatgcatgcctccaatacaaaacaaagccatcattgaatagcaccaaggtatcatattcaagttccaaagtattctcacatcattcatgtgatttat

SEQ ID NO: 148993 - DNA, 364 bp, Glycine max
agcttgtagcatattcgaacaacaataacttttcactcggaagtctgattgagtcctgtaatatatcgtgacgctcgaattttaaaaccgaagctcgtagcaaattcgaacgacaataacatttcactcggaagtcctattgagtcccgtaatatatcgagacgctcgaattttaaaaccgaagctcgtagcaaattcgaacgacaataacatttcactcggaagtcctattgagtcccgtaatatatcgtgacgctcgaaatttgaaaccgaagctcgtagcaaattcgaacgacaataacatttcactcggaagtctgattgagtcccgtaatatatcgtgacgctcgaattttaaaaccga

SEQ ID NO: 148994 - DNA, 262 bp, Glycine max
  unsure (1)..(262): unsure at all n locations
tttcgagcgtgacgatatattacgggacttaataagacttccgagtgaaatgttattgtcgctcgaatntgctacgagcttctgttttaaaattccagcgtctcgatatattacgggactcaataggacttgcgagtgaaatgttattgtcgttcgaatttgctacgaacttcggttttagaattcgagcgtcacgatatattacaggactcaatcagacttccgagtgaaaagtgattgttgttcgaatttgctacaagct

SEQ ID NO: 148995 - DNA, 394 bp, Glycine max
  unsure (1)..(394): unsure at all n locations
ttccttatgncctagacctcaaggacactcatgattgcaaatttactttttctattatcaattcacatgtaaattccactctttgtaaaaatactcatatttggcattctaggtttggtcatatatcagacaaagttctcaatcatttgaataataaaattggctgacaattctctcctaatttatgttcttctaattattctgtttgtccacttgctaaatttagaagactatcatttcctaactctaacaatttatctgatttacctttagaattactccattgagatatatagggtccctatgcccaccctacatatgaagtgaagacattcttccttacattggtagatgagtgctcaacatcactcggtatttctgctaaacacaatat

SEQ ID NO: 148996 - DNA, 361 bp, Glycine max
ccacaaccctatctccaattttgaaaatcaccttcatcctatgactttcagaaagaagctttatgtcgtcctgagttttcatgagcttttactttatgctaatgaacacaacatccttactgaccaagaagatatcaactgcttcaatcttcgatgtgcctgtaatgtaattcggaaagttaagaagttttctgccaaaggtgatctcctattaaaaaacacctctgcttcagtgactggatgcggtataagatcattcagcccacatcacccgttttgcctcactaagatggtccactatgcacatatgcacacacaaattgctcaatcccacaattcaacacctttgtctgggcatttg

SEQ ID NO: 148997 - DNA, 461 bp, Glycine max
  unsure (1)..(461): unsure at all n locations
tcaagaaaaagatggcctcagcaaattccttatttttcttaatggaattctatcaatagacctccaatctttaatggagagggttaccactactggaaaactcgaatgcaaatttttattgaggcaatagatctaaatatttgggaagccatagaaatagggccttatatacccaccacagtagaaagagttacaatagatggtagttcatcaagtgaaagcgtaactatagaaaaacctagagatagatggtctgaagaggatagaaaacgagtacaatacaacttaaaagccaaaaacataataacatctgccctgngaatggatgaatatttcagggtttcaaattgtaagagtggaaatgtgggacactcttcgattaacacatgaaggaactacagatgttaaaagaactaggataaatgcactaactcatgagtatgaattatttagaatgaatg

SEQ ID NO: 148998 - DNA, 433 bp, Glycine max
agcttgcctcaaagaggtccaggaaggacatgtctgtatattgaactagctccgctccggagtatgatagtcaccgctctatgagcgcggtacaccagcagcgcttcgaagccgtcaaggggtggtcgtttctccgggagcgacgcgtccagctcagggacgacgagtatactgatttccaggaggaaatatggcgccggcggtgggcaccactggttactcccatggccaagtttgatccagaaatagttcttgagttttatgcccatgcttggccaacagaggagggcgtgcgtgacatgagatcctgggttaggggtcagtggatcccgttcgatgccgacgctatcggccagctcctgggatatcctgtggtgttagaagacggccacgagtgccagtattgccagaggaagaaccggtctgatgggtt

SEQ ID NO: 148999 - DNA, 421 bp, Glycine max
  unsure (1)..(421): unsure at all n locations
attatggggtacccaacacatggggtacatagnttcgttcgggcgatggtgcacaacaagttttccacatacacaaagcgcgcataagcccaccatcccctgttgcccacctccaactgagctcacgtactcccacgtagcccatatactcttttctctcaacaccgggtccccatcaatcctcccaagcttccacaacatccaagcaaaacaacattcaaacagcacaagctatcacagccaagcaaaacagagtaaaggcagaaaactctgcttaaacaccaaccaaaatcacagcttttctcacttaaagaccccagtaacaatttcttcgaaccaattcgttaactgttggatcgactccaaaattttaccggacgtctatagtacataaacctacattgtgaccgttgggatctac

SEQ ID NO: 149000 - DNA, 254 bp, Glycine max
ttttcttacattccatgctacaaatggtgtcatattccacaccgctattgttgggcatctgttcagcaggaacatgcttgtattaatagccttaagctagaaatttattggtattcctttctcagatagcatggacttagctctctccatcatggattgatacttactttcagatacattgtttagctgaggtgtatagccaacagtcagttgcctatcgacacctttcttcttcaaaaatttagtcaaatcat

SEQ ID NO: 149001 - DNA, 196 bp, Glycine max
acaagaagccaaactcacacagaagaagaaggcaacccgaacccacataacctaaaatgtcaacaaccacaaaacatccaagactgaaagccaaaaaaaccacaagataaataagcaaaggacttagcaaaatagtggaaatactaagaaactaaaagccaaaacacacggcgtataaaagacatacaattagaaa

SEQ ID NO: 149002 - DNA, 273 bp, Glycine max
atgaaaatgcagaaggaacccatgttgtgactgccattccttcaatggccaaatttcccaccagcttaacaatgtcattactcaacaaatatcagcacttctcattacccaccaccctatcagccaagaacccccaatcatccacaaaggccacccctaaaccagccacaaagcctacctgccgcatgatcgaacccggcaagtgcattggatcatgcaagtagtataaaacggtgagaatcgagtatcaaactctccgggaacttgggttac

SEQ ID NO: 149003 - DNA, 364 bp, Glycine max
  unsure (1)..(364): unsure at all n locations
gatttgctttccttaactcgtgttacgtttcaaatgaagactttaagctacacgaaattttataagttgggtgataaaatttgaaaaatcttaaaagaattggaaacaaaatttgcaatcatgcttttattattttcttttgttattactggatctgggttgagaaattggggtctttccctttggattgngtccatgatcgaacccagtctgcttattatttcttgctaatttttattttattgccattacccattacttcattttaatgcaatatggtttgtgaatgttatgatgggatgcttgggtcatggaatctgtccaaaatgtgtacttcagatccaaccaccttttttcttttctc

SEQ ID NO: 149004 - DNA, 457 bp, Glycine max
  unsure (1)..(457): unsure at all n locations
gcttaaaaacagttactggccaaaagaattctctatttattattgtcagatgttttcattgagttattggagatttggagccttgaagtatggtggctcttggaattcctcttaaaaggtgaagaaaggccgttttgggccctgtcacgaggattcctgctaaatacatctccctgtttgctaatttaaactccttttttctcattatcactcacacacgcacacgcattctgtcacacattcagaactgcttctcgaacgagtccatggtctccgacatcttctggcgatttcacgatgttacacatcgactntctgatcgtcggcaattgctttatgcactcaattttttacttggtgcaacccgttgaaataacaaagtgccttaatggactgatgccctttgttccggtgaaggcaccttcatngacgctagtgaccccaccttcgccagtgt

SEQ ID NO: 149005 - DNA, 433 bp, Glycine max
  unsure (1)..(433): unsure at all n locations
actcaagctatggagacacatcttggaatctaagagttttcgcttttgttgtttttcgcanagtatacacattaaagtttcatcctgagatgacaaatgtgactcggatgtcaaaatgggagatgatgtagaccacaggtctctaagtttaaatgtctgagcataatgtgacggggaaacttatgagatgttacccacatgatgcgacaggatgactaaaaaggaaaaagatgttcaagattatttgggatcacaaagtacctatcaagttccaagattaagttattgtattgctatacttctgagtatactctgtgatagagaatgttggactctaaagggacaacatgacagaaaggagggagttatgttcatgagaggtatagatggatgcttgaccactaaagataggacatgatgtcgattgattgag

SEQ ID NO: 149006 - DNA, 416 bp, Glycine max
  unsure (1)..(416): unsure at all n locations
atagagatctgtatggtgatctgtangagaacataaaccacagactcttgcaacaagtgtagatttcttattcatggaaagctgagttactaggttgaccaaggtatcaagttttccttcaagctttntattttcagtagatgaagatgaatttgtggccacctcatggactcctctaagaacaataacatcatttcttgcactgaattgttgggagttggaagccatcttctcaatcaaattcctagcctcagcaggggtcatatcaccaagagctccaccattgctagcatcaatcatactcctctccatgttgctaagtccctcataaaaatattgaagaaggagttgctcataaatctggtggtgaggacagcttgcacacaatttcttgaatcttcccagtactcatacaa

SEQ ID NO: 149007 - DNA, 467 bp, Glycine max
  unsure (1)..(467): unsure at all n locations
tgtaggattatggggtacccatcacatgtggtactatgtggcggtccggcgatggtgcacaacaagttgttcacatccacaaagcgcgcataaacccaccatcccctgttgcccacctccatctgagctcacgtactcccacgtagcccatatgctcgtgtctctcaacaccgggtccccatcaatcctctcaagcttccacaacatccaagcaaaacaacattcaaacagcacaatctatcacagccaagaaaacagagcaaaggcagaaaactctgccaaaacaccaaccaaaatcacagcttgtctcacgtaaagaccacagtaacaattccttcgatccaattcgttaaccggtggatcgactccaaaattttactggaagtctatagtgtataagcctgcattttgaccgttgggatatactagcaaacatccaaaactcattttgcactagacntttcaca

SEQ ID NO: 149008 - DNA, 470 bp, Glycine max
  unsure (1)..(470): unsure at all n locations
tcagaccatagcgactcanaatctaggtatccaaaaccctctcaatttaatggattntcaagggttgagaagtgaaaatgagaatggggtaaatttggagcaaactctcacctcacacaagtctataacatcaatctaaacttgctcaaactggttttacgcctaaaattctgccgaatcaaaatttgactcctcaacacccaattttaccctacaaatggctcttgccttcactttggtcatatgtttttctctcttgcacagcccaaactttctcataagttctaaatgacatttcaagctaggattaactccctttaacctccaaataccactaaattcagatttggcctttcaactctcaaagcctcactctttttgcactcataacaccatattctcactttctaaccctacggtaaccctacccttcatctctaacagttttacataagcaattncagtacata

SEQ ID NO: 149009 - DNA, 437 bp, Glycine max
  unsure (1)..(437): unsure at all n locations
agcttaggctaaattagtctaaactttctgttatctctgagtctagtccaacaaaagggatctgaggacgaagcttattttaagttagtctaaacctaggagggctgtctatattgagcctagtctagtaagagggatctgaggatgaagcatggattgattcagtctaactagggatcgaggtttagtaatttaggctacaacatanaacacaaaagcatgaatgattagagaaacatctttatatacatcagctggtctattagaaagacccaacatctttacctactgctatcaatcttacttacttgaatctttactattttaagcctagacttagtttaaatttgttctaaatcatccatcatcaatgtttctttcaacaatgccttatcttttgaattaaccttgtctaagactagttccctgagtttata

SEQ ID NO: 149010 - DNA, 474 bp, Glycine max
actcagcctacaaaagttgattggcttgaaacacacatctatgtttttttacaagaagcttaatgagtttatgagcaactcacgattcaaaagatgtgacatggaccattgctgctatgttaagaaatatactaatagttatgttatccttgacgtgtatgttgatgacatgttgattgcatgatctagtatggcagaaattaacaagttgaagcagcagttggcagacaaatttgaaatgaaggatcttggtccagctaaacaaatccttggtatgagaattcttagaaacagatcagaaggaatcttgaagctatctcaggagaaatatatacacaaattacttgacaggttttaccttggagattctaagaccaggaatacccctctgggatctcatttgaagttgtcaaagaaacaatctttgtagacagatgaagaaaaatgttacatgtcaagagtaccatatgcatc

SEQ ID NO: 149011 - DNA, 374 bp, Glycine max
gaaaatgaactacctcgacaacagttacaggacatgtgacattatttcaaccagtcattgggtaccaccatttttaacagtcaattaccattcttcatggttttgtggtgcaaagctccatataggaacacattatttatttggttcttattgcttaaatgattgaggggagtattcatacttgttttgtccatcgtttgatagtacttgtgctccacttttattctaacttgcatgaggttctgacctaaattccctgacaaagcaactttggtatttatggcctctttgatatccagacctccttcacttttggaagcttttagcatctttcaatggacaagttgggattgatgtcagagtggtcaccaata

SEQ ID NO: 149012 - DNA, 429 bp, Glycine max
  unsure (1)..(429): unsure at all n locations
ctcaagctatgatcactncttgatattgaatttccactcaattgtatctaatctttgatttagaggagcactttcagtttaccaacggagcgccctactacttggattacccttggctaaccggtgtgtttagcagggagcatcactttaggtttatcaagggagtgccctactacatggagcacacttgattatttttcaaaagataattcttcaaccaatgagtgtgccttgctttgttgatagatcaataaatgcacccactttcatgggaaaaagagagtaaatctagcaatagagcagtcctatgtttcttataattaggaacaagacaaagttgcattttgtttcttatatataggactggaggtagtatattacaggaatctgaaacatatttaagcttgtgatatttcatgtgatgctatg

SEQ ID NO: 149013 - DNA, 407 bp, Glycine max
gtgagatcctagacgtgaacgagacatcctcaccacttgtatcttttcaatctttcatcttgttcttctctttggtgcaaaggaggcttcctagttatggaaagctaaaatcctctgttggatcttctttgtaggtacttgatgtaaatatcttttcatctatctaatgatgttttgtgtgtcctctgtgctatcagcttttcattctagtatgcctttaccttgatcatgtagatgcatgctttggtatggtcattcaacagcggaaactggtctgattttgatgaccttgataggacaaggctaagttgtcatactatcacgaggaatcggggtgcgataatttagttgtaatatgtatgtcttaatgccgtcctggctgagtttatcccacaagaggaatctga

SEQ ID NO: 149014 - DNA, 286 bp, Glycine max
gagtatgtttattatacatggctgatgcatcatagggagaaatatgtacaagcatggactgatcatgttctgcatgttgtaaacacaacaactaataggtatattctttaattacttgtttcacatctcgcttgttatgtatcttttggttggcattatactataatgctctacaaagttgaaggtgcatatacaagactgaagagattgtttcgcgatagtatgaaagattggtgtacttgttgcgatgcaataaataacatgcttatattgcaacatacagaac

SEQ ID NO: 149015 - DNA, 455 bp, Glycine max
tgactaggcgagttgattttagccttagtttcactttagttattagtcaattcgattaagaatgagaaatcccaaagagaaaacgtccgattgattttccgctttattttactaaaaaaagatgttttttgattattatattattttttatctctttttgttttccaacgtggttacggcacgactgaacggtcggaattcattttaaccgaagttaacggataatacaattcaaacgatcggtggaaatttattttatttttaagttaagcgagaaatgacttaagtaaaatggcttaagcacgtcaaaagggggtataaaaagtaaatggaatgagaataaaaatacacaaaacacaatgtggaccaccatgggtacatagaatgaatcgaaaaggttggttcgaggtacatacccgtcgaagattgaagaacgatgaagaacgaatgaagaa

SEQ ID NO: 149016 - DNA, 427 bp, Glycine max
atttaatggattttcgaggtttgagaagtgaaaatgagaatggggtaaatttggaacaaactctcacctcacacaagtctatatcatcaatctaaacttgctcaaactggttttacgacaaaaattctaccgaatcaaaatttgactcctcaacacccaattttaccctggaaatggctcttgccttcactttggtcatttttttttctctctggcacaacccaagctttctcataagtcctaaatgacatttcaaactatgattaactccctttaacctccaaataccactaaatccagaattggccttccaactctcaaagcctcactctttcttcactcataacactacattctcactttctaaccctaggttaactctacccttcatccctaacaagatttgcatcaacaatattcagcacat

SEQ ID NO: 149017 - DNA, 469 bp, Glycine max
taagcaccgcggctgcagcttaatttttatgctgaaatagggaatttttatgcatcaaggcaaatcaaagaggttgctctatcaaggaagatgactacggaaattggtcatagtttaactgagataagacaatgacaggggaaaatagagttcctgaattgatgaagcattttcgcccattattcacagaagataagacaatcatgtcattttgatgagatgatgaagatgtttcctaagatggtaaggtcttgtctatttgggcaatcctacaatctaagggaaaggtttcttttgtaaggagtttttggtgagcatgcctagaaaatgagggtcggcatttgtattcccatgtttggtgtaactaactgacatcttctaaagatagaaaaataatttttctccttttatgtatcacatggtattatgcctctatactagtgcaatttgagatatagagtggaatatg

SEQ ID NO: 149018 - DNA, 463 bp, Glycine max
gcaccacttcaccctaccttgcctctggagtttggttacaacatccaccatggtacccgttgtcctcttaacgtacttagtgtaggtaacagagtaccgtaaacaatcctcaagaaagttcttaaggactctgcgagccaaacagcgaatcccgagtttcataatgttctacatgttgtcgcacaacaccaccttgtgccccttggctcctcccttgcctccctcccacaaccaccgtatccgccgccgtcaccttcaccaccaccaccgaagccaccgccttcaccacgaccacggtcggtgcaggtttacgcttcgtggatagtgatgttcgaccatcaaggtcttggccgtgcaaactgctattcacaactctcgctccctctttttgcttcttcttatgaccatgaaacaatagtatctcttcaatttggtgagtccccttcgtggcttgcacccattg

SEQ ID NO: 149019 - DNA, 470 bp, Glycine max
  unsure (1)..(470): unsure at all n locations
tgcggcatgcaagctttacgtctatggacttagaatggagtcttttctttcattntagagacacccatgtgatttggatatcaatccctttaaactttgaaatgaccactttttcatttattttaattatgtttatttttggtatacgttttgatgcattggatacatgcctcgaaatacaaggctaaaaccctatactactagaatggccaaaatacaaggcccaaacgaaggaaaaacctattctaatatttacaaagataagcgggctcatacttagcccatgggctcgaaatctaccctaaggctcatgagaaccctagggccttcccttgaatctctggcccaatctacttggagtcttctatccaatgcccttgcggggtaggattgcatcaaatacttgggaagcaaaagcttcatgatgaatcaacaatgattctaaagtgttttgatgattacaatgatga

SEQ ID NO: 149020 - DNA, 378 bp, Glycine max
  unsure (1)..(378): unsure at all n locations
ccttcctgaggttaccacgccgttattatcntttgcctgtgtagcccgtatgcctctattgcatttatcgacagtcccccgtgattagcgagcgagtctgttttcacatgtgggtggtgttcttggaatgttagccacttccacagtaatctagcgtggggaccttatgcttgagggccacacactgctcaattgattgccccagagtacctacatgatacgcgctgttcgcgtcggggttgcaccacctcacgaaaggagactggtggattcttctggtggttaccaccgcctactagttggtgattaaagatggcaacaagagctgtatgacatcggaatagatgcgaactctgatagctgtttcactagagggtt

SEQ ID NO: 149021 - DNA, 274 bp, Glycine max
aatgagcaggattctgagcacataattgccttttctgtctcaaattaagaaattgatgggaaagataaaaacgtatgtatagttactgagattatgtggaactttaacgactcagccaacatgattttgtttatccatggacatatgaatttgttatggacaggaaaatcatccacaaagattaatctagtaattagacacaagctagtaatgtgttaaaactagaattaactggttacttaatatttaaatatgactattgataaaaaaaaaa

SEQ ID NO: 149022 - DNA, 426 bp, Glycine max
  unsure (1)..(426): unsure at all n locations
agctgagatgaggaagtgttgaagggtgttactttctgctnttattgnngaccacagagtggtacctggagatatgtcgtgggggtcaggagaccttggggacgtcaggtggggtgctattgcccaaaaccaagcttgaccaatcccgacccaacccgggcatagtcggtcagtgagaacctgtgatgtacctaagcaggcgagctcctggcagtcaacagataaaaggaacaaagaccaaaaagcaaggaggcttgtggtggctggccaactgtgaaacttgattgatatgtgagatatggtctctggtaatcgattaccaagggtgggtaatcgattacaaggcttaaaaatgaagacaagaggcaaagatggtctctggtaatcgattaccacggggtgtaatcgattaccacgcttgaaaac

SEQ ID NO: 149023 - DNA, 333 bp, Glycine max
tttttgaacacaaagcgggacctggagatatgtctcgggggtcaggaaaccctggggacgtcaggtggggtgctattgcccaaaaccaagcttgaccaatcccgacccaacccgggcataatcagtcaatgaaaacctgcgacgtacctaaacaagcgagctcctggcacttaaccaattaaaaaacaaagtccacaaagcaaggaggcttgtgtagcggctggccatctatgaatcttgagtggtatctggaatttggccctggtaatccattaccaagggtgtgttatctattacagggcctaataaatggacacaggatgttaaatgacc

SEQ ID NO: 149024 - DNA, 403 bp, Glycine max
  unsure (1)..(403): unsure at all n locations
tggccttgaattagaaatctgtacttgtcgcaagagtttgtggtttatgctcctctgccgaccaccatacaaacctttgcccttctatgcaacaatctatagcaattgagtagcctgaagcttatgctgcgaacatttacaatagacctcctcaacctcagcagcaaagtcaaccacaacaaaaccctaatctcagatggtctagccctcaacaacaacaacaacagcctactccttccttccaaaatactatnggtccaagcaggccatacgttcctcccccaatgcaacacatgcaacagcagccacaaccacagccacagaaatgatgctattnttaattatttatctcttggaccttngtaatccacagatgtggtaattcatttggcaaatagaagtg

SEQ ID NO: 149025 - DNA, 406 bp, Glycine max
  unsure (1)..(406): unsure at all n locations
ttatagnccggaccctcactaccctcttcaaccttattttctactgtatcacgcgaaaaaaaaaacccaaattcatgagaacaaaattgctaaaataaattacctttgtttaaaaaaagaacatgttacaagcaaaattaaaattaattacatgtaatctttagcaattcgacatttaaattttgttgactctaaatttagttatggaaaaaaaaaaacgaaattgagatacctctttttggaacaatgacagcggctggaggagctaccgcattttccagagcctaaattctcagagctgcactttctcttgaaagaggaagtcgaaagcggaggcttccccgcggacgacacgtgcgagaggctcgtgatctgaaagggcgtcgtctgtcccgccgccgcgggc

SEQ ID NO: 149026 - DNA, 378 bp, Glycine max
atgatcaaccgtcgaggtgtttcacttttggggacttccagctatcacccatggtggaagaatttgaagagatcctacgatgtcctctagggggaaggaaaccatacctcttctcagggttctatcccttattagctagaatttctaaaatagtccaaatctcggcacaggaattaaacagcggaaagcaagtcgaaaatggggtggttggaataccgagaaaatctttggaggcaaaagcaagaatcttggcaggtagaggcgaatgggccccgttcatagacattctcgcactgttgatcttcgaaagagtcctctctccaaatgtagatgggttggtggacctaacagctatcgatgcttttctcgcctatcatg

SEQ ID NO: 149027 - DNA, 338 bp, Glycine max
  unsure (1)..(338): unsure at all n locations
aatgaagagggtgaggatgaatgagaagcccgcgctgtgactgtcattcttatacgaccaagtttcccaccaacccaacaatgtcattactcggccaataacaacccttctcattacccaccacccagtcatccacaaaggccgtccctaaaaacaaccccaaagcctacctaccgcacttccaatgacaaacaccacctttagcataaaccaaaacaccaaccaagaaatgaattttgcagcgagaaagcctgtataatacaccccaattccaatgtcctatgctgactcgctcccatatctactngataaatcaatgggagccataaccctaacca

SEQ ID NO: 149028 - DNA, 423 bp, Glycine max
gagagaggggggagcacgaaattgaatgaagaaaaagggagagaagttgaactttgagttgtgtctcacaagactctcattcatcaaagtgacaacaagtgttacacatgcttctatttatagactaggtagcttccttgagaagctttcttgagaaagcttccttgagaagctttcttgagaaaactttcttgagaagcttctttgagaaaacttccttgagaagctagagcttagctacacacacccctctcataactaagctcacctccttgagaagctatcttaagaagattcctaaagaagctagagcttaactacacatacctctctaatagcttagctcacctccttgagataaaagctagaacttaaccacacaccccctataatagctaagcttaccatcatgacaaaaaacat

SEQ ID NO: 149029 - DNA, 409 bp, Glycine max
  unsure (1)..(409): unsure at all n locations
aaacacgtttaactgtagaantttaaagtcatgagttaccaaaaaatatatacatcttgttagtataggtagtactaatttacttctttaaatcatcacgaactaaacaggtttatacttgcaccgcctttatatctttctcattcgagagtgtatacctgattcattcaagtatcgccccccccccccccagagtatacctgattcattcaagtatcgcccccctagaagcttgccaataatcacctattatttgtgcctcatctcttttacatcaacgatcactccccgtttttgtcgacgtttaagatgttacaccaaattgtgtaaactccatctagtttagagttcacatgactaacacgtgatcttttgtttttttttaacaagctcccctatgttataattt

SEQ ID NO: 149030 - DNA, 249 bp, Glycine max
ctcgctcgcccagaattttgagtcaaccgaccaagcgtttcacttttgtggacttccagccatccccacggttgaacatttcgcctagagcctatgactgcctctaaggggaaggaacccataccgctattctgggtaccatcccgcattagctagagatcctacctttgcccgatgtctccgaccatattccaacatctgccaactagttcaaagacgcgtgcgcccgacaaaccgaacaatcttgcg

SEQ ID NO: 149031 - DNA, 217 bp, Glycine max
  unsure (1)..(217): unsure at all n locations
atagaaaatttttttatcgccttttcctagtgcatttttttctattctccatgaactcaacaagttnantttgggcattttgtccaatggaaagagacatttgagtggaatgcgggtacatgggactcaatcagttggggaactttttcttatttcggggtatggttgggaaatgacgagcttctggtttctggtgatatattggaaacttctgaac

SEQ ID NO: 149032 - DNA, 216 bp, Glycine max
  unsure (1)..(216): unsure at all n locations
gctaccaggctataatagaagcatgtgtttccttgtcgtaacttagacgagtgagagacttgtgagacacacttcaaagttcaacttctctccctcttttcctctntcaattgtgggctcctctttctctctctatctctctcgaaactagacaagactatactggctcccccaatgaagctctctcactcgacaaatgaaaccaaggaatacttc

SEQ ID NO: 149033 - DNA, 416 bp, Glycine max
  unsure (1)..(416): unsure at all n locations
atgcttcagatgaaaggtacatttttgtaatttctcaattcagttntcaattctggacgatttcctgttaatttatcctttcacttttggttatagatgacttgctccacggttgaactcactgttcaataggtggagaagttgagggaaatgagtccactttatgaaattgtcaaggaaggtatcaacatcaaggacattcaatgggcacagcactgattattatcaagctctcatattgcaatgcaagtgatgggaagcaattgtgattgaactccagacgtagctgccactcttgcaattgcagattcttcgaacttgctgattatttagtaatttgtatcttgaggttacattacaattaataatttaccctggcagagctatttattaggtatacaccattcgtttcaatg

SEQ ID NO: 149034 - DNA, 479 bp, Glycine max
taatacacaagctcttacatgcatgttcacaccatatttactatacttctgatctactgatgcaatctatttgattgaaaagataatttatattactcttctaatgtagtcgacaactaaaaaaaaaatataacagaaagtaatgcttaggccaatctaatcaagtcattttgaatctcgtcattactatcatgcatctcaaagagaaggagaatcaggcatcgtaatacatagcacaacaaaacattaaaagaaaacatgccttccaaagccaaccaaggttaaaatgtattcatatttggtgaactttttcaaaataataacacatatatataaacatggtggaacaatctgaccacatgcacaacacattccacacattatttctgaaaatgagtggcaagggaatataataaagcattgttattaaaactgtacatgcactaagacaacaaggttgtcatgacaaaatgaacaca

SEQ ID NO: 149035 - DNA, 397 bp, Glycine max
caagcttataggctattatggctaatttatctccaagggcttgatttgatagactcaaagagactcctactgaagtttgagttcatatccagcaagtgtgatcccactttgtgtactccaagggatcatctactatctacatgctagtatatattgggaaacatccaagtcccaaatcgactagagataaggccaatatagaatatataagtggggggcaaccctcatcctttaagctaacttttagggttgagttagacttgaacccacattctaagatgatattagaacttatcttagatctattaaaagggagtcacccaccatattatccatgctcgaagcacaaacgtgttgggcgtgaggggatgtattggggaaaacccaagtcccacat

SEQ ID NO: 149036 - DNA, 387 bp, Glycine max
ataaatttgttactagcagataaattttgtagacaatgtgtatacattgacacttcccgaccgatacaatagaagtttccttttcaaaaaccaacctataataattgatgaacataatgattagttaggacttatgagtgtatagcgatgacaagttgacaattgaccacaatctaaggaagattatatattgctattaatatctatgattgaattagatggcaaataatctttttatattatgattattatacaattgcaaaaacattggaagagaaaagacagcaaacctcgactgtggtacagatgcctcggacgagaaatagcattcagaaccactcgaccggatacggaattcgattcccgatgcactcaccatgcagcact

SEQ ID NO: 149037 - DNA, 406 bp, Glycine max
caccggcgatattttctattgggtctaaaaagaagcaaatctgatcatctcgctttgataaatgcaaaaaaaaaaaaaaactggggcaaatgaagatggtgaggatgaaggagaagctcgtgttgtgactgccattcctatacagtcaagtttcccaccaacccaacaatgtcattactcagccaataacaaaccttctccttacccactgcccagttatccacaaaggcaatccctaaatcagccacaaagtctgtctaccgcacttccaatgacgaacaccacctttagcacaaaccaagagcaccaaccaagaaatgaattttgcagcgagaaagcctgtagaattcaccccaattccagtgtcctatgctgacttgctctcatatctacttgataattcaat

SEQ ID NO: 149038 - DNA, 314 bp, Glycine max
caagacccttgtcttactcaagagaagtttattggccctctatgaagaaagatgtccataagcattgcactaggtgcatggcttggatacaatccaagtctagggtgatgcctcatgggctatacacgcccttacccattccatcataaccttgggtaagacattaatgtggactttgtccttgggctatctagaacccaaagaggtgtagactctatctttgtggtggcggatatgtttaaaaagatggcacactttttactatgccacaaagaggatgatgcttcccatatctcaaaacacttttttaagga

SEQ ID NO: 149039 - DNA, 452 bp, Glycine max
  unsure (1)..(452): unsure at all n locations
gcttgaacgaatataagaaagatcttcttctttcttgtgattctngactccatctcattgaagcgcatgtccacttgtaactccaaagtatcaaacctttcaccaaaaaaggtttgaagaccatcgaacctttccaaaatcttttgaagaagagatgaatcttctccaccatgtccttcttcatcaacatgtcgagcaccctttttcgcccaagagccatcatgctctttttgataaccaaaggatgcaatgactgaagcgcctattagaaaggatctcttgattggaacataaggttcacaatcaagagggatgttaaagtgttgaaggaagacggtgactangtgtggatatggcaataaagcatttaatcgcaatgccttatgcatgcgatatctaacaagatgtgcccaatcaatttgtagacctttatgaacagccacataacaata

SEQ ID NO: 149040 - DNA, 450 bp, Glycine max
  unsure (1)..(450): unsure at all n locations
aacaattatctaatcattccagntcacttttattatcagnntctcatacaattcattcgcaaacactcatttcatacaaaacaatccactgcatatcattttcaatcagttcattattcaaacaagctttttatacaagcaatcaactcaaagtactgaaatgtttaaagactggaattaaaacaactaaaatataaagcaagctaaaaagcaactaaataaccggtaaactaaaatgttcatgctttgcataaattaaactaaacacaatttaaacaattgaacaaaatttaaacatcctgctcatctcatggctgatcttcattaagatccagtgctggagctgctaatgaatcctgaataggctactctggctccatgactggtgaacatggcaaggtctccctatgaacaggtgcangagatggctctggtatctgatctgtaaag

SEQ ID NO: 149041 - DNA, 451 bp, Glycine max
  unsure (1)..(451): unsure at all n locations
cttggtcgcacctcgttcgcggctatgttttctatctacagggtttaagtaaaggagatcttcaatcctataacgcaaagtggaggacaaaagtgggcagntaaaatgaatgaccattattgttaatgcggaaagtattatgcgctccactatccatgttcacacattattacagctggtggttacgtgaactacttccaatatatagatgttgtttacacaaatgagcatatcttaaaagcttactctgcacaatggtggcctcttgggaatgaagtggcaattcctccttctaatgacgcatggacacttatccctaatccaactacaattcatgcgaaaagtcggccaaaatcaacaaggataagaaatgagatggattggctcgaaccatctgagcaccgacaaaaatgtagtagatgtggagcagaagggtacaacaggagtcaat

SEQ ID NO: 149042 - DNA, 448 bp, Glycine max
  unsure (1)..(448): unsure at all n locations
taagaaggcgctaccttatatcatagatgaacgcttatattnttttatggagggtaggcagctgttacatagtgtggttgtagctaataaagttgtagaagaggtgaagagatgcaataagggttgcttggtgtttaaagtagactataaaaggcctatgactttgtgagtgagatttttttcctacatgatgaagcggatggggttctgcgccaaatggatcaagtggattgaaggggtaaatggtagccccatagaggaattttgtcctcatagaggtctaaggcaaggagacccactggttcctttcttgttcaacattgtatttgaggggctgtccggtttgatgagagaagtccaagaacaaaagttatttgaaaggattaagataangaaggatgaggtggacattagcttattttagtacgttgatgacacaattttcttt

SEQ ID NO: 149043 - DNA, 424 bp, Glycine max
  unsure (1)..(424): unsure at all n locations
agctngcatgagctacatatgcctctatctttagtttattcttcttgatatcatcaaaatcttcgtgatttacattctcccnctttntgatgatgacaaccacctgtaggttaggagcaacaacaaagaaaatatctatttgcatatagtttactcccccttggttttacaatgattgcttatatgagacaattgaagatttcatatttttcatatataaaaagttgtctcataaaacaatagataatttttcttactattttatcttttatctttctctccccctttgtcaacatcaaaaacaaatcatgaatagaaaggagaaagatgttaccacttgttgcaatgtatgagaataagtgataccaaaaggcattaaaacaatcattcaatattaatcaagccaaaacaagtacaataacac

SEQ ID NO: 149044 - DNA, 442 bp, Glycine max
ctggcaccccatagaactttcagtatctcttgatcaaggctgagaacctcagtgctctgttggacttctctatgtccactaggtgtctggaaggcgtgatccctgaaaattgataaatggcatctgagatcaactagaccacacgaactctcacctgcgtcaagatggcatagaccagctggcactctagcaagggaaggtcagaattatgatcattggggaggatgttgctaaacagcaatgtcatctaaatctgtgttaggatggtcatgctagtacgcatgatccgcacccgtctccctatcacacttctgtcgaaatcctgtcccggaacacacagtagttggcctatggcctcctaatcaaatcccgatgtctagctcctctgactgaattcgcagtgttgcccctcttctatgaccaatggatgcctccaaaattg

SEQ ID NO: 149045 - DNA, 463 bp, Glycine max
  unsure (1)..(463): unsure at all n locations
aaactcagcttagcccaatatattgctaacaataatgggaatatttatatttcttactccctcccctaaactatagttcacttagcatcacacttgttacaaagtattaaaatgtcgcaacatctctaatgtatctcaaaatattgttaggatcatatcgcaaggtatgaaagttgaatctcacattgaaagtttggcatttaatgtagggttttttacgcctccaccttcacttttccaactacaattgatggctttatggtgtangtctggtagggtcttaataattggcattagagcttcttcagtgctgtaaaatggggcgctacggctaccatggctgaatggcatcatggtttttctgtcaaccaccatacgaaatctgtgaagggaggccagttttggtggctcctattatacaatggcatctttatttgtagaattgtgaccttctggcgttgat

SEQ ID NO: 149046 - DNA, 368 bp, Glycine max
acgcagcaattaaaagggttctgctgctttatttccattggctacataacataattcggtggttagaaaaagaaaaaaaaacataattcagtaaaagtagcccgtttcttacaagctatggccgaagctctatctcttagtacttgaggatatactgctgggttttattggcccacaacaattatgagatgtctgctctatctcttagtgcacctagcatttttgaaaaatgctaaaattgtccttgtttaatttttcacttccggatcagcttgatccgtaagttgatccttaagtctcttgcggatcaacttgatcaacttgatccgtaagagacttacggatcaagctgatccggaagtctctta

SEQ ID NO: 149047 - DNA, 340 bp, Glycine max
  unsure (1)..(340): unsure at all n locations
atgcctggtatggcgtaacaacagacgttctcattggacaaggtaagaccgagtctagcaattcgtggattaggttcgaagtccataatacatataaaatctaaacctgaagttgaggactgaattagctacaccgactctttattatgttacgatgccagtgtatgacattaggagattggcaacttccatgatggagggtgacattagcatattatatgtgtgatgtgtgtgagtcattagggagtgtgtgtgtgtgtgtgtggcaaggaaaaaccaactccaccaaaccttcccttgtctacaanacacaatgccaatttgcaagtgcgacacctat

SEQ ID NO: 149048 - DNA, 413 bp, Glycine max
  unsure (1)..(413): unsure at all n locations
gtaagagtgcgtaaattcttcaaaggctacaaataccgtagtccttcattggttatacgagaatntgaaacatttagcgacctcagtgctgtcattcctgtattcagatataaagatatacaaacatgtgttaaccaaagcagaacaaacttttacttgatccaattacagggcaaggggaggaattaaaaaccgatacaaaaatataatattctccatccaattcctattttctgattatccgagtttcaaggggtatataaagtattgaaggcaagcaaaaaaataccagatatcaattccgaagttttatccgttaagttgcaattctgggacaggtttagctgtgtcagggagacaatctctctgatattttttacaccggcatcagttaatcctccgccacatatttc

SEQ ID NO: 149049 - DNA, 408 bp, Glycine max
agggaaggagcgataaggggaccctgtattcgtcaccgaatggaattcgaaaggcgtcacgaatggcttcagcggaagctctgtgaccgccaccagtatcactcatgagaatcaacacgttttttgtcctctccgcgccaatctccatgagttccatgcctccatcgctgtcatcatcgagggcctcactgccacgttttttgtggctgttgttcccattatagtaacctccgaataccttctccgctatggaccttctcggcgacggcgacggcgactaaacggaaacctccatgtgtaaaaaaaaaacagggtttcacctaactggtaaacctcgttcccgccactgaaacggtatttcaccggcggagagagagagagagagaaagggaatgattggttgatgca

SEQ ID NO: 149050 - DNA, 411 bp, Glycine max
agctttcgtcttacagaatgcaaaaagtttattctgataaccactcgggtatttccggccgtcagcgtgactctaaagtcagtatgacagatcttgtgagcacggaagatgacgtaaatctctgcgtgtcaacgggcttgtcggccgcgattgacgaaggccgcaaaagacgacgttggtctctacgtgctatcaggctttttgtcttacagacagcagaaagtttatacggataaccactcgggtattttcgcccgtcagcgtgactcacaagtcagtatgacagatcttatgagcgcggaagataacgtaaatctccacgtgtcaacgggattgtccgccgcgattgacgaatggcgcacaagacgacgttagtctctgcgtgctatcaggcttttcggcttacagaca

SEQ ID NO: 149051 - DNA, 479 bp, Glycine max
  unsure (1)..(479): unsure at all n locations
atactcaagcttatagaagattaaacaaaccgtttcaacaccttgtaagattgcatgaggatctcaacaaagctcatcaagttcatttagttgattttgtcctgcaaaccactttgcttagtaatgtgcaagatgcctctgtttgtgaggaagttaaggcactactagatgaaaaggtatccagtggatgcaaaaatcattctaaggattttcaagacttagaagaaagggtgaaatccttaaccatagctcttgaagattcagaaaaagagagcaaggaaatgcttaaacaaaaactcttacttaaaaaagaatgcacccttgctaatgatgaacttgataagctgaaaaagaagaactcaaatctctgaacaaaatgtcaacattacaaaaagatgtnctttgatttgaattatacgcttaagggacatgaggtcttgaatgaactacctcatgagattgtaaaactccatgagaag

SEQ ID NO: 149052 - DNA, 455 bp, Glycine max
  unsure (1)..(455): unsure at all n locations
agctngcatctgcactactactgctngcactattctttctctagctctgncactttggcaactgcaatttaccaaggaacatgaactgcagttgtggttcatttgaaccaacttcttcttcagccttttaacttccttcacaacctcagatgacattttcaattctctggttgcaggttttttcagatcttttattgagatttctttgccctttatcctatggaattcaatataaacatctcctactagtgcccatgccttggcccagaaaaggtaagtagaagactttctttcaatatagccattaacagtctcatcttttacatcatcctgccacgtcttttcattaagatcaatgagttttctctctaaggatgagccactgaccattgaagaaataaattntgtgtcttcaagatgtggaggcattgatccataaacagaacatgatagct

SEQ ID NO: 149053 - DNA, 480 bp, Glycine max
  unsure (1)..(480): unsure at all n locations
cttaaatctcagcttacccaatatattgctaacaataatgggaatatctatttttcttactccctcccctaaactatagttcacttagcatcacacttgttacaaagtattagaatgtcgcaacatctttaatgtatctcaaaatattgttaggatcatattgcaaggtatgaaagttgagtctcacattgaaagtttggcatttaatgtagggttttttaggcctccaccttcatttttccaactacaattgatggcttttatggtgtagttctggtagggtcttaataattggtattagagcttcttcagtgttgttaaatggtggcgctacggctaccatggctgaatggcatcatggtttttttgtcaaccaccataagaaattngtgaagggaggccagatatggtggctcctattagacaatggcatctntatatggtagaattgtgaccttctgccgttgataacactgacct

SEQ ID NO: 149054 - DNA, 375 bp, Glycine max
  unsure (1)..(375): unsure at all n locations
gctcccgagtatgacaaccaccgctntatgagtgctgaacaccagcagcgcttcgaggccatcaggggttggtcatttctccgggagcgacgcgtccagctcagggacgatgagtatgccaatttccagggggagatagttcgccagcggttggcatcattggttacccccatggccaaattcgacccagacatagtcctcgaattttatgccaatgcttggcctacggaggagggcgtgcgagatatgagatcttgggtgaggggtcagtggatcccgttcgatgcggatgctatcagccagttcctaggatatcctttantgctggaagagggccaggagtgcgagtatggccagaggaggaaccggtctgat

SEQ ID NO: 149055 - DNA, 464 bp, Glycine max
tattataaaagaaatcaacaaacatcaaatgtccatgattagcaagaaaacaataacaaataccataatcatacacaaatatccattagtccaacatacactttacaactagtcatcaacttttccataattccaatcaatcatgcttaatatgatgcatgcacctgacctcaactctcaaatgcaatgtggtaccattcatcaggaaatagcctaagcatgtccacgcgacactcacacttaggaggactagacaacaagtgtcgtggtcactctatcatgcacaagcaactcagccccccacatggtgatcaggccgagtcacaagggagctccaaaccaagtgacatgccctaagtacaagtattttccctcatgaaaaactacaagtacttactgaaaaaatatatactatttccatgcagtatgaagtatgacacatgggcaccatcaatgcactaacc

SEQ ID NO: 149056 - DNA, 396 bp, Glycine max
  unsure (1)..(396): unsure at all n locations
tacagcagccctctatcccttttccattcccacctagagcaattcccaacaaaaagatggaagaagtggaanaggagatcttggagacctttagaaaagtagaggtgaatatacctctgctagatgccatcaagcagattccaagatatgccaagtttctaaaggagttgtgcacccacaaaaggaagctcaaaggcaatgaaaagattagcatgggcagaaatgtgtcagcattgataggcaaatttgttcctcacattcctgagaaatgtaaggacccaggtactttttgtatatctcgcattattaggaacagtaaatntgagaatgccatgctagatctagaaacatttggtagtgtcatgcctctgtccattttcaattatttatctcttg

SEQ ID NO: 149057 - DNA, 440 bp, Glycine max
tttgatgatgccttttgcccaagtaattgattcaagacttcaagatcaagcatcaagaatccaatccaagattcaagagaagaaatcaagaagcaaaaagtcacgacttcatatagtataagtattaaaagattttttttttcaaaaaccaaatagcacagttttgttttacaaaagaattttctcaaattttctaagttaccagagtggttactctctggtaatcgattaccagttggcagtaatcgattaccagtgaccagtttggttttcaaatgttttcaaatggtttacaatgttccaaaataattttcaaatagtgtaatcgattacactatattagtaatcaattacaagtgaatttgaacgttggaattcaaatccaattgtgaagagtcacaacttttcataaaataaattgtgtaatcgattacaccttt

SEQ ID NO: 149058 - DNA, 249 bp, Glycine max
atgaatgaagattcatttcaggaactaccggttgaagaccgaaaacgactaagaacgaacgaagaacaatgaagaacaatgaagaatttccacagaatcgcttacggaaacgtctcaaaagcattacagaagcacctcgacttggattttcttcatgaaaacacattttttcacccaaaacaactgaaatgcatagccaaggggtctgaaatattttgaaacagcacccctcccctatttattgggaaa

SEQ ID NO: 149059 - DNA, 328 bp, Glycine max
tcatataacaatcaaacgatacagatgatgtgtactacatatcatgtgacaacacttttaatttaattagagaatatatttttgtggcatggcatgttcttcatatttgcctaataaactttctcataggagtttatgaaacattgactttctgttgtttattgttgagcttgtgtctcattttgaaatcatttaatcagcttggtatcttgttattaaattatgttgagtctgtttggtttgtcgatttttctttctattttcactaataattacaaaaatccaaacttatacaagtataccatagacttttcattcttccattact

SEQ ID NO: 149060 - DNA, 213 bp, Glycine max
taaggagaatatatgagaggaggcaccatccactaagaataagccatggaaggagaagtttcaccaccaaaagagtgccttagataagaagcttagagaggaagcttcaatggaggaagagaatgaaagagaggggggcatgggaattcaaggagattagggaaaaaagttgaactttgaagtatgtcgcacaagtaggggtgggaataggtc

SEQ ID NO: 149061 - DNA, 285 bp, Glycine max
agaagctagaggttatctacacaacccctgtaataacatagctcgcccttgggccaaaatacatgatgatgtactatacgtcccatcttcagaagcatctggatgtgccttgccaaactaagctaaatggctaaactactagaatggccaaaggacggggccataaagggacagacgtttgaaacattaacgcatgcagtggactccacttggaaatgggctatatattactttgacgcgatgaaaggccgaggcctgtttaactactataaccacatctcttaa

SEQ ID NO: 149062 - DNA, 408 bp, Glycine max
  unsure (1)..(408): unsure at all n locations
tctgtgtggtggtctgcagaggagcataaaccacaaagtctggcgacaggtgcagattttttattcatggccagttgggttaccaggttaaccaaggcatctagtttaccttcaagcttcttagtctcggctgatgaagatgaattcgtggctacttcatgcactcctttaatgacaatagcatcacttctggcactaaattgttgggagtttgaagccatcttcttaattaaatttctggcttcagtaggggtcatgtctccaagggctccaccactagcagcatctatcatacttctctccatgttattgagtccttcataaaaatattggagaagaagctgctcagcaatctggtggtggggcaactggccatagtttcttgaattctnccatattatatagctc

SEQ ID NO: 149063 - DNA, 327 bp, Glycine max
aatcctgactcaccataaacctagacccattttgattattcaatccgcaccctcggaagcgagaagaattaaggggaaatctccaatcacagagaaggaaagaaggagcatctcccatcaaagagaaagcatccaaagaaatgaaggaaaattcccaatcaaagagtgggagaaagcaaccagaaaagatagaaaattcccgatctaataatgggagaaagttaaaaaggacgaagaacaaggaacgaaagctcctgatcatggatcgaaagaaaacagaacaaatgtgcagaaaggtctctggaccggacaatatctgaataatac

SEQ ID NO: 149064 - DNA, 455 bp, Glycine max
gcagcttatcgtcttatagcttggccacacgattgtgtgaattctggtgaagggttgtaacgcttgaacctcccgacaaatctcgagggatgaccctgagatgaaacaactgaggagaaaagtatggagaaggtcgatgatatggtttgcgaggctcttgaactctgtgagatatgaattcatggacctctgttgagtgagcttgaataaggtgcctttggggtcgtcgtaaaacgacaacgcaaaacgtgatttgagggcttcaagaaaatcgtgccaagaagagatctactcattttggaacatccattgatatcggcttaacgttggaccatcaaggtagaatgacgctatttgcaggcattcctcttccgaagtagtgtggtagtcgaagaactgggaaatttgaagatccacttgtgaatccatgttgtcaaacaggacataagcttata

SEQ ID NO: 149065 - DNA, 474 bp, Glycine max
atacacaagcttctcaattgacagattaaatctgttatgcaggtatttctttatactgacttctttccctgctgacgtagcagatcaatgtcacaatttatgattgggatataatttggaaaagtgctgttctatgttcagtgactgttccagttgaaagtgaaggtcaaactggtgcagtgtggcatactttggatagcccatctgggcaagtaatacctgctgtcagaagaattttttttttggcttcaaagtttttgtttcttttagttctaatacttttttatgtctcataaatatcattattaatatgtaactgaatgtcaggtttgtcttcatataacaacaataaaactatctggaaatgcttccaggggagccttttggttttatatttcgttttaaaaatttcgtttatgttggtcctacatacttgggtgctgttattatcctcatatgttggtgtatttctta

SEQ ID NO: 149066 - DNA, 431 bp, Glycine max
  unsure (1)..(431): unsure at all n locations
ctgcagctgaagcaactggagcgggggctatcttgtttctaactggccttgaatagaaatctgtacctgtcgtcaggggttgtggtttgtgctcctctgctgaccaccatacaaacctttgccttcatgcagaacctggacaattgacaacctgaagtttatgctgcaaatatttacaatagacctcctcaacctcagcagcaaaatcaaccacagcagagcaattatgacctttccagcaacagatacaaccctggatggaggaatcaccctaacctcagatggtccagccctcaacaacaacaacagcagcctgctcctttcttccaaaatgctgatggcccaaacagaccatacattcctccaccaattcaacaacagcaacaaccccagaaacaaccaacagtngaggcccctccacaaccttccct

SEQ ID NO: 149067 - DNA, 440 bp, Glycine max
  unsure (1)..(440): unsure at all n locations
cagctttactcagttctcttaccttatggcgcctttttatttttctctctcnnacattatattaattatcatgtctacatttctgtcatttctttttctcggggtatattacgagcaggtgtctatatggagtatggataatttttgtatactacaaaagtaatgatatatatcacatacctcagtaacatattttctctctttatctcacgaattctattacattatctcacttatcatatttatatacttttctcttgttggatcaagtggtctcggattaattaagaagggggggtcgaattaatttttaatgtgtcttgactaattacaaattatccttcttaatattactagattcaattacgctctactattaagttatgaggaagtaaagaacataaactataacttagactataagtaagcggaaataaaag

SEQ ID NO: 149068 - DNA, 451 bp, Glycine max
  unsure (1)..(451): unsure at all n locations
agcttgaacatacgaacttgctattattattgggaattggccactacgacttttgagctgaaagttttattaaattctctaaacatctggaaaaaagttagaaaaaaagaaccaagtgatttggataaaaggaaaaaataataaaaatcatacaagttggaaagaaaattagtgtccaagaaacaaaaaagtgaaagggaagtgtgcttgttatttggctcaaaatttgttctataattggtacctattttataccaatcttagttttgaaatttcaattgaaaattagtgtgaaagaaagtgtcaaaactagaggtttcttaagtctttnttttagtattttttactctactctagagccattctaggtttctcgttgagtcctagcttgcttttgtgtgcttttcattggcttaattggtgataatcctttaaaatttgtcttgttaaa

SEQ ID NO: 149069 - DNA, 372 bp, Glycine max
gcttctacaatctccccctttttgttgatgacaaccttgaaatcaagaaacacatacacattctttttcctagtcgatcactcacttatttatccatattctccccctttgtttttgagtttaagcttcacttgaaattaagttatttaattatatgagttcttgatttaatccctattttctctccccctttggcatcaacaaaaagccaaagtacgtcagaaatataaaacttacataaatgattataaagcataatatcaaatgtgagcacatatcactagacatatatcatcaaactaattaggtttaaaactcataacaattaagagccaagtaatataatcatgttcagatatactaatcaaataa

SEQ ID NO: 149070 - DNA, 369 bp, Glycine max
gctgagggaaaacttgatgcctgtgtctatctattaactcagctggccatgaatcagaaatctgcattcgcccctgttgcaagagtatgtggtctatgttcttctgcagatcaccatacagatctttgtccttctttgcaacaatatggagtcaatgagcaacctgaagcttatgctgcaaacatttatgataaacctccgtagcggcaaatccaacaacaacaaaataattatgacctttcaagcaatagatacaatctaggttggaggaatcatccaaatctgagatggacaagtcctccacaacaacaacagcctgtccctcatttccagaatgatgctggtccaagcaagccatatgttcctcct

SEQ ID NO: 149071 - DNA, 191 bp, Glycine max
  unsure (1)..(191): unsure at all n locations
ntgtanatagagtactttacacactatgattgtattattttattatcattttaattaaatacaataagttacttttatggtacttctctcttattttttgggaattaatttaggcaccggtcaaattactggtacacccaacataagatggacaattccaatattactcttctgtaaagctaatacggatt

SEQ ID NO: 149072 - DNA, 457 bp, Glycine max
ggtaagatttctaagatcattctccttgacaactctttgattaagatcgccatgaatatgaagagatgacaatttagagatattcatgagatgacaatttagagagtgatcaaagactttcaaatcgatttccactgaatttatcaatagacagatcaagatatcttaatgttgaaagttttccaaatcatctagaaagggcaccaccaattgagttgttgtaaaaatctagcatgtcaatatttttaaaaactccaatttaatccgtcaaattgggttattttatcatctagggacaaattttttctgtgtttatttctcatgtgggtacttttcaaatcatgccccagaagtgaataagtggtattataatatttaaggtacaagtcggaatatgactttcttttttttttaacttacatcgtaaaattatttatgcctgcgttttgttattact

SEQ ID NO: 149073 - DNA, 398 bp, Glycine max
ccattatggaaaaaaatatcaaagttgttgcgtactgtgtaggcatttggccctatataatggctttgcataaaggatccaaatgttctttattatgccctcttgctgccagtttctcgaccgattaacctttttggatcactattacaaacttatttatatgatgagtcttacatgagtctattttgatcatagatcgtgctagaatgtaagtttgactacatgggcatcctgtgtatcgtagataaaaaatctgagaatatttttgtcaaattcgtataagttgagtatttgttaattaatatatcataactttttaaaagaatgtcattttgaaagggagagattaatctattaaactcttgcaattaagccattaataacaactaagtccatgc

SEQ ID NO: 149074 - DNA, 394 bp, Glycine max
  unsure (1)..(394): unsure at all n locations
ctcatagtcacctgcggcatgcaagcttgtanggttaaagtctcacgattgtttcttctcatgcaacaattgttagcccgggctatacgagacatcttgccaaacaaattcaggttaacgataactcgcctgtgctttttcttccattctatatgtagcaaagccattgatccagtcatgtttgatgagttaaaaaatgaggccgcaattataatgtgtcagttggagatgtattttccccctgctttctttgacatcatgattcacttgattgtgcatctggtcagagaaatcaaatgttgtggtcctgtttatctacggtggatgtacccgattgagcgatacatgaagatctaanagggtatacaagaatctatatcgtccagaagcatct

SEQ ID NO: 149075 - DNA, 448 bp, Glycine max
  unsure (1)..(448): unsure at all n locations
cggatttccttttagtagggaatctttccttcctttatggagccaaacccagtccccctcattaagaactagctcctttcttcctctattgcccttagttgaatacacctttgtttggttctctatttgggtcttaaccctctcatgcaacttctttacaaactctgacctagattccccatctttatgtataaaagaagtgtcaagtgggaggggaatgaggtctaagggtgttaagggattgaacccatagacaacctcaaaaggggattgcttggtggttctatgaacccccctattgtaggcaaattctacatgaggaagatactcatcccaagacttatggttgccttttagaagatcccttaaaagagtggataaagacctattcactacctctngttgcccatcagtntgtggatgacaagtggtagagaaaagaagctta

SEQ ID NO: 149076 - DNA, 254 bp, Glycine max
aagtggttttttattttttggaaaaggagggggaccaaatgggagaataggaaaagtgacattggtggctacagaccttatcatcaagtacacaggttccagctcttcataacacgtactcctgaaagtttttgaaaactctgaaactcttgaaaacttctgaaactcttggaaacttctgaaacaactactacccacctcatacagtactctgaacaactactcaccacctcatacacttgaacttctaaaat

SEQ ID NO: 149077 - DNA, 465 bp, Glycine max
  unsure (1)..(465): unsure at all n locations
ctccagcgttgacttgaatcanaagagagatttttttgtgtttttggcatgacttacattaatcatccttcaataagttctcacaacaaggttttacaaaactttctacctcgtttctcttcatctttcaatagaaatatttgattcatttctcaacttctttctaagagtttttgttcaaaactttctctttcaagaaaagttctttgttaaaaaacttgtgctattttttcttcttcattctcttctcccttttccaaaagaacgaagcactaaccgcctgaattcttttgtgtctctcttctccctttgtcaaaagaacgaaggactaaccgcctcaattcttttgtgtctctcgtctcccttacaaaagattcanaggactaaccgcctgagaattcttttgattcttcccttccccttaagcagaagatntcaaaggactaaccgcccgagcatcctttg

SEQ ID NO: 149078 - DNA, 370 bp, Glycine max
tctgtatggtggtcggtaggggagcataaaccacagactcttgcgacacgtacaaatttctgattcaaggccagctgggttaccatgttaaccaaggcatctagtttaccttcaagcttcttagtttcagctgatgaagatgaatacgtggctacttcatgcactcctctaatgacaatagcatcatttctggcactaaattgctgggagttggaagccatcttcttaattaaattcctggcttccgcaggggtcatgtctccaagggctccacccctggcagcatcaatcatacttttctccatgttactgagtccttcataaaaatattggagaagaagctgctcagaaatctgctcctggacatctg

SEQ ID NO: 149079 - DNA, 250 bp, Glycine max
  unsure (1)..(250): unsure at all n locations
ntgataagacgttggcatggctgtctacaatagactattggtttacagctatttngagaaaacatgtcggcctacgcgaacgcgataatgaatggcccaaaattggacaggatatcgtctcgtggcaacaaagacaattgtctctgaaattcctagctcaatcatacggtgggtgcaagcggtagaaaccatcaattgctcatattaatgctgacccacgagaaaataagaggtgagtgataaatcaact

SEQ ID NO: 149080 - DNA, 419 bp, Glycine max
  unsure (1)..(419): unsure at all n locations
agcttctttgagagaacttgcttgagaatgctgnatcttagctacacacacccctctcataactaagctcacctccttgagaagcttccttaagaagattcctaaagaagctagagcttagctacacctacctctctaatagctaagctcacctccttgagatgagaagctagaacttagctacacaccccctataatagctaagctcacccccatgacaaaaaatatgaaaatacaaaaaaaaaagtctttcctacaaagactactcaaaatgccccaaaatacagggctaaaaccctatactactagaatggccaaaatacaaggcccaaacaaaggaaanaacctattctaatattacaaagataagcgggcttatacttagcccatggggctcaaatctaccctaaggctcatga

SEQ ID NO: 149081 - DNA, 411 bp, Glycine max
  unsure (1)..(411): unsure at all n locations
gaaaccaacctgagagagtcatgctctggttaatcgataccaatagttattatcaatttcatagngcnggattagaccatgtctatgttcttggatctctggtataatcgattacgaggatatagtaattgattacattgttattgaaagtgttcccaaaagtgatcaataacactttaatcaattaaattaagattctaatcgattatattgttcttgaatgttttccagattcggggaagaacacattaatcaattagatgggaaatataattgattactttctgagataattgattgagcatttgtagtttaatatctttctattcttctaagctcaattgacatctctttgacccttattttctcaccttaactcaattttgggttaaagcaaatgattgagcttaa

SEQ ID NO: 149082 - DNA, 307 bp, Glycine max
actcaatcggacttccgagtgaaaagttattttcgttaaaatttgctacgatcttccattttaaatatcgagcgtctcgatatattacgggactcaatcggacttccgagtgaaatgttattgtcgttcaaatttgctacgagcttcggttttaaatttctagcgtctggatatattacgggactcaatcggacttccgagtgaaatgttattgtcgttcgaattggctatgagcttcatttttaaatctctagcgtctatatttattacgggacatcattcgacttccgactgacatgttattgtc

SEQ ID NO: 149083 - DNA, 409 bp, Glycine max
ctgcagcttcacctaagtactagaatactattgattgatgagaattatactagtccctagagacagataaatgaggtctaaaggccaattgcctacacacattgatcccattatcttgatggtggaatccaattctccatggtttacatattaaaaaaaatacacttccctttgtacctgtaatctgatttcagaaaatttagggaactttgaaatctctaatccaggggaaatgtaattgtaagttatgtttctaactaacaccaataccaagacttgaccattcaatccccacattaaattagaatgctatgcactatatcagtcctctcgtggcttataaaagtatgcataaaatatcaaatataaaaggttcaaaaatagcatcaaattaaaagtgtggtacatg

SEQ ID NO: 149084 - DNA, 422 bp, Glycine max
  unsure (1)..(422): unsure at all n locations
ntgataagacgttggcatggttgtctacaatagactttttgtttagacctattntgaataaacatgttttcctagttgaacctgataattaatttcccaaaattggacagcatattgtctcgtagcaacaaagaatattttttctgaaatttctcgctcaatcatacagtgggtgcaagcaattgaaaccatcaattgtacatattaatcatgatacacgagaaaaaaagatatgaatgataaataaacttattcgtagaaaatctacttgatatatatatacgtcaagaaaaacgcgtcttgtagctagcactactggagtcaataagatgaatcatttcatggtccaaatgaggtgtcacgcaccanatagtacccacagacactataccacaacggccaatattggaattggagatatg

SEQ ID NO: 149085 - DNA, 413 bp, Glycine max
  unsure (1)..(413): unsure at all n locations
agcttgtagaatggctagacataatacatttttgggtttggtttggttcaaggataaaagggatgccccacattatttccatgacacaaatgcaaagatgatgatttggaaattttatgcaaaactggtcatgcatgcacctatgcggacactcaagtgtcaaatttttatggtcatgtgatgctagggctcaggatttatttcctctattttaaatcaacccaatgtttccagaatatgttcttttatcaatttgtgcattcatccgagtccattttgggtactcgggaaaatttcacagcattcacccttcaggtgtacacacattttttttccaaaaactagctatgatcagcgaatntttctttaaagaaaagttagaagtcatctcttttcacaagcatgttggtttt

SEQ ID NO: 149086 - DNA, 356 bp, Glycine max
gtttgatatgttgccacctttggagggcatgttgaaaagatgttgtaattggttacatattataactgcattgcctaaatgtgataatatgcattttagccaacatgtgcttttttctatgagatcaattgattaatgctcgatggagatgtgtctagccaatatgatctttaatggaaaaaaatttcgatcagtaggagattttgtaaacatggagagtttatgaagactttataactcttattttagttgatcatgataagtggtgaaaatttatgaacactagctgattacgatgagtgttattgcttcaatgctagattgtgtgtgatatcatactactagaaaataaggtt

SEQ ID NO: 149087 - DNA, 440 bp, Glycine max
  unsure (1)..(440): unsure at all n locations
gattcttaagtcacctgcggcatgcaagcttttgttgcatgctagacatcttagtgattcgctaggttgtacaaaactacttgcctcaagctgatgggatcttgaaaagaaagtaaaagaagatatagtgatttaaaagatcacaataataagaaaacagttctgtgtagaagctgttaccaagtaaaagaaaaaggtaataattgtagtgaattggttctaggtagtgttatagagacaacatctaacctcttctcacgtgatggtaaataactaaatatatctatatcctatggtaattttctttntcttaggaaatcatattggaccaattaataggggttagtaagtccttaactttaccctcaaagtttacttcctttttattattacaaagaaaaactggtagatttcatttttttctaaataaaatttaaaag

SEQ ID NO: 149088 - DNA, 392 bp, Glycine max
  unsure (1)..(392): unsure at all n locations
tgtagataacactgcggctgcagcatagtantctgacttttntccaacctccatcacccgtgttgcccaaattcctttgatctctaagtacatcagccaatacacgttccatttccaaattccatgtaaaataacttcttgtttcctcattattttatcctaaaacttttcttttgtccgtcattttttcattagatgactccattgaagttaatgtcacttattcaacctgcacataacaaatagtagatatgacctactttattcatttgactagtccactgcacaatcatagaaaatatttcaagcaaagtttttatgcaatagcaaagtacataaaagtctatcttcaataaaaaagttcaatagttacgaagcacacaaagcttgtc

SEQ ID NO: 149089 - DNA, 411 bp, Glycine max
  unsure (1)..(411): unsure at all n locations
agctnttgtggttgtgtgtgcggaacatattgttctgtgtattatgaaaatatagcacttacgaattacgaaaattgtatcttacttgtaggagtatacttactcggtgtagtagtttacttttttaactgatctgtaaggctaaactatagttaggagttagtctatagttgttatctgttaggacagctttcactaactaactcagattagttaaccgttacagttgtgtaagtgtctatataaactgaggtgtaaccatcttcttcttggttgaatacaatcaacagtttcacctcactttagattcgtgaaattctcttagactctttttttggatcacacaactagtttatcgatccttatcttatcttcatggcttctgcttctcacaatcctcctcctcctctt

SEQ ID NO: 149090 - DNA, 350 bp, Glycine max
  unsure (1)..(350): unsure at all n locations
tatgacgngtcataactcattagatgttttcagcttatctatagagngatagacccaaggtccattaagaagagtctgtttataacttatttgaaattgtcgtttaacataaaaacttgttagtgtttgagagagcctatgaaaatagcttaataagcttatgttgtgtcaaaactcataaattgttttcagctcatttaatatgttttacaggatagcttatgaaaacaacttacagcttatttgaaaacgaattaaccttattgtctatttgattatgagaaataacttatgtaaaagtgcctatatactatatactcattcaattagtccttaattaagtttattct

SEQ ID NO: 149091 - DNA, 392 bp, Glycine max
agcttttacgtaagaaccaggcggttctgtggaacagcgactgccaagaggccttcgagaagatcaaacagagtctcacaaaccccccggtgctcatgccacatgtaacaggaagacctcttttcctgtacatgaccgtgttggacgagtctatggggtgcatgttgggtcagcaagatgatgctgggaagaaggaacaagccatttactatctaagcaaaaagtttaccgcatgtgagatgaattactcaatgctggaaaggacgtgttgtgctctggtatgggcatcacatcggcttaagcagtacatgctcagccataccacgtggcttatttccaaaatggatcccgtgaaatacatctttgagaaaccggccctcacgggacgaatc

SEQ ID NO: 149092 - DNA, 344 bp, Glycine max
  unsure (1)..(344): unsure at all n locations
ggctttgcctacttcttctcgcatacactatgtgttttatgtttcccagnngaagagacacgtcattgctgctgattcaagtcctgcacttcctgatttttctgctgaaagttctagtcttaaagaacctgaggccattttggatcagatgatggttaggagaagaggtcaagctatgaccaaggttttagtcaagtggaaacatcacttgcctaaggattccacatggcagttctactatgatctcaagaagaagtttccttcttttcatccttgaggacaaggatagttttgagggggtggtgtctcaacgtgcccttctcnggcgattgacggccaggctc

SEQ ID NO: 149093 - DNA, 415 bp, Glycine max
  unsure (1)..(415): unsure at all n locations
agctatacgtgagagagagacctcnttttttttgtatacaaggttatcagcctaggaaggcgtattcagaatcaagctatatatcatgtattagatacatatatcaaattccccaggttaataagactagcacatacttacaatgttagattctttgttgagaaactccgccagagctctctcaagaaactcacattcccctaacaatgagatctgggcaataatatttagtgcagagaaacaccacagggaaaaataataacagcagtcaaaccatattaagatttcatattcttgaacattcaccaatagcgttgacatccaagagaattgtattcacaaatggtatctgaccatatatccttacacaatagtgacaaaaaaatcccattggtttataatggggtagtggata

SEQ ID NO: 149094 - DNA, 392 bp, Glycine max
  unsure (1)..(392): unsure at all n locations
ctanccagctgcgctaagcgcctattcaaaaatttatttttatttnnangcncgngngaaaataaactgtgctaatctcttttgttctgtcttatattttacagatggcatctaagaaaaggaaagctccttctacacctacctaggccagatatgacagatctaggttcacatctcaagaagcctggaagagatatacagacattgtggtacctacgaagatttttcctgaaaggaatgtcattatccatcacactgagttcgatgaatttactgaagaactccagcgtagaaacttgcacaaggagttgacaaactttgtgaatggtagtattgatgtggccatcgtaaaggagttttatgcgaacctctatgaccccgaggataaacca

SEQ ID NO: 149095 - DNA, 374 bp, Glycine max
  unsure (1)..(374): unsure at all n locations
agcttcagtgacaccgacatgcctgcattgccacctggctggaaaggccaatgtcaatcaggggagggattcaattcctcatcatgcaacaggtttaaggctgaaaccttatcctcatctagtttcatattcacttcacagaccaaacatgacgtcttcaacatggttttgtcatcttcaatggctaacaattttgtggataataatataggaaagtgataggagcaagatactacaggagtggatatgaagctgctgagggagattcaaatgcaaaaaagtccttcaaatctgcaagggacagcactggccatgggagccacacagcctccatagcagcanggaggtttgtggcaaacattaactacaagggc

SEQ ID NO: 149096 - DNA, 403 bp, Glycine max
tcttgtgcatccatgtttttccttttgctgtgagaggaattggagtacatactactttattcattattttaagagaaacaaaatggatccaaaaaagggcttaaatttggtttatatgcactccaatcatcaacttttgtcaagaaaggattaaacgtataaaaaagaggagacaagattgtgggacattagtggagatgtgtaatatcccaaatttatggactttagaaatattaataaaagataccttttaaggattagctttaataattaatggttaaaggatacccttaagcattattaataatagataccttatattaggaactaatgagcatatgagaataagacctatatggggagccaaggcccaacaaatctactcacacaagtgatttatatg

SEQ ID NO: 149097 - DNA, 405 bp, Glycine max
  unsure (1)..(405): unsure at all n locations
agctngctctanatatacactgatgtttgtatttatgggaggaggttgtatgccatttttgttttaagggtagtgtcccactggtaaaactaactttccaaatttttgccttcgcaggaaatggccccgaggaagcttgcctcaaagaggtccaggaaggacaaggcagccgaaggaactagttccgctccggagtatgacagtcaccgctttaggagcgctgtacaccagcagcgctttgagaccatcaagggatggtcatttctccgggagcgacgcgtccagctcanggacgacgagtatactgatttccaggaggaaatagggcgccggcggtgggcaccactggttactcctatggccaagtttgatccagaaatagtccttgagttttatgccaatgct

SEQ ID NO: 149098 - DNA, 428 bp, Glycine max
  unsure (1)..(428): unsure at all n locations
tgcatgatttacaattatgtgctactaactntctctggtatgattaactacctctactntcttgttgtttgtctggcgtatggttctagttgggcaaaatcttgaagcttctacacgcaaggaagaagagtaatttgattataaggacttacctacattgtagattagtttttagtttacaacaagtacaaaacatattttaggaaatcataacattgttatttgttttgtctggaaaactaatatgtgaaaaacatatatgtgctaagagttttattgtgctcttgcatggtagaggtagaataatgatgcaaaaatggaatgaattatgagaataatgtagctttcccacactaaataccgctattgtagtggaaacttttacatggtaattaatgaacttagttataccattatcaatatcctta

SEQ ID NO: 149099 - DNA, 417 bp, Glycine max
agcttcttatccaaagctcatcttggtgggttaatctccttattccatggcttattccctagtggatggcgcctcctctcacctcttctcctttgtcttctgctgcatctccatggtggaaaatcacaattaaaggaccccattgaagctcaaagatccagcctccataaaatccccacaagcaagcttccatcaagtggtaaatagagcacaagagcttcaagtaggtgctccttaaacctccattaattatttgctttaccttttcttcgattgttgtttcttcattttttctccatgtatctcctcacatgtcttgtgataaatgtttttaacatgattatttagagtttccactgattaaacttgctatagaagctagatttgattttctatggttcaaatttcttgttcttg

SEQ ID NO: 149100 - DNA, 414 bp, Glycine max
ctatgctgcaaatatttacaatagacctcctcaacctcagcagctaaatctaccacaacagaacaattatgacctttccagcaatagatacaaccctggatagaggaatcaccctaacctcagatggtccagccctcagcaacaacaacagcagcctgctccttccttccaaaatgctgctggcccaagcagaccatacattcctccaccaatccaacaatagcaacaaccccagaaacagccaacagttgaggcccctccacaaccttccctcgaagaacttgtgaggcaaatgactatgcagaacatgcagtttcagcaagagaccagagcctccattcagagcttaaccaatcagatgggacaattagctacccaattgaatcaacaacagtcccagaattccgacaagct

SEQ ID NO: 149101 - DNA, 385 bp, Glycine max
  unsure (1)..(385): unsure at all n locations
atcgttcgcgtgtatgatatccactcgacaagggttgaagtacacgacaccttcaatcctataacgcaacgtggcggaacaaattgggcagttaacttgaatgtccattattgtcaatgtggaaggtattctgcgcttcactatccatgttcacacattattgcagcttgtggttacgtgagcatgaactactaccaatatatagttgttggttacatcaatgagcacatcttaaaagcatactccgcatagtggtggcctcttgggaatgaagcagcaattcctccttctgatgaggcatggacactaatccctgacccaactacaattcgtgcgaaaggtcngccaaaatcaacaaggataaggaatgagatggattggatca

SEQ ID NO: 149102 - DNA, 415 bp, Glycine max
  unsure (1)..(415): unsure at all n locations
actcaagcgttcataagtggtaatcatagcacaagagctcaagttgtgtctcctttaccttctttaatctngagctttaccttctcctccattggtgttcctacatttttctacatgtatgtcctcacatgtctggagctgaatgttgataacatgattttttataattggcgctgactaaacttgctattgaagctagatttgattttctatggttcaaatttcttgttcttgttcttgaatcacgaattgtgttgaatttacgttcctttgagttttgtattgctattattgtggcttcaaactaaaccataatatcctctgaaagcattaaacttgaaaaaacctcaaaatttaagtacatgttcacctttgtagtttgtcataaaccatgtttagtctgaactttacataa

SEQ ID NO: 149103 - DNA, 408 bp, Glycine max
  unsure (1)..(408): unsure at all n locations
agctntntgtgacacgtagtgtttgtcatgttccttttttgactaagtgtttgcaataatctatcaccaagataaagaagcttgctttattcgattcaagctgacactgaattgtatcatctactttatctactaagcttttcccgttgttttaagatgaataagaaatcgtgtcagcggttctcaatgacaacttagtttcatcattcagttaatcacctaatcgaacgtggaacaganaagcagaatctgataacattaatatgattgcttaattgcatttataatatcctataatatttgctcaaatttacttgtttaattttataaaattattatgaaaaaagtttttttacataaaatttgaatgtttaggatgaatctgaggtaaattttgaaagattntat

SEQ ID NO: 149104 - DNA, 420 bp, Glycine max
taattgcttattataaaaatacacctcattgaatgtgaatagtgagaaaaccacatataaataccactagtaccaacataggtctccgtaagtctatcaagtgaagaattaaagttagaataatattccctacaattagcagaaaaaatggttcagcaagaaatccgaaggggtccctggacagaacaggaggactacaaattggtgtattttgttggcatgttcggagatcgtagatgggactttatagcaaaggtatcaggtttgaaggtggagggagactgtaaataaaataggtatgaatatttggacatgctaagttatactatgaagcaccctttaaccacctcactttgttgtaggtttgaatagaacacgtaagagttgcagattacggtgggttaattacctccaccccga

SEQ ID NO: 149105 - DNA, 329 bp, Glycine max
caaacacgttcaaccctcatggtatctaaggatcacttgaaactaacgaaacaaatcgtttccgtgaagaaaatccaagccgaggcgctttcgtaactcgtctgacacgtttgcgtaagcaaatccgtgaagattttccaccgtccttcgttcgttcttccgtcttcaaccgcgaagttcccgaaatcgaacatgtcaattcattctatgtaccctatgtgcgccccacgtgcatcccgtactttaatattcatttacttactttccgtacccacttaagacgtgcgtgaggcattcactgaagtcctctctctccacaatgaaaaaaa

SEQ ID NO: 149106 - DNA, 371 bp, Glycine max
  unsure (1)..(371): unsure at all n locations
ccgaggannatggggtacccatcagatgttgtattatttttccgtcgggccanggagcaaaacgatgctncatatccacaaatcacgtataacccaccatcccctattgcccacctccaactgaactcacgtactcccatgtagcccttatcctcgttcctctcaacgccgggtccccatttattctccctagcttccacaacatccagtgaattctcacattcaatcatcatggacttacaaaaccaagcaaaacatggcaaaggcagaaactcctctccaatcacaacttagaatcacagtcttttcatacgaatacttcaataacatattcttgttgctattagttaacgctggatcgcatcgaaatt

SEQ ID NO: 149107 - DNA, 367 bp, Glycine max
  unsure (1)..(367): unsure at all n locations
caacaacttcttcttctttaaccttttctttttctgagcttcatcgacctgactcacatgagctatcatttgttcttcaatcattttcttcatattataagtcctctcatattgaatggtaagaagttggagtaggcattgaatgaacgagccgttgtcggcgtcctttataaagaagatgcaagcatcatcgaagtaatacttcctaactggtcgtaacacttgaaagacgtcatggtgcttagcattgtcatttccatcataaccaaaagtgaaggctntatgagtgtccatccacatgacctggttctagaagatctntacatcatatgcgtcaggagcacgaacaagccttttccctctaaac

SEQ ID NO: 149108 - DNA, 371 bp, Glycine max
  unsure (1)..(371): unsure at all n locations
tgttcttgattattacttagttctgtatcttgctntgtacaatatactnggccttcatttaactgtctntgcgcttggcggccacgctcaacaaagtattttcgacacctactgtacgttgatttgaccaatgctgttatgggaatgtttcgacaatccttcaaaaccttattgatacattctgaaaggttggttgtcatgtggccatatcgacgtccttctttatcataagccatcgtccattttttctttgaaattcgatcaacccatgtggctatggctggactcaatttacgaaatttgtgttaattctgatcaaaaatgtgcttgcaaggagtgtatgcttgctaaaaatagttatgaataacaat

SEQ ID NO: 149109 - DNA, 418 bp, Glycine max
  unsure (1)..(418): unsure at all n locations
agcttaaagtatgcccgagtcattctttttctatgagatgttgntgaagtattggcgatcagaattgccattccttggattatagggttgatccaagctcatgcttttacaaaaaggttcatcaagtcaagttgaaatatggaagtaaccgtcttgcaaaattggggcaaaaaatgaatcgagtcacatcactgcttcgtctactgccaaacatatttaggattattgatgtccttgttacttccagtttcaccttgacaaagatgtcatggaccatgttgaaaatctaaattgattcaaccccatatcttgcgtaaaaattcgcaatacttcaactgtacatcattcgcatgcatccattgctttcattggttgcattgctcggtgcattctttccttgaacaataaaataaaatga

SEQ ID NO: 149110 - DNA, 415 bp, Glycine max
  unsure (1)..(415): unsure at all n locations
tgtgccaatcaaatcactcctacatctcatctctagcattcattnnctttccttacccactcctcacgtttggttttttatggaaaaacatcataactaaacgcgccccaagggatccctatcgcaccagatccaaatctaaaacgatgggtgatcaagaggagacacangaacagatgaaagccgacatgtcggctctgaaaaaacaaatggcctccatgatggaggccatgttatgtatgaaacagctcatggagaagaacgcggccactgccgccgctgtcagttcggctgccgaagcagacccgactctcttggcaactacgcaccatcctccctcaaacatagtangacggggaagggacacactgtggcacgatggcagccctcacctgngatacaaccgagcggctta

SEQ ID NO: 149111 - DNA, 219 bp, Glycine max
aataaacccatgcctattatatctacacaaatcattatagacacataataataaccgcctcggctctatgaaggaacatgtcaccaattagaaccacaaccatttggtgctccccttggttcaggaattctatgatgctcatacaattggaatacaagtggatggattgatgcataatagcatttttactgaccactattgctaagaaatatggccaac

SEQ ID NO: 149112 - DNA, 361 bp, Glycine max
  unsure (1)..(361): unsure at all n locations
cgctttgaatctagtggagatgaattatcagtnggcttgttatctacaagcnggcggctgtggcaagctcaaccacatccatcactttctcttaactccaccccatgttttatgacatgtaccttagctgttgcttttggaatgttgttgactcttttttatatatgcctatggtactttttcttattccgtttgtaatttacagttctaggttggcaaaatacaaatgagagtgccgatgatataacagagactcttgctgtcctaagcatcaagatagataccagcgtccctatatgtgggttacatcctaaatgcgatcataacttgggggtcagggtattgttttttattggtaata

SEQ ID NO: 149113 - DNA, 290 bp, Glycine max
acaccaatcgcgaggtggaggatgaaccatgctcgccgcataataattatcgggacaaatgcacaatggcaaaataatccaactctctgcctgcgatattgttttattgctcacagatgctagcatgcactgtctgatgaaggcgcgcgatatgcctatcgcttatatgaaacgagctatctgtataatgagcaatggatagccctcacttggacaacccctattcatgagatatatgcatgccgtactgagtttatcactaatctccagaggaaggatcatgctgccac

SEQ ID NO: 149114 - DNA, 296 bp, Glycine max
ttttagagcgagctcgctggttgcaaatgctctgaacatctaaccacctcctctccgttcccaaaaagcaccatttgtgatcatttgtgttgtggttataattttctaagcaaaaataaaaatataatggaggctataaattgccactatgtttaaacaatttttattgaatttgattgtcaccgtcacactaatgttttgaaccaaatttaaagtatggacccatatttttatattccaaaatcacaatggaccactaataaacttttttaatttatgtcctctagacaaactta

SEQ ID NO: 149115 - DNA, 373 bp, Glycine max
  unsure (1)..(373): unsure at all n locations
ctgcagctcggaccggagcggcgtggggtcctgctctgatccgaanatttcctccacacgaacacgagaagcccgatcaccagcaccgaatcggaaaccgaaacgcccagcgccgactcaacaacggttcgcaccagctcggaattcgaagccatcgaagtcaaacaaacactcggaactactaagcgaagctcaaattcagaatgcctaagtttcactgttcggtgagttagtttctttctctccacctcgcgtgcagtgcactcatcttactctctctctctctctgtatatatatcgctttcggtttcggtgtgcgagagagagagttctagggagaagatagaggagtggtggtggttgaacgcaacac

SEQ ID NO: 149116 - DNA, 354 bp, Glycine max
caagttgggccaaatagtgtggagtcggaagtattggttttctctatccagagaggcacaataagatgatgaacttgcccgtgcacttgccatgttccttggaaactctgaatcagattcaaaggatgcagttgctaatgacaatgccctgcagcttgaggaagagatggtccaacttcctcctgttgatgagttgttatctacttggacaaaacttttgtcgaatgaaccacttgcttatccagtccgcgacttgcttgtgatgatatgctctcaggatgatggtcaacatacatctaatgtgggctcatttttcgtggaacggatcacagaatgtggtttggcttccttcaa

SEQ ID NO: 149117 - DNA, 421 bp, Glycine max
  unsure (1)..(421): unsure at all n locations
agcttatcaatgtcaggttgcaataagaattattttgtangagcacatggttatagcatatatacaaggttttaaatcacagtcgaaaactgcaattgtggctgcatttgtctacaatttgtgcaatctcaaattgcaatttaaaaccttggttacatatattttgacagtacagagaaataacttataaagtgtgacaaaagtaacataccagaaggttggaaataaaacagaaaataagaaggcacatggacttactgggatcctcagtagtttttgtagctgtaccatcaaagtcacatgttccaccagcattatgcattttttgaaaataatcattataagcataagaggcatgactcttcacgttattgggggaatagcaaggtctccctggttgaatagctacacagttagcttg

SEQ ID NO: 149118 - DNA, 367 bp, Glycine max
  unsure (1)..(367): unsure at all n locations
tgggttaaaactctctgttgttgttcagaanaaaccatctgatgaaggtgctttgaggtttattttanttttttccttttgttcttttcgtttgttcctgtttgatgttaggtgttgggctttgatttcaccaatggggtggcttatgggttttgacattttcttttctcttgctcttctttgatgtttgggtgttgggcttctatttttttattggggtgggttaatgcataacacttcgatttcaaatgtttctctttgaatattgtagtcgagtatttatttattctttggttgtaatcctatctctcttattctctttctgaaatcgtatattgcctccgtcttttccatttttatttcattc

SEQ ID NO: 149119 - DNA, 415 bp, Glycine max
  unsure (1)..(415): unsure at all n locations
aaacatggaatctataaatgttatgtatttttaaagcctcttccattacttccattggtatttgatgacataaaaaaggcattgctgaacattgagttggtatttttggtatttcagacccaatgaatgcagggtatatagtaattaacctagtgaaagccaatgtcacaaatgaaagggacaccaagctttgccatataagctttgatcctatcatccaacccaatgaatgagggtatacctctgaaggcacttatcctgcattctgtccaatgccacaaccaaagggtaactaattgtaaaccctagctccagccattgcaacattntactagctcaaccaatcaatacacgaatagagggcaatttcacacattaatacaaaagagtatatatatatcaccaagaaggatat

SEQ ID NO: 149120 - DNA, 419 bp, Glycine max
  unsure (1)..(419): unsure at all n locations
ctcaagcctgatccttgaatctngattcttgatccttgaaatcaactatcctcttgaatcttgaagtgtnctncaactttcctcttgaatcttgaactcattctttgattgacctttgagctttttctcatcaccattgtcatcatctttgatatcatcaaaacatctttgaatcaatcttgattcatcatgaagctttgcttctacaaaaacaaggttgtccaagacctcatacaattaatatagcaacttataccctaatgtcacatcatatcagagcattctgtcccaacgtctttcagcacaaagttccttaaagtaattcacctagtcatctgctcccccgaacacatagttcaagatcataacaggatcaaaacacacacaatagagggagtgagttatcacattcctaacta

SEQ ID NO: 149121 - DNA, 416 bp, Glycine max
  unsure (1)..(416): unsure at all n locations
agctntaccttttcatgtgatgcaaataatttttcttccanaaatggtgtgtgatgatattgacaatgcttgtcgcaaatttattttgggagatatagataatggcaagaagattcacctagttgcatgggatactgttttctcccctaaggataaaggcagtttatgtctgaggaaggcacgggatgtcaatatggcttttatgtttcgagctaattggagattctgtaatagagatccccctcctttgtcagctattatccaggagaagtatggttgccgtactgatttgatacctaatattaagacgaataagcttgggagcaatttgttacgaataataaagaccccatgcagctggcatagtacgtgaatgtagtgcacaacactaacatcgtgctttctataagatatgt

SEQ ID NO: 149122 - DNA, 410 bp, Glycine max
tgaacaatgtagaacatcttcttttatcttgtgtttcttgctccattcattgaagcgcatatccacttgcaattccatagtgtcaaacctctcaccaacaaaggtttgaagtataagtgttgaatgaaaagggtaacaagatgaagataagacaaaggggcattcaatcgcaatgccttatgcatgcgatatctaacaaggtgtgcccaatcaatttgttaacctttatgaaaggcccacatgacaatgagatcttcttcagaaacctgtgcaaggtttgaagatctatgaagcaagatgtgaacaataaggtaatggaagatgcggctttcaaaatccaatgaaccgacaagaagccttccgatcatatactcttgattggtacaaaccaacaggtgggcatcatgtac

SEQ ID NO: 149123 - DNA, 382 bp, Glycine max
caaaatataacattcttatccactcaattcatacaatttctcattcaactcaatcacaacacttcatttcatacgaaatcaaaccactgaatatcatattcaatcagttcactgttcaaacatgcttttgtacaagctacaaacactaaaacaacataaatttaaaagtctggaatttaaaagactaataaagcataaactaaataactgataaaataaaactgttcataatttgcaaaaaattttaaaaaaaaactatgcaaaatttaaaactcttggtcatcctactgctggtcttctgcatgctcgttcagatccagcactagagcagctggtggatcctgtgaaatgggatgctcttgctccaatgctggtgcggatg

SEQ ID NO: 149124 - DNA, 424 bp, Glycine max
gtccacaacatccacgcgaaacaacagtttgtgcagcacattgcttttctattcaagcaaaacagagcaaaggcagaaaactttgccaaaacaccaaccaaatcacaactttatctcacttaaagaccccagtcacaattccttcgatccaattcgttaaccgttggatcgactccaaaatgttactggaagtctatagttcatgaacctacattgtgaccgttgggatctactagcaaacatccaaaactcattctgtactactctttccacagccaaccacacacaagcatttttctgcacaaagccaaaatcctgctgcatctattttgacagcaaaattctgcataagtgcagatttcgaaaatcacactatccttcattcaatcttgccgaaatcaaatcctacaagtgccatatcatg

SEQ ID NO: 149125 - DNA, 437 bp, Glycine max
  unsure (1)..(437): unsure at all n locations
ccggatccttaagtcaccgcggctgcagctgtctcgctagcagaaatcacnatgtgtttgagcgnggcctctcgcgcttagtgaattacttcattgggttggaattgcacttggcgtgcctgtctcattaagtaagtttccctcttgggtggggaattgtgcttaatgtgcctgcctcgcttaacaaatttctctctcaagttaagaattgcgcttagcacgcttgtctcactaagcgagatgtccaaaactgatattttacaaatcccaatgatagcatgaagacttggtttacgaacctacactccaaatttgaaggcgatccaacggttaacgaatccgaggtcatgattttaccataatatgtttggttaaaacatgaaatctcacaatttcaacataggtcaatcaaattccacataacctatcatccacat

SEQ ID NO: 149126 - DNA, 412 bp, Glycine max
  unsure (1)..(412): unsure at all n locations
tgcactagccaagtgtccaccatggcgcagcccatagttttctattctccacccagntatcaaggaatgttagatccattttcaattcagttcccaacaaatcctcatcattctaagttgtgtaccaatgacgacgacaacaacaactattggagcatggaggatatctggtcaatgcaattagcccattactgaacgggaattaaacctataaacataaatataaataatatatataaacctaagtgtctaagttccataaattaagctgtagtctctggcttaaaacatgttaggtttgtttatacaagtagttggatgtntggagtacttcggtcttttgcgtaccatccatatttaagaactaagttaagtatgttccgtaacttatgggctcttaattaaactatat

SEQ ID NO: 149127 - DNA, 348 bp, Glycine max
tccatacatacaacctcggagtcagctcaatcacaacgcatgatttcgtactaaatcgaaccactgaatatcatattcaatcagttcactgaacaaacatgcgtgtggacaagctaccaacactgaaacaacatgaagttaaaaggctggaatttaaaagactaattctgcatatactaaatgactgataaaataaaacttgttataatttgcaaaaaattttaataaaaaactatgcgaaatttaaaactcttggtcatcctactgctggtcttctgcatgctcgttcagatccaacactagagcagctggtggatcctgtgaaatgggatgctcttgctccaatgc

SEQ ID NO: 149128 - DNA, 427 bp, Glycine max
  unsure (1)..(427): unsure at all n locations
actcaagctgggacctgaatnggggccatgtttgcagcccctctatcataggtttctactcggntcaaaaacaaaatatgagtttggttttcaattataattacaaaatagttcactttattttcagtttctcattccaattcctatttccaaacattcatgaaaaaaattgcaccagccacctccgataaactttaaacaaaaaaaaaaactaaattcgcgtttaataataaaataaattcaatagaagtttacacgatcattcactgagtctccgacaacaagcattaccgaaattcaacaattaccttccataggttgaggaccttctggcaagtcagaacgaggaaccagcatctcatcgtgctcctgctgctgctgttgctgctgcacacaacacaacataatcgaacatctaaaaaccctc

SEQ ID NO: 149129 - DNA, 410 bp, Glycine max
agcttgacaaaaacccagtattctttgttctatcaagccattggtggctataaacaaatcaaaggatttgttgtttgggattgttgactgactaaaactatgaatgacttacaaatggatatataatcagctctttaatcttttctctcaatatgttcaaggtgttttgagagattttcaactttacaacaatatacataaagcttttaccgtttgtaatcatctattggcttatgcttgctatcatctagaatctcatacacataatagcatatcataatttgatgatgcattagacactgcttttaccatttgtatttatttgcttctaatcaaaatcattagaagtcatgattcgtcttaagttataaacctaactttgacttaaacgaatctcctttgttttatga

SEQ ID NO: 149130 - DNA, 355 bp, Glycine max
  unsure (1)..(355): unsure at all n locations
tgagatgaggaagtgttgaagggtgaaacttcctgcttttattgttgaccacagagtggtacctggagatatgtcgcgggggtcaagagaccttggggacatcangtggggtgctattgcccaaaaccaagcttgaccaatcccgacccaacccgggcatagtcgctcagtgagaccctgtgatgtacctaaacaggcgagctcctggcagtcaacagataaaaggaacaaagaccacaaagcaaggaagcttgtgtggtggctggccagctgtgaatcttgtgtgatatatgggttatggcctctggtaatccattaccaagggtgggttatcgattacaaggcctaaaaatga

SEQ ID NO: 149131 - DNA, 359 bp, Glycine max
  unsure (1)..(359): unsure at all n locations
tacttgagcttgaagctggtgaatgcctttttaagtcacgtagctatggggaaataccttgtcatttgaggatccttagtttacgaatctccattcagttgtctagtgataaatttggagctgctccagcacttaaagtatttggttcctactcttttttctaatcttaggccgactaagaaggtgtcgcaacatgcccttttgcangcgagcgaggcaaggctcacgggtgcgctttccaaaggaggaaagatgcgtggagtcgccaccaacgtttatttgtgggaaacgtcggaaaaaccgaaggaaaccggtcaaaatgaatattctaagttcgggagttgtatttacgtgtgagg

SEQ ID NO: 149132 - DNA, 419 bp, Glycine max
gaatgcgcaagcacatgagaccaatgcataatgaagaatgtgtcctacattttatattctcacgcatttctatttaatctaggcgaaagcccatatgacctatgtgaaaatacttatcataacatgacgagtagaacctatcatacaatgttacataatcgtatgagaatcaaaagaatcaaaatcatacgttctagcatacaggaagacctgaaacattcaattttatcaaccaattcacattatgatatgaattggtccatcaagcataacaatctcgtgatcatcatactaaaagaaaaattacaatacaggaacgattgcaaaataaaacttcaatgtgattctctcaagatcctatcagtgtgctcacgtgcgtcgactaatagtgataatgtcgcctgtagcggctcttccaa

SEQ ID NO: 149133 - DNA, 409 bp, Glycine max
  unsure (1)..(409): unsure at all n locations
agctntaaaanttgaattaaaacgtgcttaattattggtaatcgattaccatatatgtgtaatcgattacacagggcaaattttgaattgaaattttaatagctgtttgtaaatcagttttggccactggtaatcgattacatcctctggtaatcgattaccagagagtaaatttcttgtaaaagactttttaacttaaaattcttggccaaaccttttgctacttcaattggaattcccttcctatttaatataccctttctaagactctatagacagtcttgatcatccatcttgaatatctttaatttctttgtcttgaataaagctttgagacgcatgtgatcttttggcatcatcaaaacatcggcttgatcctttgtctacaatctcccccttgttgatgatg

SEQ ID NO: 149134 - DNA, 400 bp, Glycine max
agaatcggacatccgtgtcaaaagttatgaccattcgattttcacgatatctttcgttgttcaatttcgagtgtcaatatatgtgatgcgccaaaattggacattcgagttaaatgttatgaccatttgaatttctcaagagctttcgttgttcaattctgaacgtctcgttatgtgaattgcctgaatcggacatccgtgtgaaatgttctgaccatttgaatttctcaagagcttccgttgttcaatttcgagcgtctcgacatatcattcgcccgaattggagatccgtgtgaaaagttttggccatttgaatttctcgagagcattcgatgttaaattttgagcgtctcaatatatcatcagcctgaatcggacctccgtgtgaaaagttctgacc

SEQ ID NO: 149135 - DNA, 375 bp, Glycine max
  unsure (1)..(375): unsure at all n locations
ccaactggccatgaataaaaaatctgcacttgtcaccaaactttgnggtttatgctcctctgccgaccaccacacagacctttgcccttctgtgcaacaatctgaagcaactgaacagcctgaagcttatcctgcaaacatctacaanagacctcttcaaccccagcagcaaaatcagccacaacagcataactctctccagcaacaggtacaatcccggatggaggaatcatcccaaccttagatggtcgaatccttcacaacagcagcaacaacaacaaccttattntctaaatgctgttggcccagtagaccatacgttcctccaccatccagcaacacaacaaaagcaaacaccaccccctccccccaatt

SEQ ID NO: 149136 - DNA, 430 bp, Glycine max
actcaagctgaggattatggggtacccgtcatatgtggtactaggtggcgatcgggcgattgtgcaagttgactctccacatccacaaatcacacataaatccaccatccccagttgcccaccttcaactgagctcacgtactcccacgtagcctttatcctcgttcctctcaacaccgggtccccatcaatccctccaagctttcacaacatccaagcaattcaacatccaaacatcatgaactatccaaaaccaagaaaatagggcagaggcagaaaagtctgcccaaaacacatttcaataccacagcttttcttactcaaataccccaataacattctctttgttccgattcgttaaccgttggatcgactcgagaattttactggagggccctaatacataaatctacattttgaccggtgggat

SEQ ID NO: 149137 - DNA, 406 bp, Glycine max
  unsure (1)..(406): unsure at all n locations
gcaactacgagcggtaagtccttctcactcttctgntatgcaggtagggggatgtcatatatgtggaggaacacatgagttaagcttatgcatggtccaagacgacgcatccaatgaagttaactacataggcagtcataatcatcatggattccatcaaagaggaccattaagattctatcagagtgataattttttgcaggaccacgttggagatattatccaagtaataacttcaagcaagggggttcaccttatcaacatcatagccagggaccgagtcatcaagagaaacccactaacatagaagaattgctaatacaattcatgcaggaaacaaggtcacatctgaagagaactaatgcagcaataaaaaaattggaggtaaagataggccaactagctg

SEQ ID NO: 149138 - DNA, 404 bp, Glycine max
  unsure (1)..(404): unsure at all n locations
tgcggattataattaactatgaatcgtgtatatattgtttaacctattttgaatnctaagaatgcgatggaacccgttgaattgccttctccgagtaatactatttgactcaattatttgttaggcattagttttttattgttcatagaaaaaaaagatttgaatcttactttcatcacattaattatttgtgatcaatcaattgattttttagcattagtttatgattacaataacttttttatttttaagtataatgagaaattggctttttaacttatgaaagaaggtctgaaaacaatacgagtagaagtgtaatttacccaaattcacattcgttgatgagttaacacttatcatctcaacaactagaatttttttncttaaaagaattatttaacaaa

SEQ ID NO: 149139 - DNA, 258 bp, Glycine max
  unsure (1)..(258): unsure at all n locations
ctcttacttggaaggcattggtagtataatanggatgttttccataatggtgtcacaaacaagttttcatttgtacataaagggaaaaaggtgaccctcatacctttgtctccaagtgagggttgtgaggatcaaataaaaatgagggtgaanagagaacacgagagaaaagaacagacaaacctcattgatgatagagagatcatgaaacgaaaataagagtggagataaataaaagagtgaaactgtaaaaaaaaa

SEQ ID NO: 149140 - DNA, 414 bp, Glycine max
tgtgacacaagacacgagagaagaaacaggcatcatatgtgaccaatatggcccgtggtcatacaaattgcccctttgagaaacttgttgccttattacatcaagaaatggaactctagaagtagtattgagaagttggacattccagttttccaactttttaggcctgagtttctcttctgttgttggtagcaaaatactgaatattcattcaggcaatgcttcttttaactaattatgttgtgggggcaactgagttgaatcagttttaaaataattaattcaaaaacaaaattaactagaaactattattacttaaagcaaataaagaacatactttgttctttatattgtcactggacatattatgggtaacttctagaacatcatatgggttgtctacctcaacttcca

SEQ ID NO: 149141 - DNA, 352 bp, Glycine max
ctgcagctgcaaattgaattggacgacatttctattggtaatcgaacaccatatatgtgtagtcgattacacagggcagatcctgaatcgaaattgcaatacctgtaagaaaatcattcttggccactggaaatccaatgcaatctccggtaatccactaccaaacagcatatctcttgtggagactgttcccttaatactcctggcctatccatatgctacttctattggaagcacgtatctatctgacataccccaatgaacactctgatcaccggcatgaccatacgtctagaatatctctaacgactatgtctagagataagccatgagacgcgtgtaatcttttggc

SEQ ID NO: 149142 - DNA, 409 bp, Glycine max
  unsure (1)..(409): unsure at all n locations
agctctggaatctttgccgacttgattttttcttaatgtgttccattagcttctcaggacgatatcttgcatacagaactcccaactcagtaaagatacccatatgtgcacgctccaatcctaacccactctccattagagatatgagttcattgaagcatcctctgttctgatatgtacaaagataagtgggctcatacttagcccatgggcccgaaatctaccctaatgctcatgagaaccctagggccttctcttgcatctttggctcaatcttcttggagtcttctatccaatgcccttggggggtaggattgcatcaaggggggaatccacttatttaagcaagtggaataatcttgttttggattctaatctaaagaaatnctaatctaatatgtacaaagat

SEQ ID NO: 149143 - DNA, 418 bp, Glycine max
  unsure (1)..(418): unsure at all n locations
tgtgtcacaattcattgtgacagtcaaagtgtcattcacttagctaatcaccaaatgtaccatgagaggacaaagcacatacatgtgaagctacacttcatcagagatgtgattgaatttgagaaggtgaaggtggagaaggtttcaacagaagaaaacccgactaatatgttcacaaagtccctctctagtgtcaagttcatgcacttcctggactttttaaattttgaagatgcctaaagcagattggtagaagtgcagccctaaatcacagggtagacgcttgctgatttggagtcaaggtggagatttgtggtgtgtgtctcaaaatcacaaatggcacaagtgagaaggctctaagaggtgttgtcataactgttttcagttattataactgaattagttntagcaccaaatc

SEQ ID NO: 149144 - DNA, 409 bp, Glycine max
  unsure (1)..(409): unsure at all n locations
gtaggattatggggtacccatcacatgtggtactangtggttgtcgggcgaaggngcacaacaagttttccacatccacaatgcgcgcataaacccaccatcccctgttgcccacctccaactgagctcacgtactcccacgtagcccatatcctcgtttctctcaacaccgggtccccatcaatcctcccaagcttccacaacatccaagcaaaacaacattcacacagcacaagctatcacagccaagcaaaacaaagcataggcagaaaactctgccaaaacaccaaccaaaaatcacagcttttcccactcaaagaccccagtaacaattccttcgatccaatntgttaaccgttggatcgactccaaaatttttctggaagtctataatgcataagcctacatt

SEQ ID NO: 149145 - DNA, 364 bp, Glycine max
  unsure (1)..(364): unsure at all n locations
tgtgagaggtacaagactttctagatgaattgccccttttttgatatnaacaacggncgatcaattatacatacttcttggaggattgaagggcaaacaaacgtgatgtttgatgctgtatcttgtggaggaataatttcaaataatacactcgaagaggttgctgagttgattgacaacattacaaatgtttaattgaccaacctcattaataccatgattggggcaattcatcaatagtatcttgttcctctcaagctttacacaatggttcatttttctgacaaaagcttaatatatatttggcttagctagactgcttattgcctctgggaataaataatttaaaaacttgctttcaatg

SEQ ID NO: 149146 - DNA, 412 bp, Glycine max
agctataaaaataatgatcatacggttttattcgctaattttgcaaacattacattaacttgaacatagtggacccgaattcaaacattacattaacttgaacatactaaaaacaaataaaatttgcattaaaaactacaattaagtaatactaactttgcattcaatcatgttctgatcgagacatgtcaccttccatttccattatctatttactaaaaacaactaaattttttattgaaccatattgtttcccgtaattagactgcattaagacctttagcacgtcatcgttagttttcaactcaataatttcaaatttgatagacttacctgaatactcatagtggcttggttgttgaaaaaacaatcgtcttaccatttgtgaatcatgaataccataaagggaaaa

SEQ ID NO: 149147 - DNA, 410 bp, Glycine max
tagcaacgacgagtgggagagcgtagggtagaattgtatctgggtggaaggggagggcgtgcatggtggaagggattttgtactgctatgattatttggggaaaatcaaagggttcaatgtggggcgcgaggtgtgggaggagttgaaggggttggagaagggtttgcccaggtttctgtgtggggctacgatgactgatttgggtgggaaattgtgtgtggtttgggagtgtcaggggaatgggcatgaaatagagatttagtgcactgagattggagtgaagaagaattcggatggggaattgtggggtcaacttggttggttcgggaaggttctttctattcccaaaggctcttccattgtcaactgttcttctgtttccttgtgaccatacattacatgtaagcat

SEQ ID NO: 149148 - DNA, 337 bp, Glycine max
  unsure (1)..(337): unsure at all n locations
tgggatatagcttgtttttccttaacactaattactagtgtagggtcacactcgttttaatctgattctaaattaacacaataataaccatattggtgcaataattgttgtgaataaattataatcatgtgctaaaagcagatatagaccatgccaatcttctgcaattaaaaacgcaagcatataatcaagtntcgccaataaaatactcaatacgtaagttaaaacaaaataaagattgatgtccctcccatggtgattctccttccaaaaggctgttgaggagatgtcaatattttaagccttctcaatggaataataagaaccaagcaacaac

SEQ ID NO: 149149 - DNA, 404 bp, Glycine max
  unsure (1)..(404): unsure at all n locations
ttaagagtgatgtatnagtgttcgttcgtaagctctgttttataaatcgattcgctgaaaaggggaagcaatcacaacttgaattcctggcataaaaaactttaaatttgtgtctgaataagtaaatccgttgtgcttcaaatgaaactattctattgttataaataacttaaatgaaacctgctggaatatgcagactttgttccccttcttatctgtatcttcctaaaattttaaaattctattcattataccttctactatttccattttatttcttcgccccatctggcaccaccactccctgtcggcatcttcttccaattactttttctttgatagatttcatcatcagcatgaattcgcttataacactgatgtttcacaataatgaaagattcatg

SEQ ID NO: 149150 - DNA, 401 bp, Glycine max
  unsure (1)..(401): unsure at all n locations
agcgtgccacccaactagaacaggcgagttatgtttcttcctccagaaggcccgccttctggagaacttcctggaaggccccatgggcctggttgctatttgcacccccccctttttactaaatgcacccccttgcctttcttgcagatactttttttcgcacggcatacaaacttaagaatatcgaaacgatnctcattctatttctgtaatgttacggaaccttacagatcacgttatcatgcccttttttggcttctgggatgttacggaactttaccgattgcgcactaacacttacttttgacttctggcatgtcaatgaacttcacgggttgtgcaacaacactttgtttggactttcggcatctcacgaaactacacaaattgattaacgattg

SEQ ID NO: 149151 - DNA, 427 bp, Glycine max
accaagcttatgttgacgatggaaattagagcgaagaagagttgtctgtcatccaagtcttctaatggacaagatgaggggtatgaggaggatgatggaggaacgaggaatgagaggtatagagagaagaaatcatataagatatggaggtagacaaagagaggaagggattgaggaagtgaatgtgaagatccctactcttaaagggacttatgatctagaagtgtatcttgagtgagagatgaaggtcgagcaagtcttggcttgctacaaatacaatgaagagaagaagatcaaattggcctccttggagtttgagggacatgccttagtgtggtggaatcaagtgacgagtgattgttataggatgagaatgtcgttgattaatactttaccagacatgaaatatttttaagacagagattta

SEQ ID NO: 149152 - DNA, 222 bp, Glycine max
gtctatccttatccaaactctttttttctgcatacactcaactgttaataaatatgatctcgactgtaatcatggacatctaaattggacccccctgaactcatttcttatttaccgtgaattgcgaatacacattcgagggaaatcctcatggaacataatgacattcatatttgcttttttaccctggactctgcacctctgggatattagattttgaac

SEQ ID NO: 149153 - DNA, 255 bp, Glycine max
aattgggcaatctcatgtcttctctagctcgagaaaacgctgcatgattgctatatccagcgataactggaatctccacattggtgataatgtaaggaatcgactattaattgggcatctgcctttacaaagtgtgatggggaaaataaagttcttgacgtattgttagaggggatgtggtgattggctgctgtcaaataaattctttgaaacgatgacgaggtgggatctttggaatatattattactcctgtg

SEQ ID NO: 149154 - DNA, 385 bp, Glycine max
  unsure (1)..(385): unsure at all n locations
aagctnnactttttgctgggcacactaatagaaaatcaaacgatgttccacgctcttcatgggaaagagtgatggatttctcatgttgagaaagtaattatgaccgttcaatgttgcatccttttaatcttgtggctaataatctgctgcgcaactggttcgaaagctctgaagaataatatgtctagtattataacgcattgttggtgtctatttctgaaaattgatttgacgaacctgctttttcgtgtagtagttttataagtgtggagtataaggtctttgtcccctaatgagagtgctttaccattgtttcacccttggttgtcaaagatggttacaaatatatgttgactggatacaccccttgtgtttgattttttat

SEQ ID NO: 149155 - DNA, 411 bp, Glycine max
  unsure (1)..(411): unsure at all n locations
tgcacctagagtgcaaaagacatatgcctactntanatttatgtcagcaattgctgaagctatagctaaggtcagacactacttgctgggacacaaatttattatcagaactgatcaaaaaagcttgagatcattgatggaacaacccctacagacacctgaacaacatgagtgattacacacgtttttgggatatgattttgtgattgaatacaaagccggaaaggagaatctagctgctgattctttgtcacaaatgatgatgctgtcttggtctgaacctcaagctagtatactgcataagattgaacaaaccactgcatagaatgttgcatagcaagaactgatacagttgtgtaacaactaccacaatcatataaaaaatactcaatcaagggtaaattgttgtat

SEQ ID NO: 149156 - DNA, 409 bp, Glycine max
  unsure (1)..(409): unsure at all n locations
tctacttatgtggcagggcgggcttacttcacttncttgtctccaacgcgagctctgaccactgttcttccttcccgcgatgcttcttntcatgtccgcctgagtgggcttatagcctaaaccatacttcccacgatttccttgggtttttatcaggctagttatgccgccattgtcttttcctaaacccatcccgggttcataaccgttccccaacataactcgggccatcattaccgccgcatctgacagacaaggttgcccaaagagggagtccacggaggaaatgctgaccaccttaaaagactggaaagcgggttctaacgattcttctgcggcttccacataatgcatggaggatgggcagcttaccaagatatctttctcgcctgacacgatgaccaagtgc

SEQ ID NO: 149157 - DNA, 357 bp, Glycine max
ggggagcaccaaattgaatgaataaaagaaggagagacatggaactttgaagtgtatctcaataagactttcattcctcaacagtaccacaagtgttacacatgcttctatttatagactaggtagctcccttgagaagctttcttaaaacaacgttcttgagaagcttttttgagaaagacttcctgagaagctagagtttagctacacactcccatctaataactaagctcacctgcttgaaaagctagagcttagctacacacacccctctaatgactaagctcaccttcttgagaagagaagctagagcgtagctacacacccctataatagctaaactcaccctcatgacaa

SEQ ID NO: 149158 - DNA, 401 bp, Glycine max
  unsure (1)..(401): unsure at all n locations
ntaaataggctctgaaatcgcaatgttgcgcttaacgtctccctcgcacttagcgcaggtaagtggattcgggcttagtgtcagtcgtgcgttgagcctggctaaagatacctgctgcgcttagcgcactgatctcgcgcttagcgcgcggccttgatattgatgccctgccagattcttctgtcgcgctaagcacgctgaagctgcgcttagcggtggatgcgcgcttagcccaactgctgagctaagctcaactgtcacttttgacacttcatgacttaacctttttctcacctgaaatcgcacatatttcatcattaaatccaattgacatattctatagacagctttatccatataacaatatttatgtactaaaatcactacaaaataaccataaa

SEQ ID NO: 149159 - DNA, 419 bp, Glycine max
  unsure (1)..(419): unsure at all n locations
agcttcanagaatcaagatcaagatgcaagtcnncattattcaagaatcaagtgaagaattaatcaagataagtatgaaaaagtttttcaaaaactgagtagcacatggatttttctcaaaacatgtttaccaaagagtttttactctctggtaattgattaccagattgttgtaatcgattaccagtagcaaaatggatttgaaaaacttttcaactgaatttacaacattccaattgatttcaaaaagttgtaatcgattacaatgttttggtaatcgattaccagtatgcttgaacgttgaaattcaaattcaaatgtgaagagtcacattctntcacaaaaaagatttgtgtaatcgattacactgatttggtaatcgattaccagtgatagtttctgaacaaatcaaaagatgt

SEQ ID NO: 149160 - DNA, 427 bp, Glycine max
  unsure (1)..(427): unsure at all n locations
ggaaaacaagactatacgaggtatcttccttgggtatatttatatctctaagggctaccgngtctacaacttgcaaactaagaaactcgtcatcagtcgagatgttgtagttgatgagtatacttcttggaattgggatgaagaaaaagtggagaagaacgttcttatacccgctcaactacctcaagaagaaactgaggaagaagacccaggtgaaccaccttcacctccaccacaacaacaagatcaagaactatcatcaccagagtctactccaagacgattaagatctttggtggacatatatgaaacctgtaacttggccatacttgaacctggaagcttngaagaagcgtcaaagcaggaattatgggtcaaggcaatggaagaagagatacaaatgatcgagaaaaacaacacatgggag

SEQ ID NO: 149161 - DNA, 414 bp, Glycine max
  unsure (1)..(414): unsure at all n locations
agctntgaagaacaaatcacgaatcatcttgtatganatattntttcattctttcttataaagctttatgttgtgatattcttctgtaagacaatcatcttttagtcattgataaatcttacacaacaaatcttgttgatttgtttagagtcagttgtgacttggtagcacaaagaattcaaccttggagtagagcttctctttataatagtcaaaagtgatagtgaataatacttgtaacttttgataagttagtggaacttggtaggtgccataccctaatttcgtccgggaactatcgttcgttgatcttttgatccttgctagtcgacttatggtgttgaacgtcaattacagtgcaaagcaaggaaccatntggtgtttcgatcaggaagacaaaagataccaagaaag

SEQ ID NO: 149162 - DNA, 387 bp, Glycine max
tcttctccgcgaggcgcgccaaggcttccttcttctactcctctaacaggttagttccccttccccttacccttagcttgtaatgtgcatcactgttagcatagcaatggaaccttatgatagcaatggaaccttagcatagcaatggaaccttaggatagtaaccttatggtagaagacgagaggggagaagacgagagtatgccggaaaaggctgacggcgaagtcttccggaagacccgttaggggttcttccagaagtttcggaagaacatttttcggaaagtttccggaagaactgttcttccggaagtaaccaaacgtcttctggaagaacacttcttctggaagactcccggaaaacctcttccgggaactttccggaag

SEQ ID NO: 149163 - DNA, 394 bp, Glycine max
gcttccttgaaaagattcctaaagaagtctgatgcttatctacacacacctctctaatagctaagctcacctccttcagatgagaagctagaacttagctacacaccccctataatagttaagctcacccccatgacaaaatacatgaaaatacaaaaaaagtccatactacaaagactactcaaaatgcctcgaaatacaaggctaaaaccctatactactagaatggccaaaatataaggcctaaacaaaggaaaaaacctattctaatatttacaaagataagcgggctcatacttagcccatgggatcaaaatctaccctaaggctcatgagaaccttagggacttcccttagatctctggcccaatctacttggtgtcttctatccaat

SEQ ID NO: 149164 - DNA, 425 bp, Glycine max
  unsure (1)..(425): unsure at all n locations
tggtttgaggtacttacccgttgaagactaaacaaaacgtagaacgaacgatgaatcttgaagaacgatcaagaatcttcgcgtaatttctcacggaaacgttacggaagcgcctcggctaggatttttttcacggaaataattttcctcagcaattttgagagagagagaagtgcctaagaggctgaaccccttctcccttcactcctccccctatttattgcaaaataggggaggagcttgccacccagctcgcccaggcgaccaaggttgcttcctccagaagcaacagccttctggaggaaggatatggaaggcccaagtgggccagattgctatttgcaaccccccttttaactaagtgcacccncttctatttttttggtaattctttttccgtaacgctacgaaactttacgaatttc

SEQ ID NO: 149165 - DNA, 419 bp, Glycine max
  unsure (1)..(419): unsure at all n locations
agctctcacaggtcatgtctttgnagtttttgttattagcctcaagcttacatgtctgagtttcttgtgccatatccagtgattttctttgatggataatacacatgttacattttgatttgatagttcactaagattaatcttataaaggttacctttccatttatcaatgcaaagttgggtatcatttttgagttggacgacacacccttctttgctaaaggaaacatcaagtccactgtcacataattgacttatgctaagcagattttgtttaatccctttaacaaatagtacattgtcaatgggaggatagggatcaatacttatctttcctacccctgccatcttccctttctgatttcctctaaaagtgacttccaccatgcaagagagtcaggcattggaacatacacttt

SEQ ID NO: 149166 - DNA, 392 bp, Glycine max
  unsure (1)..(392): unsure at all n locations
tgtgaacagatgtgactctacacatgtgaatttgaatttcaactttctattgcattggtnatcgattaccacaacattgtcatcgattaccgccttttgaaatcaattggaacatgtgtaattcatctgaaaactttttcaaaaacatcttgctactggtaatcgattacaacaatcgggtcatcaatggccagagagtaaaaaactctttggtcaacatgctttgagaaaaaattcatgtgctactcaacctttgaaaaaaacaccccatacttatcaggattatgctatgtcgcgaggcttgaatagcctttccttgagtcttgaatcttagagtcttgaatcctgatctcttgaatcttgagagtgttcttgattctatcttgaacatc

SEQ ID NO: 149167 - DNA, 161 bp, Glycine max
atatattaaccatattatataaaaaaaataaaagaactaaagacataaaacgtccaaaaatatatttaaaaaaaggataaaactacataataaatttaaagatggcttagcaacattagggataaatagaaattagattataatggtccttttgaaatttg

SEQ ID NO: 149168 - DNA, 431 bp, Glycine max
  unsure (1)..(431): unsure at all n locations
tgttttattttaaattataaaaataaataataattattcttacctattacataaataaaaactaaaaagttagtggaaataaccttcatccctatgtgcaaccatcatctttttaaaaggttcacaaaacataaaacaaatctataaaagtatatcaattatgagtctgaaactattataattgattcatcatcattatcattatcaccatatttactataataataatcattgcatccataattgtaattattgttattatcattataattattgtcgctgttatgataagtatagtgtgttatcattaccatcaattttatggtcgataaaatttgtgagttgttcaaaaagttangaacaaaatgcattatattatatttctgaaataaaatttgtgataaataaaaatttgaaagaaaaaatcaatc

SEQ ID NO: 149169 - DNA, 316 bp, Glycine max
ctttatggagggatatccttctgtcaaacaatcattttttcttcatggatacctcttacgcaacagaccttgacgatgagttgatagtcaagcgtgacttcggtgctcaaagaattcaaccttggagtagagctactctttataatcatccaaagggatagtgcctaatacttgtcacttttgataagttactggaacttggtacgtgccatgccctgatatcttgcgggaactatggaccgccgactcccagatccttgctagtcgacttatagtgacgaacgtcgattacatgcgcaacatcaggaaccatttg

SEQ ID NO: 149170 - DNA, 232 bp, Glycine max
atataggtttggtcctgaaaatgacctaatattgaaaatagatatattaggacagtgaggtaacttggagcattaattccataggagaagtgcggtggctatatggttacttctgggttataagagtcatctgtttaaagaacataattccaggtactggtctaacatgggatagagttttctcgtcatggcggcaggcacccttgtcgtacccatataaactctcttgatc

SEQ ID NO: 149171 - DNA, 317 bp, Glycine max
gccaccctggattatatatggtcttaatcggattttgtgctggacttatgtgaacatatggaaaccatttttacattgaaccggttacaaatatagatcaaaatcccatcctatgtgatcttgtcaagatatttttgattgaaacgtttctgttttcactgcgcttgaacaatttcagattaaatgttatttcctgttagttccagataactaaaaaggggcagttcgcaaaattaaatagggaaaaatttgtcgcagatcttgggatcatatataaacgggagataggtgcaacggaatatacagaggtattacta

SEQ ID NO: 149172 - DNA, 414 bp, Glycine max
  unsure (1)..(414): unsure at all n locations
ntntntgtgttaggtattaagatactattatatcgctttctatgtatcctaaggggggcacaagggagctatatcgataaagtacttgatagatttggcatgaaagatagtaaaccaggagatacccctatagctaaaagagacaaattcagtctcaaacaatgccccaatagtgaccttgaaagaactgagatgcagaagatcccctatgcgtcagtagtaggaagtttgatgtatgctcaagtttgtactcgtcccgacatagcatttttcgtaggagttctcggcaaatacttgagtgatcctggatttcagcattggaaggcagtgaaacgcgtaatgcattacttgaagagaacaaaaggctacatgctcacttatcagaagtctgacaatttggagatcatcgggtac

SEQ ID NO: 149173 - DNA, 232 bp, Glycine max
atgaaaacaccgccttctaacaaattttcacaatgaggctgctattatattgcgtgcctggagatgtattttccgactgcattctttgacatcatggtgcacttaattatacatctactcagagaaacgacacgtcgtggtcccgtttatttgccgtggatgtctccggctgagcgatacatgaagatctttaaagggtgtaccaaacatctacaccgtcctgaagcatcta

SEQ ID NO: 149174 - DNA, 414 bp, Glycine max
cgttatcaaggtacatgaactgtgctacgttaattcttttatctgcagcaaaaagagcccttacatatgttaaggacacacgtgattacggaataagatatcattatgttaaaaacttcatacttcatggttaatctgatagtgattgggctggatgtgctgacaatatgagaagtacttcaggttatctttttagctatggttctggaattttttcatggtattcaaagaaattggaagtaatagctcaatccacagcagaagcacaatatgtcgctgcaatcgctgctgtaatcaagctctctggatcacaaagcttatgacgattctgcgtatggaacaacaggacaacacgcatatatttgtggataatcaagctgcacttcaatttcaaataatccaatgtatcgtggc

SEQ ID NO: 149175 - DNA, 408 bp, Glycine max
  unsure (1)..(408): unsure at all n locations
agcttctcagatatggagagcgaattcctcngttggttcttccttgtaggtacttgatgtaaatacatgtatatctatttaatgatgttttatgtgttctttgtgctatcagtacgtcatttcagtgtgcttttgccttgatcacatagatgcatgctttgttatgattattcagtagtggaaactggtctgattcttagaacttgataggacaaggctagtttattgtattatcacgagggatcggggtacggtaacctatttatttgtattgttgtcataatgcggttctggtcgagtttactccaacaaaaggaatctgaagacgatgcttgatcagtattatgcttgactatcatgaggaatcatggtttaacattttacgagacaccatagaattcatgaaca

SEQ ID NO: 149176 - DNA, 391 bp, Glycine max
  unsure (1)..(391): unsure at all n locations
agctttgcataccccagggattctatttgtttattacttgtgaaagagagccatgagggtgggctcatgggccactttgggatagacaagacccttgtcttactcaaagaaaagttttattggccccatatgaagaaagatgtccataagcattgcactatgtgtgtggcttgtttacaagccaagtctagggtgatgcctcatggacacacctttacccatcccatctgcaccttgggtagacattagtatggactttgtccttgggcttcctagaacccaaagaggtgtagactctatctttgtggtggtggataggtttagcaagatggcacactttataccatgccacaaggtggatgatgcttcccacatctcanaactctttttc

SEQ ID NO: 149177 - DNA, 412 bp, Glycine max
gcttctgtagttcaatttcgagcgtctcaatatattattggcctgaatcagacatccgaatcaaaagttatggctgtttgaatatgccatgtgcttcaatgttcaattttgaacatctcgatatattatgcgcctgaatcgggcatctgagtgaaaagttatgtcatatgagttagccgagagcttcgttgttcaatttcgagcgtctcgacatattattggcctgaatcggacattcgagtcaaaagttatggcagtttaaactttccatgtgcttccatgtttaattttgagcatctcgatatattatgcacctgaatcggacatctgagagaaaagttatgccatatgagatagctgagagcttccgttgttcattttcgagcgactcgatatattattggcctgaatc

SEQ ID NO: 149178 - DNA, 415 bp, Glycine max
  unsure (1)..(415): unsure at all n locations
agcttgngccaacaacttcattgtttgatcttttatgagcctcttccttgcttaaaccttcttcttcctctgccattattgaatccacctcctctaccttgtggtccagtgcccttgtacttctactgcatcagttttaccttgtgttgcattgaacaagatgttggaatctcctatagttcctccattgagttgtctctcgttgtaaaactatagaaaatactctttttttttcatcaacaaatgttaattttattacgatgttagtttttgttaaacccacaattttttttttgttagggtggttattttccaaatcaacaaatttattatcctagatggcttgtgatccttatgctactctcagtgcatatactttttttttctatattgaatatctattttgtctcactgg

SEQ ID NO: 149179 - DNA, 318 bp, Glycine max
ctaccattctggaacctgtgttgctgctgaatttttaaaaactgtactatgtttgaaatgagaaatgggcctttacttcactctgcatttgaagaaccatgcatagtgaacgaacgaaaaccgtactttttaaatatattttattgaacttaattaacttctgcttagaacctttaccattttgcaaaaggttaatcctctaatgagcttgtgtatattactggaatgaaattattatgtaaggttctagtaccttctcttatgtaaaaaaaacaaaaacctaaatctttgtgttcactagctcaagcaattttgcaa

SEQ ID NO: 149180 - DNA, 417 bp, Glycine max
  unsure (1)..(417): unsure at all n locations
agcttcacatangcaagtgttttcgtcttattttcaaatcatagatatgtcataaattgattttgcaggtcatttcccatcaaatcaaggataatatgcataatcatcatggatcaataggactttctaaggtcagacttcgtaggaaattggttttggttgctctggcctttcccctctctcttcccctttgttttgtgaggaataggagagtagacccaaagatttggttagtaacttaaatgggcgatcacttcctatcccttcatgtcttaaccaagttactattacccccctcctttttctccttttgacaactctgtacatggttcagccattgtttggtccaaagaacttgttttccttttctattttcctttgctcttttctatctttaattgattgattttttttctt

SEQ ID NO: 149181 - DNA, 386 bp, Glycine max
  unsure (1)..(386): unsure at all n locations
ctgagcattttcgtgcaagcttcatgttgatggattgacaagtgcaataattcgtcccaagtagtaaagttaaaatggaagtctaagtgtcaaattcatggaactttgtttgtacttaggtagatgaatatttttttaataaaagaagttaaagaaaattgacttgaaaaggttataaaaaaagcagtaatttaaattgctagaaaattaaatcaaacaagagaagaatttaaaccagaatttaaattgattaattaaaaacagaaaaattggagagcccaataatattgtagaagtaaattcaaaagatgagaatgttgggaacttagcctaccaaaactattctttgatgtaatgttaatgaattttctttatnntataatatt

SEQ ID NO: 149182 - DNA, 428 bp, Glycine max
tgtgactcttggcaatttctttaaaactagtcacttattaaagttgtgtcttttgaaaaaatcttcagaaacaagtcacttgaaaaattgtgacttttggaaatgtatttttcgaaatcagtcactggtaatcgattaccattaaggtgtaattgattacacatcaacagatgtgactcttcattttgaattttgaaaattaaaatgtttagaagctctggtaatcgattacaagtattgtgtaattgattacacaagtttaaaatactttaaaactgtttaaacataagttataactcttgaaatttgaaatcttaacattttaaaacattggtattcaattactaccttctggtaatcgattactagagagtaaaactctttggtaatgattttgtgaaaacttcttgtgctactcaatattttaa

SEQ ID NO: 149183 - DNA, 294 bp, Glycine max
  unsure (1)..(294): unsure at all n locations
tacccatggagcatgttcttaagcaagnagcctggtttgaaactcacaatatattggtgagactccaccatgctgctcctgatgagcccacatctacacgggtttaaccaatgccagtggaacctcaatctttagcggcgaatgaaccttttttttactatgtcgaaggagattctgccatatacacatatgattatcagttttgatttcctatcttagagaaaccattgttcccccgatctatcacctgagaagcagttatgctccgattccccattgaaaagctttgatctt

SEQ ID NO: 149184 - DNA, 275 bp, Glycine max
ctgttcaaagacttccaaccgttgcgtgtggcctctcctggaaagagtgattcttgtccttcctttgaatctgaccattgacctttacaaccgcattttcacaaaaaccacctatgcccataattatctcgtggccataactcccattctatgccctccaattaagtgattcttgagcctacattgaatatcgaaaagacacctttcacctcgaacaggaatcacctcatttggagccctgtagcctcaattatagccattactatatttctgtc

SEQ ID NO: 149185 - DNA, 403 bp, Glycine max
  unsure (1)..(403): unsure at all n locations
tctaaactctatacaagaatgaagctctgttaccactttttacacaagnggtctcagatatcttaagaaaggggggttgaattaagatattccaaactacttccccaattaaaaatctatttcactttttattcaagttataaattcccttaataatgaacttcttagatgttgattcaaataaaacaattttgaatatgaatatcaagcaataataaacaaaggagatttatggaagagaaagtgcaaactcatatttatactagttcggccacacccttgtgcctacgtccagtccccaagcaacccgcttgagagttccactatctcgtaaattccttttacaagttctaaacacacaatgacaatccgttctttgtgtttaaaattcctttacaacaag

SEQ ID NO: 149186 - DNA, 316 bp, Glycine max
tagcatcaggatacgaggagggtgtaggccaggttcataacaaatatagataatatatcactcgacctataggattaatcaagactattctaatgtcagagctcttaatgtaaaaggacattgatgctctggagataaaattaattacctatcttgattatgtgaagctcgagtatggtctacaaaaacaaaatgaaacattgtctttgaaggctcacttataattccttggtgacttagccattttaacattagagacatacaactgctcgtactaacacgcctcggctcgttgagtcattgttgagtccacgtg

SEQ ID NO: 149187 - DNA, 348 bp, Glycine max
agaatggtaagctcgaccaacccctgctcaaccagggcattgtcggacatttataacttgtgatcgcccgcacctagcgagctgctgactgtcaacacataacacgactacaaaacctctaaacactgaggcttgtagtgtctggccagctgtgaattgcgtgtgctatgtggatacgtggcctatggtcatccagtaccaagggtgggctagcgattactaagcttaaaatctaggacacgaagcttagattgtctctagcaatcgaccacaatgggtgtaaccgatctccatgcttgtatactaatgtctgaagcctagcgagcctctcgttatcgattactaccc

SEQ ID NO: 149188 - DNA, 318 bp, Glycine max
  unsure (1)..(318): unsure at all n locations
cccgggcatgcngnatgatgacaagctgtggattaagatttttctatgcngaggcncctacaactatgggtgcagggcatgttcacaaaaccatatatctgatgcatggaaaatgttctagagtatggagcgcctaagcgttaaactcacttggaaatcacttgccgtattcattaaagagctttgcaaggcttcacagacagatgacattgtcaaggtattgcacgaaatgcaggcttcaaatagtagaattcaaaacacactataggatttggatataactcggatgaagaataaagtggaaatctttatcattta

SEQ ID NO: 149189 - DNA, 417 bp, Glycine max
  unsure (1)..(417): unsure at all n locations
agctttgaatgaggctgaatattctgcttttcatgtncaataagatccgggggagattagtttatctcaacctcatttgtcacaagatagtgacatggagttgatggtaaatatttgtcacaacaaagtagttttatctcaacctaatttgttgtggcactctatttttatttacaattattcatgtttggcatttgcatgtaggtccctgcaactattgttccaccaatagcaaggaataagctaaccataacaagagccaaacaaaggaaggttgctgataaagatgatgcaatataaagaaaactgaagaagcattttntgttgcattttgaatgttgctgagtntcaaggttgctgatgaagaaaactgaagaaccattttttgttgcattctgatattacgatgtgtagttg

SEQ ID NO: 149190 - DNA, 415 bp, Glycine max
  unsure (1)..(415): unsure at all n locations
tcttagtttcggatgatgcaggtgagtatgtttctacttcatgcactcttctaatgactatagcatcatttctggcgctaaactgctgggagttggaagccatcttctcaattaaatttctagcttcagcaggggtcatgtctccaagggctccaccactggcagcatctatcatacttctctccatgttactgagtccttgataaaaatattggagaagaagctgctctgaaatctgatggtgagggcaactggcacatagtttnttaaatctctcccagtattcatataggctctccccactgagttgtctaatacctgaaatatcctttctgatggtcgtggtcctggaagcacggaaaatttttttgagaatactctcttgaggtcatcccaaactctgatggaccttgga

SEQ ID NO: 149191 - DNA, 301 bp, Glycine max
aaaagggggagaatgttaatgtatgtatacatgactttgatgacgtcaaaaaaaaaatcaaacaaggctcattttgcttcaagattaatacaagattgtttcaacaaacaaagccttgattcaagatttcttcaagatcaagccttgcctcacaatgaaaggtttcaagtcattcaaggcacatgtaatcgattaccaatacatgtaatcgattaccaatggtttgaaagtgtgtaatcgattacacatcatatgtgatcgattaccacagactctgaacattgggaactcaaatttttaa

SEQ ID NO: 149192 - DNA, 399 bp, Glycine max
  unsure (1)..(399): unsure at all n locations
tcagaccacaacaacacanaatctaggtatccaaaacctcncttttaatggattttcaaggtttgagaagtgaaattgagaatgggataaatttgaagcaaactctcacctcacaccagtctataacatcaatttaaacttgttcaaactggatttacacctaaaattttgccggatcaaaatttgactcctcaacacctaaatttaccctagaaatggctcttgttcactttggtcatttgtttttctctctagcacaacccaaactttctcataagtcctaaatgtcatttcaagctaggatcaactcactctaacctccaaataccactaaatccagatttgaccttccaactctcaaagtctcactctttttccactcacaacaccatactctca

SEQ ID NO: 149193 - DNA, 212 bp, Glycine max
gctaaaaaattatacccttgaaataaacgttaaagaaaaggtagacatgcagaaaaaataatgcattaataatttttaaccattggtataaggtctaaaaaatataaccaaaatctctataagagaaaggaaaatggtttaaatatccaccaacatgcaatttgtctttaaattgtaaaagaaatttcttttgttaaggagtcgtcaaaatt

SEQ ID NO: 149194 - DNA, 196 bp, Glycine max
ccccccccggagatgaattttgattttacttaaacgtgtgacgcacagggacaaaacagttaattgagttttgtgaactatggggtataatatggatctaaaaaaagcattatgtgatttttggaattaatggagtaagagataattatagtctgatgttaattataattattagagtatgaatttattgaacata

SEQ ID NO: 149195 - DNA, 184 bp, Glycine max
caagagcacaaccaccaccctgcgaaggtacaattctgatcaggccgctgggttccaagttaccaagcatccagttgccttaagcttcttatttaaataatgcaatggcttgtactacttagcactctgaatgacttggcatattttggcctaaactgctgggattgaagccatttatcaataa

SEQ ID NO: 149196 - DNA, 289 bp, Glycine max
atttagaaatgctgtctggggatgtctcttcatcttagaactcataatcactccgaattatttatgctctaggatagcttctcttaagctcattctctgtcaatcttccacaaaaaagctctcaaactcttgaacttgacctttctctctctaaaattctaacatgcaaaacttcagaattgccaactctcttcatcttgatttaagctaaatagaggtttttggtgcttggtgctaaccaacttgcctgctagcggcctagtaatttagctaatgccacttctgttac

SEQ ID NO: 149197 - DNA, 329 bp, Glycine max
tcctattcattttttctttcggtcattcattcatcatgagcgaaacaacactcagcaatatcgaaagcctcctatatctgcatccgagcaagaatccagccatcgcgcttgtatctccggtgttggattcaactaattatcattcatggagcagatctatgctcacagcgttaagcgccaaaaataaggtcgaatttgtcaaggaagcgcaccaaaacctttaagaccgataggatgtatggagcatggcgtttatgcaacaatatgggtgtgtcatgattgttcatacggagcttcttctatatggcaaacatattatggatggacaa

SEQ ID NO: 149198 - DNA, 365 bp, Glycine max
ataagggcgagctgaggatatatcatactgagagtgaatcaataaagttgtgtttgttaatttctctctaatgtagtaatgtcagatttcttatattattagtgtcaaaagctaaaatattttatatactaaaataattaatgattttatatgagattgtcttatatagaaactattaatggtttaccagctctgctttgtgttcgaataacatcggtaagtgtaccgattcgcacaagtagtatataaaacggtaagaccgattatcatatccacatgatatttgtttcactcagacactgtacattcagtaagcaaacatttgtataaactaaaagcaacagtaatatcaagttgaattttgc

SEQ ID NO: 149199 - DNA, 409 bp, Glycine max
atatattggagggactcttggactttatgttttacaaacaccttgggatgaagggagagttgccatgttaaaacatgtccgctctcaggaatacatactcctatcattggtcgctaactaacaaaggaccaattaactgttcacgtctataagcaattggatggtcctcttgcaacacacacagtgcctaatgacatcatttgaagcatcacacttaatgttgaaagactattgaaagcttggcatcacaggcatggggggcattacgtagcttgtgcttaataacattgaactctacttcttgtatatatccccatttgaaaccaacatctttcttgagcactttattgagaggggctgccgatgtgctagaatccttcctcaatcgtttcttaaactcgcttagcca

SEQ ID NO: 149200 - DNA, 238 bp, Glycine max
  unsure (1)..(238): unsure at all n locations
aaaaaacnccccccccccnnnnannnngaggggagggggaggaggggggggaaggaggaggggggggaggggaaagaggggagggggggggggagaaggggaggggggggggggaaagagggggggggggggagagaaggggggggggggggggggagggagggggggggagggagggggggggggagggggagaggggaggggggggggggaaggggggggggggggtgaaaggggg

SEQ ID NO: 149201 - DNA, 345 bp, Glycine max
cacgagaggacggactctagatcagtatgaaaacaattcaccatgaaatagagtagcagatggatttatcacaaaacatgtttaccaaagacggtccactctccagcaatcgaccaccagaatgctgggatggattaccacgtagcaaaatcgatgtgaaaaagacttcaaattgaatttacaacgacccaattaatctcgaaaagctgaaatcgactacaaagcttcggcatcaatgaccggccgcctgaacgccgaaattcgaatcaaatgagaagaggccatcctttcacataaaagccatgtgaatcgatacactacggggggatcaatccaagactgcta

SEQ ID NO: 149202 - DNA, 325 bp, Glycine max
ttttcccaccccagacagagggataaatctaagaaatccaccccaccacccccaggaagagacaatatcttcgagtaaattccttatgaataccaatcaaaccaaacttactctaaataagataagcaccaagaaaaggcgaaataacatatatttatgacgtccacccaatcatgaatggtccagaatttgatgctttaagacctatacgcatccctgtgaataaacctagcatagaattggaatgggatgtcatacactataaaaataaaaagattccattactgaattcgcctctttatacagagtgaagcgcctgacttaa

SEQ ID NO: 149203 - DNA, 320 bp, Glycine max
ttttttgccgataggcgcctccaatggtgtgcactcctcttggtaccatttacttctggtgggtggtataaagggcctttcgccttcttaatatgggagttcctaaagaacaaaaagggtgagtatgccttcaaacatgaatatgctatgaatgatctgacacttggatcccctcatgcctttttgactacgggatgaatctcatactctttttttaataaaaggaacaaacctttttttttccagatctttcacaatggtccacaaaactaacgggtctatttatgggccctaaatcatcatggttgacagaatgatta

SEQ ID NO: 149204 - DNA, 407 bp, Glycine max
  unsure (1)..(407): unsure at all n locations
agcttataaaagaatagaggatatgtattaaaattggagagnatccatnnccaatcctgctaagagaacagccctcccaaaactgtacatggtaaagtagctatgtatattcaattgacagtctttgcaaaacctagtaagtaaactatccaaaataccggcccaacaaaaccaacctgttaaggcccaacccataagtcagaagtcctgtacccaccgatcatttgtatccttcatatataccttcatattcaaacataacccgggatccatatcagttaggcaatgatgggtttattgttttgggtgttctaaactaaatttggagagtaaagtcagtttggtgacatatttggttattcttaaaaatatattatttacgcattaagattttgtgcttctatcta

SEQ ID NO: 149205 - DNA, 407 bp, Glycine max
  unsure (1)..(407): unsure at all n locations
tgagttccatgtgttttgcgtatattacgttttttttttttgcatngcncngatgccacgtgcaggctttttgccctacaagctcactatatatattgtaacagataaatttaaggttgaagacattaacccattaccaaaataaaaattaagtggcaaatgtatatttttttatttatttatgcaaattcaaatgcataatttttttaatttatttatacaaattcaaatgcatattttttttggtagccaatgtcatgtaagctcccatttctatctctttttagtctatataatttaaaatattgtattttggtcactataattancaatttttaatctttttattcttgccgtatattttgttttttccaaaaaccatctaacgttgttacatatagatgttt

SEQ ID NO: 149206 - DNA, 334 bp, Glycine max
  unsure (1)..(334): unsure at all n locations
agcatgtgtaacactcgggggaactttgatgaatgagagtcttatgagacacacttcaaagttccacttctctccctcttttattccttcaattttgtgctctcccctctctctttctctccctctttcttttcctccattgaagcatccttccaagcttcttatccaaggctcatcttggtggtgaagctccttcttccatggcttattccctagtggatggcgcctcctctcacctcttctcctttgtcttccgctgcatctccatggtggaaaatcaccattaaaggacctcattgaagctcanagatccagccttcatagaagccccaca

SEQ ID NO: 149207 - DNA, 419 bp, Glycine max
  unsure (1)..(419): unsure at all n locations
aactatanaaactcaagcttcttcaggtgagattccntccaatcactangaaggtgcctctattcaagaagaagacagctgcagacattgcctctccccacaagtacttgggtagactattgcctttcaacatgctccttaccatattcattatggttctgttttttctttttgcagctccattatgttgaggtgtgtanggaggagtcacttcaagaattatgccttcttgatcacaaaattcttgaaattatgtagaaacatattcaccaccaccatctgttctcaatatcttgatcaatgagccactttgcttttctgccatatttttgaacttctcaaagacttcaaagacatcactcttccttcttattaggtaaacccatactttcctagtcaattcatcaataaaggatatg

SEQ ID NO: 149208 - DNA, 440 bp, Glycine max
  unsure (1)..(440): unsure at all n locations
cagcttctatattctatttcaagcgactcgttatattattttactcaatctgacatccgagtaanaagtaattgtcgntagaatttgctcacagcttctgtattctatttcgagcggcttgatatattacgggactcgatcggacatccgagtaaaaagttatattagtcaaaattaactcagcttctgtattcaatttcgagcgtgtcgatatataacgggactcaatcagacatccgattaaatagttattatcgctagaatttgctctaagcttctgtattctatctcgagcggcttgatattattccggactcgatcggacactcgagtaaaaattatatttgtagaatttctcacagcttctgattcaattttagcggctgatatatacgggaccaatgggacatccagggaaaatttatgaccgttgaattgct

SEQ ID NO: 149209 - DNA, 414 bp, Glycine max
  unsure (1)..(414): unsure at all n locations
ctaagcttgagcaattctacgacaataacttttacttggatgttcttttttttcacgtaatatatcgagtcgctcgaaatagaatacagaagctgtgagaaaattctaacgtcaataactttttactcggatgtccgattgagtcacgtaatatatcgagacgcccgaaattcaatacataaactctgagcaaattctaacgacaataattttttacttggatgtccaattgagtcgcgtaatatttcgagacactcgaaattgagtacagaagctctgaagaaattcaaataaaaataccttttgactcggatattcgattgagtcccgtaatgtatcgagacattcgaaattgaatacagatgctgtgagcannatctaatgtcaaataactttgactcggatgtccgattg

SEQ ID NO: 149210 - DNA, 389 bp, Glycine max
  unsure (1)..(389): unsure at all n locations
agcttgatatcggagcttcaaaaaccggcttcagcgttttttgactcactacgggatcgtccaagattgacaagattaaatgctgaagctctactatgatagacgaaacagaaaacggtttttgctattggtttttgtggtgggggtaaaagtggaagttattgggggtggcgacactagttggcttgagagcgcttttgcgatcatgagagagttcaagacgggagggtcgtggtcgtcaaaggcgtgtgtgtgcgacgatggagcacattctatggagatgaagaggcagaggttgagggccttgaactggaggtgtggggagtatgcacagnttcgagcgcgggagcacgcgtcgtggacgagggcggatatagcgtgaagcgaca

SEQ ID NO: 149211 - DNA, 474 bp, Glycine max
ccatccaccacaattagagaaagaatgtggtctgtttctttgaaaaaatgtgcccacatttgatccacatagcatatgaagaaccacatggtcacatgactaccatcctatccatggtttttcttctttctaacttttgtgggttattactttaggtttaaatatatttttatttttaataaatatttaatttgtatattcattcttaataaatcttgtattttctattgaatttttaataaaacaatcattgtatttattatcattcatattttattccagtctttgataaattagtgattctatgtttatcctatgataaattagatacttttattttagtttgggctaattataaataaacaataaaattattattgtattaagaactttatataaaaattattgaaaagtaaacataacaatcaaattttattagaaataaatacattttagttctatacttaatattac

SEQ ID NO: 149212 - DNA, 218 bp, Glycine max
actcaagacagctgaaaggtgacttagtgtcactatatattcacacttgtcacaacacaaagacctaactataagatctctttagtgagcctgagtgaaaccgttcaatacttaatcttcggtatgagttgacattgccatttgctcccgctcttatgtgttgaacaaatatatgaagacttaaactattcaattggatgtaggcgtttctcggattt

SEQ ID NO: 149213 - DNA, 443 bp, Glycine max
  unsure (1)..(443): unsure at all n locations
agcntgtttcagtttaatctaatcgataatttgtagtttttcatgatgatactataaaactcttaacaaaactacttttcgcaaaggatatttgttgtctagaatgaaaaaaaaataagaacataatatacaaggaatgaatatatgtagggacgtccggtgctgttattctaacttaattttgacaacaaaggacattggacggttcaattatattctgaatattaaagctagctagtgacagagattgnggagagctgatatatcacagattaggctatatcaaaggtgcaaccgatcgttgtgtacatagtacatacattgactcagcctcatataagccaagcataaaacagtatgtgaataccaactaagctntcggttgcaattagtcacacgctctaatatcttattctttaataaatctggttttagggaaacat

SEQ ID NO: 149214 - DNA, 441 bp, Glycine max
  unsure (1)..(441): unsure at all n locations
tgtagatatgcacttatacttgttagatggtattctataatgaatngncgatagaaaaagtcttaaaagataaatgtacaaatttgagggtctatatatatatatatntgtgaaaagtcttaaaattggaatacaataagtaatttattgcgttgttaagttttatagaaagagtaaattacttgttatgtgtgttgtgcttgtttgattgttacttgttagtatcaaattggctcaatgttacatttaatcaattaaattataccttagttttattgtggtatttttatgattgttcattattaacgtctaactgcgttaatattctaaatgttaaaataatttatttaagataatgagaattaatatcatcattatttttatgtacgctcaaaatgcacttattcttctcatttacccacccttgcattttatcctttt

SEQ ID NO: 149215 - DNA, 483 bp, Glycine max
  unsure (1)..(483): unsure at all n locations
acctgcggcatgcaagctnggttcacttgtatgggacattngcattgtatttgttttctaccctctgaaggaatgtcccttctccttttaccttcaccctatgcaccactttagtggtggggctggccctagtccctagcatggtcctgtactgaaaaagggggaacaacagagatggcctatcaaggaaatacctgcaaaactcataccttcctttttgcaggcaacagcagtcatcatcatatgagaaccatcaagtgaatgaacaaaatttggcggaaatgctgtcctctgccttgtgaccatgacctataatatttgaattaaaaatacacaatttaattctggaaaatataaattaaaataccaaaatttttctccccgccctccccccccanaaaacatgatagaaatgtctgttaacttgtttatacaaaaagatacaattactcaaggaagattcccaagcatgttctgaagtct

SEQ ID NO: 149216 - DNA, 436 bp, Glycine max
ctaagctgatattctccataggaaagataaagaagaaatctcttttatctccttttatcagatcaaagacaagaatggcaataacctgatgaacctcattgaagagcgagtcagctccaaatttatcatcgagacgcttatacatatcagaaatatgatccatctcccacaaatcaacttcaaaggagaaaatctagtaatcaactttgcactcattatctttagactcatcatcatcttctttgtactcatccaacaatccaataagaattagtaggtaatttgaggatatgtcatacccaaaaccatattgatacacaatggttagaccatagtcgacatgagatcactacttctatcgtagtataaaagtatgagccctctgcatgaacccaaaatctcaagtttatcacgataatcatcatcgtattggtca

SEQ ID NO: 149217 - DNA, 436 bp, Glycine max
  unsure (1)..(436): unsure at all n locations
ctgcagcttacaatttgtttaaatcctagcctatttataaaataaaatctagataagataagatctagatgaaataatatctagatgagatcaaatctaaataataccaagataagataaaatctagataagataaaatttggtagaataaaatagtctgctctcttcaagtccaagcccaattctggattcaagcccaattgcttataattctcttgaaattaaattaaaaacacaaaattaatccagtaggcccaaatgataaaactacataattaatttgacagttaaggctaatcagtaattaaaatggtgacaaaaagggttaagaaatatgagaaaatgatgacacatcanatcccctcacacttatgcctttgcactcctgggaaaaatcaanaaaaaaaaaaaacaaagcaagggacaaattcagaga

SEQ ID NO: 149218 - DNA, 428 bp, Glycine max
  unsure (1)..(428): unsure at all n locations
tgcgcaacccactcatttttttcatattataacaccggtcatgtgtctactatcattgtgataatctctttctctgtttttgggggtgctacttgagttgccaagtctctccatctttgggcgtattctttgaaagattcgtgccccctttttgcacactttttgtagttgcatcctatccggagccatatcagaattgtactgacactgcctaatgaaggcaaccattatgtccttccaagaatggactcaagaaggttcctaagttagtataccaggtgacagttgtcctagtaagactttctcangaaaaatgtatcagcagtttctcatcttttgcgtatgcccccatcttccgacagtacatctttagatggttcttggagcgagtagtccccttgtacttgccaaagtcccgcaccttgaac

SEQ ID NO: 149219 - DNA, 396 bp, Glycine max
tcattacaacaatgagaagagaagatgaaagattgatttatttctagtagtggggatgtctcctccacctctataaacctcacaatctctcaaaatctcatccaaagctccgcaagatggcttccttgtcaagctcatctctctcttagtctctccatagccaaaaactctcaaaatactcaacaacctttccaaaattgagatttcagctttaaataggcattcctgttggtgggcgtgcgcttagtggaagatgagctcgcttagcgcacgtaagtgacttctggcttatcgctagtcttctcgcttatcctaatggttaaaggcggggcgctcagctagttcacacttgctcaacgcctctatacagctcatccttcttccatattcttctgc

SEQ ID NO: 149220 - DNA, 442 bp, Glycine max
  unsure (1)..(442): unsure at all n locations
agcttttgttcctntttataaaatttatatattcttaaactcatcacgttatctaaaaaggccttgaggtggatccaagtgctctgatcattctttagcatattcatgttttggtggcatactcaccactgtttgtttctttagggaactcaccataactaaaaaagtgcaaaggcagccctataacacccgatcaagaagtaagatggataacgaagagggagtgcaagaacagatgaaggctgacctatcggccttaaaagatcagatggcttttatcacgaaggccatgctaaaacttcaaaaaaactatagaagataatgctatggcagccgcttccaatacagctagggaagcagaaccggtgctacagcccacaataaacttgggccgagacagaaacgcgacgggttttaatcggaggtatagtcctcaagccta

SEQ ID NO: 149221 - DNA, 239 bp, Glycine max
ttgatccattgctattcgcgatctttgtctcgtaccttatgctccaccatagaacgcattttcctgcttgattccagaaacattcacccatgcatcaggtggtctgctatattgaccgacactgctacctatcgatatcaatctgactgacttacatatccaccagtttttatcctagacatactctaacactacgtgtgcccatcattgatgaacgcctgtgctcttccatggctcat

SEQ ID NO: 149222 - DNA, 460 bp, Glycine max
  unsure (1)..(460): unsure at all n locations
agctggacttcctgaggacagttatccttttctttctattgtgtacccaaacccaatcacctacttcaagcacgactttctttctgcttttgttggctngccttgcataactcgcatttttcttttcaatttgagccttcacttgctcatgtagtttcttcacatactccactttagcctatgcatccttatgcttaaacatagcaatgttaggcataggcaacaaatcaagaggagtcaaaggattaaatccatacactatctcaaatggtgaacaattagttgtgctatggacagcctgattataggcaaactcaacatgaggcaaacatgcttcccaagatttaagatntttcattaaaacaatcctaagcagtgtgcctaaagtcctgttgactacctcagtttgaccatcagtttgtgggtgacaagtagtataaaacaacaattgggtccaatc

SEQ ID NO: 149223 - DNA, 400 bp, Glycine max
ctaagctttttcctttgacacctacgttcctatacgaaatatatcttgtttctctatatacacacacattgaaaaactctttctctctataccaacacggtctatataaaatctctattccttttcaaagatttcttttccccttttcaatatacactcattgtttatataaaaaattcctttatatacactcattgctcatatacaagaatttcttttcacacattgtttatatacaaaacactttttcacacattgtttatatacaaaaaaaatcttttcttttctttatatacagatatgacattgtgttcactatgtctctttctttgtctattcttggcgttatcacgacatttgttcgttttattgtatgatgacgttcctaattaaaactcta

SEQ ID NO: 149224 - DNA, 434 bp, Glycine max
agcttaattgagagagagagactaacatgattttcctccttgtcccattcgcattaatgcagagaaactggccatgtctccatccatctttggaattgccaaagaaggcatcaccagacttcgtgtagaatcgcccccaccattagccaccagtgtgaaaataaaaccaaccctgcataatcaatatccgcaattaccatacaattcactgataggattttgtctaatatactgtcaaagattattgtgcaatccatatatcatatacgatactgtactttcaaaatttatatcaactatatgattgcttaatcaacgagacacaattatcatccaatttcgaaatttggatacaagatcaatgcagccattactaataactggatagatacacaaaccaaaatcaatttcttttctagctagctagaaactcg

SEQ ID NO: 149225 - DNA, 309 bp, Glycine max
tccaatcaagatcttcataggagtactacaataccaaataagaaagatcttttttattaagcattcagaggaattaaactacactatttttaggagtggtgctcatatgaaatattgtcatatatatgggggggaaatagtgacgctatataaaatgttatcatcatactctctgactaatggaggagattagatgggtcctggagtaacggatatgtctcttagctgtacgtcatcatgcaagagagagagcgttctataaacagtcacaaattcctctgttacagagtatgtgacagcatgtatttc

SEQ ID NO: 149226 - DNA, 260 bp, Glycine max
tagcttctcttatctattaatcgccaccatctttgttctgttccgctcacaaaataatctctcaggcaaaatatattatccctccttattactacaaaactacattgagggggttgacctaatgctgttttcaatctatgggcaaaacaagtaggcttataaatcagactaactatagtgaatgataatgaaataggcccttgaatgaaatataagttatgagtcctacctatgatgcacaatgtatgactcaaaagact

SEQ ID NO: 149227 - DNA, 350 bp, Glycine max
  unsure (1)..(350): unsure at all n locations
agcttctcgatatattatgcgcctgaatcatactttcgtttgaaaagntataaccatttgaatttctcgagagctttcgntgttcaatttcgagcgtctcgataaattatgcgcctgaatcggacttccgtgtgataagttatgaccatttgaatttctcgagagcttccgttgttcaatttcaagcttctcgatatattatgcacctgaataggacttccgtgtgaaaagttatgaccatttgaatttctcgacaactttcgttggtcaattatgaggttctcgatatactatccgccggaatcggacctccgtgtgataagttatgaccatttgaatttctcgagagc

SEQ ID NO: 149228 - DNA, 202 bp, Glycine max
aatctaagcctggggcgaaaaacataaacagaccaagtcttgttggctctctaccaacccccgggagagggcttcacaggagagacaacgcaccacactgaaacagaaccacaccgcggggatgccaggagcacgaacgaaagcaagaaaggcaccgccactgacaacggaggggagccccagcatggagctcagaggaaca

SEQ ID NO: 149229 - DNA, 454 bp, Glycine max
  unsure (1)..(454): unsure at all n locations
agcttactccatgtgntatttgagtataatttctatattctattagtaaaaattttttacaaatcatcgttggtatgacttgttggtatgacttttaagatggatattaagtcaataaacatcaattaccctttcactgcctgtgcatatatatatatatattttttttactcaaacaatgtagtttactatggaagattcacaagtcttggtatatgatatactttcaattgtcttcatgatatagggaaacaaggccgaagacttgccagagcatttattatgtgcaatacggttgaataaacttgactacagcaacttcaaccagtttggcttttaagtctaagcttcaacataaagagttttaaccataatatgtctcataatgattacaagtgtgacactcataggttgctttgaaatgacattcggtagctaaccgcaatgtatcttt

SEQ ID NO: 149230 - DNA, 442 bp, Glycine max
tcaggtattacattaatacttggttctatataccctcattttgttcatctgaactcctgagggaacaatcattttgcatagttcagtgcaacacttaaaaacgatgatcagtgttatataatttgcacttaggaatcatcaaatggcatccagaggtccatgtcaggcatggtaaactatactactagaaactaaggaactgcaataacttaacctattcatgtaatgccaaacacttacgaataattagtaattctacaagtaaatggccaaaatgactcacctctgtgttctcgaacatcctaagcacaatatggctcatatagtcaagctcctctgttgtacataatctctctagagcattactgcaaacaagactctcttcttgaatggattcttgcaaattacaataacgaagaacattcatgagagaatgaatatg

SEQ ID NO: 149231 - DNA, 442 bp, Glycine max
  unsure (1)..(442): unsure at all n locations
agctntttattttcagtagatgaagatgaatctgtggttttcttatggactcctctaaagacaatagcatcatttcttgcactgaattgttgggagttggaagtcatcttctcaatcaaattcctagcctcagcaggggtcatatcaccaagagctccaccactggcagcatcaatcatactcctctctatgttgctaagtccctcatagaaatattgaagaaggagttgctcagaaatctggtggtgaggacagcttgcacacaatttcttgaatgtttcccagtacttatacaagctntctctaataagttgcctgatgcttgaaatgtcttttctgatggcagcggtcctatatgcagggaagaatgtctccaataacaccctcttaatgtcattccagctgataatggacctgtgaacaaggtattatatccaatctt

SEQ ID NO: 149232 - DNA, 461 bp, Glycine max
tgtaagttgaagctggacgtacgacaagcctgtcatcttcttctaagcgcatgtagtagaaagatttctggtgttgcaaaaagcgcttatcgtcgctgctgcgctaaaccccaaatacttactggaaggtacaacttcaagttgggcttatcgcgaggctaggctaatcgccagtgttttaatctctaacatcacattggcacgctaagcgcagctgcgcgctaagcgtgccatacaaattttaattcttaaaaagtataacagaggcacttgggttgctaccttggcacccaaacctgtgcactctctcatacctgagcatatctttgtttctgctgtggtgtactactactatgcatatgtgctgcttaaatctgattaccatacaagtaagcttgtgatttctttgcttgatttatgtttacacctacgataaagattatgttctaataaattgctgt

SEQ ID NO: 149233 - DNA, 474 bp, Glycine max
  unsure (1)..(474): unsure at all n locations
agcttagaataataatgataatgccttgttcttatttttgttaccaaaacttcttgctctaaccctttgctcaaatgctggttatatatactaagaacctgctgctgcatttcacgttgcttaacttgtggcaccaactaccacgtgtgaaaattatacaatcatttataaaataaaaggctctataatttttttttgaataaacagaagagttaaattataatgtatcttcagtatttattaattgaaaatcgatttaaatataatttttgaaataatttttacaattattgatagatgattaaacaatgttcattacattttaaatagaacttatgcatgtttgtttttttagttacaaactaatgtcagaagcaaaataaaatttacaaaaacttataatttttttataaaattaaatttgtgaatcatcaaatttattttgaaattgatatatcacattntgaactgaaa

SEQ ID NO: 149234 - DNA, 379 bp, Glycine max
gtactatattatgtaacaaattacaatgatgtcatgttcttctgttaaattaaagtgttaaaaggtactgacaatgactatcatcaaaactaatgaaaatgatagaagcaggatactgaacaactattggtttgctaattcaccagtgcgattgtttgacagatgattgtgagtcgtgggattccttctatatttaacatctttgaaacataaatgtgttatgttaaggttttgaaacataaatgctgaatcgtgttatctccgcatcacgaattatgttacgtgtttggtgtatcgtagactttgcattggatttcatgaagatgattataaatgtctatttctcaatcttcccggcaatgaaatgaatgctagaata

SEQ ID NO: 149235 - DNA, 299 bp, Glycine max
  unsure (1)..(299): unsure at all n locations
gcttaacgcactctacnatacaacaggccttgangtttgttttctctaagccncagngnagggcttagcgtgatggtacctacaaatcattgtggcaacagtccagatgccaaatcctacctctgttcgtgaagaactgagtgacaggcatatgaacgtgagtaagctttcggtaaatgaagagataaaaaagtatcgggagtggaagagtataatagaagataggaaatgagctgaggtggctaaaaantttaaaggcaccaaaggcagatgaggggttgggcagctacaaaaactgt

SEQ ID NO: 149236 - DNA, 417 bp, Glycine max
taagctataaaacaaatgcctaatatttccaatatgcttgttttattacgcatcaacagaatcaaccattgtttgtgctgcatcatgtggcaaacacaccaaatgatataatgatggatggctcaaattctcacaaagtaaaatcatcactttcaaatgagctttcaaaactatcatgacatgttagaagaataaggatttaagtcacaaatgtcaagactttatttcaaaacaattacccattttgaacatatctatattcaaaatacatgcaagtctacgtgcacacgaattgaccaaattttactgaaatcgacaactacacattacaattacacactacaattacataacacatactacatatcaagaacctccccatacttacaacaatgtctcatggtccattaaaattaa

SEQ ID NO: 149237 - DNA, 415 bp, Glycine max
  unsure (1)..(415): unsure at all n locations
tgaagaagagatgaatgaagggaaagggagagaagagcacgaaattttgtgctctaaatgagctctgaaatctgaagtttaatatttaaatgatcaaagttgaaaaaaatgcacacacatgacctctatttatagcttaagtgtcacacaaaattggagggaaatttgaatttcaattcaaatttcacttgaatttgaaattgaatttgtggagccaaactttggagccaaaatttcactaattatgattagtgaattttagttatggctcagcccactaatccaaaatcaattccaagattcttcactaagtgtgcttatgtgtcatgagacatgtaaagcatgaatgacatgcacanagtgtgactatatgatgtggcaatggggtgtagtaagcaaatgctcaccttcccct

SEQ ID NO: 149238 - DNA, 416 bp, Glycine max
  unsure (1)..(416): unsure at all n locations
gacactattaatactaagcttatgctaagtatgtatggcaaaacttcattactgtggtgcatgacatacaagtgagcttgtaacaaatgttctacacttggagtgatcacatgcagtcctcttgaacccttaccacccactcggtcatcatgccgagactcaggaagccaataggtttagccttctctaagtattctgaacaaaattcaatggcttcttctgtaatgtacctctcaacaatagatgcttctggatgatatagattctntgtatacccgtttaagatcttcatgtatcgctcaaccgggtacatccaccgtagataaataggaccacaacatttgatttatctgaccagatgcacaatcaagtgaatcatgatgtcaaagaaagcacgtggaaaatacaatctcaac

SEQ ID NO: 149239 - DNA, 416 bp, Glycine max
  unsure (1)..(416): unsure at all n locations
agctntgatggtgtcgagaagatatcacatttttgtatcatcaaaaagggggagaatgtgaatgtatgtatacatgattntgatgatgccaaagaagaatctaacaaggctgcttcaaatgataagcattngcttcaagaataattcaagattgcttcaacaaacaaagccttgtttcaagattcactaaagaccaagccttgccttaaaacaatgtgctttcaagacatgcaaggctctggtaatcgattaccaggaagtgtaatcgattaccagaagacagggttgagatatagctgttgtaatacgtctngaatctcaattttcccatgtaatctaatcccttactgtcagagtcgtctccctcgtttgaatcttatgatttcctatgcctactcattcgtgctttatattac

SEQ ID NO: 149240 - DNA, 414 bp, Glycine max
  unsure (1)..(414): unsure at all n locations
gcgagattcctcacggaaaacgttacggaaacgtggtggattctcctcggcttagattttcttcacggaaacaatttttccaagcaatttccaaagagagagaagtgcctaaggggctgggatccttttcttcttgcattcctcccctatttatagcaaaataggggaggtggttgccgcccagctcgcccatgcgagctcatctcgcccatgcgagcatggttgcttcctccataagcaaccgccttctggatgaatcttctggatggcccaagttggactgggtgctgctttatatatcaatattatattatttgtcgacatcactacctctttgttttaaatttattactcaataactctatgtntacaattactttacttatatattgcttttctatttactccattaca

SEQ ID NO: 149241 - DNA, 490 bp, Glycine max
  unsure (1)..(490): unsure at all n locations
ccggatccttaagtcaccgcggctgcagcttaactgccgctaaattgtttattgcttggaggctaattagagatagactaccaactagagcaaacttgcggactcgacagattgaggttgaagatgcaacatgcccattctgcagagaggtggaggaaagcgcatgtcatctattctttcattgtcacaagataactccagtatggtgggaatccttgtcttgggtagatctttccggtgccttcccaaatcacccaaggcaacactttctccaatacatacacagagtaacagaggaaatgaggtctaccagatggaaatggtggtggttggcactgacatggaccacttggaagcaaacaaataacattatcttctccaatggtacattcaatgccaacaaaatcctagatgaatgcagtttcttactatggatgtggcttacanacttggaaaaggatttcaacactcactataacttctggtcttc

SEQ ID NO: 149242 - DNA, 373 bp, Glycine max
tgacacttataaactaagcttgtcaagtcttgctgcaatagaacaaggaactttgcttcatggctatatcctaagaaggggtgaccctcataacaatgtatggaagatgcggtgagacttcgatgggacaaagtgttcttgatatttatgtttcacttatatcaaggagaccaaatattagaaaacaagtttgctaattgtaaccatatgactataaattatggatcaatcgcattctatcccccacatattgatcatgcagctaaacataattgtggcagggaaaaaaatgaatagaaatataagcaaattctgcataagctctattttatatgcaatcaaagtacctttatggataccattaatgtatgac

SEQ ID NO: 149243 - DNA, 479 bp, Glycine max
  unsure (1)..(479): unsure at all n locations
cggatccttaagcacctgcagctgcaagctgaacttgaaataagaattggtgtganttttaaacattattttgtttgaaagaactaaaaatatatttaaatttaaaaattaatatggattatgactgcgcttataaaattatattgttgattntaaaaaatatttttttaagactttagacaacttataattgcactactggttaatgaataaagttatattttggaaaattaggccatttctattttagttaaacaatagttaataagctatataaactttacctaatgatcgacttgctaactatatatgtactaactagaaaaaagtttaatttctaaacttgattatatatatatatatatatatatatatatatatatatattccatattatanaagaaaccgtatataanatttgtatatagggcctctcaactctcaagcaccttgcattcagccgtatgtgcgagtataat

SEQ ID NO: 149244 - DNA, 326 bp, Glycine max
cattacccactgtgcacctaatatcatgtatgacattgtctcaacttttacacaaacaatatttaaattcaaactgtttttttccgttagatgaatggaattcttgaggtatcacatatgtaatacctaaatattgcctgtttctgtaaccattggtgtttgagtgtatttctcacaggatgatatacactaaacatcaaacattacaaacttatgttgagaaccaatatccataaaagtatctcaaatgaaggcacactctacgcttattataagctctctctatgtcaattcttacagtcacatattcttcctttctatgctcc

SEQ ID NO: 149245 - DNA, 445 bp, Glycine max
  unsure (1)..(445): unsure at all n locations
tgcaagcttataagaacanaatngcctctatcattttctttatgcatgtgaattaggacgcatcaacaagaatcaagccaaggctattgtgcaagcaatcaatggggaaaaacacaccaaatgattatgatgatggatggctcaaattctcacaaaggtaaactcatcactttcaaattgagctttcaaaactatcatgacatgtagagaagaatcaaggatttcaagtcacaaaatgtcaagaacttttattttcaaaacaattacccatttcttgaacatatcctataattcaaagaanaacatgcaaattcgtacgtgcacacaaaattgacccaaaatattaaactgaaaatccgacgaaactaacaacattaacaaattaacacaactaacaaattaacaaaaccaacaaaactagcaaaaccaaagaacactttccccc

SEQ ID NO: 149246 - DNA, 430 bp, Glycine max
tcgattacacaagaggggatgttcagaatttttttgttcaagagtcacatctattcaaatggtgtatgaatggccatcataggtgacttggaaacacgaatcaaaagaaaattttcattgcccaaaaagttttatcctctcaatagaaaaatttttctgaactgaaatgtcttatcctctcaaaaagattccttggtcaaccactcgtatattcaataatgaattttgattgatcttcattgtacaatctatctcttttaagagagatttcttcttttcttcttcttatatccgaaaagggattaagagaccgtgggtctcttgtgtagaggattcttgaacacaaggaatgggtgtcctgtgtggtcaaaacttgtaattgagttttcaaagagataggaaacttatatgggttgcttgaagactgaat

SEQ ID NO: 149247 - DNA, 392 bp, Glycine max
  unsure (1)..(392): unsure at all n locations
gtgttntatatggatgttagttcaaggtggtgaattgttgggctgtgactaaaatccatatggcagttaattctgttattgtttttctgttatgatatatatgtatatatagacaacttgctttgtattttttcagagaacaacttccacttgtattttgcatcagtaataaaaaagttttttgccccctcctgtggatgtagccttgatcaaaggtgaaccacgtaaatccgtgtgttctttctcatctctctctctttcaccttgctacaaaactctgtgtatgacatagtgttctactgctgttgttttttgtttgttcttcatacttnctaacacctattccgaacttntttctagtcttatcacacatggggaggactgtacatttc

SEQ ID NO: 149248 - DNA, 469 bp, Glycine max
  unsure (1)..(469): unsure at all n locations
tcaagtcaatagaaaattaccccttagttctattcttttatatctgcttcagggagctatgagaccagcaaaacttgcagatagaccggatcatgtggtcgatgatcccctatatctgatgacattgatcatcccaaagctttttctgaagccattgcaggttatatgagatgctaccgtgttcgaggtgtttaatgaagacttccccttgtacataaagcatgaagatctatctgaaatagcacacggtggtcaatgtctcagcatctctgttatacagttgtggattctataagtcaatntagattattgttaattacctaacttattattttaaattcatacataatttactttgtgttaacaacaataggcatatgattgagacaagtatgcgagtggtgaatcccgatgtgtatggattcctcgagccacagtccatcgagagatctgcaatcacaatttgatc

SEQ ID NO: 149249 - DNA, 423 bp, Glycine max
agcttctacttatgtggcatggcggtctttcttcactttcttggctccaacgcgagctttgaccactgttcttccttcccgcgatgcttcttttcatgtccgcctgagtgggcttatagcctaaaccatacttcccacgatttccttgggtatttatcaggctagttatgctgccgttgtttttgcctaaacccatcccgggttcataaccgttccccaacacaactcgggccatcattaccgctgcatcggacagacaaggctacccaaagagggagtccacggaggaaatgctgaccacctcaaaagactggaaagcagtttctaacgattcttctgcggcttccacataaggcatggaggatgggcagcttaccaagatatcttcctcgcctgacacgatgaccaagtgcccctccacta

SEQ ID NO: 149250 - DNA, 337 bp, Glycine max
  unsure (1)..(337): unsure at all n locations
tatngggttacggagcacaccgcatatgtggttctatgttgcgatcgagcaacggcgcaatatatatactaccactgtcataacaacacatgtgctctccattctcagacgcctacctttctatagagctcactctctgctacgatgcacctattgtcatgactatcataactgggtacccatcaaccgctgcatgcttccacatactacaataaatgcgagatcattaatcatgtatcatcccttaaccaggactacagaggtgaggactgttactctcaccataactcattcaaactacattgtctcctctactcacatacctcatatacactca

SEQ ID NO: 149251 - DNA, 422 bp, Glycine max
  unsure (1)..(422): unsure at all n locations
cacaaatgggcccagacacagtatacacaccctgttccccacataaaagggtccaaagaggaaggccaaagaaaaatagaaggagatctgtagatgaggacaatgtcacaggacataagctaaagaggaaattggctgagtttacatgtggaaggtgtggccaaaccaatcataacattagaagctgtaaaaatattggagttcctgttaggccaaataaatatgttgcaccatcaacttcaaatgaggatgaccacctattatctcaagatgaacaagctntgaatgaggctgaagaagctgctgctcatgttcaacaagatcangtggagattaatttatctcagcctcatttgtcacaagatagtgacatggagttgatggtaatatatttgcacaacaaaagtagtttatctcaacct

SEQ ID NO: 149252 - DNA, 300 bp, Glycine max
actaagctggaacattaactgatcttagccccttaaacttttttaatgtcatctggctgatcatgagaattaatgaactctgtggcaatctctttggacagattctcctctcgaataaagtgacagactatctctatgtgcttggtcctctcatggaagactgggtgtgaatcaatgtgaagagcaacctgattatcacatatataacgtcatttgctccactttgcgtgtatataactcctcataaatctgtttgatcccattagtcacatgttacatagccatatatctgtttcattc

SEQ ID NO: 149253 - DNA, 467 bp, Glycine max
  unsure (1)..(467): unsure at all n locations
atgatgctgggcatactagtaagtatcgtgttgtgtttactangcttttagccaagcaggagccgatgtcatggcatgggcatcccattatttcctctttgccccagttgcttcgaatcttctgttacttgtactggcaggggcggcatagttgaacttccctctttttaagcatacttcaatcctctcgcccgtgaacactagatccacgaagctagatggcatgtagcccaccaacttttcatagtaaaacacgggcagtgtgtctactatcatcgtgatcatttctcttttgaccatgggggtgccacttgcactgccaagtccctccatcgttgggcgtactccttagatgattcatgctcccatttgctcatgttctgtagctgggttctatcatgagccatgtcagngttgtattggtattacctaatgaatgtagnaatcaaatccttccatgatcggat

SEQ ID NO: 149254 - DNA, 460 bp, Glycine max
tcttagtctcagatgatgcagctgagtttgtagctacctcattctctcctctaatgactatggcatcatttctggcgctaaactgctgagagttggaagccatcttctcaattaaatttctggcttcagcaggagtcatgtctccaagggctccaccactggcagcatctatcatacttctctccatattactgagtccttcataaaaatattggagaagaagttgttctgaaatctgatggtgggggcaactagcacatagtttcttaaatctctcccagtactcattcatgctctctccattgagttgtctaatacctgagatatccttcctgatggctgtggtcctggaagcatggaaaattttttctaagaatactctcttaaggtcatcccaactcgtgatggaccttggagcatggtaatacatccagtcacttgccactccctctaatgaatg

SEQ ID NO: 149255 - DNA, 450 bp, Glycine max
  unsure (1)..(450): unsure at all n locations
agcttgtctntttcatggtatacgaaagatttgttattttattcataaaattaatgactgccctcacgtactgtctcgtggggggtatgaactgcttgacaagaaacttatggaggagaagagcaagcgtggacatgaggaacattcgtgtactgaaagcccaacactcaacttcgacccaccatccccagttgcaagacacttgaagtggaagattgcccgtactaagcggcatggccaaatgacgtctgaagtggcacaagaaattgcagacaaaattgtcagttcatatatttttttggttactgtcattggcaaataatggttagctaacctagtcaaatttgttctattcaaattcaacaattgtatatgcatgcaggattcattacaggaacaagcaacacatgggagttttgttccgcatgggcgacaagacatactcaacac

SEQ ID NO: 149256 - DNA, 440 bp, Glycine max
ctaagcttaatggagcttacatcatgtggtatcaagagcatctttatctttgttgttctcttttgactcctctatctttttgttcggtgaattatctttaattccttgttcttcatcttattctctatgtatatcctccattgtcttgcggtttggtgctgtttatagtacattcaaaaaaataaattgattaaatcttagatctacacttgttcttgcatttctatggttcaaattatgtagatctactcttgaatcatgtttttgtgttgattttaagttctatcatttctcattcataatattcttgcactaaaccttaaatctaaattgtcttccaaaatatcgattataaaaaacacacaaaatctaagtgttaataacttaatccatgttgtcttatagtcatgttagtcatagtaattgcacattatgttcta

SEQ ID NO: 149257 - DNA, 448 bp, Glycine max
  unsure (1)..(448): unsure at all n locations
agcttcaccacacatggtacaacctgggacctgtcattctataagaatgtgtaggttgtccaattaacagtttagttggcagcttaccaagtgattctattaggatctcaagttgcttagctagcaacttgttttgtgccaacaaagcatcgtgtgatgttagctccaataggctcttctttgtggattgatgggttctgtccctcaaaatagcatgatcattggctgacatgttctctacgagctcagttgcttcttctggggttttcagctttattttttccccaatagaagcatctagtaattgcttggtttgtggtctcaggccatctatgaacatattcagttggattggctcggagaatccatggatgggagttcttctcagtaagtctctgaatctctccaatgcgtcactcaaggattcattanggaattgatgaaatga

SEQ ID NO: 149258 - DNA, 343 bp, Glycine max
cgcctaattcacctgaaattgagagagaatgatggttgaatactttatatggaagtactcagtatttattatctatgcttaacacaaggatcttatatcactccataataaccataaatgggaagagtttgatacaacttacacaagctgtatacacataagctagtcgtttttaccggctgacatctccagcaaatgtacagtcttgcttgtcctcaagcaaaaagagaacatctcacttgtgctcaagtgacaataacatgcagtgactatgtacaatggtgtatgaaacaaatgttactgattgcatgataatagaatgaagcattctgtactcatcact

SEQ ID NO: 149259 - DNA, 435 bp, Glycine max
  unsure (1)..(435): unsure at all n locations
agcttagtgctngattaattgtctctgctctttattttctttcatgcttaatgatcatttatgagtaattggtgtatgtgttgcttaatcacataacgaatgtcttatgttaaatttctcttaataatttaatttagggttggattaagtggttaaactgataaaggataaattctcgcaacctangataagagacttgcttgtgaatcaaggggaagcaatgcattttaattctaatattttctagttcaattttactcgttgtgtaatttacaaaagcaaacaccccccccccccaatttgttgccatttcctactatctgttatgaacatttgatttatcattgctcattgggaaacgacctangatcacttcctagttactacattntaatgtttatttgattcgggtatggtctcgatcaatcatggcat

SEQ ID NO: 149260 - DNA, 387 bp, Glycine max
tagcttgacttgataccatttgttgagaagtgtgcactcaactttttttacctgtgatgaacatgcaagcaaagtacataaaaaaatgtatctgtgcagtttaaccattgattgaagagggcattaaaaaattgttttctgtgttcaagcattaattttcattctgcatacataaagatgcattatttctcctgtcacatcatattattcttgtagtagttattcttattgctttgttattatgtttttggttcagccttttgttcaagttggtctgcatgcagattctcaagcagtcagatccttatcttgcaaaacagtacgtggatatactttatttatgccaagtttatttaaatccttctattgtatggacaatgagattca

SEQ ID NO: 149261 - DNA, 475 bp, Glycine max
  unsure (1)..(475): unsure at all n locations
ttaagtcacctgcagctgcagcttatacctgaacagccttttttgtttgctttttctcnggaatcagacgctcaaacctgaagtaatggaggagtttgtggctgaatttgtggcagttttacctcttcagccttcaatgctgattgatttagctaggttctatagagctgaagttgccgccagaggggaccaatcccatttctctgtctggctcacagggggaggattgccagctgaatgggctaaatatttaggaagatcattcaggtgcttactgaagcgaacaacggatttgaagttgcggatgcagttggctacagtggcaactggatttggggatgtcattgatgcatgtacaaaataaatggataatgtcgcttacaatgcagcaccactatttctgaagaaaggtcatggtggagcctacctcccttttatagtgaaagttctactgtagatcatcataatgattgga

SEQ ID NO: 149262 - DNA, 307 bp, Glycine max
aatctaagctgtctacattctgctaccgactcttactcttttttgttgtcaattgtctacgcctgcagatacaacgggataacattagatagcatcaatacaaaagttagattcaacttcagctcataacttttagtttgcctggagccgacgaaatggagttagaggaagggcatgatgagaaattgtcatgactcattgcatatcagttggagacaattcggcacatctctttgtcatttattgtatcttgtcacagacaaaaacagatagacatttaatgtatcatctagaacattcacaataa

SEQ ID NO: 149263 - DNA, 466 bp, Glycine max
  unsure (1)..(466): unsure at all n locations
gcagcttaattaaacaatcttgaaaaattttctatatatatataacggaagaaaccaaacatttcacatcttcatgtgtttggatgtaaatattttgtgctaaacaacggcaaagataacttgggtaagtttgatacaaaatctgatgaatgtatattccttggctattccttacacagtaaaacatttagaatttataacaaaagaactatgattattgaagaatccattcatgttgcttttgatgaaactaatgcaatttttccaagaaaggatactctagatgatatnttagattctttggaacaaatgcatattcatggtgaagatcacaaaggcaaaggaaagggaaatgatgaagactttcactctgatgaaacaaaaacaagtgcagatcttccaagagaatggagaacttctagataccatcctcttgacaacatcattggtgatatatctaaagggg

SEQ ID NO: 149264 - DNA, 453 bp, Glycine max
cgctggtcttttatggtatacgaaagaaggcccagtaaagtcattttttaatgactgccctcacgtactgtctcgtggggggtatgaactgcttgacaagaaacttatggaggagaagagcaagcgtggacatgatgaacattcgtgtactgaaagcccaacactcaacatcgacccaccatccccaattgctagacacttgaagtggaagatcgcccgcactaagcggcatggccaaatgacgtctgaagtggcacaagaaattgcagacaaaattgtcagttcatatattttttggttactgtcattggcaaataatggttagctaacctagtcaaatgtggttaactcaaattcaaaaattgtatatgcatgcatggatcattacaggaacaagcaacacaagggagttttgttccgcatgtgcgacaagacatactcaacacggtcctt

SEQ ID NO: 149265 - DNA, 440 bp, Glycine max
  unsure (1)..(440): unsure at all n locations
agcttgtaatcgattacacacattctgtttctattaccatangagaatttcagaaaatattctcaacagtcacatctttttgtgtggttcttgaatggctatcaaaggcctatatatatgtgacttgagacacgaatttgacaagagtttttcagaacaaaaaggtcttatgctcttagaaagaaaaataattttatcctcttacaaattccttggccaaaactcttgtgattcaataaggaattatttgagtgctcaaattgttcaatctatctttttatagagagatttcttcttctcttcttcttcattctgaaaagggattaagagaccgagggtctcttgttatgaaaggattctaaacacaaaggaaggattgtccttgtgtgtttataacttgtaaaaggaatttacaagatagtggaacactcaagcgggtt

SEQ ID NO: 149266 - DNA, 415 bp, Glycine max
tcaataattaatatacaatcacttgtttgtatgcctaacatggcttataacagtcgaataacacacttacacaaaatacttccctaaaaatagtcataacaaaaaatattgcttcaatacttaatccaaaatagaacaaaccatacacctcacaatcacatgcaatacaaggcaaacaaaagtggctaagcctactcgggacatacttctcattatgagagtgatgttgcttcaacatttattttgtgtatagtacttgtagaccttatccacatgttctaatcatcatatgtaacagaaaataaatttaatcatcaaagtcttgaatatataaccacaattcacataagggaacttagaattggaaggtctaaatgaatacaaatgttgttcagtctatataacactacatata

SEQ ID NO: 149267 - DNA, 426 bp, Glycine max
agcttgtagtgtacatgtctccttctaattttgatgatatgcctgtactttacaagtttcctagggctcttcattccaagacccttgtagacattcctttctctgagactctaagagtggattcgggtcatgagcatcctttattccaagacccttgtagacatgcctttctcactctgcttttctttcctttttcatgtaatatggctaagtacgattaccaatccatcaaaagaaaaaaaagttgtcaatgttgaagtggcagaagattgggctcctcctcctcccatcaacactgagtccgacgagaggaaggatcttagtttttcttctcaagatgttacaaggaagaagcaaagagtggctactccatcatcgattatcgctccctctcccatcgagagccactcaatgttcctttctatg

SEQ ID NO: 149268 - DNA, 439 bp, Glycine max
  unsure (1)..(439): unsure at all n locations
tattctgtacacttacatttctccttgagttctctttctatttcttcttgagttctctttctgtgttgtttcttgagtgtgagtttattgagcttgtgcttgctgtgctccttggttcaaattggattcaaatttggtggttgctgtgtgcttccttccttccttcaagtgtgtgcccttacccttacccttccttactggtaagtgttttcaaagtaaataaaatttatatattgttgtaataaatattataagtttaagttagttagtattaacaaatattctaagttagttagtatgtaaatagtatgttagttagtattaacaaaaattctgagtctagataagtagantaagattgtgtagctatttctacgtttaatataatagattacaatcgttaggtattactatgaaatatatttggtagtagatgaaa

SEQ ID NO: 149269 - DNA, 294 bp, Glycine max
cacaagactgaagtgataagcttatgcccatgcacaagatacatatatggcagtctaaatcaatcagtgttgggctctggccatgatcgtggacttgccatctacaatcaataggagatagatgatgtccgtgaggctgtcaatactgacaggagcttgaagattcacaacaggcaacacgcagtgcagacagaatacgacaagatcgtggagagagaaaacaagatgttaaactattgtttactttctaaaaaacccaattacaaaatcaccctttgtgtataggtatctaaa

SEQ ID NO: 149270 - DNA, 446 bp, Glycine max
  unsure (1)..(446): unsure at all n locations
agcttgngtttttagagtccatgatgaattatccgagtcaaaaaatagaggtaactntcttgagatgattaaacttttagcatcatacaatgacaaaaaggctcaagttgttttagaaaatgctccatataattgaaaatatacttctcatcaaattcaaaaagaaatcttgcatatttgtttctaccaaagttagaagttatattcatgaagaaattggaaattctaaattttgcatcattgttgataaatcaaagagagagcaaatagctattattttgcgactgtaaaattatgtgtttttctttctaagcatggtcttggtgtttccaatattcgtggtcaagggtatgatggtgtttgtaatgagaggggaatagaatggattacaagccttattgctcaatgacnatccttatgcttattgtgtgcatttgtgtgctcat

SEQ ID NO: 149271 - DNA, 274 bp, Glycine max
ttacattctcccactttctcattcaaattcttcttgatatcatcaaaatcttcatgatttacaggttttgttacaatatactatttttttcatttcttattatattattatttatatacatttaatattatcatattcataaaaatataactcatataatactataataatcatcaactatactatacaactacattattacttcatatattattattatttctttattacattaataattataattatatttttatccacataatattaatta

SEQ ID NO: 149272 - DNA, 465 bp, Glycine max
  unsure (1)..(465): unsure at all n locations
gcaagctttcgattcattctatgtacccgttgttggtccttattgttgtttcgngcatanttattctcnggttgtttactttttataccccctgttgacgtgcttaagccattttacttaagtcatttctcgcttaacttaaaaataaaatcaatttccaccgaacgttagaattgtattatccgttaacttcggttaaaatgaattccgaccgttcggtcgtgccgtaaccacgttggaaatcaaaaagaggtaaaaaataataataataatcaaaaaatattcttttagcaaaataaagcggaaaatcaatcggacgttttctctttgggatntctcattcttaaccgaattgactaataactaaagtgaaactaatgctaaaattcactcgcttattcaagctcgtccataataataggttcttgacagttgtcattcaatttcttactaagtaaatggatc

SEQ ID NO: 149273 - DNA, 354 bp, Glycine max
atcctgactcaccataaaccttgaccctttgtttatatgtcaatccttaccctcggaagcaaaaaagaatagaatggaaatttccaatcaaagaaaagagaaggaaaatgtccaatgaaagaggaaataagaaaagaaaggaaattcccaatcaaagagtgggagaaagaaaaagaaaagaaagaaaattccctaccaaagaatgggagaaagttaaaagggaatgaatctcctggtcaaagaaaccagataggtcgttggaccagattatatttgaacagtacataattgtcaccatatgaacaatatatgaatgaaaggataccactaccgtaaatggtcgttttcctttat

SEQ ID NO: 149274 - DNA, 498 bp, Glycine max
  unsure (1)..(498): unsure at all n locations
tcggatcctaagtcacctgaggctgcagcttanaggagcgatattcgataagtgatcntaatctttgggtctcattttattcaaggtggcaagaagaccaagaaagcaattaagaatgaaattcaaactagggctaaggagagatacatacttgtggcgattgaaagtggagaagcttcccaaaacagtttatctcctttccaatcagttatgacacctccagcgccttcaataacaggaatcaatgcaagaaaatcgtatggctgaaatacaatatttaacaaacaaatattgttttaatcatcttggggtacgttttgctctacactgggcaaaagtttctaaagttaaacatgcaaccaaaggtgagagtgcagcataccttcagaccagactcaacaacaagatccacaaaaccagaagacaaaagtgcatatgcatagcagtcgcagccatacaatgtgaatttaacctgtaaaggtgcaaataggaataact

SEQ ID NO: 149275 - DNA, 362 bp, Glycine max
tcaacactgtgtcaagcatttcgaattcattagtgtctgtctcttaataatcacaagatattctctttggctgcaccagcttggagattaccgaccacctgctctgctttaagtgacttttggggccagtaatgaaacacaacacagattctaatgatctcctagtgaccacttctgcttctgctacttttgaactgtgaactcattttttattgctttcaagtctctcaaggccttatcaatttcccttttcatcttcttcctacatgccatgtattttccaccctcaattgtggatcccatttcatcatctctcttcctgcgaataactggcacaagttcgtgcatgctatcctttgatt

SEQ ID NO: 149276 - DNA, 466 bp, Glycine max
  unsure (1)..(466): unsure at all n locations
agctttacatcaatgcttaaggtagtgcatttgtttattctanattataacacatnaccaaaaagttactatgaggcgaagatattatgtttgataggtatgaagtatccaaaaaatcatgtgtgccctaatgattgcatactgtacagagatgagtttgaagaaatgcataaatgccccaagtgtggggtattacggtacaaagtgaaggatgactagtgtagtagtgatgaacggctccccagcaaaggtgttatggtatcttcctattattccaaggtttaagagattgtttgttgataaaggtgacacaaaagaccttacatgacatgcagatgggagaaactgtaatggaatgctctgtcatccgattgattcttcccaacaaaagaaaatttatcatttgtatccagattttgggaaagaagcaagaaatcttatgcttagaattgccactaatggaatg

SEQ ID NO: 149277 - DNA, 403 bp, Glycine max
  unsure (1)..(403): unsure at all n locations
cttgatgtttgtgttgaatgcattataggtaaacagaccctttgtcttgatattagngcacatagggctacagacgtcttggaattgatacatatatacatttgtgggccatttcatacaccttcatggaatgatcaacaatattttatatcattcatagatgattactctagatatgctgatgtgatcttgactaggagcggatcgcttgatacatgctacagagattttggatgacgtcacttccagtgaaggaagataagtcagggttgacgccacaaggattaccttgataagtctgagattggttcaacaaggaacccaaagagaagctctcaccaaattttatgataattccaatagtgctttcatggaaaacaaaaaccaatacttatagtgtatc

SEQ ID NO: 149278 - DNA, 467 bp, Glycine max
agcttcaagaaaaccttgaaaaagatggttattagcttttttcttcacattcagcaaattcagcatttaaatgtgatatttaatgttatgcttttttatgccatgataattggtggaatgaatattatttatttgtcaaggtttcatgatatcgaatattgatacctaaaaagggtaatatttcaagttgtgtgattagtgttattttgagatgaaacaccaactatatgtaatcttatctttgcattatcaagttggtattaaaaaattgtaatctatttcgtggatatgatagtagtagggactcataaggatttacttagtaagaggcttaacctaaagtaagaattttgttttctgagacaaaactgcagagatcatctgtttttattattatttccaagtgggagaaagatattgtatctgtatttgataaataagatagaattaaaagattgcacgttcgt

SEQ ID NO: 149279 - DNA, 420 bp, Glycine max
atgcattggttaactaggtaacccttctgtgtttgaaccataaatatgtacctgttgcaagggtctgtggttcgtgctcctctgctaaccactatacagacctttgtccttgcatgcagcatcctgtagcaattgagcagcccgaagcttatgctgctaatatttacaatagacctcctcaacctcagcagctaaatcaaccacaacagcgcatttatgacctcttcagcaacagatacaaccctggatggaggaatcaccctaatctcagatggtctagccctcagcaacaacaacagtagcctgctccttccttcaaaatgttgctagcccaagcaaaccatacattcctgcaccaatccaacatcagctacagccccataaacagccaacagttgagatccctcacaaccttcctcg

SEQ ID NO: 149280 - DNA, 390 bp, Glycine max
  unsure (1)..(390): unsure at all n locations
tattcgcgctggaccgcttagcgcacgttagtgatttttggcttatcacgcctttcttgcttagcggatgaactaaagtagtacgcttagtgagatgaagtggtgcgcttatcgaacctatacaactcatcttcttccaaagtcttcctcgcgcttatcctatgagtgttgcgcttagtggatgctgttcgagctttgccaaattgcctaattaacatgaaattgagagaatttgattattttacatacaaaacagatgcattaagtatctatagtcaatacttaacaaaaagtacttgtnatactacaaaacaaccattaattgtgaagagttgatacaatntacacaagttgtagacacaaaaggtatgtcgtttcatcgactaacat

SEQ ID NO: 149281 - DNA, 345 bp, Glycine max
  unsure (1)..(345): unsure at all n locations
actatgcttgctgatctagtcatcaccagtgataagatcgatgtgtgtctgtatttatgcaaatntactcatcctgcttatacgaatgacaaaactggggcaaatgaagagggtgaggatgaaggagaagcccatgctgtgactgccattcctatatggccaagtttccccccaacccgacaatgtcattactcatccaataacaacccatccccttacccaccacccaattattcacataggccatccctatatcaaaccacaaaacccacctaccacacgaccaattgctaacaccacttttatcacgaaccgtatcaccaacctgatgcaatcctacccccc

SEQ ID NO: 149282 - DNA, 278 bp, Glycine max
tggagtataatgaattgcacaagttgttgataacacctctttgggattgttttttcaagattcactgttccgaatccaccacccaagtaaagttgaatgccgcgcctatgctagtaagcttcatttgaagtcacacaaataaaattggattctacattcatgtgcttatatctatatttcatgttatacagaatcagtttgggatattttcatgaagtaaataatttatggacctttagaatcatatatgtgtgtgtgtctattgttcgggaaggtat

SEQ ID NO: 149283 - DNA, 304 bp, Glycine max
atttgaaatacttctacacgatagggaagtttattttactgtataagtgtaacaagccaaccttgatatgcttcccctgaaaccataccttaacgtagaaaggggtgtgctcttccgattgttaggacatataacaccatcattcttcaagtcaacttcactgtaaatagcaattgtggtgttcgcgctgcatcaagagattatataatcacaattaggttaaaagtaaaaaccaggttcaataaaagtggataatataaaagtgttgtggaatcaaattaacatgcacttctgaagtattaaa

SEQ ID NO: 149284 - DNA, 376 bp, Glycine max
agcttgaaattgaacaacggatgtctcttatatattctaatgctcataacattgcacacggatgtccgattcagatgcataacgtatctagatgctcaaaattgaaaaacagaagctctcgagaaattcaaatgggcataacttttaacatggatgtctgattccgaagcataacatatcgtgacgctcaaaattgaataagagaagctctcgagaaattcaaattgtcataaattttcacacggatgttcgattcggggataaaatatgttgagatgcttgaaattgagagataaaagctctcgtgaaattccaatggtcataacttttcactcggatgtccgattcacgacacttgaaattgaccaacggaagc

SEQ ID NO: 149285 - DNA, 431 bp, Glycine max
  unsure (1)..(431): unsure at all n locations
tgtccttggtttagacatgattgatacatgatgtgtgtcttgtttgattcaatttatgcaaaattggatgagggaaagtgtgatttcgaaaatctgcactttatgcagaattttgctgtcaaatatgtgcagcagaattttggctttgtgcaaaaagtgttgtgtatttgctggttgtggaaagagtattacagatttggttttgaacgtgttctatcagatcccaacggtcataatgtagatttatgtgctagagacttccagttaaattttcgagtcgatccaacggttaacgaataggaacgaggagaatatnactgtggtatttgagtgtgaaaagctatgatgttgggttgtgtctacgcaaaatattctgcctctgccctgtttcttggctgtgtagtcaagatgattggatgtgaatacttgat

SEQ ID NO: 149286 - DNA, 277 bp, Glycine max
  unsure (1)..(277): unsure at all n locations
agcttacacaaacattcattatttctcactctttctacaaatagtcatcattcatccatagttccaatcaatcatgctcagtatgatgcatgcacctgacctcaactctcaaatgcaatgtggtaccatccccagggaaatagcctaagcgtgtccacatgacactctcacttatgaaaactaggcagtaagtgtcgaggtcaccctgttgtgcataggctactctctccccccctcccccaanaantatngaattaagaataaattcatttccagt

SEQ ID NO: 149287 - DNA, 379 bp, Glycine max
tctcggctcctgctgggaacgcctctatctcatctccttttcttcctaaggcacccacccatatggaagctccccatgttccaactccgaacgcgactcgaccagccggtaattccaacacgacaaggaacttccctccgagaccgttgccggaattcaccccgctcccaatgacgtacgaagatcttctaccatccctcatcgccaatcatttggccgtggtaactcccggaagggtcttcgaacccccttgtccgaagtggtatgaccctaatgcaacttgcaagttccatgggggtgccccggggcattccatcgaataatgcatggcccttaaatacaatgtccaacatctaatggatgccggatggctgacttt

SEQ ID NO: 149288 - DNA, 328 bp, Glycine max
agcttcaacatcagaccactgtctttgtctgttacttcttcacatggacttgatggggcctatgcaagtataaagccttggacgaaagaggtatgcctatgttgttgcggatgatttcttcagatttacctgtgtcaactttatccgagagaaatcacacacctttgaagtattctcagagttgagtctaagacttctaatagaaaaagaccgcgtcatcaagagaattacgagtgatcatggcagatagtgtgaaaacagcaagtttactgaattctgcacatctgagggcatgactcatgagttgtctgcctccattacaccacaa

SEQ ID NO: 149289 - DNA, 345 bp, Glycine max
gaatggaggctctggtctcttgtgaaacagcttgttttttttttcataagcctcacaagttattcattggtaggttgcgaaagagcctcaactgtttgctgtttctggggccgctgactgtgatgatgctggatcgatggacgaacatattgtctgcttgtggcaacagctttcccaaaatatgattgacgctgctgctgattgggaatattcctccacccgaaattgtacctgttgttggagaagtcataattgatctgacgcggctgactttgctggtgatgactaggatgtccattgtatatgttggggcattatcgtcaaactttcaattgctaaaaatgt

SEQ ID NO: 149290 - DNA, 431 bp, Glycine max
  unsure (1)..(431): unsure at all n locations
gatccttnagtcacctgcggcatgcagctttagccattatacacaatactttttttttatgcggangagccccggatataacgaaccgctcgaaattgatggtttaacctttaagccaattcatccaacaataactttttactcggatgtcggatggagtcccgtaaaataacgaaacgctcgaaattgaatgtttaacctttgacccaattctaacgataataancttttactcggatgtccgattgagtctcgtaatatatcgacacgctcgaaattgaatgttgaagctctaagctatttaaacaacaataacgtntactcngatgtccgattcagtgaccgtatatatcgagacggtcgaaattgattgttgaccctatgtgcaaatttaaacgacaatanacttttactcggatgtctgattgagt

SEQ ID NO: 149291 - DNA, 461 bp, Glycine max
  unsure (1)..(461): unsure at all n locations
acattcaactgtgagcgtctcgatatattacttggtttcttctacatccgagtaaaaagttattgccgtttgaatnggctcataggttcaaaattcaatttcgagcgtctcgatatatttcgggactcaatcagacatccgagtaaaaagttattgtcgtttgaattggcttagatgttcaacattcaatttcgagcgtgccgatatattacgtcactgtatcggacatccgagtgaaaagctattgtcgtttgaattggctcagagcttcaacattcaatttcgagcgtctcgatttattacgggactcaatcagacatccgagtgaaagtatttgtcgttgaattggctcataagtcaacattcaattcgagcgtctcgtttttaccggactcatcaacttccgagtaaagtattgtcgttgatgggccaaagtaacattaattgcgaccgcccatttt

SEQ ID NO: 149292 - DNA, 433 bp, Glycine max
  unsure (1)..(433): unsure at all n locations
agcttctaccatattatatgggataaagtttttttaagaaagaaaaaaagtagttgccgtattaattaatgtactgtccatttcacaagttgaagatttatgtccatagagacagacagacacccagacggaaagaacttgcttgatgtttctctgtgttttggtttttggtttgctttgttttacctctctaaattatggttttgacaagaactataataagaccaatacttgtcaatacactgactttgttgaggagaatctgggtttcgattcccaaataatttcgaggattagtcagttttataaatgacctataggattgaagtctgtgaaatgcctaaggaacttaaaagagaaatcaaaagtcctaatatggtgatngaaaaaactgagagtaagagatactatgattttacacaaattatgatta

SEQ ID NO: 149293 - DNA, 437 bp, Glycine max
  unsure (1)..(437): unsure at all n locations
tgtgccatagttaccctgccagtcgtggatatgatcttttctttccagctagtaattattcgccagatatttctaatatggggtttaaacagctactcatttctcttatgatcctatactaggaaacccaaataggaatcaagattattagtaatagtcacctgaagctgttgactaagctccctcaccttagcttatgagacattagttgagaagagaacctttgatttgctcatgttgatcttctggctagatgcattagcaaaagggtttaatatctggttgacttccccagctgctacactgaatcttcatccaccaaaatcagatcatccgcatagaataagtgtgagacatttacccaccgagaatggatgcgagttaccattctgaactgaatctnggatgagatgtgccaatctctgaatacacaacac

SEQ ID NO: 149294 - DNA, 456 bp, Glycine max
  unsure (1)..(456): unsure at all n locations
agccttgtttaaagatntatggtcatcgaattctacctttntgtcttgttctaattntgattcttctattccagtatcaaccattagacataggttgacttcctcttcatcctcttcatcaaaggtggtgtcgtccaagtcctcccaagtgcatatgagacttttcttatccttcgacttatgcttctttttgtatttggacttctcctattctgggcattctgacttgaagtgtctaggctttttttcacttgtagcatattattgaacttttctcttttctttccttgaaaaccttcttggatgagttctttcatctggactcattgttgttcttccacatcttacaaatcttccttgagataaatgttagctcatcatcttcatctgatccttcttcgtcagaagagttctccatatctagtgctcccggcgtggctttggatgatgatttga

SEQ ID NO: 149295 - DNA, 430 bp, Glycine max
  unsure (1)..(430): unsure at all n locations
tagcttgcctaattaacctgaaattgagagaaaatgattattattctcacaaaatagaattattaagtatttattacctatacttaatagaaaatacttataacactacaaaataaccataaattggaagagtttgatacaatttacacacattttatacacaaaatttagtcgtattcaccgactaatagtttacacacctgttcatagtaaacacatatcttttcgcactagacacctattcactgaaatagctttaccaagtgacacaagttgcccgagagtttgatactcggttcttaccgttttatactattngcgtgatccggtgcacttgccaaatgcgaacacatacanctattcctggattctcgtgactagataaagaaatcatgctactctcaccactgatgatctgattctattcatg

SEQ ID NO: 149296 - DNA, 353 bp, Glycine max
  unsure (1)..(353): unsure at all n locations
tgangcatgcaacatggggatatagggacccacattttgactatgtgtttcggcgaggagcacatccgttttatgtagccccctcaattctactggttaatagtatcattaaataacaaaacccggtaaaattcttctctcttttcttttcatttcttctttgttaccatactatgctataaaggaattctcctataaaacctgaatggcagtaccaactttctcggatcattttttgtaccgccatattcctaaatattttctcgtgcaaggataattctgcccttctttagcgtccgtaaatataggataatgcaaccgtaattctttcaattaagtgcgaatgctctctt

SEQ ID NO: 149297 - DNA, 351 bp, Glycine max
cacattcttggtggtgaaacaccttctttttggcttattccctagtggatggtgcctcccctctcttcttctcctttgccttccgctgcatctctatggaggaaaatcaccattgaaggacctcattgacgctcaaagatccaccctccatagaagctccgcaacaagcttccatctcctgcctgtgggcgcaatactttttgatgaaagctctgatgatgggtggtccgatgaccatcttgggggtgatgggcaccctgtaggactgacaattgcccattaccagagctggtaaccaccaagaccctattggacttctatgggtctactgaatgtcttgctggcgtgatc

SEQ ID NO: 149298 - DNA, 469 bp, Glycine max
  unsure (1)..(469): unsure at all n locations
agcttgtntgagaagagtgaggtttaactcttctatatgcctgtgttntctctccacaaaatcattttgatgatgtgtgtgagcgcaaatcagcctgtgaatgatccaatgggtttgaagaaatgaggtaagaagtccgaattcatctctccaatctgtttgaacactctntattttagtatcaaattggagttcagccatggttttaaattgctgaaaaacagaaatcgtttctattttaagaaaatagatccaagtgaacttagaatagacatcaacaaagtttatataagaagagaaaccatttgaggatgaaatatgagatggtccccacaaatcactgtatataagttcaagagaaacagaatatatagtttgagacgagaagattgtagtctatgtgacttaccaacacaacaagcagcacaaaattcaaacagttttattaactatggtgtattacaatgat

SEQ ID NO: 149299 - DNA, 428 bp, Glycine max
  unsure (1)..(428): unsure at all n locations
taatgcaagtatgctattgctatgcgcaccagcataattgttgtttcacccaacaaaattaaaaaattctatttttgttcttccgtaaaactgatatggattaacgaatctataagtccaatacggatactacaattcatattagcttatggattggccaatcagtatgaagcccaatcaattttttttaattttttcaaaaatatgtgttacgaattaatttaaaattaatgaccggtaataaaatttgtgataattaattttgatttaataattaatttgtttacatatataaattcatttaaaataaaatacataaaagttaatttacttgagggaaaattgatttattatagtgaaatgcaaatatcccatcgtgcaaaatggtgntntgcaaaaattaattacttattaaaaaatgtaacaat

SEQ ID NO: 149300 - DNA, 458 bp, Glycine max
  unsure (1)..(458): unsure at all n locations
agcttatatgcaatgtggtaccatgtcagtgtataactttctgtggcgcttagaagtacatgacaaagcacaccacacaatgggtatactcggtcactctcactaagtaacatcataaggtgaccagtcatggttactctgttgtgcgagaatgccccaaccacatgggatcaacatgggcttaaaggagcactctaaccgagtatctttacccncaaggcctagactccgaagaatccgtttgggcctcaccttcctgattcaggtccaacccctataatattatttttttatttgcacgcacacactgtttatgagttatataatacccacgaccttactcttatatgccaaacatatttaacaaattgcgctatagtttaacccttcaggatcctaactaggaattctactatattctttaacactgcgccataaaattctctctggtacacact

SEQ ID NO: 149301 - DNA, 436 bp, Glycine max
agttacactgaagagaaatgtggtcctcttttgttgttaaaatgttggttacatcttattctgttttctattatttattttatctggatgtcggttccaaccaattggatattatttcccctgcataatgaatactattatgcatggatatttagtccttgagttcctcttcaataatgagtatggggaagtccacttggagagagataaataatcattttatcctggttaatgtgacaccattagattgcatggttatctctcctatatggccttgctattgctgggtaattcaaagtgttgtctagttagtttttcaatctgttgcatggaagtgttctatgaacatatcaagtctgtgttcataatttatattttgccatgcttttttgtgtgcatatccaattagcttactctattcttgtaattagatttg

SEQ ID NO: 149302 - DNA, 468 bp, Glycine max
  unsure (1)..(468): unsure at all n locations
ctgcagcttatanagttggcaacaaagcaatgtacattggtcatcctatctttagataaattaaaagctntctcatgcacattagtccacttgaacaccacattcttttttgcaagttcacttaaaggtgaagcaagtgaactaaagttcttcacaaatcttctataaaaacttgataaaccataaaaaattcttaactcattagcattcttaggtataggctattccctaattgcctttaccttttcttcatccacacttattccttttgagctaatgacaaaacccaagaacacaatagattcatggcaaaaagaacattnttaagattggcatacaacttattttctctcaaaacattaagaacaacatgtaaatgaccaacatgctcctctgatgnttttctatagatcaaaatattatcataatacaccacaacaaatntcctaatgaaaacatatgaaacat

SEQ ID NO: 149303 - DNA, 414 bp, Glycine max
  unsure (1)..(414): unsure at all n locations
ctcagcttgatgatatggtcttaccgacaaagatcaagtgttctttttgatgcaaatctgatcatcatactttgataaatgccaaaaaaactatggcaaatgaagagggggagatgatgcaagctccattggagcttgtatgcctatgatcttcttcatcaatggattcctttgcttcttggaagataaatggcagcggaatggagaaggaagagagagaggagacgccacttcaaggagaagatgagtctagaagaagctcaccaccataggaggccatggataagagcttggaggaagaaggagaagaatgaaggaagagggagagaagagcacgaaattttgttctctaaatgagccttgaaatctgaagtttaatattcatatggtcaaaagtgaataanattcacacac

SEQ ID NO: 149304 - DNA, 468 bp, Glycine max
  unsure (1)..(468): unsure at all n locations
agcgttgaagacatggagtatgaattaaagcactcacnattttcatattcttttgaaaaagctctctatgtaaattcttgtcatgtttagaaaagctctcaaaatactttgattatcttgagagaaaaaactaagtgttgaaattatttatccatgtaagacgattgagtgttagtcattgtgcaatcaaaataaacaattcttcttatttgtgttagagccagcagtgacttggtaggataaataatagtggttgtaacaagcttggcgtatagcttaagttaaggagtcaaaagtggtaagataaatacttgtaacttattgaagttagtggaacttggtgggttgccaagaactgaacgtattctatgtgattgagattaacctanaatcttctggcttatactgtntattttattttatgctctctaacaaactcaaggttgaatttaattgttgctttgaaaa

SEQ ID NO: 149305 - DNA, 388 bp, Glycine max
gcttatgtgaactaatgtctacagacaccactcatacctgtttattcttatggaccacaatgagatgacaacaggataacctgtatgagaatataacaaatatgacaattgtaatagcatcaacgccttcacatgtgcttcttgttttgttgcataaactcacatagttctaataagagagaatgtctcttgggctacctatgagaaaatcgtcgtcacaatggcattgaagatatataaaacgagttgaagcataaggcatcttattctacatcatttgcataaacaatgacttcttggatcaaccttactggcttctttggtacctatgcataaatatatgaccaaatcaatactattgatataaaggagacaaacaatggatgat

SEQ ID NO: 149306 - DNA, 142 bp, Glycine max
  unsure (1)..(142): unsure at all n locations
gatgttaaaaaaaaaaaaaagagaatgtgctgctgccaacggaaaaaaanaacacgggaangaaaaacgaaaacatttgtttacaacaaggaagacgacagtaccaaagaaacgaccaccgcaagcggccgacgcacaaacc

SEQ ID NO: 149307 - DNA, 399 bp, Glycine max
  unsure (1)..(399): unsure at all n locations
ctcagtgttcaactcaataatacctcattcagctccaactgggtgcaagggataaatcattcaagcacgtggtcaactttttggctaagtggctatcacaatcaaacatggccttcatcatctcaatttcatgcatttagtccatactttagagattcatgcaaaaatcagtactaaatgatacgcggttctctcaaaatttaaggatcacactctcaccgggatacagtcaatgcattccttcacaatcaatctgataaactgactaacattttctgtcatacttacaatcacatgctcattctcttctaatggtgcaagctngatcaaaacaaacatctaatcattcccatccactgaaatcatacatttgctcaatcaattcatttgcaacactca

SEQ ID NO: 149308 - DNA, 280 bp, Glycine max
  unsure (1)..(280): unsure at all n locations
aacagatcctccatgactactacatattatcgcttcccttgttcttcttcttgtatgtacttgttacttacttatgactgagtgctattgcatataatcatgaatatttgtggggatcatgcctggttttatatgactgtgctgaatctttgtaggcacatgtgcactggtggaagattaacaagacctaacattgtaatatgcaatgtgctgcttccctgtggtgcagaatcataatccattaaggggggtgtgttntatgttgctgaatgctattcct

SEQ ID NO: 149309 - DNA, 434 bp, Glycine max
  unsure (1)..(434): unsure at all n locations
agcttatgcataatnnnttnttatatatattcttgttcattgnnggtcgtcaaaattaaatttctttgaacattatcgatattatttaacaattctaatattaaattttcttgagagtgattaaacctcctggtttggtctgcttcaaatcaaagaataaaaatgccattttgcaaacttctattaacttctaaatttaatatttttttaattattgtgatcatccctggatcccatgagtaattttatgaacatcaaattatagtgtaaagagtaaaatgccatggagagagaccgcaaacatggggtcccatgatataaattctgagacagtcttatggcccctaaattgcaatcaacagtatgcccatgaagaatgaatnttcagcaaagcatagagattcagaggaattgaatatggttcagctcaactt

SEQ ID NO: 149310 - DNA, 341 bp, Glycine max
  unsure (1)..(341): unsure at all n locations
gtntagaagtcgtgatgtgaaattcatggaagacctatctattgaagacatcgataaggtggagaagtctacacccaaggaagacaatgatgtggctgattttgaatcagcttatctgcctattcagaatctgaatgctgatgttcaaaatgatgttggtgatacaatcctaccccacaagggcattggatagaagactccaagtagattggaccatagatgcatgataatgccctaagattctcatgagccttatggcagattttgggcccatggactatgtatgagcccacttatctttgtacatattagattaaggtttcattatttttgggccttgt

SEQ ID NO: 149311 - DNA, 424 bp, Glycine max
  unsure (1)..(424): unsure at all n locations
agcttatcaaatggacctgggtgttgtccatttttatttatcttccgnaatactcaccacctctatcatatctaataatcctcacatttatgtctaattgtctttttacttcattgtagtaaatttctaacgcatccattgcctaagaaatctcgggtagttagtagacataaccgtaacgtgaataatcatcaataatggtgataaaatatccttccttttgaaagaactaacatcataaggtccacaaatatcaatatgcacaatttcaagaagctgagtgcttcttgtagctctcttctttgtatgtattgcttgtttttcccttaatacaacccacacaaatatttagatccgtaaaatctatatacggaagaatttcttccttattaatctttccatcctttctctagaaatgtgacct

SEQ ID NO: 149312 - DNA, 352 bp, Glycine max
aaaaaaattgttactcttgcattacgtgaccttaaaactaagctggtttggctataaagaaagagtatttttttgtttctttaaacctgaagcttttagccacacatttctttattcaaatatatatatattttaccttgattcataatcaactgtattttcctttattgtctagaactacaaggtttgaggatttggatactcatcatctattggttattctaatcgaactttatcaagaatattttggatgaccttaggtctgatgcttgtactacaattaagttctgagaaattgagatacatataattgacaaagaatacaaaatattacaacacattattttatctt

SEQ ID NO: 149313 - DNA, 273 bp, Glycine max
  unsure (1)..(273): unsure at all n locations
acaagggacggacataagaacgaacacaggnaagacaaagagagagatggttcggtaagttataataatgatgtgaaaaacaacatataacagagaacacagagagagaatcctcctgcgaatgtcagtgacaacttggaatatgtatgcggtggtgggcgaacacaagagtcataataactgagacagattcatacaatgtggagacccaaaacaaaacccgcgcttcaaacaaaagcagttccaacatgagagagcttggcctctgcacct

SEQ ID NO: 149314 - DNA, 459 bp, Glycine max
  unsure (1)..(459): unsure at all n locations
agctnntgcggattggtcttcgctggcgattgatcgaagngggactaaaaagaggcaaatctgatcatcatgctttgataaatgcaaaaaaaactggggcaagtgaagagagtgagaatgagggagaaacccatgttgtgactgccattcctatacagccaagtttcccaccaacccaacaatgtcattactcagccaataacaaactttctccttccccaccacccaattatccataaaggccatccctaaatcgaccacaaagcctgtctaccacacaaccaatgctaaaccccacctttatcacgaaccaaaacaccaaccaaaaaggatatttgcagcanatagcctgtaggattcaccccaaattccggtgtcatatgctaaacttgctctcatatctactcgataattcaatgganccataacccctgctatgtttctcaccctcatttctga

SEQ ID NO: 149315 - DNA, 335 bp, Glycine max
cgagatgaggaagtgttgaagggtgaatcttcctgtctttcattgttgaccacagagtggtacctggagatatgtcgcgggggtcacgacaccttggggacgtcatgtggggtgctattgcccaaaaccattcttgaccaatcccgacccatcccgggcatagtctgtcagtgagaacctgtgatgtacctaatcatgcgatctcctgtcattcaacatattataggaaaacaagaccactcagcaaggatgcttgttggggctggccagctgtgaattttgtgtaatatgtggatggaggcctctggtgatcgattaccaagggtgggtaatcg

SEQ ID NO: 149316 - DNA, 407 bp, Glycine max
  unsure (1)..(407): unsure at all n locations
agctngggataagaattttatcatgcagattgtctcgatnatgggagacatggtggatgtcgatgataattaccatgaaacccaacaaattctgccttgtttggtcgttagtatgagatgtcatgtcacaatctcgtgtgagtgcagttcattattgtcttaattattacccaacgaaatcattgtcttgagtcctcatccataaaccacgttatatcccctcaatccacactcttcttgacctcagagtagctgcaattcgacaaatgaagataaataccatgctcactggtatgtttcttcaagagttctactgagttctccaatgcttcaaaccttgattccatctcagctaattcagaactcagcaggttagaccacaattgtatgtaacctatattgagttt

SEQ ID NO: 149317 - DNA, 343 bp, Glycine max
gcacacactgtgtacctcgagtttacatggagatgggacttatttacaaaaatggctcaccatatgtgaaccttgggttttttgatccttgaaccactggcgtgtttgacttgagttttatcaagcctatggagttgcgtcaatgcttaccaatgacgagccttgggttttgtggacatgttatgatcatcaagcacagagcttgagtttgacgagtcttgtgtgcaatgtaagtgttgtgctcttgcatacatgacactcgccgtatgtgtcatgtattggatacgatactacatgctcttgcatacttgcctctacaaagatgcatgaatcattggactca

SEQ ID NO: 149318 - DNA, 471 bp, Glycine max
  unsure (1)..(471): unsure at all n locations
agcttgtctntggtttaaatatgatttatacatgatttatgatctttangatccaatttgagaaaaattggatgtgggcaagttggatttcgaaatctgccacattatgtagaaaaatgttgtcaaattgtgcaaccaacttgaccaaatgtgtagaaaaatgcttgtgcattgctagtcataagaagagtagtacatttcgggttccaggcattttatagtagatcccaacggtcaaaatgtagatttatgtactgggaacctccagtaaaattttcaagtcgatccgatggttaacgaatcggaacgaaggaaatgttactggggtatatgaggaaagctgtggtatttgaatgtgctttggccagatgtttttgcctctaccctantttcttggtttagggtagtttcatgatatttggaatngaattgcttatatattcgggaagcttggagggattgatggtgacc

SEQ ID NO: 149319 - DNA, 353 bp, Glycine max
  unsure (1)..(353): unsure at all n locations
ctaagcttctatcaaggctcatcttggtggtgaagcgccngcttttcttgtcttttcancaaaggacggcgccgactctcacctattttactttgtcttccactgcatctccatggtggaaaatcaccattgaaggaccccattgaagctcaatgatccagcctccatagaagccccacaagcaagcttccatcagaatcctaagagtgtttggatgaccacatcaagggtcccaactaaacactcactatcactacgaaatatggcataaaagtattacacacaaatggatatgtggtaacctattggaggctcctatctcactcccaatgaaaggcctgtatgtcacaaaa

SEQ ID NO: 149320 - DNA, 470 bp, Glycine max
  unsure (1)..(470): unsure at all n locations
agcttgtagaatggccagacatgatacatgttatggttttgtttggnanaanaggaaaagggatgccccacattatttccatgacacaaatgcaaaaatgatgatttggaaactttatgcaaaactggtcatgcacgcacctatgtggacactcaagtgtcaaatttttatggtcatgtgatgctagggctcaagattcatttcctctattctaaatcaacccaatatttccaaaatatgttcttttatcaatttgtgcattcatccgagtccattttgggtactcgagaaaatttcacagcattcacccttcaggtgtacacacatgtgttttcaaaaaccagctatgatcggcgaatttcccacagaagagttggaagtcatctcttttcataagcatgtcngttattcagcttaacaacattatgttgcttttctctgtcctcattttcccttacttgctcccttct

SEQ ID NO: 149321 - DNA, 218 bp, Glycine max
tatacattccattaccaaatgaaaagatctatgcactgagccctactctcaacctgtcaaaacactcacagggttacatcacactctcaccggttatggttgaagctttcttcactcaatcaatttgcatactgacttacagttggaatggcaagtccacattctatgctcttctttcgttatcatacacactcgcgacaactcgtgaataggatcac

SEQ ID NO: 149322 - DNA, 466 bp, Glycine max
  unsure (1)..(466): unsure at all n locations
agcttattatcaaatgtaaattcactaacagtagatattcttataaaaaaaagatgggacctcgttgatagcaagcacttggtcattgctcttcttcaaataaaggagattgtgaaaaaagaaggttgtgcatagagcatgagaagatatatacaaataaccttatcaagtgaagtgagcttcttcaaccaacacaggtgacaacctctgtacaccggagaatgaatcttagatgcatttttaaagtgtttctatgttattttccaatctaaattgaagttttaacacagtaatctatgttgatccagtgcaaagctntataatacatattatcaagaagaaaaactcacaggttgattaaagagcaatactaaactaagcatatattaggataaatgttgtacctcttccaaaagtatgtgtagaacgaaagatataggcatgttttacaaatcttcttagtatt

SEQ ID NO: 149323 - DNA, 374 bp, Glycine max
gttgagatacatcttttgcttacgtctagtttttttatatattttattacagcttgacattctctgttcttatatctttaccctgtgctatataatagctgcaaggatgagggaagctgcaaatgagatagctgatacaaagaagattctgcagatcaaaaaggcagaatgagatgcatagtcaaagtatctatcagggcttggaatagctcgtctgcgtcaagccatagtagatggtctgagggacagtgtgctaaccttctcaaagaatgtccccgggacaacatctaacgatgtcatggacatgtgtttggtgacccaatactttgacacgttgaaagagatcggtgcgtcctcaaaatccaattttattt

SEQ ID NO: 149324 - DNA, 438 bp, Glycine max
  unsure (1)..(438): unsure at all n locations
ctgcaagcttgtcacctctttcaaaaaaccaagatttatnattgttccaatgccttaatgttttctctcctttcaaaagaatcgaaagatcgtttaatggtccatgccttaaatgacctttcattcaatcaaaatatatattgcaaaaaaggataaaaacaatttaaccaacgtttagttctcaaagaactacgtaggtcagatttccttatcacaattgagggatacgtangagcaagggaaacacccttgtcgaccacaaaaagataaaaaatacaaaaggcatgaaaagacatataaaaggcataaaagaaggaagataaaacaaattgaagtcatatttgcacacttgattaaaagatgtcgtcccttgtgacagacgcgtggggtgctaataccttccccgtgagtaaatacaactcccgaacctttacactt

SEQ ID NO: 149325 - DNA, 432 bp, Glycine max
  unsure (1)..(432): unsure at all n locations
actaatctataacataacgctacaatgctgataatgcgagacatgtgtattctcatacaggtcacaaggattgtatgatcataatcatctaactaattttctcgtccaaactaacatatatataaaaacataaacagggatcatgtacgaaattaactccaactctcgtaatctactccctctgggagtgcttgcctgtatgtactccactgccgttgtgtacgcgtcttgtttgtgctttgccatcttgctctgccgtttgtcaccagatcctactctaatttcctctgctgaactaaatcctcactattttcaccgaacatatatttgtaagcatacaacaccattggtataacaaaagacaatataatngaaattaaagaatgaaaaaaaattgtctaacacgctaaccatttaatacatcaacgtaac

SEQ ID NO: 149326 - DNA, 430 bp, Glycine max
  unsure (1)..(430): unsure at all n locations
gcttacagcagatattaagaatgaccccttattctttatataaaaaactnaatgccgttcacctatggaataaaaaaaaacttaatggctgagtgtaactgaaatagtggcaaccaaaagtcacccccaacagccaacaagtcatccaccatttggtctcccaaaaggctgatgcctaagttgccaattgggcccttattacaacttgaactaaacctaactaaagcccttttagttgattaacccaaaacatatttttggtcagccaactttacaaggatcgtgccattatttagacaaactaaacactctataattgaaacaaagtggtgtcatttagtactcctccatttgggccatgatacaactcacaaccttggactattctccttgatacttgggcttgtattcaaacagtatggacaacact

SEQ ID NO: 149327 - DNA, 364 bp, Glycine max
tcttctccacctgatgaacattctgcacccactgtgacttttctaatgcgtatctctttcccatgttgtttcgttttggagatatgaaaatctccctcacatcttccacctgctggaagtgccgccataagtctctttccgtagtctcttcagggaatctagtgaagtaaaaggatgttatgtcattgcgttctcgccaattaactcgctggtagcgttgatagtcttcgttcctgttccgatcagtgctcagacgatgacccttctctctcctcttccatcttttcctaacactcactcacacactgtctctctctcctctctcctctctcatatctctctgcaaatgtgtatcattttctta

SEQ ID NO: 149328 - DNA, 412 bp, Glycine max
  unsure (1)..(412): unsure at all n locations
agctntcattaggtggatggtaaatgatattatgttagtggacttcatcgagggaaaattaataatatgtgctgtgtttagtactcaggctaaaatttcttaaatgtcctttcaaaattaaaagaataagaaaagaacaaactagtttgttattcatcaatgtcatgagagtcataaactcatgacttattgatgaaattggaaatatacgcttntaaagggattcacttgagttacaaataaggtgagatgttaaataaatgaacaaatgtgtcacaaggttattcacttcttactgttactagaaaaactatgctatcaaaacaaaattgttaagttactcgtgaaagcaatttacaaactcctcaacctttggtcaactaaaaagtgttcacaaaactcacttaatgac

SEQ ID NO: 149329 - DNA, 322 bp, Glycine max
  unsure (1)..(322): unsure at all n locations
gatcgagccatttctcagaaattatataccttggatgtaagcagttgttcagttttaataaacttggcaccatcccccatatgtttccccaatctgatgtgtttgtttgtatttgagtgccatgggttggaaaacttgttcacatcctcaacagccaaaagtttgtctcggctcaaaataatggaaataagaagctgtgaatcaattaaagagatagtgtctaatgagggggatggatcaaatgaagacgagataatatttcggcagcttctttatttgaatcttgaatcgttaccanatctcacaagcttttatacaagga

SEQ ID NO: 149330 - DNA, 376 bp, Glycine max
  unsure (1)..(376): unsure at all n locations
taagtcacctgcagctgcagctggacacacaacgnnattatatttctcatctttctcaatacccgagcacgcctgcgagatattcaacggcttcatcagcancagcagctccgacatgtgccccgccgacgacatcattttctgcggcaaactcgttcccttcaaggccgaagagccgctgaaaaatctcatcgtcgaggaggaaaaatctccctcgcgccgccgcagatcggagtcactctcctccgtgacgcgatcgaacagngtgagcacgtgcaccggttctcgcctactcatgatgaagaacagcaagagcctggatcatatcaagttgcgagagtcttcggcgccacacgttgatcggaattacttcacc

SEQ ID NO: 149331 - DNA, 402 bp, Glycine max
  unsure (1)..(402): unsure at all n locations
ctatgcttgggcatttgtgacccccaacgctagagttcttttgtatctctctctggcaatagtcgcatgagtatatccgttgctccatggatcatatatgtgaacgtgaagatgaagataaagatgatggctcaagacgaagatctatgttgagtatgttctcctcatcgtgttggcttaagtgaacataaatattggggttatggaaattcatggctatctaccattgaacgaaagatagataatttgaatgaatgcgtgatgttgtcatagtagtggtagtggttcacacttcaaagtgtattatggaccttgaattgtggacanatagctattataggaaatgattttgctgcctattggggcgaaagatccttttgtaattaagacgctctacgttca

SEQ ID NO: 149332 - DNA, 461 bp, Glycine max
  unsure (1)..(461): unsure at all n locations
ctgcagctgcaagctcgcactatactcngcacctgttttgtttttattttatttcnagatgccgttcacagttaaaacagatgcctcacgggtaggcatgggtgccatcctttcgcaaaagggacatccaattgcgtttttcagtaagccatttaatgccaagttgcttcgttcctccacttatgtaaaggaactattcgctattactgctgccattaataaatggcgccagcacttgctggggcatcgtttcattattctaacagatcatagaagtcttaaagagcttctcactcaagctgtgcaaaccccaaaacaacacatgtatctggccaagcttatgggatatgattaccagattttgtatcgttccggcgcccataatctagctgcagacgtgctatctcaagttcctgaatctcagtcccacctctctatgattctttctgttccatgcttca

SEQ ID NO: 149333 - DNA, 314 bp, Glycine max
cccatcatgacacacattttctgtgatttctacaacccacttgtgctgttccaacttccaaagttcaaggcttcatgtcacgaaattttccagtagtggtagttgatagataaaattatcttcaccttgaactgaattccctcagtcattgttaatatctgtgtctgtttatgtggggtgggggcaccaaaatcaattccaaaaagttgctgaacactatgctagatacaacaacatcgggcacgattaaattgttccacgtgttaatcatgtattggtaacgtacgtagattgattggtggtgccttttcttg

SEQ ID NO: 149334 - DNA, 403 bp, Glycine max
  unsure (1)..(403): unsure at all n locations
agcntttaacgtgcacgaatactgttatgtttaaagttaattaaaaaaagaagtgtcagaattgaataatgctaaatagtgttaggttttcttttgcatttggatgtgtagcttgtcggcaagatgtacgaggtttaagcatatggagacgtggaggcttcttctccattcatggaaaggcatttttttcaatatcttatcaggtcgtttcgtcaaacttttccattttcggattattttaattaaaattattcctattattttattctcattttccactttgcttattttagttgaataatttatttcctttacgtaacccaattattggtttaagaatcatattgtttatgtgcctggactgttatagtatatataataattgattgattgatttccattt

SEQ ID NO: 149335 - DNA, 363 bp, Glycine max
ggacacttataaactaagctgtccaatccttggctgctttgacatatgctgtctgttaatgaccctatcttaagcatcgtgatcatagaatgtagcgcaacaccaaggtcgaggtcttttattcaaatggagatggcggtgtaccgcttcatgaatgactatagggacttgacattaatctggcaaatgttgatcaaagtgacagatgtggtgtggtgagggcaactggttgtatattatgctccgaagcgctaggctaaggtgaagaaagagttaatgaatcttgggggaaggcgtttgtaccacattagtgtcagtcatttgagggaggtgggaaagaccatgcatatcaccacgtcatcg

SEQ ID NO: 149336 - DNA, 233 bp, Glycine max
  unsure (1)..(233): unsure at all n locations
aggaccacaaagagggtaaaataggcaccaccacacaacaccacaacaccagcacgcaccaccaaaggagtacacaaacacagaacacaagcagatcattattgaatgaaaagaaacatacatcacttacggcaggaaaatctcattgaaaactacacgacgacacagaaagtacatgtaccggacctgaaacatcgcataaaaangaatgatccaacaccacatgcggacat

SEQ ID NO: 149337 - DNA, 366 bp, Glycine max
  unsure (1)..(366): unsure at all n locations
taacgggnnncctacaacataaggaattaggacttatcgcccaatattaagtgtaaaaaaactgtcatctgcagctctcaagttttaaaatctttgctctagacacactccacaatccttgaaccaaaaatcaacatagaataaactccaaatttaacatctccactattgggtcaacattcatatatgcatgtgaatataaattatatttatgataaggtcaattgaaatatctgaaagaggccataaggaagtggagtaaagactctgggtttgtcaatgataacgggattcacaaaatccagaagaagctaaatgaagcggaggatatagcatctaatataagtctgtccgaggttgagatta

SEQ ID NO: 149338 - DNA, 405 bp, Glycine max
  unsure (1)..(405): unsure at all n locations
cctatccttgcttgtgagttccttcttctgatgcagtttcttcttctttatgtctggagagtntgcctagccttgctttcacatagcatgatgggggtcttcattattttgaagcatcttatacttccttttgtatcaatcttccttatggatcattcttggcttgtctactgctaattggaacttagttccatattccgcaaggcataaaaaataagagcctaacataaaatgtatatgcacattcatttgttgcagtcgtctgaaggaagcttaccttaccctgattgtttctttatattgtgttaggcacatacataactacatgccataattagagaactcccattgtgagaaggttagactcatctcacgatcttcaatggttaatgttccncagattct

SEQ ID NO: 149339 - DNA, 446 bp, Glycine max
  unsure (1)..(446): unsure at all n locations
agcttataaacttgatcttgattacaaaacctttttattctatgattaaatggntaatgttgtattgtacaaatttcaattcaatgattaaaacctttcatatcatttcattaacaatcaaagcttgaatacaagttagaatcaaattatggaagtgtgaactagtataaaatctagactctctttgcaagacaatttgtaactcgatctgcttgtttactttgaaaactcctttgcatgaagaataatagcatcaaactcaaattgaatgtgactgtgctgagctattaaatagtgtataagagttaaatgacacctagtgtgaactgatccggtaacatatagttttctttttttttctggctgatgatccggtgacatgggtaaattaacatagtgtggggatccagaacatttatctaccaaccctagcttcctagtcttta

SEQ ID NO: 149340 - DNA, 365 bp, Glycine max
ttgtctacctaagtatatgtgaataactcatgtgtatagaatcttatgatcgatctcttaaagtattcttgactattcttacctagatctgcaatctatttcctcaattgcaaagatcataccaatagctatcatgcttattttctttattttataccacaatgaattggctctattgagttctttcacattttaatgtggcagatataagacttcgactaccaatgctggatggggaagaatatctatcaatttttgatgaattcatgtgaactgtcactctcgatggcccaacgctactgtgcatgtatggatgtttatttcttcaccattttccattgatatgcattggttcctatttttct

SEQ ID NO: 149341 - DNA, 385 bp, Glycine max
caccatagcatcaatctttaattaattattgacactcaaatatatatcaagcactcctgcaatctaattaagaccacttaattatacgattattattatggctattcataatcaaaatcaaggatgtgtatccagcactctcccattgtttgatgatgacaaatactaaggagctaatttagagggtgtgacaatacacatatgagcttttcaattatgaactcacctacgagtgtgcatcaatgttgtttcttcttaacaaaaaagatgctcccactcaatcatgcaatattaatcttgttaagccaacataatgtaattgaaagaaacaatgaacacattaccgagtatcattcatcacatcactttatatatataataatag

SEQ ID NO: 149342 - DNA, 394 bp, Glycine max
ctaagctgtaaacttctgcagatattttggttcctctggacaacttttttttatgtggtactgctcatatacttacttgcaaagaacccgactattaacatattctatggaacatgatatcttctgggagttacttgttacattattactctagtctgcacctgtgtggttggtctgacggttgataacgattattatgatgttttctgctattactgatgtctctgtgatttgtatttcacgttgcagattatgatagataataaatatggaggacaatgattttgttcctgctccaaatcgtatcgaatttgtcttccatacattcccaagacaagacgatcacttgggtggaacattattcacaattacagttgaacgcctgcataaactg

SEQ ID NO: 149343 - DNA, 405 bp, Glycine max
ccatatctactcgataatgcaatggttgccataaccccaaccaatgttcctcaacctccatttttccgaggatacgactcgaacgcaacatgtgtgtgtcatagaggaggccccagaggaacttactattgagccattgcaatgacctctgaagcataaggcgcaacgcctaatttatgcgggcttactgataattgaggagaattgcttgtgaatcctgacattcacaagagatgccacacatggggcaattcgaaggttgttgttagatgtctctaatgactcattacgcatttcaagtctattccattatttgaaaccatagttacaatactaaataatatggatgaattgacatcgcttctctcttatctctacaatacatctttgctatcaactccaccg

SEQ ID NO: 149344 - DNA, 323 bp, Glycine max
actcgagatgaggatgtgtagagaggcgaaacttactgcttttattttgtgatccacacagtggctcaccggagatatatcacgggggtcacgagaccttgtggacatcttgtggggtgctattggccaacaccatgcttgaccaatccatacccaacccgtgcataatcggtcaatgagaacctgtgatgtacctaagccagcgagctcccggctgtcaacatatctgatgataacattaccacatagcaatgacgcttgcggtggctggccaaccgtgacatttgaagaatgtgcggatggtggctgtggcaatcgattac

SEQ ID NO: 149345 - DNA, 469 bp, Glycine max
  unsure (1)..(469): unsure at all n locations
agcttgatcgcacgcagagactatcgtcgttttatgttctttttgtcatccagaggcggcgggcccgatgacacgcgggaaccatttggtcccgcacttttaaaatatttttgctatctataagactcacggcccgatgacatgtgggaaccatttggtcctacacctttttgctatctataagactaaaagcatgataggacgcagagactatcgtcgtctttggcgtcttttgtcatccagaggcggcgggaccgatgacatgcgggaaccatttggtcccgcactttcttttgcaatctataagactcaaagcatgaaagcacacagagattaacgtcatcttctgcaccttttgtcatccagaggcggctagcccgatgacatgcgacaaccatttggtcccacaccttntttgctatctataagactcaaagcctaatagcccgcagagactaacgtcgtcttt

SEQ ID NO: 149346 - DNA, 259 bp, Glycine max
ctcgcttatacactgactagataggggtgtgtaataggtatttcttttccctaactccatccggtgacctttgcttgatgacatgcgaccatcctttggtccttgcgaggtgctcggtacacatcatcatgcaacttgtgaaattacatgacatgccggaataccatatacatattgatgcacaataacgaagttgtctgtgacacacccgaattcaaatggatgcatcttcgcattattcattgaggatacgctacat

SEQ ID NO: 149347 - DNA, 287 bp, Glycine max
  unsure (1)..(287): unsure at all n locations
ttctcgctgatcaatatcattgcaaggatagcacagtgcactgatgaatcncatgctgcctatatgttcgaatgaacctgctncgccagacaatgtatggcgtgtatgtcacacatgcaacaagtatgatgggccttcgtagatgacataatactaatgggtgttggcacacgctctggtcattcatgccgcttgtcaaatatgtgatgctgttgagaacgatgcacattattaatctatgcttttattgggaaaaacccaagtccctctatggctagagatattgt

SEQ ID NO: 149348 - DNA, 453 bp, Glycine max
  unsure (1)..(453): unsure at all n locations
agctttangatagacggatcatttctattattattattcacacaacacatgctgatgcagtccttgccaacaacacatactcttcaagggtggatctaatgtacgaagcttatcaattttatttcacacacttactcacttgactataccaaccctttctgtcaacaatttgtaggatctctcatcataaacatagcatgtgctataccatttatatgtatgtgacacaaagtactggaaataacactagcactatgttaatggataactcactntataagaaaagtaaaatttctctgatgaaattcttgcaagctaatttgttcttctgtagaatacctgcgccagagaatagtagataactaactcgtagtcagaaaaataatggacagcagcataatctggtcgttgaaaattgcaagcaatgtatgcagaaataatgagaagtatact

SEQ ID NO: 149349 - DNA, 392 bp, Glycine max
  unsure (1)..(392): unsure at all n locations
gcattacggacacttaaatactaagctgtttaaagacnttgcagcaaaagagtgttgtgtctttccaagaagcttctcaagtgtgttctagatgttgagtgggaaattaagaaaaagtgatattgataagttatagtagcattttatgttgaactacagaaagtgaaaagaacttggagttggaattgaagcataagattggaaactggaaagtcgatactacacgaggaaactagagaaaatgtgacatcaaagcggatagagaagagacatgtaagaataattatatccgaacgcatgcacaaaatggtaaaaatgggtatgaaaccaacaattcatactttataaaaaacaaataataaaaagacatttccatgaatgttgaattctat

SEQ ID NO: 149350 - DNA, 479 bp, Glycine max
  unsure (1)..(479): unsure at all n locations
gatccttaagtcgacctgcggctgcagcttacactagtttgtgtagaataatattattattttgattatatatatatataatcaaattgtagcttttacaataaaattatttaataagtagttattaaataacgtagtaataattaaagtagtttatttggtattgtctaaacgttaagacaccaaatttcaactttcacatgttcctattttcggtacctacactatggtattatttatttatttattatgttattgatatggagtattgattaattttgttgctacattaatttgattgaaaaatttaactgattattttaatgcgtnttttttctttcatttatatttttttatcctcaaaatttaaattaaaatttttattaaagataattaaatatatacgcctattggcacatgctacttcacttataaaatacatgatacatactagtctttcaaaaatagagaaatggaat

SEQ ID NO: 149351 - DNA, 417 bp, Glycine max
tcgtgatggttacctcggcctgcagaaattatatctattttgattgattacaacattaaagtgttctttaaagaaaaaataggttaaaagatgcaactttaggaactaactccatgtaccataaggtgggataacatcttcatatgctacaccgacatggcataagcaaattacaacctttattgccaacttatggaactagaatgcaggaaaaaaaatgctaacgtggcctttaacatcaatgatactgaagaggatagagtttgacaatattcctctttttttggctctatgagaactaaaacaaaatggtattaccgtggccttatttcttaaaattattaacatgctcagttaatcagatattagataccgtgtaaacatacattataattattttctacgtaattcccattt

SEQ ID NO: 149352 - DNA, 465 bp, Glycine max
  unsure (1)..(465): unsure at all n locations
agcttacaatacaaattaaattcattaagttatctattgtgtgttgatttcattttcttagccaacaatatttattaaaccttagctaattaaaaattatcatttgatggtgcattaattttatcaggcttcaaacgaaccaatcaatcttgatggtgaggaattcaacaacaggattggtgaaagaatcaagggcgagttaagatatctcgatgggcctgtcattgcagcgtccacggttctaaacaagaccatgaaaaactcgtcagtgatctatatatactaatactaatatttattatatgaattgaagtacttcatcaacttttttttattgatatttattccgaatgtgtgcttcaaatcagtgcagacttatatgaaaatgtgaacatggngtttgttcgcaaacgcggagtttgcaactaagttcagtatctgaaatgtanagtctaataacatgat

SEQ ID NO: 149353 - DNA, 455 bp, Glycine max
  unsure (1)..(455): unsure at all n locations
ggcgtgtctgaattcgtagcaaagccacgtttaatttgtgttttgangaaatttttccaaaaacagttgaaaaccgctaaaccatcagttttcacggttttacaccggtttaacggtttcctgtccggattgttaattgccagtttcagagattatccggaccaaatgacaggccgattttctgttcaaccgatagaactcggttctgtccaattttcaaaactttgatgaaatgttaatacattataaaatgaactaggcatgcactttaaacggacatccatttatgatctattatcatatatgtgtgtgaaattctataataattatgttaaaaagagatattaaggatgatttatgatggtaagtggaaaaaaatcactgtctatgttgaacataaagcatgtatcacgtaaatgtcacacaatattgataggatatttatatattaattt

SEQ ID NO: 149354 - DNA, 433 bp, Glycine max
  unsure (1)..(433): unsure at all n locations
agctnngaacgnngctatttntctttacttttcttattaagacaccagatctagtttggtcatcacgttgtctaattttctttacgttgcaaatttcactgcttgcacaatttggactatttcttgggtggtttgtcaagttgacctcttataatattgtgtcccacaggccaatcaatctgcatctaggcgtgatggtggtagtgatgtatgctttgggagatttcctaacacattatagaaaaaaaagaaaaagtttataacatttattgttgctcctaattaaattatattgcttacttgtactgactagtgactcctctccatttcttattcttttgttcttttggtcaattcaacttgtccttttttttaatagtgattattcatgataacactcgaacgtcaccaaattgattattcttgataacac

SEQ ID NO: 149355 - DNA, 379 bp, Glycine max
tgctaacccatggaagctcctaatatctcccacactttttgtggtgggccattcttggatagccttgattttctcatggtccacttatacctcatttctaccaacttaaaaccctatgaaaactatattatctacacaaaaggtacacttctctatatttgcatagatggtgtttttcctatggactgaaagaacttgcctgagatatcctaagtgatcatctaggctcctattgtacactaaaatatcatcaaaataaacaactataaatctacctatgaaatcccttaatacatgatgcataagcctcataaatgtgcttagtgcattagtgagcccaaaaggcatcactatccattcattcaaaccaaacttggtc

SEQ ID NO: 149356 - DNA, 401 bp, Glycine max
  unsure (1)..(401): unsure at all n locations
agcttgccacccagctcgtccagtcgagctatgttgcttcctccagatgcaaccgccttctgaaagaattttctggaaggcccaagtgggcctggttgctatttgcacccccatttttactaaatacaccccttgctcttttttggtgattttttttttccgtaacgttacaaaactttacgaatttcgtaacgatgcttgttctctttccgtaatgttacgaaaccttacggattacgtaatcatccctttgttgcctttcggaacgttacagaattttacggattgcacactatacacttcttttaatttctggcatgccacggaaaatcacggattgtgctacaatgctnttctttgacttccggcatgtcacggaacgtcacgaattgcctaacgat

SEQ ID NO: 149357 - DNA, 398 bp, Glycine max
gacacttaaatctcagctgtccacaaaaggctttgagttgtcatttaatttctcactaataaaggatcatttttaagtccaacgcctttaatgatcaccacttaagtaaaaaagaatcacttgatagaaagaactacgtggtctgatttcctcatccaaattgggaatacttgatctatggaaacacccttgcaccacaaaaaagaaaaaatataagggttaaaggatataggacataaagggaacttaaaataaagcatgttgccattcattaaagctgcgtacctgggatgactgtgggtgctaatacttccctgctaattcactccaactttcttaaattcttacccatctttccgttttcacgtttcctaatatatgtgtgaactcccctttct

SEQ ID NO: 149358 - DNA, 478 bp, Glycine max
  unsure (1)..(478): unsure at all n locations
ccggatccttaagtcacctgcggcatgcaagcttctacagctaagattatttcttttttgttcctccccgggctactacaaccaacattctctaagcctttgtaggctcaccctagtattctttcaacaagcctctacatgcttcactcttagtagcacctgttacttgacacacacaataacctattgtgttccctagtgttaactccttggcaagcataccaatttgtacaagtagtattaaaacggtaagatcgagtattgaattccacagagaccatgcttgtactcagagttataaatatctaacgattaagcaattagtgactcaaattgaatcttgttcattgattaactacaaatataactaagtgaatntacttcaaagcaaggaacatgaaaggttaagaaaacaaacactcnaagttgtgagatggtgttggtgatgagttaaggaacgtgttgggctccacatact

SEQ ID NO: 149359 - DNA, 365 bp, Glycine max
tgtcactaccaacatctgcaaaagccttcttgttttcctagatcaaatccacaatacaaccatatttagactcaaatgagcttcacaagttatcattaaatatttaaataaaaaattaaacttaaaaaggagcaagatagataaataaataaataccttgttgacaaaacaagacaatcgtgcgttatgattttcaactccataacactctaaatcatctaaatccatttccacaacattctatagaaaaaataaaaagtaaaaaataaaataaaaaatgtaactcgttaactcgcacttataccaaagtgcagatgttaggtatatcatagattgaaaatctgaccctaataatggtgtctgga

SEQ ID NO: 149360 - DNA, 464 bp, Glycine max
  unsure (1)..(464): unsure at all n locations
agcctcaatggagganaagaaagagagagagtgtgaggtatcatgttattaaagagaggaagcttaaatggaggaaaagaaagagagagagagaggggggagcaccaaattgaaggaggaaaagatggagagaaattgagctttgaggtgtgtctcacaagactctctcattcatcaaagttatgacaagtgttacacatgtttctatttataccgtaagtcactaacaaaatgtgaatttcattttcatttcatgtgaatataagaggaatatttcaaggatatggcaaaggcatcttaacatattccaagaatatgccaaatgtatcttagcatattccaagaatataccaaaggcatcttaacatattccctttagatgtcacaagaatggaaggtgtgactctagcacatgggaaaggaatatgccacaagaatatgcaaaaggaatattccaagaatat

SEQ ID NO: 149361 - DNA, 342 bp, Glycine max
  unsure (1)..(342): unsure at all n locations
tacacttaatactacctcttattgtatcgtgacttctgaacatttgagataattatgttcatttaccaatcactnttccatgactgatccatattacccagtgacggtgtaccatttaaaggtacactgaatgacaactggatatttgatctctctgcccatgatgcccgccaattggtttgcaccaacaatgcggatatgatcggacgtattcttgccggatcattggcttatgaaagccccatccttcactatttaaatgtgcgtgtactagtaacacggtctttcaaccttgcccagttgtctgaagatgatctaattatcacgtggagccttcataca

SEQ ID NO: 149362 - DNA, 466 bp, Glycine max
  unsure (1)..(466): unsure at all n locations
agctttaccaagtactatgtatcaaagcactacacattaattctcttgagacaatccattacaagagaacagttactgacactatgtgttctgtggagtcttcaaatcaccctccacaaatcaaaacatatggcttcaactacttgtttttttacttttgatcagactccagaggaaccccctgccaaagatcccaccacagaaatagtagcatgtccttcacatgtcaagtgttccaatcacttattgatatgactaatggtagagaggtcgtctagctctacgggacactgaaagttcagtatcaatttngaccctgaatagtcccagaagaatcaacttcaaaagttaataataattcgaataatcatatcaataatgcacagaaataatgcaagagaatgggagacatacagatagctaatcactagcaaccaccattaaacatcattgactactataaaac

SEQ ID NO: 149363 - DNA, 272 bp, Glycine max
taagctatatatgatggaagaacaaaatgtttatgctcttacattttattattatattggtacgcgaacaattatgtcatgtaattgtgcaattaatagacattgatcatgtcttatgtgatgaaataaataggagactgtgtttaatttgctttaacagtttttgagcaatacaatggttgttggaaaatataaggcttattggtgtgttagactatattttggcagacatggtgcatgtaaataatgaatctcagctggttgaatattta

SEQ ID NO: 149364 - DNA, 267 bp, Glycine max
tatcaatctaatataaatacataagataaaaattaaatcaagttatgacaatattaatgtcacaaactcaaaatacttcatttatcactataatttctttaaaaggaaaaaaacctcttagctctctgggatccatagacaagttacaagtttatatgaacctatctttcttaaccgtcattatcatctccgattcccctaaacgacttcttctagacccttcatcatttgtgtcctgtgtgccaccctccgtcgcgcagctctttc

SEQ ID NO: 149365 - DNA, 423 bp, Glycine max
  unsure (1)..(423): unsure at all n locations
agcttcttatccaaggctcatcttggtggttattctccttcttccatggctaattccctagtggatggcgcctcctctcacctcttctcctttgtcttctgctgcatctccatggtggaaaatcaccattgaaggacctcattgaagctcaaagatccagcctccatagaagctccacaagcaagcttccatcaagtggtaatcagagcactagagcttcaagtaggtgctccttaaatctccattaattntttgctttaccttctcttccattgttgttatcttcattttttctccatgtatctcctcacatgtcttgtgctaaatgtttttaacatgattctttagagtttccaccaattaaacttgctatagaagctagatttgattntctatggttcaaatntcttcgtctttgtcttg

SEQ ID NO: 149366 - DNA, 387 bp, Glycine max
ctatacattactcgatcttgacaacaccagtgatgagaaagatgtggtcctcatatctatgcaaatagacacatgcgtcatcaaagagatacttcctatcaggtcataacacttgaacaacatcgcggtgcataacaatttcacttccatcatatccataggtggaggctttttaacaatccatccatatgatctatctccaaaatgtccttgcatcattatcatacaaagttcatattagttgcttcccatgaaacagtgggctccaattacggtggtggttcacaatctctaccttcatctaccgcaaatgaatttgttccttgtagtatagatcaaacccattcttcttggcaacaccctatactggtaatcatggacaaacta

SEQ ID NO: 149367 - DNA, 428 bp, Glycine max
agcttctttaggaccttgaaccttcttttttctatgctatgtgctcgcgactggtccctttcttcccttcgcaacttgagttcactattgctaccccatagagctccgcgaaatttgttccggccatactcttccttgcgagccctcttggtctcttgttcaagggctcttgcggtaattgcattctcttcccgtaacccggcacactccttccgaacgtgtgtagcggccaacttgaacttctccttggcaagttttgcctttcctaactcgctattgagagtttggacttcttcgtcctcttccggtgcttcaaaactctcttcgctgacgacttttaacttggcgagccaatctaaacctcgtatatgaactttcatccatgcgtggtacccaccaatgatgccattacgaatgcctctaagctc

SEQ ID NO: 149368 - DNA, 308 bp, Glycine max
tctactatcattgtcatcgtgttttcgtcattgaggtgccactttgatctgccatgttctccacctttgggtgtattctgtgaaagaattgtgccccccccttttgcacatgttctgtagttgcatcctatccgaagacattatactgacactgcctaacgaatgccaccactatgtccttccaagaatggactcgggaatgttccaagttagtgtaccatgttacagctacccagtaagactgtcttggaatgaatgtatcaataattccttatcttttgcgcatgcacacatcttctgatatacat

SEQ ID NO: 149369 - DNA, 420 bp, Glycine max
  unsure (1)..(420): unsure at all n locations
gagcatgaaattggacgagtaaaagatggagagaaggggaactntgaagtgcctctcataagacttgtcttcatcaaagttacaacaagtgttatacatgcttctatatatagactaggtagcttccttgagatgctttcttaagaaaacttccttgagaagcttctttgagaaaacttccttgaggagctagagcttatctacacacacccatctaaaaactaagctcgcctccttgagaagcttccttgagaagctagagcttatctacacacacccctctaataactaagctcacctccttaagaagagaagctagatgctaactacacacccctataatagctaagctcacgcgcatgacaaactacatgataatacaanaaacatcttactacaatgactactcaaaatgccctg

SEQ ID NO: 149370 - DNA, 326 bp, Glycine max
  unsure (1)..(326): unsure at all n locations
ntacaacagaatttagttatgacccactaaccattaattttatatcttaatgccattaacatagggaattaaaaaaaacttaatggctgagtgtaactgaaattgtggcaaacaaaagtcacccccaacagccaacaagtcagccaccatttggtctcccaaaatgctgatgcctatgttgccaattgggcccttattacaacttgaactaaacctaactaaagcccttttagttgattaacccaaaacatatttttgatcagccaactttacaaggattgtgccattatttatacaaactaaacactctcgcatgcagataatgg

SEQ ID NO: 149371 - DNA, 457 bp, Glycine max
  unsure (1)..(457): unsure at all n locations
agcnttaagaatgagaggatcgagttacattttgtgtgacctgttattaataaggactacccacgctgaattggattatctgaatctcatctcaactttaaaatctagatttatagtttaatcatattttgtaattgtaatcgtggattgtaaaaacattatttcttcctttcaagattatgttacgagggaggctaatcaattaactcatgttgactcatattaagacaattgctgcaagttgtatttctgcagcatgggctgggctcgaatatcatgcttagctctcatactttttttttttttttgtataaattggcgcttccatttttgtttggtgaatgatatatatcattttaggctaaattaatcatttggtttctttagtttgatgattcttatattttcagtctatatagattcgaagtaattattattagccctataattcatattt

SEQ ID NO: 149372 - DNA, 415 bp, Glycine max
  unsure (1)..(415): unsure at all n locations
acaacattgnttatatatagaaacctactttttttttctcatttatcatcatttcaacatataagtaacttataagtattttatgcactatacaagtatttaataaggtatagaatacttaagatactattaatttaatcaataaaatattattgtattgatactcaaaatttaaactcaaaatataaataagtaaatgtttaaattgttaattgtagaatttgttaataaaaattaattttagaatttttaaaaattatctacaaaatttctagtttgttgcacattctagtttctcaataaatattattaactaaaattaatatataattataaatatttcaagttaagcttatatgtatttatcattgtctttctaaattcgataatcttcaagacaatatttaatttaaat

SEQ ID NO: 149373 - DNA, 440 bp, Glycine max
  unsure (1)..(440): unsure at all n locations
agcttctcgtcatgactgctggattaagctatgtttctgagnnacaagctctccgattgaacaatacttggactctcactactcttcctcctcacaaaactgccattggttgtcgttggatatataaaatcaaacatcatgctgatgggtccataaaaaggtacaaagctcgcttggtagcgaagggttatacacaaatggaaggattggattatcttgataccttttctccggtcgcaaagcttaccactattcgtcttctactggcattagctgctcttcatcagtggcatttatgacaacttgatgtcaataacgctcttcttcatggtgagcttacttgagaaagtaacattgcaagtccgccggggcttttattatgaaatcctaatcttgtttggcgactacaacgttcctatactggctcaagcaagcttctc

SEQ ID NO: 149374 - DNA, 376 bp, Glycine max
tgtggactatcgtccaccctcccgcccacgtgctctctttctttcttttccgccaggacatccccccgcgttaccaccacttttgccatcgcctccccgtacctatccaccactattgcgtcgcctgacacctgtagagctgacctcttgccgggagcgagacttatgtttcacgtgcgacgagaagtaccacagatggcattgctgcgcctctagggttcttctcctgatcttagaagaggacgaaccctcgtgggttaatatagatccaggcgacccttaccctgctcctgaccctgccgatagcccatcacaatatcatgcccaaatcaacctgaactctcttttatgctatttggcccctaatagctttgga

SEQ ID NO: 149375 - DNA, 409 bp, Glycine max
  unsure (1)..(409): unsure at all n locations
agcttggtggggttgacttatatctctatattattagcacaggcctgtgatcaaagcaggaaaccccagggccctgttggacttctccgggtccaccgggtgtctatgaggctctatccctgcaaattgatacatagcatctaagatcagctgggcaatatgtacactcacctgagtcaggatggcatagaccaattaacacttcggtagggggaggttctagttatggtagctggggagaatgttgctaagcagcaacatcatccaaatctgtgggagggtggtcatgctggtgcgcatgatctgcacccgtctccctgctacgctccgagcaaaatcctgccccagaatgcacaacaactggttgatagcctcttcatcgagcctgaggcctgactcctnctttgct

SEQ ID NO: 149376 - DNA, 342 bp, Glycine max
taccacattgactacattgtttatttgtctctttcatgcatcttgtacattactattaaacttctcggagattacttagatgtttcaatctaccattaacaatatgtcaaggtcaattgaattcacactttctaatttgaaagcacaatgagaatttagaagagtggcacgtcttgaggttaattagagcccagcaaaagttgtttcattatcattattttaagaaaaaggaatataaaatgttaactgaattaaagaaagctagagtatgaaatgatttgggcttggctaactaaagaaaaataaaagcctaacctattatggttcaaatgatctgcatgt

SEQ ID NO: 149377 - DNA, 452 bp, Glycine max
  unsure (1)..(452): unsure at all n locations
agcttcatgatgaatcaacaatgattcatatgtgttttgatgataaaaatgatgacaacaaaagatgatgacaaaggtgatgaagaaaaagctcaaaagatcaaaggacaagtcaagtgaatcaaagaacaactcaagtgaatcaaagaacatctcaagtaaatcaagaacaagtcaagagttcaagaatcaagaagaattcaagaatcaagaagaaagtctacaatcaagaatcaagattcaagattcaagatctcaagaatcaagatcaggattcaagactcaagattcaagaatgaagaaaagactcaatcaagataagtattaaaaagttttttcaaaactttgaatagcacatgagtttttgacaaaacctttaccaaagagnttttactctctgggtgatcgataccatattgntgtnnatcgatacgagtatgcaaatgagtttg

SEQ ID NO: 149378 - DNA, 362 bp, Glycine max
  unsure (1)..(362): unsure at all n locations
ttcaatgacaatactcttgtcttgatgttcgatngagncatnntataatgtgagacgctcaatattgaatgcaggagctcttaccaaattcaaatgccaataactttttactcggatgtccgattgagtcccgttatatatctagatgctcaaaattgaaaacagtaactcttagcaaattcaaacgacaataacttctaactcggatgttcgattgagtcatgtaataattcttgacgctagaaattgaatacagaagctctcaccaaatttaaatgacaataacttcttactcacaagtctgattgtgtcctgtaatttatctagacgctcaaattgaaaacaatagctcttatgaattc

SEQ ID NO: 149379 - DNA, 308 bp, Glycine max
  unsure (1)..(308): unsure at all n locations
gctanaaataccttggcggctctggttgtagctctaaaccaacgggaaatggcaggttcatgtttctcaatgttgaaaaaagatatacagctgtgcttgtgttcagcaaaatctaaaagcttccacctatgtattaaaacaaaaagattaaattaaaactcatggacagtttagtaaagaaggacagaggctctcattgcagtaaataaagtaccagctttgttcaataagaaatgcgcaatctgctagcttttttcttgtacgaaagcttttgtttactttctgagtttaagcgcagccctatattt

SEQ ID NO: 149380 - DNA, 187 bp, Glycine max
aaagctacctcaacaatcctaaagactaaatcgtcaatctattgccaacaaaaatatcgctgccaaaggaaacaatgacgctccaaaagtaaaaagacatctgaccctatagtattcgtcatacatacgctcaccccaccgctagggcagcccctcttctgacgcccaggcctatctctctgtatca

SEQ ID NO: 149381 - DNA, 395 bp, Glycine max
  unsure (1)..(395): unsure at all n locations
agcttgctctaaatatacattgatgtttgtattttattggaggaggtggatgccatttttgttttaagagtagcatcccttggtaaaactaactttccaaatgtttgccttcacaggaaatggccccgaggaagcttgcctcatagaggtccacgaaggataaggcggccgaagggactagttccgctcctgagtatgacagtcaccgctttaagagcgctgtacaccagcagcgcttcgaggccatcaagggatggtcgtttctccgggagcgacgcgtccagctcatggacgacgagtatactgatntccaggaggaaatatggcgtctacggtggacatcactggttactcccatggccaagttcgatccagaaatagtccttgagttttat

SEQ ID NO: 149382 - DNA, 385 bp, Glycine max
  unsure (1)..(385): unsure at all n locations
agcttcatcccataggaatggctcagttatcttatgtnnntnatagaatggctttccttctctgcgagctttgggaggaacctggacaaggacgtcagtctaccatttagcttttgtacttcctaaacgttggtatgactgtgcatctatagtatggttatgcatttttcagggttggcttctatcccctgatgtgtgatcatgaaaccctgaaactttcctccattgaccccaaaaatgcacttttctgagttgaggcacatgccgtacttgcagatttctccaaacacctcttctaagtctgccacgtgttgggcaatgctatgggatatgacaaccatgttgatgagataaaccttaacatttcatctgatctattgtctga

SEQ ID NO: 149383 - DNA, 426 bp, Glycine max
  unsure (1)..(426): unsure at all n locations
tctaactctataatgtatgtccaaagttgttcataagcnatanctttccataattcatgtacaaccctttaagtacaacaatcattaccattaaaattaagataacttattcaactaataaattaatttaaagccaactcattcatccttttactgtcgatagttgctatgcctaagaatataaatataaaagaattatcacacatgttttggtttggcatgtctcaatatgcatctaggaatttcaaggacactcgcattaatttaagtttcttgtgacttaaaagaatcatttccaatgttatagttatctcaaaaccaanatatgtataagtattctctatttactatattaatattctcttcagtaaaatatatggcaagtataaagtagtatgcacatactctatttactccatgggtgga

SEQ ID NO: 149384 - DNA, 392 bp, Glycine max
  unsure (1)..(392): unsure at all n locations
agcttatagaaacatatgtttgtagatttcattattctatcgaaagatcatttaaaactttagaaaacccttcaagatcaagtagatgtttcacttgagtccgctcagacatgtgaagctngagtaactcttaaggaaaaagagtccaagttatgtcttgagataaagaccaatgtcagctaaaaaactatcattcttaaaaaatttcaagagttggaaaacaaattaatagatcttcaaaaggatctgaaagagcttaatgaacttcataatcatcacaaggacgacatatatgattcttggagatagtgtgcacaagcacacaaagattatgaagacttctaaatgaagtaacataatctttgggtggaatgcgtagaacacaagaaatc

SEQ ID NO: 149385 - DNA, 459 bp, Glycine max
  unsure (1)..(459): unsure at all n locations
ntctctatatattatgaacagatcgcagttttccttaatttattttcgncnataagacaancaagaactactcagtgagcaatcacaacaaatattctaatttgtgttagatgtgacaccctctaccccgacatacatataaataagaaaaacatataaaaatgtagaattaactaatatgattttattcaattaacataaaggagctcacgtgagtaaaagggtcacattcgttgcactattaccaaataaaacttattaaaaacatatccgactcagaacaaggccatcaaatttgacataagagatcttattaaacggtggaataaaataaaattatataacatcatgcaattgaaataaatactcatgccccattgtcacatcctatcaaacattgggtctagtatcctctacacaatgtttttaaagcaaccacctatcatctgctccacaaca

SEQ ID NO: 149386 - DNA, 389 bp, Glycine max
atagctgttccattccatcatttatacacagttgagttctattcagaagaatagagtttatctcttttatcttaatgagagtgattctcctaaattcttgagtgattcaagaacaccctgactgtatcataggacattcacaacctttgtgtgttgccctcgctggaaagagagattctttccttcctttcatcttcacccttgttctttcaaaccacaattccagaaaatccacctctgcccagagatatctcgtggccataactcccattttacgcactctaaataagtgattcttgagcctaaattgattttcaaaacgagacctttcacctcgtgttggaatcacctctattggacgcctgtagcttcaagtattgccatttcta

SEQ ID NO: 149387 - DNA, 360 bp, Glycine max
  unsure (1)..(360): unsure at all n locations
gtcaacaagttgcttcacaaataactatcatgatgttgtaatcttcangactacccatcatatctcccaaaaccccatacccacgaaatttaagagagaaagaagtccacccaaacctgaattttcgaagtcccactcgtagccacgcacttcacgaccccgaaaatgccctcctttctcgatttggggcagatatgatggccaaaggttgaagctttgcttggagcttcaatggagaatgaagaagaatataatggctacgtgagggagagagagagctgtctgtaaaagtgtggcgctgattgaagagagagaaaagctctttggttgtaaataaaaaggtgttctctttttctatta

SEQ ID NO: 149388 - DNA, 329 bp, Glycine max
  unsure (1)..(329): unsure at all n locations
ttcttacgcctatgccacccacattattagtatctggaggagctattcataagattacccttaagatcaactatttaataaatctctaatctaaaatataaaaaaataaaactaattctctaaagttcatactgataaaaaacaaccaataacaacggttcatataaataataataactttagattagagttcaaatattgattaactcttaaatataaaataaatgttattgaaaaaatnatnttaatctcatttgcacttaccaatttctgaccaaaaaatttaatactactntcaaccaacaacattataccaatatcattttttt

SEQ ID NO: 149389 - DNA, 457 bp, Glycine max
  unsure (1)..(457): unsure at all n locations
ggactggctcaggcatncctatagtcgtacaattatattgttagacgctcacccaaaaagtggacattccaagatgtcagcattgtagtccaaccaccttcatgaatgatttctagattcaccataacaatcttctaatggaaaaccgagtctagaaaacaatgtggctcggatgaatcaccagcttcgacttccttcttgatcaaatctgtaatagggttatcaagaaaatcgactttgcagaccacatacgtcactccattttccttgtgctgctccctctttattgagggagcaacatcttcctccacaaccattacaatcttagtttctctttctaactatgctacatcatctgtggggtacttctccaccacaagaggaagtggctcttacatacggaaccttctctacttctgatatctgatatcaagaactacaatgggtcactatcaca

SEQ ID NO: 149390 - DNA, 308 bp, Glycine max
  unsure (1)..(308): unsure at all n locations
tccattttcaactctaagctngattttcacttcattttcttgctttattctcacttgtagtttcaaaaccttattctgcactcttgaatgttgcaaaattgaatctaaactccctcattcttccttctaaattttgtggagactacgaaaggtaagggggtctctctaactcttgaatcctatgcttgttgttaaacttccttgaacatgttatcttgaaattttcgagcttgcttccatgttctggatctgtgtgctgagatattttccttgagtttttaatgccaaaaattaattctttgcatgtt

SEQ ID NO: 149391 - DNA, 486 bp, Glycine max
  unsure (1)..(486): unsure at all n locations
actcagctagaattgacaacggaagttctcgagacattaaaatggtctaaactnttcactcggatgtccgattcaggcccataatatttcaagacgttagaaatngaacaacggaagctcttgagaagttcaaatggtcagaaactttgactcggatatccgattaaggcgcataatatatcgagacgctcgaaattgaacaatggaagctctcgagagattcaaattgtcataaattttcactcaaatgtgccattcacggacataatatatcgggacactcgaaatggaaaaacggatgctctagagaaattcaaattgtcataacttttcactcggatgtccgattcgggaaaataatatatggagacgctcganattgaacaacagaagcactcgtgacattcaaatggtcataactcttcactcggatctttgattcangccgataacatatcgagacgctcgaaattgaacaacggaagc

SEQ ID NO: 149392 - DNA, 165 bp, Glycine max
acaaccctttcttttgctgcacaatgtgatcattcatcactcttaggctgattcttgggtgtgggaaccttgtcccacgttgagatacacatccaaaccaccatattagctaatctcttgtgacctttcccttgcccacacaacacatatttcttggcgcgtcgc

SEQ ID NO: 149393 - DNA, 235 bp, Glycine max
cacaaccaccacaggacaaaaaagcgagcgacaaaaacaactgcacaacaacccatcaaaaaagacaaaagagcacagaaaaaatcatcaaaacaagaggcaaaaaaacacaaaaagaagtgcccgccataccgccgaacccaaccggcagaaccacctcatcaacacactacgtgacaccaggcccacccccactaaacaataaccgacaacaaaatagcggtgccagtaaaac

SEQ ID NO: 149394 - DNA, 265 bp, Glycine max
atgagatgagaaaagattggaatacccgcttctgctgttcgtcggaagaaaacactgtggaagaagacaatgaaggtgggattggtgctgtggatgcgctagtggctccacaacgatgagctcttgaagctgaagcggaggcggaagaaccctttcgtttctttgacgattctgccatttgagggagtttttgcagattttaatcggtgaaatcaaaagaaaaatgaaaaagaagaagaatgcaatttacgggagttgatttgat

SEQ ID NO: 149395 - DNA, 480 bp, Glycine max
  unsure (1)..(480): unsure at all n locations
ctgagaggatgcttcaatggagganaatgaaaagggagatttatagagatgngggagcacganattgaaggaataaaagaggtatagaagtggaactntgaagtatgtctcacaagactctcattcatcaaagttacaacaagtgttacacatgcttctatttatagactatgtagcttccttgagaagctttcttgggaaaacttccttgagaagcttctttgagaaaacttccttgagaagatagagcttagctacacacacccctctcataactaagctcacctccttgagaagcttccttaagaagattccttaagaagctagagcttagctacacatacctctctaatagctaagctcacctncttgagatgagaagctagagcttagctacacacccactataatagctaagctcacccccatgacaaanaacatgagaataaccaaaaaaagtccttattacatagacaactc

SEQ ID NO: 149396 - DNA, 474 bp, Glycine max
  unsure (1)..(474): unsure at all n locations
tgtaagaccacaataagagtagtgttgtagcagnggagattatccaacttccttttatctttnccatgttcacgccctaattctctctctcaaacacacttatatatatgtatatggtccctcttatcttttccaaaccaaacatagcagcctcatgtcctaattatagaaagccactaagcaatttcttatttcatcatattatataattagttaatagggagggggaatgaatccatgcagagtcaaaggaaccaattcaagacaaataatatcattagcaatttataactgttggggaaagacgaaacattgtgcagacaattccaaaaataaaataaaatggaatgctacaaaaaaaaatattactaataaaatggttcctctggataacaggaagcgcaagggtacttttccctcttgctatgatggcagtcttacacatatatgcaaaanatgagtgaattgtataat

SEQ ID NO: 149397 - DNA, 179 bp, Glycine max
  unsure (1)..(179): unsure at all n locations
tgatcnttagccaattagaggggaccgattgtacattttttttcttagcacacagcctaagagatggacgcttccgacctcaacctcaatgttttacttactctcaccgctgatacatacaagatctgcaaagtgtcctctgctgtacgagaggagcctaacgcatatttacctaaatg

SEQ ID NO: 149398 - DNA, 387 bp, Glycine max
  unsure (1)..(387): unsure at all n locations
agctagggatcgcattagggcatctatttttattttcctatgctgtctctacatatataaaacagccccaccatcccaattttacaaaatcatattcatacatcattggggcatntcaccgagcacttggtgagcccatgtttggacataaattgcaagaggatggggacaatgtggcacgccccattgcttcggaatacagcataggcctaaggccttctcattcaaatcctcaattcaagaaaaaaagcattaaaaacaaaccaaaactgtcccacaaatacaagcatattcccacaatttggagcatcaaaagatgaagaaaatatccaatgggaagctgcaaacatctaggattgaatactctctttgttggagtgaacaata

SEQ ID NO: 149399 - DNA, 321 bp, Glycine max
cacttgctcttagaggaataaaataatgatgactgcggcaagtcgatggcttaactagtcacaactattcgcatgtagttagcgatcgatgttgcgcctcgtccaaagctttgataaatataatcatcattcctaattaacacagaagctcgaaaagaaagaaaagcatctaaatagataattaccatctacccttagtgatgaataggagcaactatgtacaatccacaataacctctccctcttcttgtgcgtcattaagtctaacaagaacaataatatatggatgagacacgcaacctagtggccttcgttgcatgt

SEQ ID NO: 149400 - DNA, 405 bp, Glycine max
agctgcctcaggtcgaaaagaaatttgtctttacagttaagcgttatctgaaggaatatgtgggccatcatcgatgagtgcaaagagaagctaaatcttgcagcgactcacgagcaaaggctagaggatgagtacgccaagatatcagcagaaagggaagcaagggaaagggtaattgattcattgcaccaagaggcaacaatgtggatggaccaatttgctcttactttgaacaggagtcaagaacttccccgattgctagccaaggccaaagcaatgtcggacacctactatgcccccgaggagatccacggacttctcagctattgtcagcatatgatagacttaatggaccatatgattagaaaccgctaggaagtttgattggcgctcagatcttgacta

SEQ ID NO: 149401 - DNA, 475 bp, Glycine max
  unsure (1)..(475): unsure at all n locations
taaagcatggtaagctntagcctaaggagtggtagaatttattataaatatccaataatatcnttgattatatttttagaataacttagagtatcttatattttgttaagattattctctatatttcctaatatttcatgatttgtttccatattgactattagtataaataaggattagtgctttatgttttagtcatactataacacatcatatcaaataaagtcaacatcaataatctcactgtattcagtttcttaattcctattcctctctctctatacctaaatccatatagttttaacacacgtaatgtatcagttcacactagcataaatttaaaaacaaaatccaaatgatgatcataagtggcgcacatggactgacatgtaacacattatatacatgcttccattcttccctatattgnttcatgcagtattttccccccataaaacatagcctttaatgtgct

SEQ ID NO: 149402 - DNA, 395 bp, Glycine max
agcttgagatcagacatgtctagctgcactatctatttgcgcctgagcaactctgctacatcccctgcaacttctgcaatattgttcttgcggaatctttgatttcaaagctcttttacaatttagtgggagatctgcttttcaactcttgcgcgcatgctacctaattgatatgatatatatcttgtttttaaatatcaaactaatgtacagcacatacacactgggttgttttcttcttttgcctctttgttttctttcacctgtttacatccaaggataaaagaactcaatcagatcctgaaaaggaagctacactttgggtgtgtgtgtttgcgcttttgagaaccagtgggtgcgttatataattccctctctctgggttcctagatatt

SEQ ID NO: 149403 - DNA, 289 bp, Glycine max
agcttggagaggatgctttttggaggaatttatagaggagagtttatagaggggggagcacgaaattgaaggaagaaaacgggagagaagttgaactttgagttgtgtctcacaagactctcattcatcaaagttacaataagtgttacacatgcttctatttatagactaggtagcttcctttagaagctttcttgagaaaacttccttgagaagcttctttgagaaaacttgcttgagaagctagagcttagctacacatacccctctcataactaagctcacctcc

SEQ ID NO: 149404 - DNA, 427 bp, Glycine max
  unsure (1)..(427): unsure at all n locations
taacatgtcaaattcatggtagtgaagttatgaatgtttgtatgcttgaagtgtattatgtataaatgacattgcatatgagtagacatgtaagtttagagtattaggtggactctcaatttagagttgaagttnttcatagtggcaaacaaaaattggtctatagaatatatgagttgacaaattcctatagatgtaaggatgcaaaccttttaaaagaaagtcaatacccacacgtgtctatgttcgataaaatcatactttctccataaggtcagctcaaaagcctccctaaatggtcaagtattataatcatggtagggaatatggcttatggggttcacccaaatatcgtagaaatctccatggagtcaagtcaacataacattacatgatataatggcatttgagaatgaagcattaattg

SEQ ID NO: 149405 - DNA, 411 bp, Glycine max
  unsure (1)..(411): unsure at all n locations
agctntgattacatattgaatttcatccttttttttgacaattcattgttacttccatcaatattgatattgtatcatgcttaattatatgcatttgcttattctgatcattgtgtgttgtgtgattatttcttccatgcaggtacatgattcctatttgttgtgagagtgaaatgatgggcagcagcaccaagtgaggtgagtttatatttccttttttttgtctttatctttgttagttcggtatatatcttttattttatatgtttgagttttaaatgtgtaaaaaatagaaatagaaaggtctgttgattgcttattaaatagaaagtacgatattttggttgtagagctaaattatcccccagccacacaatagttaggcttatttgcttccatgttgccccccat

SEQ ID NO: 149406 - DNA, 468 bp, Glycine max
  unsure (1)..(468): unsure at all n locations
tctatataagctgaaccatgttatcaatatctcaagttttgttttattcagaaaattagagtttatgtcttttatctagtgagagtgattctcctaaattcttaagtgattcaagaacaccctggctatatcaaaggactttcacaacctttgtgtgttgccctcgtcggaaagagtgattctttccttcgtttcgtcttcaaccttgctctttcaaaccacaattccagagattccacttctgcccagaattatctcgtggccataactcacgttttgcacgctcaaattaagtgattcttgagcctaaattgaatgtcagaatgagacctttcacctcgttctggaatcacctcatttggagccctatagcttgagttattgccatttctatatgtctgtccagccaccacttaacctacngtttatcatctcattcttccattgtatgccangaaccaccttatt

SEQ ID NO: 149407 - DNA, 394 bp, Glycine max
gcttgtcaccgacatagtcaacatcacacttatttactaacttgaaaccctttccttaatgcatagaccaaggttaggagttcgaataagatatctaaatattcttttaacagtagttaaatgaacttcccttgtctcaaaatcttgcacgtaggcatacactgaacatgatgtcaggtttgaacacaattagatatatgagagacgttatcattgctctatattgggttttgtccatcttcttgaattactcatccattctaagataagttgtcgcaacctacccttcggcgggagggcgacgcgtgactcgcgggatgcgtgttccatgaaaggaatacgcgcggagtcgccaccaacgtttatttgaggaaaacgtcggaaaaaccggaaa

SEQ ID NO: 149408 - DNA, 464 bp, Glycine max
tctagaagatacctacgctatcgttgtgcctttgtttgtttccgtgaatacttaagcttctagcacgtaatctttcagatagctacgagtgtggcttcctcttttaggccttccctctactaacttcttgctgtcatcacatctgggcctggttgcttgcggttcatagctgttacttgtaacactatgggcttgtcaagatgtaaatttccctattagtagagtaagaatatggataattaaaatagaacccatagtataaattattattgatattacattcttctttttaggtgattaacattcatttgaggcatcagttaaggttcttatttctaaatttctacctctaaattattattgatatccatgggcattctgctcgaaagggtgatgggtcgaacctcaagtactttatctcctagacacaggcactttactgcccaggtaaattggcattctcg

SEQ ID NO: 149409 - DNA, 314 bp, Glycine max
tgggactggtatacatgccacaagtccgatgaaattacttttgcccatttatttctgatgattggatgccgtacctgtatgacacccgacatgctcaatgggtgatcaccgccaaaaggaaaaacatcctgttaacataaggtacagtgttagaacctctgaacctgtatgtgaagaaatgcattcggaatcatgaaccaactatcccaaaaccttaagttatttataatcatggtcggctagaatatcatatcacaaatgatgaaccatctattccaaaataagcattttgatcaaatctgcaaagaaaaaaa

SEQ ID NO: 149410 - DNA, 331 bp, Glycine max
caacaggggatggtgggtttatgcgcgcattgtggatgtggaaagcttgttgtgcaccatcgcccgaccgccacctagtaccacatgtgatgggtaccccataattctacaagcttgagatgaggaagtgttgaagggtgaaacttcctgcttttattgttgaccacagagtggtacctggagatatgtcgcgggggtcaagagaccttggggacgtcaggtggggtgctattgcccaaaaccaagcttgaccaatcccgacccaacccgggcatagtcggtcagtgagaacctgtgatgtacctaaacaggcgagcttcttgcagtcaac

SEQ ID NO: 149411 - DNA, 424 bp, Glycine max
  unsure (1)..(424): unsure at all n locations
agctnttgtcatcacctaaaagagccattcttaatgtccaatgtcttgaaatggtcttttccgctttgattggttaaacgtagatttctaaaggcctaaaatcaacatgtagctttattacctctttcaaaaataataagagatcattaatggtccaatgccttaatgttttctctcctttcaaaagaatcgaaagattgtttaatggtccaatgccctaaatgacctttcattcaataaaaacacatcttgcaaaaaaaaagataaaaaacaacttaaccaaggcttagttctcaaagaactacgtaggtctgatttccttatcacaattgaggaatacgtatgagcaaagggaaacatccttgtcgaccacanaaagataaaaatataaaaaggcataataatacataatgacgtaaaaagg

SEQ ID NO: 149412 - DNA, 490 bp, Glycine max
  unsure (1)..(490): unsure at all n locations
ccaagcttgccgcgatcctcttgtagactaactcaccagtccgatnatgatacacatgcacaacangggtcgtgcaccccgatctctcgtgatagcacaacaacttaatcccgtactaccaaggacttcagaatcagactagttcccactgttgaatgaccctaacaaagcatgcatctatgtgatcaaggtaaaagcacactagaatgaaaggcagatggcacaagaacacacaaaacatcattacatagatagaaatatatttacatagatagggaagatccaacagaggatttagctttccatagtccgaaaaccttctttacatcataaagaagaacaagatgaaagactactaaaacacaagtggtgaggatatctccttcacctctaggatctcacaatcactcacanactcatctgaagttctcagaacggcttccgctntgaactcgcatctctgtagatcttcacacagcanaatctctca

SEQ ID NO: 149413 - DNA, 311 bp, Glycine max
tgcagctgatatgttgaacctggagaagattttttcttttttctattatggagcttttttcttgcctaaactaacggaaattatcattttccgagtaaaccgaattatgttctgtcattaaagcaccagaatcctcaaaatttacaaattttttattaaaaccacaaaggaccagaagaaaaagaaaagggatcactggtgtactctatgcatgataatactacccccacaactaagataatactgcgacatgaaactaaacaatcaactcatctctaaatatcgatatttggcaatagcctagattaatc

SEQ ID NO: 149414 - DNA, 425 bp, Glycine max
  unsure (1)..(425): unsure at all n locations
gcttgtcatctcgacgctcagggtttagccactcaagtagctttggagcattttttttcaganncccatgaagtgaatgctgagttgctacccaaaagtgtggctgctaatgagtcgcattcaagggaagctgctgctcgtgcaacatcttctgtgccatccgatgatacaacttccagaataaagcctaagctgggttggggcgagggacttgcaaagtatgagataaagaaagtcgatgtgcctgatgcaagtgcaaacaatgaagggtctgtcttgtctactaacaacacggaaccttgtatactcctcagtcccagcttagttgatataagcccaaaactcttaggaatctcagaatgtgcatctcctgcaactccatcttctgatgcctgcagtgcctcacctggtatgttgcgacactg

SEQ ID NO: 149415 - DNA, 326 bp, Glycine max
agacacttacattggccgacatccattatttatttagggcataaccaaacccaacaaaatgagcatattgccacaccaatttcctatctcttctcataaaaagaaatcacgttgagagcttgggacaaattcattggttcttacgagcctagcataaataaatcttactatgtgtctatatctatcaaacttacataccaatacctagggtacacacttagactatgcttgccgaagcagaccaacaatcaaaacttcacacccttcccaatttcagttaaaatcgtttaatcaaggttggccaaatgttacagctgaaacaaaaa

SEQ ID NO: 149416 - DNA, 478 bp, Glycine max
  unsure (1)..(478): unsure at all n locations
ctggaaagagtctntgaagttagtagtacctgtataagtgtttatttgatttctctgaagcagtgtcaagtttactgaggaatctcttgcgagttgaagaaatagttttcatgcgtgagttgatggcttttaactcatgcgcaatccgataacgagctttcatattcctgatactgagataattagagaatccatttgtatggttatgtacctggaccagttccaattcatcaagaagatcttcagcctcgtgaacaacatctctgacttgcctaacccaaactttgagttcctcatcagtctcttcaaatacatctgcagcccttaagaaggctcttatcagttccaactgtgctttcagatatatcacttctgcttcaacccctatgaacaatttcaacttattctcaaaaactggtttaagcctttcgagaagaaaactcactgcactctcagccatgatctatgtgcatttctg

SEQ ID NO: 149417 - DNA, 354 bp, Glycine max
  unsure (1)..(354): unsure at all n locations
accttgagaacatgcaatagaactatggactataaagctagcacaaatagggagatattgacatggntataataatggttacataggatctatattctaaaattcagcatgaaaaaccttagtgaattgaaaaaaaaaataattagaatgactgcacatgatgttatggaaataatataaaataaaaatgaagtgaagaacaggattgagtgatagagatgaaaagatagacacaacgttaaccttaaagaaacaatataaataatgaagtgtgtgggtataaatattgtactcacgacatgattttatcgttgatacccacatttctttaataatgtggtaatttcttgatta

SEQ ID NO: 149418 - DNA, 400 bp, Glycine max
tacacttatctaggggggagttcaaagtggggaaccactgtctcaattgataataccatctgcagcattgagtggtgccatcatcagatttgcgataagtccaacagaactgataaacgtaaagagaacttgcagtgtgtcattggaactgttattgtccctaacaacaataccaatttaaatttcaacttctccagtgtaggatgcatatacaaggcactgactctttggttcctaaatccattagagacagtactcctcttgattgtgcccttaaaactgtcaaggctgaatgggtgaagaaatactgcaacattctgcaaaatgtgattctagccatcctctaagttaattggttttattacttagagtccacaaaatatggtgcctctcactgcat

SEQ ID NO: 149419 - DNA, 411 bp, Glycine max
  unsure (1)..(411): unsure at all n locations
agcttaaggattgtccaatctataagnggtttatataatnnnttttttattntttttacaaaaatgttttacaaattaatttaaaattaatgacccaaacaagaatcaaaccttcgagttttgtgttattagcacaacactctaaccaactaaactaataaatcaattatattataaaataattaatgtcactatatgtaatactaaaatttttaatatttaatgcgcatgaaaatttagataataaattttgtaacaattaattttgatctaacaattaatttgtttacacatgttcgtagaaaaacaaccactagaccacatgtcattcacatattggataattcaacactgcagaagttgagtgttgactaacaacatattaacaatgaggtgaaacaagagcctaaa

SEQ ID NO: 149420 - DNA, 462 bp, Glycine max
  unsure (1)..(462): unsure at all n locations
tccaatagaggccaacttcatgctcacatattgcaagncctccttctcaaagcctccaccctacaccctcgcaaatctggttgtcgatgtagaggcatccatcggaggaagagacagtggtgcacagtgtcagggttgagccaatagaggaggtggaaggaccgacttgatgatgaggaagtcattgtcggagtcctagatttggagggagagagaaagaggggaaggcgagcaacttgtcatcgaggttgtcatggaggtgagaggaggaagggcaagggcaagaagggttccgagtagaaatagagacggcgaagggtatagaaagagaatgaagagaggctatgatcgttggattagagagagagagagagagatagggaaagaaaaagtaggatagtgtctagtttctagtggacacacatcagatacttatgttcggattcgtccaagcttatcttc

SEQ ID NO: 149421 - DNA, 407 bp, Glycine max
  unsure (1)..(407): unsure at all n locations
agctnttgagtgaaaggatgtgactcttcatatttaaatttgaatttcaacgttcaagggcattggtaatcgattaccaaaacattgtaatcgattacagccttttgaaaataattggaacattgtaaatttagtttgaaaactttttcaaactcattttgctactggtaatcgattacaacaatatggcaatcgattaccagagagtaaaaactctttggtgaaggttttgtcaaaaactcatgtgctattcaaagttttgaaaaaaattttttaatacttatcttgattgggtcttttcttcattcttgaatcttgatcttgattcttgagatcttgaaccttgaatcttgattctaggctttcttcttgagtcttgaattcttcttgattcttttcttgaactc

SEQ ID NO: 149422 - DNA, 467 bp, Glycine max
  unsure (1)..(467): unsure at all n locations
tatgctagatcaaaatgtntgctngcaggtaagggaagttgttcatgaggtcctaaaggtgagggccaaatttgatatcacccattgaggcatatgcgtcaagctaatgacgttaaaagagcgcttcctgngaggcaacccagttctaatttctttcatttgtttttcatgcattgcataagttggaatttgctttatgatcattgaaaaaggggtatatcagcttatactaagttatagatattgnggtttgatctaaatgttttgagaaagtggactgaaaataactgaaaaaacattttcttgaaaatagtccactcgctaagcgtatatcacgcactgagcgcatctcctccatgtgctaagtgaggctagcctacgctaagtgctcanatccctgcatctcaagctgatngngctcactaagctggccatgggtgagcttagcccaattcaattcaatctga

SEQ ID NO: 149423 - DNA, 402 bp, Glycine max
  unsure (1)..(402): unsure at all n locations
agcttgtgattgagtacactttgcttgtaattttttacnaaaagttctaaacgttttataacaacctttataatatttaatttaaattttaaagcctgtaattgaatacaacttgtgtgtaattgattaccaacatgaaaattcaaatattaagtctgaagagccacaacctcttcaaaaattaactgtgtaatcgattacaacagttttgtaatcgattaccaataaggatatttcgaaaataactcccaagagtcacaactgttcaaattattcttgaatggtcatcaatggcctataaatcaattaccagacatgaaaattcaaagtcaagtctgaagagtcacaactcttttgaaactaattgtgtaatcgattactacaattatgtaaatgtattac

SEQ ID NO: 149424 - DNA, 479 bp, Glycine max
  unsure (1)..(479): unsure at all n locations
ggaagggtgcataccccaccattttcatatgttaacactgtgtttgtgncnactattattgggatcatatctttctttgtcattggaggtgccacttgagctgccaggtctctccacctttgggcgtattctttgaaagattcgtgcccctttttgcacatgttctgtagttgcatcctatccggagccatattagaattgtattgatactgcccaatgaaggcaaccattaggtctttccaagaatggactcgagaaggttccaagttagtgtactaggtaacagctaccccgataagactttcttggaagaaatgtatcaacagtttctcatcttttgcgtatgcccccatcttccgacaatacatctttagatggttcttggggcaagtagtccccttgtacttgtcaaagtttggcaccttgaacttgngaatgaccatgtntgggtactaggaacaactcttctacgtcagtaa

SEQ ID NO: 149425 - DNA, 366 bp, Glycine max
agcttccatttcattgtccccatgtgagggatttttctcaaccttttttttattcaacacatcccaacgatggggatgtgcggcagagttgcaaacctggtgatgttatcctgactaaaagcggatcacttgatacaggctacagagtttttggatgatgccacttcgagtgaaggaagataagtcagggtagacgccacttccggtgaaggaagataagtcagggtagatgccacaaggattaccttgataagtctgatattggttcaacaaggaacccagagagaagttcttacaaattttatcaaatgccctacgtttttttattgagaacaaacaccaatacttatagtggatctgaacaaa

SEQ ID NO: 149426 - DNA, 433 bp, Glycine max
gatagttggcactatagatagattccaatatttatttttataaaacatgaacaagagtgcatgttaaaaaaaaaagtcacgatttacattgaaactttccattttttctaacagaaattaaaaatgactttatttaaaaatcaagagttttaggaaaagaatgaagtctttttagttgaataaataagaagaaatagttttatttattaaaataattgttttaagggaaataaaataaatatgttcttaagaaattaaaaggagattttatttattcattagataaggtgtaaaataaagtgtctttttataaaataataaaatgaaataaaatatagagtaaataataaactgaaaatatcttagtcataaattaagacatattagctcagtattatatttactataggtttctatgctctcttttcctctc

SEQ ID NO: 149427 - DNA, 412 bp, Glycine max
agcttcttcaggtgttattccttccaatctctttgaagggctcctattcaagatgaagacagttgtagacactgcctctccccataagtacttgggcagactcttgcctttcaacatgctccttaccatattcattatgggtctgttttttctttctacagctccattatgttgaggtatgtagggatgagtcacttcatgaattatgccttcctgatcacaaaattcttgaaattttgaagaaacatattcaccaccaccatctattctcaatatcttgatcaatgagccattttgcttttttgtcatatttttgaacttctcaaagacttcaaagacatcacttttccttcttattagataaacccatactttcctggtcaattcatcaataaaggatatgaagtatttg

SEQ ID NO: 149428 - DNA, 465 bp, Glycine max
  unsure (1)..(465): unsure at all n locations
tagccctagaggagatggaccttntcaagttttggagagtatcaataacaatgcctataggttggacctcccagaagagtatggagtcagcaccacttttaacatttctgatttaactccttttgcaggtggagctgatattgaggaggaggaactaacaaatttgaggtcaaatcctcttcaaggggaaggggatgatgcaatcctccctaggaagggaccaatcactagaaccatgagcaagaggctccaagaagattgggctagagctgctgaagaaggccctagggttctcatgaaccttanggtagatttctgagcctatgggccaaggttgggtccaattatctttgtacatattagactaggatgtcactatatttggtccttgtatatanggctccatattgtangtagggtaccctagaaatataggaattttcagcccttgtattttgggcacct

SEQ ID NO: 149429 - DNA, 328 bp, Glycine max
  unsure (1)..(328): unsure at all n locations
agctatatgacttacttttttatatncnattttcttttgnngaaggngaccaagaggtacagcataaataacttgtcctcctcttttcatcaaaagtaacttctataacaaaaaaatcaaatttgaacatgttatgccaaatagagaaacatttaactaaagaaataaaacattttgcttatgagctctaataatttcatattccaaatgcacctcatcaaaaagcttcaaaatgtctatgcttggttgatgaattgtgcaaacaacggttctcccagtgtccactgtgtgtcttacagtacgcattacaatagcagcatctctagca

SEQ ID NO: 149430 - DNA, 193 bp, Glycine max
gggaagcaatctttattaccgaggctgcctataggtgcatactagattatcaatatctgggatagatgctatcaacaacggatggaacataaaaggtcctaaaagcaaaaaaggatgggagttatgcacatttattcccaggggttttggcaacctctagaattagtactgagggattcctccccttaccaaa

SEQ ID NO: 149431 - DNA, 370 bp, Glycine max
  unsure (1)..(370): unsure at all n locations
aaaaataacttttttattttttttggtggccactcgctaagcgcaccactcgtgctaagcaccattttcttcacacgctaagcgagctcttgcttgcactaagcgcattgacccctgatcattggctgaacgttctcgctaaacgcacagactcgccaagcgcaaaaacctctctggaatttaattcttttggattgtgctaagcgagcctattcatgctaagcataggccactactgcatttaatgagcattaattcgctaagcgcagcctttggcggctaagcgcaagatgtaggaccaatcaaagctgcagtacccgctaagtgcaagctngcgcgctaaactgaaaagcttctctagaaatttaac

SEQ ID NO: 149432 - DNA, 407 bp, Glycine max
  unsure (1)..(407): unsure at all n locations
tggaggttgtgccatgttctcaaaatgttcaaaatcagaatgttcaaaattaccaaccacagaatgctcaggatgctcaaaaggtaaaaaatgatgcctaactaatctatgaaatgtcctatctatctcaggatcaaagggttgtaagtcatatggattgcctctagccatacactacatttagcatgcacaactagttgccttcttatgcaagtaacaatgtaggtttgaactacaactaccattaaatgatatccaaatgacttgaaattntgtaagcaaccttataaaatcatgaanagatagcacaaaaattntcagacaaanaattaaagtctaactatggaaactacctaagganagttagaanaataaaacaataaaacttgaaaaanaaactagtaaac

SEQ ID NO: 149433 - DNA, 370 bp, Glycine max
  unsure (1)..(370): unsure at all n locations
taaaaaacttacccaacangtatgtcttgcccaatgagtcgatcacactttgaagggacaagacaaaagttttgggcccgatataaaatgacattttcttaggattgacataaacttaaggttgtgtgcgatgactaaagctcccatctacctccatctttcattttcctccattttccttcaatttctctcttgcattttgtaattttaaggtctctcgtgacaatgagaagttagttcatccattgttggggaatttgtacactaagtttactcttatgtagttaatctttatatttattcaatgtttattcccgtgctattgtttctttttaatttgattgtgtggtttatggttcgaatgacttta

SEQ ID NO: 149434 - DNA, 479 bp, Glycine max
  unsure (1)..(479): unsure at all n locations
actcagcttaagagagagaggagtgctggtgggggacttgttgtgttgtgtangnggntagggatttcttgacctttcatgcataagtgtaggtggttaggtatttcttgacctttcatgcataagtgttaccatngaccgaatcatttttggcataaccataacttgccggctaaagttacattttactactcttctctgcataaaaacatgttacttaaatctgttggtgataaaatgttataaatatacaaatatgtatttaaaccgtttagcatcaactcaaaattttgaatgatctaagacacattattcttaaaccattcacagatagtataatgatntaataatcatgagtagtaatactatcaaaaaaataaaaaagttgtataacattgcaatcataatatcntttttaagaaatgcatattatgaaatgctacaatgttaacaacatcacgatgtatgattcaaagctt

SEQ ID NO: 149435 - DNA, 368 bp, Glycine max
  unsure (1)..(368): unsure at all n locations
aattangaagcatcaacaagaatcaagccaaggctattgtgcaagcaatcaatggggaaaaacacaccaaaagattatgatgatggatggctcaaattctcacaaaggtaaacttatcactttcaaaattatcatgacatgtagaggaaaaattgggatttcaaatcacaaaatgtcaagagacttttattttcagaacaattacccatttcttgaacatatcctataattcaaagaaaaatatgcgaagttgtacatgcaaacagaattgacctaaaatattaaactagaaacccaacaaaactaacaaaactagcaaaaccaaaaccaaagaacactcccnccccccatacttaaacaacacattt

SEQ ID NO: 149436 - DNA, 227 bp, Glycine max
ctcagcttcttccactcattgaggaactctagttcctcgaaagttttctatttatctttcatcctccttgaggggatttcttctatatagtataatttgaagcgcttcttcttatcaacatcctaaatgggtgaatgaggacacaccttatctgtaacaatcttgatcttggtgggctttgagatgtgccacccttattgataagcaattgcttgattaccaacata

SEQ ID NO: 149437 - DNA, 324 bp, Glycine max
ttttattatgtaggaactaacaaaaattttcattccggggaccctcttttaataattctgacttgcaacaaccctctattcattctctattttcacctaaaaccattcccaaccaaaaaaatggaaaaaagggattaagaaaacttggagaccttcagggaaggagaagggaacatacctctgctagatgacatcaagcaaattccaagatatgccaagtttctaaaagagctgtgcacccacaaaaggaagctcaaggcaatggaaggatagcatgggcagaaatgtgtaacattgataggttaatctgttcctacattcctg

SEQ ID NO: 149438 - DNA, 454 bp, Glycine max
  unsure (1)..(454): unsure at all n locations
tactaagcttcattccaaancattgcagactgacatcccatatcttgatttagctttctcngttgacaggatatgttatacaatctgggatatttctcccttanaggttcctggtccatgagccagtagtcccatttaaccaatgcaattttcttttgatcaaggccaccaccccataagaaccttctctggattagcccctattggtattcccaaataagagataggcagaggcatgattctgcaattcagataactggcagcctgcaatttccattgttcagaatggcccaagaccccaaagctgctcttcccataattcattataagatcttgctgcagctgagatcttgatgcatctttatcacacatacgaacacactcacacacacacactcatactcaaccacacagtctctcactcactcttttaatacctcacacacacactcac

SEQ ID NO: 149439 - DNA, 389 bp, Glycine max
ttcctcagagtttcattacagaacatttgcattatcgagcattgctagtgtatctggatgttgtcaagtaatttgatatcctttaaggtcaaaggtaaatatttttcttctctaaatatttattaattggtctgatattttgacttacatatataagcttttaaattatttgcaggttacagttccattaagataacatgatgattgttctctttctgtctcattcgtctcatttcatggagctgataaatttcttctagacacgatcttggatatttattcaactcttcaagagcaagttagtgttggttcctattcttttccattacctaatatcaatggcaacagggaaacttctgaacttttaaaagagaaagatagatttctct

SEQ ID NO: 149440 - DNA, 482 bp, Glycine max
  unsure (1)..(482): unsure at all n locations
acttcaaactcagcttataataataaggtttgaagaaaataaaggctcttttctgtattaatctgttcattcatagaaaacaaaaaaaggtacacgaaccttacaattccaccatttgtgtttcttccccccttccaatcctacattggatctcatgactaccttgagacatcttacatgacattcgcaccatgtttcagaatataatgcttcagctgtattcaaatttcaaaagcataacttgtggattacctctttgtaaacatcaattggaagaggcaatctaagatatgcaatccattctttagntaaatttagcttcatctttttggcaactttggctgctgacaatacctatatatgtaaaatgaaaattaagtagacagtaaaaaaagaaaaactacacaaacaattacaagagtttttaaatgagaaggaccttcaatatataaattcattaaattgaagataagaaaactact

SEQ ID NO: 149441 - DNA, 390 bp, Glycine max
  unsure (1)..(390): unsure at all n locations
gcttatggattataaaataattggaccgcattttattgacaagtatcccattgagtattaatttaaaattaatccttgtgtccatcatatccataagtcaaggaagttgttgttagaaaatgatgaaaagcagcctttacaaattataaccccatctcatcatagtgattcaggtacttatttagcacttgacaaacaaaaggttaaactaagtgatcagtttggttttaaatccaacaattgcagaagtgtttttaatgttggtgcaagttatcttaattntggaccccaatggatggccaaaatgaagcatttggaggtgcttcaactgggtcgttggctgcaggttcaccaaaacatcatattgaagtggagagtgaagaattcttg

SEQ ID NO: 149442 - DNA, 469 bp, Glycine max
  unsure (1)..(469): unsure at all n locations
tacggacctatgatactcaagctgcaaactgatcccattgcacagtccanacctcctctggtctttgccacctcttccagcaagaccaacaatggagatggggttctccttgggtccacaactcacccaaagaagaacaccagacatctcaaacactaggcaacttcctcttacttcttatgctgcacctttgaatggcacaaaaagtgacgaagtgcacacaccaganaagaaagggagcaagaaaattagaaaaatttgagaagttgtaagtaactntgatgggaaaaatggttggtttttgtgaggctagtacaaagtttaggacctgcttattattatgctgagtgaggatatagagagaaatatgattggaaggctaaatgcaaaggcaatctcttgtgaggaatatgctcagttgtaaccttagctgacacatngtaaatgtatggacggtggtgtagtaatc

SEQ ID NO: 149443 - DNA, 405 bp, Glycine max
  unsure (1)..(405): unsure at all n locations
agcttaagaaaagagtgtctttcaaatttcttatttgcagaagggaattctatcaatagacctccaatctttaatggagagggttaccactactggaaaactcgaatgcaaatttttattgaggcaatagatctaaatatctgggaagccatagaaatagggccttatatacccaccactgtagaaagagtttcaatagatggtagttcatcaagtgaaagcataaccatagaaaaacctagagatagatggtctgaggaggatagaaaacgagtacaatacaacttaaaagccaaaaacctaataacatctgccctgngaatggatgaatattntagggtttcaaattgtaagagtgctaaggaaatgtgggacactcttcgattaacacatgaaggaactaca

SEQ ID NO: 149444 - DNA, 466 bp, Glycine max
  unsure (1)..(466): unsure at all n locations
tcacanagtcaatcatctntgtatgacatatttgtgtttcttcttacaaggttatgttttattagctgtgagattaaccttaagctagtatgaccaatttttttgccacacctggtgatcttctttgatagaaagaaagcaagatacattttgatatgacagctcatctagtctaatcttgtaaagattacctttcctcttggtagaaaagagtaataacccatcattgtttttgacaatagtctcatccatgttaaatgaaacatcatatccattgtcacataattgacttatgcttaacaaattatgttttaacccttcaacaaataaaacattatcaataagtggctatggaggtatacctttcttatccactcttgttattagccctttttattccctttgaaagttatagttccaccatgcataggggccggccattgaacatacacctttctcatgtcat

SEQ ID NO: 149445 - DNA, 385 bp, Glycine max
agcttctaaactttatactttatatgaactctgataccacttgtttgactagtggcctctgatatcttaagaaagggggttgaattaagatattacaaactatttctccaattaaaattctatttcactttctattcaagatacaaattcccttaacaatgaacttcttaaataatgattcaaatagaacaatttgaatataaatataaaacaataataaataacagagtttaagggaagagaaagtgcaaactcagatttatactggttcggccacacccttgtgcctacgttcagtccccaagcaacccgcttgagattccactatcttgtagaatccttttacaagttctgaacacacaaagacaatcctttctttgtgttc

SEQ ID NO: 149446 - DNA, 378 bp, Glycine max
  unsure (1)..(378): unsure at all n locations
acccagncaccctcattaagaactagctcttttcttcctctattgcctttagtagaatacacctttgttcggttctctatttgggtcttcaccctctcatgcaacttctttatatactctgacctagattccccttctttatgtataaaagaaatgtccagtgggaggggaatgaggtctaacggtgttaggggattgaacccatggacaacctcaaaaggggactgcttggtggttctatgaacccccttgtgtaggaaaattatacatgaggaagatactcatcccaagacttatggctgcctttcagacgagcccttaataaggcggataaagacctattcactacctctgtgtgcccatcagtttgtggatgac

SEQ ID NO: 149447 - DNA, 282 bp, Glycine max
aatgaatcctttaatttgttgggctatatccttaaatcaagaatcaactcctattgcttttcacctgccgggggctttttctttctcgtaccgtggaattggaattggaattatataaaacctgtgttccataatacccacccttaattatgcttaaaagccttacacattaacaccggttgaagggtataatccgagacaagttccagttttaaaaatggacgaaagtaccaaaatatgcttatggcacatgatggtgcaatgattatttaataatttcat

SEQ ID NO: 149448 - DNA, 468 bp, Glycine max
  unsure (1)..(468): unsure at all n locations
tatggtattntcaggttgttcgcttgcagtatctgccgttgcttctcattntcctccacaagttcatcaatgatttgttgctgtttcataacctaaatccacaataacaacactgatagttgaagtgaccgaaaagttcaacaaaaagtatacatgtaccctagtttacgtactaaggttgagaatatatcatcgtttacatcatgaaaagttatatactatcaattaagatatgagatatttttgctacaaaatcaacagcacactaatcagacaaaaatcaaaatccatacccaattaaatagattggatttaaaatctatattcatatttagaagtttggatntttttaaatttggtttgaaaccggtttttgtttcaattatcgattctgcgganagttgctaataaccttctctggttgggtgtgagatgcagagtcaactgcagcccttttaatactttatt

SEQ ID NO: 149449 - DNA, 368 bp, Glycine max
agcttagggatggaatacttacttgttggtgatgaacaaaagcgcgaaacggaatcaaaaaatgcgaaaaatgatgacccttaggctgcaaactcgtaagtcccgtgggtatggcttttgaaaggggggaaaagacagttttgaatgcaaaaacgtcccccctttcgtcattcttatattttggtgtaggggtggctcgcccatgcaagctaacctgcatttttttttttgagaggaacattaaccatgtcccctccttccttatggtttagcgctttgcctaacttgaacttacttaattaagaaatatcgcgttgattacttatttttaaaactaacaaatattaacacaactgctaatctaagga

SEQ ID NO: 149450 - DNA, 490 bp, Glycine max
  unsure (1)..(490): unsure at all n locations
ggacctatgaatctcagcttaacatcagaccacttccgggtgctggttctcttatatgtacttgatggggcctatgcaagttgaaagccttggaggaaagaggtatgcctatgttgttgtggatgatttctccagatttacctgngtcaactttattagagagaaatcagacacctttgaagtattcaaggagttgagtctaagacttcaaagagaaaaagactgtgtcatcaagagaatcaggagtgaccatggcagagagtttgaaaacagcaagtttactgaattctgcacatctgaaggcatcactcatgagttctctgcagccattacaccacaacaaaatggcatagttgaaaggaaaaacaggactttgcaagaagctgctagggtcatgcttcatgccaaagaacttccctataatctctgggctgaagccatgaacacagcatgctacatccacaacagagtcacacttagaagagggact

SEQ ID NO: 149451 - DNA, 405 bp, Glycine max
  unsure (1)..(405): unsure at all n locations
agctntgtaacatagagattgtgaatngngagctctgggcatttggtcctgccgatgcagatggaggcgctgaagcaaatgatgaagggatgtcatctgctctagccctagttttcctttttctcggtgccatctgtaatgaaaataactcaaaattcaccttgactacatttattcaagttgaagaagaaaaacagaaattaaaggttgaaattgacgatgggcacttagcgggatacaactcacttagcgcgcctttagaaatataagactttggcttagcacaacagggtgcgctttagacgaatcaaggctgcaaaagatatgcgctaagctcagcagggttgcgcttagcaggaccataaatntcagaaaatttcactaagtatgtgggcttagcgagct

SEQ ID NO: 149452 - DNA, 476 bp, Glycine max
  unsure (1)..(476): unsure at all n locations
actcagctgtcctggcatcattggatctggcttgcaactgctttatttagtttatcacctcatctaacattgaagctttatctgtctgcaattntgccaagtaatccaccacgtacaggaataatcaatccacatatatagaactgatttgttgcatttgattttggattgaatatgtttttaactatgtaattttgataaaattgaaattgatattagtctccgattctaactttaatcaatttaatccttaaattttaaaagactgttttcgtcaattttcaggaagaatgaaaatcattatttttttgtaaagttcagaaatcgaatcgtccttagtttgaagttcaggaactaaaatcaagtttcattgaaagttcaggaattgaaagcatacttaccctttanattntgaaaaatcacttattttagttctnnttgaaaattgctcttganacannnaaagtatttgtata

SEQ ID NO: 149453 - DNA, 484 bp, Glycine max
  unsure (1)..(484): unsure at all n locations
ggaccttgaaactcaagcttttcaatcttctgtaagggtgatgagctnttagatatctgcgatgtctaggggacactggttttctaccatgtttcagttgtatgtagcttgtgtcttcttcacagatggggcatgcaagatgacccttaacactataaccgctgagattcccatatgctggaaagtcattaatggtacaaaatagcattgcacgcatttgaaaagtctccttgcgaaacccatcaaacactaaaaccccctcatcccacaactttctcaggtcttcaatcaacggacttagataaacatcaatgtcatttcctggttgtcttgggcctgatatcatcatagacaacatcatgtatnttcgcttcatgcacaaccaaggcggaanattgtaaatactagtataactggccatgaactgtgttgagtgcttaaatngccatatggattcattccatcactggctagtccaagtcta

SEQ ID NO: 149454 - DNA, 397 bp, Glycine max
  unsure (1)..(397): unsure at all n locations
ggctgcagctttcaaggaaacaccaccaccaagctttattttcttggtggtagcagcagcatgtccccatctagatcttttggtcaatttggggcatcattcaagtctataaaccatgttggtgatcatgtagatgatgtaactagtgttttgagtgaacttgtgagcaagaggagaaacacagtcattgttggggagagtcttgctagtgctgagggagtagctaggggagtgatggaaaggttagagacagggagtgttcaaggagagttgaggtttgtgcaatttgtgagtcttcctcttgtctcctttaggaacattancaaggaggaggttgaaaggaagcttgtggagcttanaaacctagtaaaaagtcatgtggggagagggttaattc

SEQ ID NO: 149455 - DNA, 463 bp, Glycine max
  unsure (1)..(463): unsure at all n locations
ntaacacanatatcttcaagctntatatagactttatattttctattcatngagatatctcaactaaccattgtcaaataattttgacgcttgacacgaggtcgctactatgcagagagagaaagtggggaccacaaacactttctgtaatatatctttagagaagtacaatttgttagtgtcatctagttcttagagctgactctcaacatacaaatcgaaaaaatgataacagcataagacaaaaggaactaagaatatcaagacaagacaatttgaatcttccttttggtgcgttatggcatgagtttcttactgaacctatatacgttactttccaatgattggttttagtacttgaggatngagttattgtttcattgcttttgtattgcgagtcaagcgctaaaacacttgtcttctcaaggctgaacgctgaagcaatatcgtccaatcactgata

SEQ ID NO: 149456 - DNA, 366 bp, Glycine max
  unsure (1)..(366): unsure at all n locations
gctccttaaacctttattaattnttaactttaccttatccttcattgttgcttcttcatttttctccatgttctcctcacatttcttgtgctaaattttgttaacataattctttaaaattttcaccgattaaacttgctatagaagctagatttgattttctatggttcaaatttcttattcttgtttttgaaccatgaatcatgttgagtttaagttcctttgagttttgttttgctattttttatagctaaaacctaaaccataaaattcttacaaaaacattaaagtagaagaaaaactcaaaaatctagagtgacttgttcacctatttgtagtttgtcatagaaatcatgtttaatcatg

SEQ ID NO: 149457 - DNA, 317 bp, Glycine max
aatttttgaatgcttaaccactattaaggcagaagcaacacaacaatgtttaaccatccatggtaaaagcttgacatcaatgcttaaccaccatggacagaaacttaatgaccctttttttttcaataatagaggttcttgaccagattgaaccccagggacaacaattgcttcaaggatagagacaaggaagaagttgctggacaacaggatcaacaaatgacctaaagtagggttcgtgaccagtttgaacccctatgacaacaattacttcaatgacaaagacaagcaagaagttgctggacaacaggatcaac

SEQ ID NO: 149458 - DNA, 240 bp, Glycine max
tcccaggagggagattgagctgaatgctgatggtcagccttctgaagatcttaaggaagaacatgaccacactcgctcagacataaagtgttctttcttactccaacttgatccccaccttccacacttctgacatcacactattatcggaccaagttgatctacgacattatttagaagatggacatgaacatgggacatatcttctcgagtcagaattttgtgatagctcatcatgac

SEQ ID NO: 149459 - DNA, 410 bp, Glycine max
  unsure (1)..(410): unsure at all n locations
cagcttcaacattcaatttcgagcgtctcgatttattactggacttattcaaacctccgataaaaagtattgtcctttgaatctgctcagatctttgaaattcaatttctagcatcttttatattacgtgactcantccgacattcgagtaaaatgttattgtcgtttgaatttgctcagagctttaacattcaatttctagcatctcgatatattacgtgtctcatccgacatccgagtaaaaagttattgtcgtttgaatttgctcagagctcagtattcaatttctagcgtctcgatatattacgggactgaatcagacatccgagtaaaaagttattgtcgttacactttgctcagaacttcaacattaaatttcgagcatcttgatatattacgggactcaatca

SEQ ID NO: 149460 - DNA, 467 bp, Glycine max
  unsure (1)..(467): unsure at all n locations
ttgaggatattcaaacgacaataccttttgactcggatgtcggattgattttcgtaatancncgagacgcttgaaattgaataccgaagctctgagcaaattcaaacgacaataactttttactcggatgtgcgattgagtcccgtaatatgtcgagacactcggaattgaataccgaagttatgagcaaattcaatcgacaataaatttttactcggatgtcggattgagtcacgtaatatatcgagacgcttgaaattgaataccgaagctctgagcaaattcatacgacaataacttntgactcggatgtcggattgagtcacgtaatatctcgagacgcttgaaattgaataccgaagctctgagcatattcaaacgacaataactttttacttggatgtgcgaatgagtcccgtaatatgtcgagacactcggaattgaataccgaagttctaagaatattc

SEQ ID NO: 149461 - DNA, 425 bp, Glycine max
  unsure (1)..(425): unsure at all n locations
cagctttattcaagacacagaaattaagatttttttatggtttctctacagnctctaaaancttagaaagggtatattaaataggacgagaattcctattgaagtatcaaaaggtctggtcaagaaatttaagtaaaaaagtctttttcaacaaatttactctctggttatcgattaccagaggatgtaatcgaattccagtggccaaaacttgattacaacagctattaaaattcgaattcaaaatttgcactgtgtaatcgatcacacacatatggtaatcgattaccagcagtttctgaacgttttaattcaaatcttaaagccttgaatccattaccaatatactgttatcgattaccagatcagattttccgaaaatattccaccagtcacatctttttatgtggttcttggatggctat

SEQ ID NO: 149462 - DNA, 335 bp, Glycine max
tagacagaaggaaattggccaatatacgccaccttgatattagtggcacaactctggtggatatgcatgtaacattccattatgttcgtaaataaaactttatagaattatgatgtgttaattattaataagtaaatcaatactgatttgataaaatgatgatctgagaaacaataaaaggatatgttattattcatatgatagagaataaaatagagtttcttgtatttatataataatcgaaattaataaatagatgatatattatgtcgggaatacccttaactataaatagcaacataataggcaggattgagaccgactcctcaatctcc

SEQ ID NO: 149463 - DNA, 396 bp, Glycine max
  unsure (1)..(396): unsure at all n locations
tngcttgggagcagacattgtttatagctttatttactngaaacagtgggaggtctttaatggtggaggggcgacacaattgcggtcggtattgcggatcacaatcttacattgtgagtgattgtgaggtggtattgttgaaatggcaattggtacgaatactgaagcagaatgagctccaaatctcattgtatggcatgtgtggcatgaacctctacagtgtgggattgatagtgctacaaagtgaaatgagaaaggacgacgatgaatgacaacaaaatagcgtgcgaattacgacttttggaataaagtataaacacacacaatcttagaccttttttaaaactactctaaatgataccttctagacggttccacaatatatcgtggtaaaac

SEQ ID NO: 149464 - DNA, 347 bp, Glycine max
  unsure (1)..(347): unsure at all n locations
agcttgaacaaccaactattatgtatcctatcatgccactgcttgtttcttaaacaaatctttaaatnttgttgtgtgattgacccactaacaaagtgtgttgagaactnttaaactttaaaagaatattccaacaaaattatagaaagaatttgaatgatagtgtctaggatcaatactcattttttcaacaagtattttgttggtttaaacatacataaaatttcatttgagcctcccgtatgaaaatagtaggcaatgaagaatataaagcttgcataaaacgaccgctctcttttttggtgatattaacatctctctttgcacttgtaaagcacataaaataa

SEQ ID NO: 149465 - DNA, 481 bp, Glycine max
  unsure (1)..(481): unsure at all n locations
tgcttgtggagcttctatggaggctggatctttgagcttttttatgtccttcaaaggggannttccaccatggagatgcagcggaagacaaaggagaagaggtgagaggatgcgccatccactatggaataagccatggaagaaggagcttcaccaccaagatgaaccttggataagaagcttggaaggatgcttcaatggaggaaaagaaagagagaggggggagcacgacattgaaggactaatagagggagagaagtggaactttgaagtatgtctcacaagactctcattcatcagagntacaacaagtgttacacatgcttctatttatagactaggtagcttccttgagaagctctcttgagaaacatttcttgagaagcttctttgagaaaacttccttgagaagctagagcttagctacacacacctctctcataactaagctcacctgcttgagaatctttcttaagaagat

SEQ ID NO: 149466 - DNA, 405 bp, Glycine max
agctttttggagtagaatcatgggaccaacattttatttcaaaaaagaagtcgtatccagtcaaggtctgagagaccatacaagtttcctaacgatttctaattatgtgggccattaagtctatcatatgctgacaatagccgaaaagcccatgaatctcttcgggggcggagtaggtgtctgccatcgccttggccttggctaacaatcggggaagttcttgactcccgttcaaggtaagagcaaaccgatccatccacatggttgcctcttggtgtaaagagtcgatcacccttcctctagcctctttttccgcatacacttgagcatactcatccgcgaatctatgctcgtgggccgtggctagacctaactctttctggtacttggcgatgatagctaaca

SEQ ID NO: 149467 - DNA, 472 bp, Glycine max
  unsure (1)..(472): unsure at all n locations
ctcagcttacacaatttatttgtctcatacttgagttgtggatgtttctatttgaggtacttcctaactagattatntagatgatgcatgttaatgtgtgcagtcctacgatgccacaaccaagaatcatctattgtacttaccaaacaaatcaactcatgaaatgatgcatgttcaacatttaacatatatatatatatatatatatatatatatatatatatattacctattatctttcaatgtggaaaactatacatggcttcacttataagacaaataatttttgttgaattcaattttgaagcctttgtcacaaattngactaatgcttaggaggttatgctctagtccatccacatatagaacattctntatttgagtcttgtgttgatttccgatatctctctcccatntattttcaatgtattatctacaaacgtgacgtatcctccattttttttacacaaag

SEQ ID NO: 149468 - DNA, 401 bp, Glycine max
agcctgtactattattttaaatgtgatggtgttgttgaatcaatattctccttgaagtgcttatgaaaagttacatcggttaaaaagcatgattgacaagtatctttctccaatagttattagaagaaacaattcagaactataacttacttctccttttctgctctcatctaatcgactactgaattgtattacataaagttcctggagaaggaaatgatacatacttagcttccgcctaatgtgtaatgaaatgatatactcacaaacacccaacatatgtgtatacattgaaaagtatacaccatcatctcaatgcaaaatcaatatgttggtaaatcaagagatgaaaacttagtgttccccattatgacctttcgacgtctaacttctccccacta

SEQ ID NO: 149469 - DNA, 420 bp, Glycine max
  unsure (1)..(420): unsure at all n locations
gaccttaaaactcaagctgagacgcgtcccaccatttgcatagtaacacctgtttgtatctactatnatggggatcatctctttctctgccattggaggtgccacttgagctgccagatccctccacctctgggcatattccttgaaggattcatgctctttatttgcacgtgttctatagttgcatcctatccgaagccatatcaaaattgtactgatactgcttaatgaaggcaaccattatgtccctccatgaatgaactcgggatggttccaagttagcgtaccatgtaacagctacccattaagactttcttggaagaaatgtattattagctgctcatcttttgcggatacccccatctttcgacaatacatctttagatgggtcttggagcaagttgctcccttgtacttgtc

SEQ ID NO: 149470 - DNA, 378 bp, Glycine max
  unsure (1)..(378): unsure at all n locations
agcttgactaaattaaactgttcatgatcaatttgctgcatatttgggtggagagtgtgggagccaacatcgcctttctctttctagactctattgcaagtttgcaactccaagattctataacctctaaagcgaggataatatcgaagtttgacatcaggctcaataggtacaatcggtggaggtagagttcttgaaggaagaagccgtgcgaatcttgcttcaccaaacaatgattaagtcttttaaagagattggtcaatctgatgggtcctttagtcatgtgttgcattntcctctttttccataagcacttgtatgtcctccatgctgatagatgttggagccccatatatactnttgtcgcaacctaccctt

SEQ ID NO: 149471 - DNA, 483 bp, Glycine max
  unsure (1)..(483): unsure at all n locations
gaccttaaaactcgcttgacnaacatacaataacaaggtattttactttatctaaatnctcaatcagatgtagttaaaatcaatagctgttctagaaactatatatgattaacattttgcttaagtcctctttctagcatctcaagtccattcatataataaattgttaggatatattaaatttgattctttctattctagaaggacccttttttctatttttgaggaatataatagatggacctcagtgtttccataaagatggaccttaatgtcagcaaattttctgcatcatctaaggattcaatattccataaagaagccatttccatctaaattttgaagattcagcacctaatcttatatgcaggaaatgcacctgaattctcagctgatagaaagaaggaacttaactcttgtgtgacaagagacacaaatgtaagttctcacattctgatntaacttatnntatttattccccat

SEQ ID NO: 149472 - DNA, 357 bp, Glycine max
gatccttaaatcacctgcagctgcagctttttttatagtggacaaaggtttgtttagcgaagtactggatataaaactgctcacttttaatacaaagtctagagagcagataccagcacagtgatctttgttgcgatactacaggaaacataacatggccggctctaatgccagtgtcatactttcagagaggatcaccattcatgatatgtgaaagccattggattaaaggaattgaattgggtgcactgttactgaatccattggcttttaatccacttctttaaggccctctaaagatgtccttgatgtaaattgaccaatacaggacatttgacacactgaccaaccggtggc

SEQ ID NO: 149473 - DNA, 336 bp, Glycine max
  unsure (1)..(336): unsure at all n locations
gaacagatgatactggntcctttttgttgctacatcaaaatcnttgtacactaacaaaggagacaagagttaagttacctcggctatcgctactacttatgaagacgggtacaacacaatgggcctcaaatccccaaacaaaggctaactgtacaagcaaccccagcctaaacatccttggctaacactactgtaggcagcagacaagcaaccaaccaatctaactatgcccgctacttcccatcacagcatcaagaagtatgtgtgttatcaaaaagctcatgagtacactgcagataggattgttgaactatactataaagattaaacttacta

SEQ ID NO: 149474 - DNA, 389 bp, Glycine max
  unsure (1)..(389): unsure at all n locations
agctngtcatttaagaattatgcatactntnttttgtttcttacacttntatccaaagaccatgtttacttatctttaagtccttatgatctttgtgagcttgtgcacattcgttccaaagatcatacctctatttataaggtgatctggaagttcattaagttcttttaactctttttgtagaacttcaattttaacttctaaaatgttaaagcccttcattagagtatctcgttctttggaatctttttcattttccagacaaagccctttgtccaaggtgtcataagcttcactggtttcagtattttctatcaaagaactgatattcttagaatgatggacttctntaagttaatatgatctttggatagtttctaaattctttt

SEQ ID NO: 149475 - DNA, 392 bp, Glycine max
gaactacccatcatatcttccaaaacccaatacccaccaaaatttatgtgagaagaagtctacccatacctcaaatttgaagtcccacaacgtataggtgcacttcacgactccgaaaatggcttccttttgcgaattggagcacaaatggtgagcaaagtttggagcttttatggaggcttcaatggtgaggaagaagaatggaattacaacctgatatagagatggagaaaagcttctgaactttctggctgattgaggagagagaacgctggcttttaagttaaaaaggctacctctctatttatctattttaacaaaggtatgccacatgtcttcttttgagtggagcaaataatggcccactttctctcttgatgtgactcatactc

SEQ ID NO: 149476 - DNA, 474 bp, Glycine max
  unsure (1)..(474): unsure at all n locations
tagaagccttgcttccacacttctatggaggctggatctttgatcttctttgagggccttcaatggggattntccaccatggagatgtagcggaagacaaaggagaaaaggtgagaggaggcaccatccactaaggaataagccatggaagaaggagcttcgccaccaagaatgtgcattggataagaagcttggagaggatgcttcaatggatgaaaagaaagagagagggggagcatgaaattgaaggagtaaaagagggagaaaagttgaactntgagttgtgtctcacaagactctcattcatcaaagttaccacatgtgttacacatacttctatttatagcctaggtagcttccttgagaaacttccttgagaagcttacttgaanagctttcttgagaaactttcttgagaagcttncttgaaaagctagagcttgactatacacacccctctaataactaagctca

SEQ ID NO: 149477 - DNA, 408 bp, Glycine max
  unsure (1)..(408): unsure at all n locations
gcttcatatgaatgattacatacaagttatgtgaaaaattcnatgattataagtgaaaanagggggaggggggagactataaaaaatgaacagaaaatatcaacggcaatgtaaataagttggaaatgggcaaataaataaataataggtagaacaagtgggtgaaaaaaccccatacaaataggtatcaaaatgatgaaagtgggtggaaaaataattttaaaaagagaaaaaaaattatattgcgtaaaatagttttatattatcatctaactaatcacattatcatggtaagttttacattgtcatctaatcaatcataaatcatcatgataagggtttttttttactcttatactaattaccttaaatttgaaattacattanaagacttacatgaaaacaaac

SEQ ID NO: 149478 - DNA, 434 bp, Glycine max
  unsure (1)..(434): unsure at all n locations
actaggnnnagaagaattgatgtttggatgttgtaaaagtaaaattacttttatatatcaaatcaaattactatcaaaggcacaatattattttagttctaaaagacaccacatggatatgaggttatttcagtaactatacccatttgtttttacttgtttctacttttgtttctcatgtaagctaacggtcatttcttccaaaataattgatttgtctttntctgggtaagttgagaacaaatataggagtaaccaaacacttttcaattttgttgaactgtgcaaacttccacaaatggccatgtgaaacacctcataatctaaaacagacatgttcatgtggtaagcatgtttgcatgcgtatgtctttatgcttctgattttcataattntatttggatgcttaaagtgaactcctctccantaacttt

SEQ ID NO: 149479 - DNA, 355 bp, Glycine max
ggaacgcgccaattttttcaatgcaggcccccttttgtctgaaaccaatgcgcaacctgccaaagaaagtacctccaggttgaactgtttttctcgggcaagggctgcgataccagtatcagtgattgcacacctggatacattgagatcagcgagcactgggcaactacctgcaatagccatcaagctagcatcactgactcttttacaaccatcaaggcttagcaccttgagagtctctccatgtgagttaaccatggacaaatctacctgtccgtcagatttacacaaccactttaaattaacttttaccagaccagccttatagcttctccgcagttggaaaataccctgc

SEQ ID NO: 149480 - DNA, 311 bp, Glycine max
gctcacaacctaaagtcggttggccaattccttctctaactacccttatcgggtgtatatcctccggctgatattttggttcttctacaatatcggaactcatcctgagaagatgcatcccactgggttgacatcattattgtgagattggatgccttatctgctcttgacagattcaaaggtctccattatcgtagactatctgaacgttgcttaagtctggttagcatttaatctgatcgtggcttgcatttgttaactataggcatttgatgcctaactagatgcttgtttgttgatctgatgaacca

SEQ ID NO: 149481 - DNA, 350 bp, Glycine max
ttttgggatcattaacgctgataggggtatctacattcatggaataaacaagggtattaagtcataacagttaaaatggaaggtattctttgtaatgactatacaatcagtttaaaaatatgaattttagtttaattagttggcgactaattaaagtgtctaattatatgatgtagaatcattaaaataagttagagttgtaaaactctgaaaaattacaactcagactaaagagaaaagtctatgttgtgttgcatgtatgaatttaatttcagtcagtatatgttttcaatcatacattctcttgctatatatatatctatatatatatatatatatatatatatata

SEQ ID NO: 149482 - DNA, 472 bp, Glycine max
  unsure (1)..(472): unsure at all n locations
cttagatatggtggattgggggaataatttcttcatggtgtattttgacattgatgaggacagatagaaagtgattgaggaggggccatggatgatctttgatcattatttgatagtgcaaacatggacgcatgcctttgtttctcctacaaaaactatcgataagaccatggtatggattcgttttcctgggcataacttttacttctacgatgaaagtattttgctagcattgtcttttgcagtgggttctccagttaaggttgatgtgaaagctctatatgctcgaagaggtagcttttccagagtctgcgtggaagtggaactcaagaaactcgttgtgtggagagttgggctgaaagaccattantataaggtggagtacaaacgcttgcatcgtatctgctcatcctacgggtgctatggtcacctcacacgtgactataaaaccccaccagcttcaaacaatgat

SEQ ID NO: 149483 - DNA, 436 bp, Glycine max
  unsure (1)..(436): unsure at all n locations
cctgcangcnatgcaagctgaatgctcatttgagcttatatgcatgttatttacactcttatgtgtaaggagagataactgaccaaatcttttcatggctattcttccagaaaaacgctcccctgatgtagtttcctttatagcttggaccatctcatttttgctgacatatccatccttgttcttgtctaagaataccaatgtatcaaccaaagtctcaaatgtgcccttcagctttggcatcccaattcgtgatttctagggaagtcttggaaaaaaatttgaagatgtagcacaacatggaaattcagggttattggtatcaatgcaagcctgatgaaattctacgcctgcctgaagaaatgcatgaaatgtccataaatacaataaaaaggaatgacctattaattgaatgttcataagtacaacatctttg

SEQ ID NO: 149484 - DNA, 381 bp, Glycine max
  unsure (1)..(381): unsure at all n locations
ttcactttggcggttaaaatgaacatttcaaaagtctaactgtgtaatcgattactagaaacctgtaatcgattaccagtgaaaaatttcagaaaaagatttttgaaaagacacatctcttcaaatcattttgaaaaggaacgaagggcctatatatatgtgtttgttttcaaaatgcaagagagagatattccaagagaaattcattgtcaaatgctctctcaacaactcttgggcaaacacttgcaaatctattgagagttcatctangaatntcaaattgtagtatacactctaaaggaggcaaatgtttctgttcttctcaaaagtcaattgtaatcaagagactggttgtctcttgaattgtgaatttcctgaaca

SEQ ID NO: 149485 - DNA, 367 bp, Glycine max
  unsure (1)..(367): unsure at all n locations
agcttgtagaatggctagtattttatacatgttatggttnggnttggctcaaggataaaagggatgccccacattatttccatgacacaaatgcaaaaatgatgatttggaaattttatgcaaaactggtcatgcatgcacctatgtggacactcaagtgtcaaatttttatggtcatgtgatgctagggctcaagattcatttcctctattttagtcaacccaacgtttccaaaatatgttctttaatcaatttgtgcattcatccgagtccatttcgggcgtccggggaaaacttcacagcattcacccttcaggtgtatacacattnttttcaaaaactaagtatgatcaatgaatttttttca

SEQ ID NO: 149486 - DNA, 481 bp, Glycine max
  unsure (1)..(481): unsure at all n locations
ttatacaagggagcaaaagatgcaannattattcaaggttagctnnttggncaaaaggcttgtgtatgtacaatcatggccttcatcatgtcctcatttatacatttcattctaaaattcagagattcatgcaaagattattactcacacctagtcgttcaatcacaatttaaggtcacactctcaccgatttttggttcaagcttttctttcacaatcaatctctactgactaacaattctaaatgcaagttcactttcttgttctttctttgtctaacatacacattntctcaacttcatgaaaggaaacacagatctcatcttaagcatgcattcaatngagaacaaagtcatacacccattttcgcaaaaagataaaagtgtttcactgccatgtcatcaaaaattaagttaaactggtaaaaatgcttcaggataagcatactaactattcatatataaactaacgagaagtaaat

SEQ ID NO: 149487 - DNA, 312 bp, Glycine max
  unsure (1)..(312): unsure at all n locations
attgctcatatgcaacgaaaactccatgaaaacttcttacccatgaagagaaccaacttcaaggaaataaattattctgacagactatacggntcctaacacctactcaatgctcttgccaggatggatcanaattcttagggtttgagaaccaaactcaatccaaccttagcactcttttcaatggccttggtgtctacctcaccacaaatggtaaagaacgatttgggacgccactcgtgctggatcagagcacttgtccttccaagatgttacacgtgccttcaatgtggcaatggaccaactgatgct

SEQ ID NO: 149488 - DNA, 359 bp, Glycine max
cagatgtttttaaaaagtcatgtctcatgcctctgcgagtatgctagctatgttgaccttgaggagaaattggatgaaaattacttattttgtccaacagcctaaagaatttcttggtcttgattcgtctctctctctctatatatatatatgctaatatattatatctgatgtgttttatgcatcttcataaaagagacaagcgattctatacattctattaaaggagaaaatgtacatatgttccagacaatcttgcaagaaggaaaaatatacatgattgatcgtgaattttgtgttgtcacataatatagacgaatttatgggagtcacatcgtatgtcacgatggaacaataaa

SEQ ID NO: 149489 - DNA, 303 bp, Glycine max
agaaaagaaaccacaagttgagctttgaacctttgacatagatgtgccttgtattctgaaattttaattgtctttttcattcggtgcgattggaatgttaaaagaaatgagatttggcttataaattaaatcttgtgtttggaatgctacaaaatatgaaatgtttagtgtctgtttataacaaaattcattggatttaacgggttagatttagaaatttgatgaaatattgtgtttgttctgagataatcttggttgggaggaatgaaccacaggaggcattacttactggtgggttatggc

SEQ ID NO: 149490 - DNA, 425 bp, Glycine max
  unsure (1)..(425): unsure at all n locations
ccgcggcatgcaagcaggagacccaagcttattattccnnatatggttttgngnnttctaagcnggcagcaccacacttttttatcctttcgacagacatataaactttttcttggagtctatctggctaagcatgttactattaaatatgtttttatagtaacctacagaatcctttttcctttatttggctttagttattgttaatctggttgagcagtgcttagttgatggagttgagcagaaggctttcaattctcttataaagaaattaagagtggaatcatataacatcattgccaatgatgcctcacaaagattgatagaagaaaccttcatagccatctggcacacgggcaggattttctgagtttttcccttcatggctgccattttatggggaacaatagccatgtttctatccc

SEQ ID NO: 149491 - DNA, 272 bp, Glycine max
ttgaaagaccataagcagcggcgacagggacaacaatcttgtcgattattcattcctatcattagttaatacgtggggattacctgtcgtgcatccacaaaattgaagtctcgacagcatattcataagataaaaaatgtgaaagatatgaagatatgaggaatatgcatttacaaaagctggactggtatatgactacctcagtcctgtcaaactgatgaactcaaatgcattgctgagaagaactaatgcattctcctctcacatatctt

SEQ ID NO: 149492 - DNA, 389 bp, Glycine max
agcttgatgttatgatattattagagaccatcatcaccaacaactccttgaagaaccttattggtctcctgagatttcacaagacataagtgatgatgaaattcaaagaaaatcgagttatctttagcaaattgactcacacttaacaaatttttcgaaattgaaggaacatgcttgtcaagtttgaaagttatgtgagagtcattaggagacacaaaagaggaggaaccaacactagagatacttaaaccttcaccatttcctatgaagatttggttaggtccatcaaagtgtgtcaaactgtttgatatgctgtgattcaccagtcacatggaagctagctccagaatctggaatccaggttgaactagcttgaccattgccatgag

SEQ ID NO: 149493 - DNA, 436 bp, Glycine max
  unsure (1)..(436): unsure at all n locations
tgggagggatgatggggacccggtgttgagagaattgattatattggctacgtgggagtacgtgagctcagttggaggtgggcaatatgggatggtgggtttatgctcgctttgtggatgtggaaaacttgttgtgcaccatcgcccgaccgccacctagtaccacatgtgatgggtaccccataatcctacaagtttgagatgaggaagtgttgaagggtgaaacttcctgcttttattcgttgaccatagagtggtacctggagatatgtcgcggnggtcaggagaccttgnggacgtcatgtggggtgctattgcccaaaaccaagcttgaccaatcccgacccaacccgggcatagtcagtcagtgagaacctgtgatgtacctaaacaggcgagctcctggcgtcaacagataaaggaacaaagccacaaa

SEQ ID NO: 149494 - DNA, 398 bp, Glycine max
agcttggttcgaggtacttacccgttgaatatctatgaacgatgaagaacgaatgaagaacgtcgaagaacggttgaaacctttgcgagattcctcacggaaaacgtttcggaagcgcctcggcttatattttcttcacggaaacaatttttccaagcaaattcgaaagagagagaagtgcctaaggggctgaaccccttccttcttgccttcctcccctatttatagcaaaataggggaggtggttgccgcccagctcgcccaggcgagctcagctcgcccaggcgagcagggttgcttcctccagaagcaaccgccttctggaggaatattccggagggcccaagtgggtctgggtggctattgcacccccatttttactaagtacacccccctct

SEQ ID NO: 149495 - DNA, 449 bp, Glycine max
  unsure (1)..(449): unsure at all n locations
tatacaaatgcctctgaatccttaaaagtctgttctctcntgtggagaagagcgaaaggcaagccaaagcgagtcttcccctaacaagactacaagtggaggaggtgatactcaactccaatcctaatcaaatccttcacctaatcttcaacaaaatgcacctattcctgcgacttcagtagcataatcaagaccaacaaaaggagatcccttgaatactcctcacacaatcaatgcggcagctgtttgagtacaggagatcacaaaaaatcctttctctttactcaagtttatttcaagtgattccaacattttgaaggattctgacaccaacacgcttaaactgacttctaaccaaattctcatacaagaaattgatgagatttcaaaggcttgctaatgtgatgtangtgccccacaatacaaaggctgatagaatctacattact

SEQ ID NO: 149496 - DNA, 356 bp, Glycine max
  unsure (1)..(356): unsure at all n locations
tttggtcaaaggctgtgtatgtaccatcatgggcttcattatgtcctcatttatacatttcattctaaaaatcagagattcatgcaaagattattactcacacctagtcgttcaatcacaatttaaggtcacactctcaccgatttttggttcaagcttttctttcacaatcaatctctactgactaacaattctaaatgcaagttcactttcttgttctttctttgtctaacatacacattttctcaacttcatgaaaggaaacacaaatctcatcttaagcatgcattcaatngaaaacaaagtcatacacccattttcgcaaaaagataaaagtgtttcactgccatgtcatc

SEQ ID NO: 149497 - DNA, 391 bp, Glycine max
  unsure (1)..(391): unsure at all n locations
ntctaacaagcttctttgagaagctagatccttatctatccacactcttctattaactaaattaacttccttaaaaataattacggatgaaaataatgcaacaaataatcaaacatcaaacataattactaataatatatatatcagggtgttacacatggtatacttgagaccgtatagtaagcataaaattgagtataccaagaacaatgcctttttattgactacaaccaaagctataagggtcgccaatgataggcactaagttgtaagatcaatatttctatacatgttgaatttcaagagttgtagttcctttctaaactaggaacaaaaaaaaaaggataaaaaacatgccacccctctaaaatatcacacaacttnttttaaa

SEQ ID NO: 149498 - DNA, 322 bp, Glycine max
tcttgccaaacaaaatcagggtaacaataactcccctgtgctttttcttccatgctatatgtagcaaagtcattgatccaatcatgtttgatgaaatggaaaatgaggccgcaattatactgtgccagttggagatgtattttccccctgctttctttgacatcatgattcacttgattgtgcatctggtcaaagaaatcaaatgttgtggtcctgtttatctacggtggatgtacccggttgagcgatacatgaagatcttaaaaaggtatacaaaaaatctatatcgtccacaaacatttattgttgagaggtacattgc

SEQ ID NO: 149499 - DNA, 444 bp, Glycine max
ctcccacgacacaccttcgttgtgcgttttttcttagaaagacgaaagctgccgaacagtcttccctacaatacacaagctgatgaagtgatcactaacatacgataccattcacctgctctatgacactaaaggccgattccctcttcctgccatcccggatgaagaagcaaaagcacctaatagataggccatatatgactattgagattcatttgcaggctacgtgccattatactattattgatgtaactcctgtgtgtttagttatcttatatataggctaacaaatgtgttgatgctaatgaaccttttacatgtcaattgcaggacttgtatagttttttattatattttattttggagtcacaatgtttcctacttaatggtgatgcgctacaatatattgtttgtatgttgtgtaaatggcaagtcaagctctgc

SEQ ID NO: 149500 - DNA, 451 bp, Glycine max
  unsure (1)..(451): unsure at all n locations
gacctgcangcattgcaagctgctaagcgagatctgcatattataaattcgttcttcagcgtgtattaacatgattttcactctctcctcctctccaaatgccacctaaaccctaacacctcattttccaccaccaatggccgccacgagccaccgttgcttgccgttgaacccccacaccaagaggaacattttaatcgaagtggaatcctcagaatcatcctcaaggattcggtggagaaaattcccctaatcctccatttcatagctctctgaggtaatcttgacttataagcctttgtcctatttagtttgagttcctcttagtggttcttgtgtgttgggtactataatagagtggttttataccttcctttgaaaacccttgaatatgacacantgtaaaagttatctttttataacattgatgttatntttgtgaccttcactg

SEQ ID NO: 149501 - DNA, 466 bp, Glycine max
  unsure (1)..(466): unsure at all n locations
actaagctatgctganatattacaatagacctcctcaacctattatcaaaattatatacagcagagcaattatgacctttccagcaacagatacaaccctggatggaggaatcaccctaacctcaggtggtccaaccctcagcaacaacaacagcagcctgctccttccttccaaaatgttgctggcccaagcaaaccatacgttcctccaccaatccaacaacaacaacaaccccagaaacagccaacagttgaggcccctccacaacattccctcgaagaacttgtgaggcaaatgactatgcagaacatgcagtttcagcaagagaccagagcctccattcagagcttaaccaatcagatgggacaattagctacccaattgaatcaacaacagtcccagaattctgacaagctgtcttctcaagctgtccaaaatcccaaaaatgtcagtgccatttcattg

SEQ ID NO: 149502 - DNA, 397 bp, Glycine max
  unsure (1)..(397): unsure at all n locations
agcttgtagcttaactgtttattatatccgtatttcagttncatatcagagcntgtctatttaatcaaatatataaattcgatcgaatattttatatttaacccgattcatttacatcgctattcaattatatgtaaatctatctattagatntttatcacgtcaatattaaaagaattattattactagaaaattttaaaaaatattaaaagggagtacaattatataaagtgtttatcagatcaaattgatgcgataaatctgataattcaaatcaaactaattaaattagtttggggtgattggttaattggttcgttttactttaattatgaaccacactgattatactgtgctcagttctcaaataaatatttttttaaattgaactaagct

SEQ ID NO: 149503 - DNA, 458 bp, Glycine max
  unsure (1)..(458): unsure at all n locations
ctgatttagaattaattatcacttatgtagttgtacatttttatgttcatattatcctactnttgcgttatttgttatattaaattttttattttattaacaggcataattagagaagatccatcaataaaagtttctttgattcaagaaaggataaatagtgaattcgcctataaggtttcgtacaaaatagcatggatgacgaaacaaaaagtgattacaattgaatatggcgatcgggaagagtcatatgcgaaactttcgtcgtggctaatatacatgcaaaatcggctaaagtttcgtcgtggcttagattatatatattatacaaataaattaaaatacacacaaagaanatattactatataacagatatatattttgaatcttatattgaataactatatatatacaataacaaattaattaatattttacaataattaatactgcaaac

SEQ ID NO: 149504 - DNA, 362 bp, Glycine max
  unsure (1)..(362): unsure at all n locations
ttaacctgaaaatgattngnctaatgcaacttctttaattactaatacagacttgaatttgattaccatttaatagtctcgggtttaatttattaaaaatatttaattggatgacttagatgtcttgttaattacatttatgaactcttcacaattaattcaatcagttcgaaattagtcctcacattaactacagttatttatttaagattttactatgattactaaagttggtctatactgtagcattttccaatataactacaagcagtacaattttatgtgaaaatgaaaaaatgaagctgacattggatgattggagttgntaaatggtcagagattcctagtttcctacttgatat

SEQ ID NO: 149505 - DNA, 475 bp, Glycine max
  unsure (1)..(475): unsure at all n locations
tactcagcttacatnntattggcaaagaaagagggtttaagacataaattttattcattaactatagntatatcttctgttataaattaactnttacgagtaaatcacattaattctcttctcttgaaaggtgttaaataatttattttattntaacttatgagtttaatttctatgcattttcaatgtgtaaaaaaattacatggtcaacttataagaaatcatatagtagatatgctttttaagtagttatggtaatcctcttcaacataaataaatcttttaattatggtgaaaaatatgtcttgaaagtgtctcttaatgatttgttttatctttctacagcccttccgtgtcactaaattgaatattttattttagatgataaaatgaatcgagtttgaatagtctgcttctgcatggtanggtnggtagaaacatcacntgttttgtaaaataaataaatntgtttaca

SEQ ID NO: 149506 - DNA, 376 bp, Glycine max
gatagaactataactcttgggcgatgagaatggaaaattacttggaggctttacaagtctgggaggttgtagaagaggattatgatgttcctcaactaccaaacaatcttctagtcgcctacatgaaaaatcacaaggagagaaaaaacatataagcaaaggccaagacttgtctgtttgttggagtctcaaaaacacatttcataagaatcatgaaactaaaaaatgcaagtgccatttggaattatttgaaggagtatgaagaagatgatcggatatgatacatgcaagttttgaatttaattcgagaactcgtattacaaaggatgaaggagtctaagataatcaaagagttcttatacagactgcttgacat

SEQ ID NO: 149507 - DNA, 422 bp, Glycine max
accttaagcaccgcggctgcagcttagaaaccttttttctggttatgtattccacagagtaaaaactatttgggaaaaggtgttgagaaaaattcatgtgctactcagtttttgaaaaaaactttttaatacttatcttgattgagtcttctcttgattcttgaatcttgagtcttgaatcttgatcttgattcttggaacttgaatcttgaaacttgattcttgaaatcaaatttcctcttgaaccttgaagtgttcttgattcaatcttgaactcattctttgattcttgaagtcatcatctttgttaacatgaagtgttcttgacttttgagctttttgtcaatcatcttcgttatcatcaaaactccttgaatcaatcttgattcatcatgaagctcgcttttctctattgagagctt

SEQ ID NO: 149508 - DNA, 445 bp, Glycine max
  unsure (1)..(445): unsure at all n locations
tactaagcttcaccacttactaaagcttaaatttgtgtttaatggtgcttcctctttcatgaataatgggttgagcttgtggattttacttaggttggatattattcatattacttaggcattatgaatatgcttgatagtaaccggaaacacttgttccattaacgttcttttgtgtttgatgtagacatacngagatcgaatcgtcctttccttgaggataaaacagaagatgatttctttcaaattgatgtgagatttattggtttactgatttatgtctcctgtattctaattntttgaaccctaaaagaatttccacacccaatggtagtgaatggtgatataccttggcagaatgggaggggagagagataaattattatatgtgctagtgtgtccttctaagaaaaatagatgtgctagtgtaaaaatcgaggtgtga

SEQ ID NO: 149509 - DNA, 398 bp, Glycine max
  unsure (1)..(398): unsure at all n locations
agcttatcaattattatacatactctcagatttcttgtcattttcccctacggcagagatttcttggtgtgtctacacatggtcaaattgtaaaattggaatatttgatatcctgagttactgctgtgaacaagacctggatccaactgtaacctccatttaaatttccattcttacacgtattggctactcataggaaagtatgaaatctcttatgatgtaactccatgtagagcttgtaggtcttgaatcttctttatcaatgaagttctttgtttcttgaagatcaatggcaacggactgaagaagaaaaaaaaaggtgatngaagacgctacttcaaagagaagatgagtcaagaacaagtttatcaccataggaagtcatgaataagtgtttg

SEQ ID NO: 149510 - DNA, 459 bp, Glycine max
  unsure (1)..(459): unsure at all n locations
tggagaagaggctatataaggggattttagttggcatatttaaggtggaagttagtatccttcagtatgcggatgacatgatcttctttggggaggaaactatggaaaatgttagagcaattaaagcaatgttgagggcttttgagcttgtatcgggcctcaaaattaattttgctaaaagtaattttggtgctttcggggtgccggatcagtggaaaatcgttgcatccaattacctcaattgtagcttgatgtccttccctttcacatacctcggcattcctattggagcaaatccaagaagaagtcagacatgggaccctattattagcaagtgtgagagaaaactagcgaaatggaagcaaaaacacttatctttcggngggagagtgactctcataaagtcagtgataacatccattcctanttattttctttctttntttcanggtccctaaa

SEQ ID NO: 149511 - DNA, 388 bp, Glycine max
  unsure (1)..(388): unsure at all n locations
agcttggttcgaggtacttacccgttgaagatctaagaacgatgaagaacgaatgaagaacgtcgaagaacggttgaaatctttgcgagattcctcacggaaaacgttacggaaacgtttcggaagcgcctcggcttatattttcttcacggaaacaatttttccaagcaaattcgaaagagagagaagtgccaaaggggctgaaccccttccttcttcacttcctcccctatttatagcaaaataggggaggtggttgccgcccagctcgcccaggcgagcagggttgcttcctccagaagcaaccgccttctggaggaatattccggagggcccaagtgggcctgggtgctatttgcacccccattnttactaagtacaccccccc

SEQ ID NO: 149512 - DNA, 468 bp, Glycine max
  unsure (1)..(468): unsure at all n locations
ngatagcatgcagagactaacgtcgtcttctgcgttctttttaatcgcggccgacaagcctgttgacacgtggagatttacgtcatcttccgcgctcacaagatctgtcatattgacttttgagtcacgctgactggaggaaatacccgagtggttatccgtataaacttgttgctatctgtaagacgaaaagcttgatagcacgcatagactaacgtcgtcttctgcgcccttcgtcaatcgcggccgaaaggcccgttgacacgcggagatttacgtcatcttccgcgctcacaagatctgtcatactagactttgagtcacgctgacaggcggaaatacccgagcgggtatccgtataaactttatgctgtctgtaagacgaaaagcctgatagcacgcagagactaacgtcatcttctgcgcccttcatcaatcgcggccgacaagcccgtagacacgcggaga

SEQ ID NO: 149513 - DNA, 405 bp, Glycine max
  unsure (1)..(405): unsure at all n locations
gctttggggctgatgaactatattacagcattttggttttaatttatggaaggtttttggagaagagaataattctagggttttaaaaatccaatttttacttgtcatgcacactattcacgtagaataaaattcattttctgcaattttgtttctgcttcaatctacaatctcgttttctactaattaatggaaggctaaggctccaacgttgttttctcttgaggatcaagcacagctctctttgagggttttttattactattgaattctgatcagtttttcctcttcaccaattactctgtatttgtngctattattccatgcatgcttagtgcttgattaattgtctctgcgcttaatttatgttcatgcttaatgatcagtttcattcatgattaattg

SEQ ID NO: 149514 - DNA, 441 bp, Glycine max
  unsure (1)..(441): unsure at all n locations
gagtctatacatgttttctttgatgagnctaatgccattcttccgaggaaggattttttagatgatatttcagattccttagaatatacacatattcatggaaatgactctaaagaaaaagatgaaggaagcaatgaggattctcaagataatggagttagaggaaataatgaacttccaagagaatggaaagcctcaagagatcatcccctcgacaacattattggtgatatatcaaaaggggtaacaactagacattctcttaaagatttatgcaataatatggcttttgtatctatgattgaacctaanaatataaaagaagccatagtagatgataactggatcattgccatgcaagaagaacttgaatcaattgaaagaaacaatgtgtggaaactagtagaannaacctgaaatatcctgtcataggaacaaaat

SEQ ID NO: 149515 - DNA, 235 bp, Glycine max
tacctgatcatccgggcgaagatgaacttcctcggatgacccttcctcctggtgacaggaactccaggctctctccgaatcccgggtaaccgtgtgctccatgtggcaggttccgggccacgaatggagacctgtgtttgtctaagaagaagaagacggagagggtcactatagatactataaggagaatgagggagaggtcccagtttttacggtccatgcttttcgtgtgagt

SEQ ID NO: 149516 - DNA, 497 bp, Glycine max
  unsure (1)..(497): unsure at all n locations
cacttcaaactaagcttaagttcacgaaatgaccaggtttcggtagagtccctctctccactatatttgcctcgctccctcgtgccatttcaaaacccagaaaccaattacaaattacactctttgcctcgcaccttcaacttaaccttttctactcataatcttaacaacttgctagaagaagataaagaaagagaaaaagtgtgtgtgtgtgagagagagcaatggctggctcgtgggcacgccgttctctgattgttctggctatcatttccttcggtaactttcaccacataatagatctgatcatgttttcttttagctctttgctgtttttgtttaaatgcgcaagtggaaaaatgtaaccagatctctctntctttgaactttnttttggatctgttntgttggattcgttgtgttacgtagcggtagatcagtgactgagatcttagacgtagttgcttaggaggatttcgtaaatcgtgccatgttct

SEQ ID NO: 149517 - DNA, 364 bp, Glycine max
  unsure (1)..(364): unsure at all n locations
ctattcatattaaaaanttgttaacagactagcaagtgactaaaacatgtgcacaccccttagatacttctccataagcacttatagaagaaaataanaaagaaataagcttctctcaaagctaattttaacttctatataagctaattganaagcttgtttcatttagtttctccaaaagctgattttgacttgtgcataagcaaattttggtttatgggagaatattttttcattttaccttcttattttcttctcctatgagtgtggttagataagtttatcaaaacataacctatatctaacagtgaccagagcaagcatcaataaatttgaattaaatataatgatttggcgaaaataa

SEQ ID NO: 149518 - DNA, 449 bp, Glycine max
  unsure (1)..(449): unsure at all n locations
gcttacaatagagctattcatagcacctcttattgttctccttttgaagttgtttatgggtttaacccactaactcctcttgatcttttgcctatgcctaatgtttctgtttttaagcataaagaaggtcaagcataggcggactatgtgaagaagcttcatgagagagtcaaagatcaaattgagaggaaaaataaaagctatgctaaacaagccaacaaagggagaaagaaggttgtcttcgaacccggagattgggtttgggtgcacatgataaaagaaaggtttccggaacaaaggaaatcatagcttcaaccaaggggagatggaccatntcaagtgcttgaaagaatcaatgacaatgcttacaaagttgagcctgcccgtgagtataatgttagttccaccctcaatgtctctgatttatctctctttgatgcagatggaga

SEQ ID NO: 149519 - DNA, 296 bp, Glycine max
agcctctcgatatatgatgcgcccgaaacggacgtccatttgttatatttagaccctttgaatctcgcgagaacttgctttggtcaatttcgagcggttcggttattatgcctcagaatcggacttccgtgtgacacgctatgaacatcttaattcttcgagagcattcggtgatcacattcgagcgcctcggatatataatcggcctgaattggacttacgtgtgattagttatgaccctttgaattctcccacagctcccgttgatcaattccaacgcctcgcgctattatgcc

SEQ ID NO: 149520 - DNA, 393 bp, Glycine max
ctcaagcttcgcgatatactttgcgccttaatcggacttacattagataagatatgttcttttgaatgacccgagagctatcgtgtttcaatatcaagctttccgatatattttgcgccttaatcggactttcatttgaaaagctatgacgattggaatttctccagagctgtcaatgattgatatcaagcttcttgaaatattatgcccctgaatcggacttccttgtgacaagttatgaccattgtaatttctcgagatcttcctttgttaatttcaagcttcgcgatatattttgcgccttaatcgcacttccatttgaaaaagtatgaccattttgaattctcgagagcattcgtgttgattatcaagctttctatatatatagccctg

SEQ ID NO: 149521 - DNA, 410 bp, Glycine max
  unsure (1)..(410): unsure at all n locations
agcttcttatttagactattgtggtagatatcttgaagatgttgcagtaggatttctggaatttattgagacaaaaacaaagtatgctctttaatttcaaaaatccaaaacgaaatgggtgaggcttaatgattacagtacacgttttttttcttctacaaaataatgtttcaacgtgtatggtaatcaccaagcgggataaataataaacatcattaaaatgtaaaatacaaatagataagaaaatatatttacttatattaaaattcgacgtggatatattnttccatatctcttgatgatgatcatcccttattacatgtattttgtcttctccatctgctagtcattttattacataagacacattacattgtgtaaaactaagtttttaaatcaggataataaaa

SEQ ID NO: 149522 - DNA, 309 bp, Glycine max
  unsure (1)..(309): unsure at all n locations
ggtagagttaagtctcgtattggtttaatcgattatcgttatcttgtaatcgattatactgttgtttgagacaatgaatgatagtaaggagtctttgctctaattgattaccaagtggattaatcgattatttctctctcgtttgagtgttcagaggtgaacaagaacactttaattgattacttgngtcatctaatcaattacattgttcttgaattgttttccagatgttggaagaacactntaatcaactacttagataatctaatcaattagtttgttaaaataatcgattaccttatagattta

SEQ ID NO: 149523 - DNA, 341 bp, Glycine max
acccccaagagatgaggtccggtttcattctttaatgcctaccttgtagaagctgaatccattctaccttttgttgggcgaggcgtggcgataaacaaattcacgattgacttgctccttgcccctttgccattcttaaaccctagcacaatcttatacttaaatcagaaattcattgcaaatatttgggggctttactccacctgtaagaaatttctcatatactgccaacaccagacatggctgacatatatatatatatattacaatattccttgatattatattattatggagaacaaacttcttcctagctaatctcgacgtcaagtaaatgaaat

SEQ ID NO: 149524 - DNA, 340 bp, Glycine max
aagaaatgacacttctgttaataatatatatatatatgaaaaattaaaactatctatatcatattgaatcatatatacataataatgatgaaaacacatcccgcgcatgacacgggtaataaatcagcattaaataaatgttaactaattataaaacgatttacaattagaacgttaacattcttcttctataaaagacaactaaaaatcatacattatgttcgactggcgcatcaaacgtgagagcgtcgatactatccctcgctgtcttggcgtaaggagaagggtccatgctgaaaatagaacacacgccacgaacacgctatctctgaagcaatta

SEQ ID NO: 149525 - DNA, 402 bp, Glycine max
  unsure (1)..(402): unsure at all n locations
agcttattggattatggggcaaccgncatagtggtactaggtggcgatcgggcgatggcgcaaattaactctcccatttccacaagtcaggcataagcacaccatccccagttgcccacctttaaattgagctcacgcactcatacgtagcccttatccttgttcctctcagcatcgggtcctcatcaacccctccaagctttcacaatatccaaaaaattcaatttcatttgtcatgaaactaccctaaaccaagaaaaacagagtggaggcagaaaactctgcacaaaactcattcaaattccacagttttttctactcacataccctagtaacattctcttcgttccgattcgttaaccattggatcgccttgaaaatttaactgggggttcctaatac

SEQ ID NO: 149526 - DNA, 439 bp, Glycine max
  unsure (1)..(439): unsure at all n locations
ctttcatattcttttcttgcattggcataatggtcaattactgtcaaggcttttggagcatctataactngttcaactatattntgtgcaacatttcggttgataagctgcatcaaatctctctttttcctctgtattctttcagcacgaaagtattttttggttttcaattgcttggcaactttagtttgtatctctcctttgacaatcttcttccgtatcgcatccagagaagcccccttctcaagctcttctaacaattcttttcttgcttcctcanattccatctaattcaattaagcagtgagtgccaaaaagtattgttagagaaaatgaaatatgattgacaatctaagtaattaatatttaatactcagcagaaaaaagaagaaatcagaaaagatgttataaagttacaagttngtgttcccgagagtag

SEQ ID NO: 149527 - DNA, 415 bp, Glycine max
agcttgtagaaattagcattggtcatcagttgtatcttagcagtcaaaagattacatgttatatacgttttttgttattttcaaacttagtgcaatgaagaaaatatccattactttacaaggcaaggagaatggacttccaccttaatggattgaaccaaaggtatgttgtaatccctgtatttatggaaattttaaataactatcatgtgtaacaaaaaatgaccaaacttaattgggtattttcatattgcatgtagagtcatgtacaagccggagcctatgagtgtggatattatgtgatgcattggatgtggtgcatcgtcaccagcggtttgaagaatgaatggaacaaggtatgcatactattacactaactatatgaattgtggagtatgaaatcgtacctcaatgc

SEQ ID NO: 149528 - DNA, 459 bp, Glycine max
  unsure (1)..(459): unsure at all n locations
ntngcaagctggaatcatntatcctatctccgacaacctatgggtgagtcccgtccaggtagtcctgaagaanactggcctcaccgtgataaaaaatgagaaggaggagctgattcctactcgggtgcagaacagttggagagtctgcatcgactataggaggctgaaccaggttaccaaaaaggaccatttccccctgccatttattgaccagatgcttgaacgcttggtaggtaaatcttactactggttccttgatggtttttctggttatatgcaaatcactattgctcctgaggatcangaaaagaccacattaagttgccccttcggcactttngccttaggaggatgcctcttgtcctgtgcaatgcccctggtaccttccagcggtgcatgataagtatttttagtgattttttagaaaatggcatagagggcgttatggatgaattcact

SEQ ID NO: 149529 - DNA, 403 bp, Glycine max
  unsure (1)..(403): unsure at all n locations
agctttgacttttcttttcttctctcgcttcccaaaacccctctcttttaagtacttcctctctttgttcaaaggtcccttgctcttttcttatttttgttttaattaatcgaatcatcatcttcgttttcttttttctttttttttatgtatatattcggacaaaatcaatacacacttgatacaagcatgtgttttgcttgcagggtatacaacaagacgaagagattcgaaggattcaaagagaaaataaggccaggtattgctttaaccttcgttaaattagttatcaggttcagtttacttacctagttgttgagagtgacaactgagaattaagatttnttttaaaacaaactgcttttgagaatcttctgtaattcctttgcattatgattcacca

SEQ ID NO: 149530 - DNA, 456 bp, Glycine max
  unsure (1)..(456): unsure at all n locations
ggtagaaaccaaagagatcgagatatatatatgaaatctatcttgttataccatagaaagaaantaattttttgaattgattnttttactgctttgagttgcttactaattataacaaaatttcacatgaaggcttgtctgtttggccttattgtgaaatattgtggagtacacacgttgacaacaattttgtgtgtctgctactctgctgtcatataaaaacactaaaaagaattttggcaaaacaccatgaagagttaaaagatatgtctaattttctacatcggttcaggccaaaaccgatgtagaattctagacattctacattcggtattagaatgaccgatgttgaaatctgatattctacatcagttacaatgacacgtgataaccgatgtaaaaggtgccgataccgatgttaaagcctatttttagtagtgtgttggccgctctttt

SEQ ID NO: 149531 - DNA, 400 bp, Glycine max
agcttcaacctagaggttattgaccattccaagtgttggagaagatcaacgacaatgcctacaagattgacttgcctagtgagtataatgtaagtgccactttcaatgtgtctgatctatctctttttgatgcagatggaggagccttggatttgaagacaaatccttttcaagaaggagggagtgatgaggacataaccaagggcaaggaccatgaagcacttgaaggtcccatgaccagaggcagacttaaacaagcccaacacgtcatagagacaaggctggtcatttgtatagctgccattgatgatgattgaaggcccaagtggagaaagatgaaggcccagaggcagaggcactaccaagactactaattgttgtgaaggcccaaactaacttg

SEQ ID NO: 149532 - DNA, 460 bp, Glycine max
  unsure (1)..(460): unsure at all n locations
ttgcgaaaggcttgtcactggagcttacccatcttctgttctaactcttttagactggcgattcctaggctcttgatcttgacttgatagaacctctttntaagccaaggcgtttgactcgatcccatgttttactaaaatggaataaaaactagtgcgaatcaagactntgacacctatcacaggtgaaatggatgaatgcatgaagaaatggtatggcacaaatgcattttacggatacgagagctcgggagattatctcattcttacatacaacattcgggcggcatagcgcccgatgcatgcatttaagaaggtgacatggaccttttgtcttctcgtgacaaagtgaggggatcaagacgcaacccgtgcatgatgacatgatgcagatgcgataaagaaagggataacaaggagatgtacacaacatggcaatatccacaaataatcatacagc

SEQ ID NO: 149533 - DNA, 355 bp, Glycine max
ttattccatgactctgtcttaccattgagtttatatgccggttctttggccagaatgtggttggcagccagtgtctctgacagatatgattacctcttctgcagttaaaaaagtgtatagaaaagcaaatttatgtattcacccagataaagttcaacagaaaggtgctactcttgaacagaaatacacagcggagaagggttttgacattcttaaggtaccttattaatagtcatgtagaaataatatactactttacataaaagtataaacccatttttatccctttggttaattgtcacgaatatattttacttttaccagatataagtctacttaattttattgagctact

SEQ ID NO: 149534 - DNA, 458 bp, Glycine max
  unsure (1)..(458): unsure at all n locations
gaaactcagctnggggatgctgatgcgcgggtttggaggattttttttgttgggttgggtgagtccgagagcgaggttatgagggaggttgatagttgcagagtgagagtgggatagcgtgttggtgatagaagctgccaccagcacctctcccaattgtttccaatgccgcatttcactcggaatcaaagtattctcgattggttttggttgctttatgaatcatcttccatcataatatgcctcaacaatgctaatcctaataccctaatcggaaagtagaaacctggagaggtaaaattgttgtgaatgttatgtgaaaccgtcgcactttctttgtcgatgacgaattcgaaatcctcggcggtgatcagcttcgccgtgtcttgcttcttcgtcttcattcttcgacgacggagatttcagattccgttacgagatggatgtgtnggcgtttc

SEQ ID NO: 149535 - DNA, 342 bp, Glycine max
ttaaaataacttaatgccgttaacctatggaattaaaaaaaattaatggctgagtgtaactgaaattgtggcaaccaaaagtcaccccccacagccaacaagtcagccaccatttggtctcccaaaaggttgatgcctaggttgcccattgggcccttattacaacttgaactaaacctactaaagcccttttagttgattaacccaaaacatatttttggtcagccaactttacaaagaatgggccattatttagacaaactaaacactctaaaattgagacaaagtggtgtcatttaatccttctccatttgggccatgatacaactcacaaccttggac

SEQ ID NO: 149536 - DNA, 341 bp, Glycine max
cagcgtctcatatagtatgggcctgaatcagacatccgaatcaaaagttgtggctgtgtgtattatccatgtgcttccatgtttaatcttgaacatcgcgatatattatgcgcctgaatcgggcatctgagtgaaaagttatgtcatatgagttagccgagagcttccttgtgcgatttcgagggtctcgacatattattggcctgaatccgacgtctgactcaaaagatatggcaggttaaactttacatgtgcttgcatggttaattttgagcgtctcgatatattatgcacctgaatcggacatctgagagagaaggtatgccctatgagatagctga

SEQ ID NO: 149537 - DNA, 435 bp, Glycine max
  unsure (1)..(435): unsure at all n locations
agcttctgatgactgagaagcacganattctgttgtntttcatatggttccttcgccaagtatgtgtatatgtgtatatctgtattatattggtcgctctggttgatgtttgcattttgttttgtgccgaataaaaaagaagaagtagagatgagagtcgccattccgaaaagggcaggacggacgaaatcagtgtcctatctttgctttcctcttatctccgatgagaggtaagtaaagaggggcaactgtcataccctaatttcctccggggattattacttgatgacacgcaatctttggttagccgctttgagatacatggcgtcctttgttgcacaataaatgaagtcccgagatgtctcacagatctaaaggaagcccgcttgctccatccgtgaaataccctactgtggcggaagtcgaacagagatg

SEQ ID NO: 149538 - DNA, 475 bp, Glycine max
  unsure (1)..(475): unsure at all n locations
tactcaagctttcagggttaattacctaattgatcatagggcgctgtattttattttntacaacttctggttcatgtacttaccttgctggatctaaatctgacagcttttaatttctaattttagggtaactgcagatatttcattatcacattgttgcccatttcttccacgttacaattattgctaagaaattcaaaatctgaatgcgagtgctatttaccatattacgataaaatctattgctaaatgggtacaaagtcagttgcagaaaaatcgttgtggctctaattaagcaactcaatgccctgaatttatcgaactgtgctgagtagtgtaaattgaaccacttgcacatatgcaaaagtacgtccaacgagttgagctgttgaatgtagaacccacagaagagttttctgcacttgacttgtgttgaacgtagtntctggtagtttagccaaaagaatgaaacttg

SEQ ID NO: 149539 - DNA, 458 bp, Glycine max
  unsure (1)..(458): unsure at all n locations
nagcttctagccaaatggacttaccttgaattatttccttttatagcccttttgagccttgtttccctttccttgttttgaagctcactacaagccttaagtgaaaaaccatgatattaccatatccttaaggaattttggagctttggaattgttttgggaataagtgtggggggtttttgtttcattggacaacttgttttgttggctatgcttcatgatgtattttgggccatacttgatgtacattgtatattggttaaatgttggacatgctgaatgaaatgttgtttctcaaaggctaaagagttcaaaaaaatataaaatcgaaaaaagaaaaagaaaagccataaagttgagtgaataagatcttaaatggcacaagaatgatgaaactcttgggtctactcttcatggttaattnttatctctacttctttctatgattatgtctttat

SEQ ID NO: 149540 - DNA, 411 bp, Glycine max
  unsure (1)..(411): unsure at all n locations
attgcacacganggatatgcggccataaacatgtttctctgtaagtggtattacagttgatggatttgcggtcatcatcactaatgatctacaagtcatcaaagagggttgtgccaaatcctttgctccctttccaacaggtataccaccattctttntggacttgctaagatgttaatcaagtcaggggaacttaacaccatgtcagttttgattgggtcatttggctatattgctgcagctgagttcttttcctaaatttatttgcttttggtttatatttttgtttcctaactaacgaatatattgcttttgcttttaccataggcaagagtaatcctttgttaagtgttgtaaattattcttgtttcacgtcccactcacaagtntgaaaagcatgatgttgagggg

SEQ ID NO: 149541 - DNA, 422 bp, Glycine max
agcttctcgaagcgcgacagccgtgccgtgtaatgacattattttctcttttctgaactcgtgaacgaggaggcgacacgtggcggctgtggagtcctggtgggtgtgcaaacaaaccccgttgaggatgtaaagtttgcggagggaagcgtctaacatgacttggcaatggctcttgctcacacgccggtcgatgaagaccaactcgcagtagcggggtcggcgcccgatcgagtacggctgatccgcgcgaaggtgcatggagtctcaccgcgaaacggtggcgttttgtgtggaggaaaggagagggacatctaagtttttaaaattgacggaggccgatgatttaattctaagttcatgttgagagacaaaaatggtcttgtgcgaaggtctctgtgattggatcatgccatcatgtg

SEQ ID NO: 149542 - DNA, 469 bp, Glycine max
cttgctagaacaccgcctcatatgctgagaacaccacatattatttactctttgttggatcagcaccagttgttacagcctcgccctgagaaaggcaaaattcttacttgggagggtcccctgaggcttctggttttcgcttgggttctctatgaagtggaggttttcatggttcctggcaaatgcatccactggattttccttctcacaacatgttttctcatgttggggggaatggcaccgaactgacaaccaatgctgggcaaaactctcctaagcagctatctcatgttttcccagtgagacatcctatgtcttcaatgtcaaaatttgatgcttccaatgaacgtatgagaaacctttatcaccgtaaaaatgaagcaagcaccaacaatgttgataaaaaactgtatgaactcgacttacgtcgcatattgcgtggggaagacagccgaactacacttatgat

SEQ ID NO: 149543 - DNA, 442 bp, Glycine max
  unsure (1)..(442): unsure at all n locations
agcttgacattactgctgtatataagatgatcatgatggtaagccgnggtaccatgacatcaagcggtacatagagtgtaaggagtatccacaaggggcttctggcaacgacaagaggatgttgcagaggttggaaactattttctttctaagtgggggtatcatgatgtagctccattggagcttgttggccttggatcttcttcatcaatggagtcctttgcttcttgaattttaatggcagcaaaatggagaagaagaagagttgagaggagacaccacttcaaggagaagatgagtctagaagaagctcaccaccataggaaggcatggataagagcttcaaggtaggagaagatgaatggaggaagagggagagaatgagcacgaaattttgtgcctcaaaagaggtctgaaatttgaagttaatcctcacatgatc

SEQ ID NO: 149544 - DNA, 343 bp, Glycine max
tctcagctgcttaattacatgagttgattatgggagttgttttgccttttgctttaaagtatgtccacaaaactaactttccaatgtttgccttccaagaatggcccgagaagcttgctcaagagtcccgaagacaggcggcgaagaacttttccccccgagtcgacgtcaccgttatgacgttgacatacagcgcttcaaccatcaaggatggtcgttctccggagaacgcgtcagctcaggacgacagttactgatttcaggagaaattggcgccggggtggcaccactggtactccatgccaatttgatcaaaatatcttgatttacccatgcttggcac

SEQ ID NO: 149545 - DNA, 411 bp, Glycine max
agcttcatgagatagcaggatggacagccttacttatttcttatttgcatgaagagtgccgaccaacaataatccattatgacataaagccactaaatattctcttggacacgaatttcaatcctagagatgctgatttctgtttagccaagctttgcaacaaagacaattctcacataaccatgactggaagtaggggaactccaggttatgctgcacctgaactttggatgccatttcctataacatacaagtgtgatgtatatagttttggtatgctgttatttgatatcatacgcaggagaagaaaccttgatattaaacgtggctgaaaccaagaatggtttccaatatgggtttggaaaagatttgatccgctcaactgggggagctaatagtactctgtgggat

SEQ ID NO: 149546 - DNA, 461 bp, Glycine max
ttgataacaaaacgaagtcacaacacgagaaaatgggattttattttatgttcaaacacacccaaataagggactattggaagtactcactaccattcgaatattttacataacaaagactcttatagtatattagttgagctctatagttcccaaaaatgaagtctttgaaacataactttgtataagtgcgaacattattgttcacagaaaacatacaataatattagttttgtgtagtgtggtgcaaagatcctttaagctttagatgtcttggtcattgacattatgtcacatacatttataatcttgccctaataacttattaagaccattattggtttgatctgaaccatattcactagcatatgaatggtacataagaacaatgaacgaaattaataggatgaaggatctgagaaaatcactaagttattcattaactgagaattaattattac

SEQ ID NO: 149547 - DNA, 450 bp, Glycine max
  unsure (1)..(450): unsure at all n locations
agctttaacaccattaagggtaaagactcttcctcgtggccttggatgtccagtttgaccattcgggcctccaccatttcgctctttcttgggtcgtgaacaatctctttgagtgtgtcccttttgtccataattaaaacatgttgcgcctatatcaggacaattcgaggagatgtgccctggcttaccacatctgtaacaaatgatatgagtggagaaagtattgggcttgctaccactaccacctgcaaatcccctagcaacagtcctctgattgtcatggcggttaccatattgcttagggggtttcgaatatggttttcctcaatgttgaggcccattctttntgttcctcattggacctgtactccaataataggccgccctatctcgggagtcttcatcccaaatccggcacatgttaaccaaaagtgggaactgaccaacacc

SEQ ID NO: 149548 - DNA, 410 bp, Glycine max
acactggtgatccctaggctatctacctttacttgatagaacctcgctataagagaaagcatatgacttgatcccatgttctactaaagtgaacaaatatcggtgcgaatcatatctacaacatctatcatgcgtggaatggatgaatgcatgaagaaatgcatatgacacagatgcgatgtatgaatacgggagcccgctaaaatgtctccttattagatacaacgtcttgaggtaacacaatgcccgacgtatgtatttaagaacgtgacacggaccctccattggtttgccaaagagaggggatttatacagaaaccgtgcatgatgcatatgccataggcacaacactaagatatctacaaccaattataagcaaaggggtacatgtcactttgactacatgcatg

SEQ ID NO: 149549 - DNA, 445 bp, Glycine max
  unsure (1)..(445): unsure at all n locations
agctngagtgaactcatgtgggatcagctttattctgcnagtcggacaccaattgcgcgagtccatcaaggctcccatttcacaccaaatcgacaacctttgttagctgttttgaggcataactaaaactgtgagtcatgttatggcttgctttctctctgttagaaggcaactttatattctccctaggaaggcacggttttttgttcaacggtaacaaaaaaaatcactgttttgccatcattacgtttgaccatattgcacatatccctggctagcgatcaaatatcatatattttccctacatcagaatgaagaatggggtcaaaaccatttattcattcaaagaatgacacacttggttgctgctctgctccattgcaccaacttntatctgaatgatgactcattttcctcaaagccttgcttttcataccccacatgt

SEQ ID NO: 149550 - DNA, 455 bp, Glycine max
  unsure (1)..(455): unsure at all n locations
agcttcaggttcagaaaattgccatgcaatattatacttctagntctagggtctaaccaagcatgtatatatgtcaagcttagaaggctatgacaccatgcaacaaatctaaacagtaaacacaacggttaatttttgttggttcaaacatagagtacaaatgggtgtaagtggaaggcccaagtgtggaagtacaaagtctctggtacatatgcaattaaaatgttaggtgcagcagcacccacccaatgtagcaggatcatcaccgattaagctgtggctgcggaatcatagcatcatttatgcacgaaataactagcaccaatccaaatggaaaccgtatttgctatataatttaaaatttcaaataatatacatgcgatttcaatatatggtttcctataaggcatggctnggttaacaaaaagctagcaaacaaatggcatggtgactgg

SEQ ID NO: 149551 - DNA, 452 bp, Glycine max
  unsure (1)..(452): unsure at all n locations
cggcattttctgagagtgtcngattgtataataaaaccaaaacgttaaagcatttgatgaccctttaattcaaagttgaaaactttgggcttcacctactcaaattcttcacctttcagatctacttcgccatcactccctattctctagtccacactcttctctgctttttgagtcaaacaatggtttttttttttaaaccttgaaaaaaaaaaaacctcaacttgacatatatgaaaatgttattaaaaagctaacgagtcacgactcggcgagttacaaaagcgaagcgtttcatttcatttcccagtttagattttctcgttcaattcccaaaaccccgtttgttttgtttggctctcaagttaggaaattggaacagaacagagngggttatttgatttcatcacttgttgtgtttgggccctatgaatatgattctccgtaatgta

SEQ ID NO: 149552 - DNA, 471 bp, Glycine max
  unsure (1)..(471): unsure at all n locations
accggatccttaagtcacctgngctgcagcttgaggctttggtgtagcaaatattttgctcttgcctcctattntaattntaattctaaaaatttaaggggcaatttttttaggataaataaaataacatgaagaatccttttgtagtgttgcgtttcttaacttccttctatccttattagttattatagtcccttttgatttaatttaacttgattcggtaaagcttggctgtcatggtttctgtgaggcaaaatgctgttcctctcctgatagaagcaattgtgctgtgagttcatcactatgaggtagcacagtagcaccttaccaaaatattcatggaggttgaaatctacagaaaagtaatggctcagattgtcaataatcttctcaagacaaccgtttctggttccaaggccatatataaaaacttcaaatcaatgacatgaatcctacagtgggtatatggag

SEQ ID NO: 149553 - DNA, 409 bp, Glycine max
  unsure (1)..(409): unsure at all n locations
gaccaaaaactcagcttgcagttcaaagtgtctgaaatcttttttatttttttctactgccacccatctgataaacatgttaactgcctgggttctacatggtctttacccgaatacagtccatgactcccttttatttctcttataaaaagtcttccatgccatgtctttggttgtgttgcctttgtctatcacagtcaacagtgtggtaaattggatcctacaacagtcaaatgtatatttataggcatgcaccacgcataaaaaagatccaaattctatcacccctaaagtcgccagttttatgtctccatggatgttaagtgtcatgagacagtattgcactatcactggtcctcaaccncaggcagtgctatagaaactaaatctcgtgttgaggcctctttta

SEQ ID NO: 149554 - DNA, 447 bp, Glycine max
  unsure (1)..(447): unsure at all n locations
agcttgaaannttgatttttgagggagtntgacattttttcttcagaagcctctgcatgcacaagaatctggccttggcttgaagcttttgcatgtttaggaagttctagagagagaaaggttcaagttccagagagttctgatagattttgctgagtgaagatctgcagagacgagagctcgaagcggaagccgttctgagagcttgagatgagtttgtgagtgattgtgagatcctagaggtgaaggagacatcctcaccacttgtatttttgcaatctttcatcttgttcttctctatgttgtaaaggaggtttccggactatggaaagctaaatcctctattggatcttccttataggtacctgatgtaaatatacttatatctatgtaatgatgttttgtgtgttctttgtgctatatgcttttcattccagtatgccttta

SEQ ID NO: 149555 - DNA, 426 bp, Glycine max
  unsure (1)..(426): unsure at all n locations
tnctcggggccatttcctgtgaaggcaaacatttgtaatgttatttttaccaagaaatgctactcttaaaacaaaaacgacatacaacctcctccaataaacacaaacatcaatgtaaatttagagcaaactcatgcacatacttcctcacgaacattcactcgcacaagatattcttctaactaagaaaaatgcacccatgcacaatcaaggcaccttcgttacctatattatttatatgtacttccaaggcgtatttgctacctacatcacatgcacttccttggctaaatttacatacatgcatactcaaagcatcttggctaccaaaaattgcacacgtgcacattctggtatttctaatacctatgcatatacaaactttgtgatgaatcttggctatctacacaataaggtgctacattt

SEQ ID NO: 149556 - DNA, 399 bp, Glycine max
  unsure (1)..(399): unsure at all n locations
atctggatgtttatgtttnttgtttaatatcgttagctaccttagaaaatatttattttttgtatgactggtattggtagcagtgtctggtttattttcctggacaaatgtatggtttattttgcgggacaaatgtatgttttattttgcgagacaaatgtatggtttcattgagtaaaagttatttctatttgatcaattgttgtgttntgtattggtatgaatttagtctaagtcttgtttatgcaaaatgtatcaatcacaggtgacacaaaaatgagttatttgagacaaccttgggctattttaaattgtccagatcggtcctttaagtattttaaataggtctcacataggacctttaagtttttaaaaaggttcaaagtggtcatttatctt

SEQ ID NO: 149557 - DNA, 457 bp, Glycine max
  unsure (1)..(457): unsure at all n locations
ntacggatttggtcttcgccaatgaaaggatcgatgtgggtcctattttattgctaattgatcatcctactgggacgactgagaaaactggggcaaatgaagagggtgagaaagagggagaaacccatgctgtgactgccattcctatatggccaagtttcccaccaacccaacaatgtcattactcagccaataacaaacctcctgcttacccactgcccagttatccacaaaggccatccctaagtcaaccacaaagcctgtctaccgcacttccgatgacgaagaccacctttagcacagacaaaaaacaccaacaaaaaggaattttgcagcaaaaagcctatagggttcaccccaaatttcgttgtcatatgctaaacttgatcccatatccactcgataattcaatggtagccataaccccaaccaaggttcctcaacctncatttttttg

SEQ ID NO: 149558 - DNA, 467 bp, Glycine max
gcacctgaggcatgcaagcttataatatatcgaggcgctcgaaattgatcaacggttgctcttgagaaattcaaatggtcataacttttaactcggatgtccaattcatgcgcatcacatatagagacgctaaaaaatgaacaacggaagctctccagaagttaaaatggtattaagttttcacactgaggtccgattcaggcttataatatatcggggcgctcgaaattgaacaacggaagctcttgagaaattcaaatagtcataacgtttaactcggatgtccgattcatgcgcatcacatatagagacgctcaaaaatgaacaacagaagctctcaagatattaaaatggtcacaagttttgacactgaggtccgattcaggcttataatatatcgagacgctcaaaattaaacatcggaagctctcgagaaattccaatggtcgtaacttttcactcggatg

SEQ ID NO: 149559 - DNA, 448 bp, Glycine max
ccaagcttatgcgcatatttccctacaacgctcctggccaagatatgctcttttctaagaataatgcacccatctacaatcaatgtagacccattacctagattatgtacctgtacttgcaatgcgtgtttgatatttacatcacacacacctccttggagtaatctacatacatgcatactcaaagcattatggggtaccaaaaattgcacatgcgctcatcttggtatttatcatacctatacatataaaaacttcatgatgaatcttgactacctacgcaataaggtgctacatttcatgctcttttttttcaagtttttgctacctaaagccacatgagaattcacgcatattattctttgctgactaaaattgtattcaaattagaacgtatatatttgtttagaatatgtaatcttcacataacatgcaacacatttatata

SEQ ID NO: 149560 - DNA, 448 bp, Glycine max
agcttcgaagggctgagagagaccaattgatagttgagggcatgatattggaagataagctaaaggcttgtcaaaggtcaaagagaagtttgtccgaccaattgagcaagatggaagaaaacatgggggccatgattgaccaatacaaggaaaaactaagtctagcagcaacccatgaacaaaagctagaaaatgagtatgcaaaggtatcggtcctgtaagccgaaagggaagcgagagaaagagtgattgattcattacacaaagaagcaataatgtggatggataggttcgccttcaccttaaatgggagtcaagagcttccaagactgctagccaaagctaaagcaatggcagacgtgtactctgcccccgaggaagttcatgggctcctcgattattgtcagcacatgatcgatcagatggcccacataattatgagtcacta

SEQ ID NO: 149561 - DNA, 441 bp, Glycine max
tactcagcttaaatggatactacttgtggtgataataaaagttctatcggtattgaagaatgccgaaagtggagatcctagggctgcaaactcgtcaattccgtgggtatggcttttggaagggaggaaaagaagtttttgagtgccaaaacgtcccccttgtctcacttttatattttggtgcaggggttgctcgcccaggtgagctaacctgcactatttttttttttaggggaaacataaccattgtccccctctatttacaggatagcattcgactactcgaacttacttaagttagaattaggcatcgttttacttacttaaaacgaaaaatagtagtaatcattgtgaattctaaggatactgggctgccttgcatcgacgtcctctgcttgtccaacgccgggaagagacgacgattggtcagacatgacccta

SEQ ID NO: 149562 - DNA, 429 bp, Glycine max
  unsure (1)..(429): unsure at all n locations
agcttcttcttgtttctgcccccattagataacaacatttttcttaattatcttatncaaaggggctgccaaggtactaaaatccttcacaaatcacctataaaaacttgctaggccatgaaaacttctcacctcggtcacacttttaggtgtaggccactcttggatagccttgaccttttcttcatcaacttgaacccctttggaactcactacaaaaccaagaaacacaacatggtctttgcaaaaaattcatttttcaaggttaacatacaattgttccttcctaagcacacacaacaccgattttaagtgtgcaacatgcaaatcaagggttgtgctatgaacaaggatatcatcaaagtacaccaccacaaatttaccaatgaattctctcnaacatggttcattaatctcaaaaagtgcttg

SEQ ID NO: 149563 - DNA, 451 bp, Glycine max
  unsure (1)..(451): unsure at all n locations
ntaatgaacttcaactattgcttgagggtatatcctccctaacttctatggtgataattgctccacttaagagccaccatattttggaatcccttgtcctgcatccaccaatccatgattttgaaaggcttangtccccagtcaatgattttggatctcaaaagaataaggcagtggtctgaaaaattcctatccaacacaaactgggtggtatcaggccattgaaccagccaattttcagataagaaaaacctgtccagcttactcatggcacttccattaggtctgaaccaagtgaacattctgccaatagatctaacctcctctaaggccataagtgaaatccaagagttgaattcagcaatgctagaggagttgaccacattctgagatgaactcactctctcattttgatgtcagtggagaaaggtgatgacagaaagccctcctc

SEQ ID NO: 149564 - DNA, 434 bp, Glycine max
  unsure (1)..(434): unsure at all n locations
agctntgagggattggtctttgctagtgaatggatcaatgttcttctganaaaaggcaaatttagtcatccttcttggacaaatgagaaaactggggcaaatgaagagggtgagaaagagggagaaacccatgctgtgactgctattcctatacggccaagtttcccaccaacccaaaaatgtcattactcagccaataacaaacctccttacccaccacccagttatccacaaaggccatccctaaatcaaccacaaagcctgtctaccgcacttccaatgacgaagaccacctttagcacaaaccaaaaaaaaaacaccaacaaaaaggaattttgcagcaaaaagcctgtagggttcaccccaaattccgttgtcatatgctaaacttgatcccatatctacttgataattcaatggtagccataacccta

SEQ ID NO: 149565 - DNA, 458 bp, Glycine max
  unsure (1)..(458): unsure at all n locations
cttggaaggcgaagatgatggtatgctntaaaatgtgctcctatagtctatttagactctatcttaagaggaacgaaggtaggttgaaagataggtcttggaaaggattcagtctactatgaaactatttgttgagatttactcaataaatcaaggttaaaggatgaaggaactacaaccagtgcaagtagagcctaacacaaatccacatgctaagctggataaggtaattcttcaatatgtgttagttgcatctatcaacgaggatcttatagtggcagatgttgtggaaatagatgatagagtgctaggggttgttccaagaccaatgactgcagaggatgagaagaaagtaattgagaccctagagaagcatatggaagcatgtagacttcaaaggatcagaacttagtatagtgaaactactgctaccatcattgagtctatgtagcaaaatg

SEQ ID NO: 149566 - DNA, 451 bp, Glycine max
  unsure (1)..(451): unsure at all n locations
agctctagagaggaaagtatcttcaaaattaccaagaatagggggtngaaagagcacagcatgactttcctaaattggtgtaaagatacaatctttggtgacaataatgcttctgaaacgttaagaaagttagcagatgggcctaattaaattgttgatacttgtctctgtcctttctccagacaaatgccgactaatgtcaacggagaagaagaagaagttgacgacgtcctcacaaatcataatgatcatgatgaaggagaattaactaacatcatataatgtaatttattttatatttacttgctttcttaatttcaagtacacaacttaatatagttttcagacattgtttaattaatgttctttcttaacaggaatatggctacaccacctagcttccttcctcctcctcctcttcctgattcaacatcaccttcactgtctacgt

SEQ ID NO: 149567 - DNA, 459 bp, Glycine max
cataaaactcagcttattttccatgtatcaagtctgtgaaccttttctctcttgtattatgactctcgaacccaacaccttgtgtgggtacgcattattctcctcagtcacttccaaatcttgaggtaactctccctgtacctgatagttcccaacagctcgcttaagtaatgacacatgaaaaactggatgaattctacatgctgatggaagtctcaacctgtaagctacttcgccaatcttatccgccacctggaaaggtccatataatcttgcagcgagtttctgatgaattctttttaccactgattgttgactatgggatctaagtatcagaaagacccattctccaacttcaaaacacaagtccctcctcttcttgttagcataccgtgtcatttgttcctgagctttgagcaagtggagtttgagttgattcaaagcctcatctctttcact

SEQ ID NO: 149568 - DNA, 430 bp, Glycine max
  unsure (1)..(430): unsure at all n locations
agctngaaattgaacaatggaagctcttgagattctcaaatggtcataacttgtcacacggaagtccgattgtggcacataatatatcgagacgctcgaaattgaacaacggatgctctcgagaaattcatatggtcacaacttctcacgaggaagtccgattcaagcacataatatatcgagacgctcgaaatctaacaacggaagctctcgagaaactcaaatggtcataacttgtcacacggaagtctgattagggcgcataatatatccacacgctcttaattgaacaacgaatgctctcgtgaaattcataaggttataacttgtcacacaggagtccgactcaggcgcatagtatatcgagaagtttgaaattgaacaacggaagctctcgagaaactcaaatggtcataacttattacacgga

SEQ ID NO: 149569 - DNA, 416 bp, Glycine max
  unsure (1)..(416): unsure at all n locations
tctcgatatattattggcctaaatgggactctcgtttgttaagttatgaccattngagattgtccagagctttggttgtccaatttcgagcgtctcggtatattatgcacctgaatcggacatccgtgtgacaagttatgaccattggaatttctcgagagcatacgctgttcaatttggagcttctggatctattatgcgtctgaatcggactttcgtgtgacaagttatgaacatttgaatatctcgagagcatacgttgttcaatttcgagcgtctcgatatattatgcgcgcgaatcggacttccgtgagacacagtatgaccttctgaatntttcgagagcttccgattgtcaatttacagcggctcgatatgtaatgcgccagaatcggtcttccgtgtgacaagttatg

SEQ ID NO: 149570 - DNA, 453 bp, Glycine max
  unsure (1)..(453): unsure at all n locations
agctntcataagtgtagtcttgtgcagccttcttcctaagagtcctctcatgagatggagattgagccatgttctcagtatgaaaattagcagccgaatgctcaaaatcagaatgttcaaaatcaacaacaacagaatgcacaaaatgctcagaatgctcaaaatgcacataatgatcaggatgcacactatgcctaactaatatatgaaagattctatctatttcaggatcaaagggttgtaaatcacctagattgcccctagtcatgcactatatgcagcaaatcatgtatttctcaaacaagcaccaatggtaaaaagctaggggtaaaactacaactatactcaaacgatatccaaatgagctgaaaatntgtgagcaacacccttaaatcatgaaaagatagcacanaaattttcagacaaaaattcaaagtctaactatgaatactg

SEQ ID NO: 149571 - DNA, 412 bp, Glycine max
atcaaagcacgaaaccctagggccctattggacttctccgggtccacggggtgtctaggaggcgctatacctgcaaactgatacatagcatctgagatcagctgggcaatatgtacactcacctgagtcaggagggcgtagaccagctaacacttcagcagggggagttctaagttatggtcgctacggagaatgttgctaaccatcaatgtcatccaaatttgtgtgaaggtagtcatgctggtgcgcatgatctgcacccatttccctactacgctctgggaaaaatcctgccccgaaatgcatagcaactgggtaatagcctcatcgtcgaagccagaggcctgactcctcctctggctaaactcatagtgctggccttccttcaagaccaatggatgccccacaaact

SEQ ID NO: 149572 - DNA, 439 bp, Glycine max
agctttgatttcaatacaagaaggcatatttatgagagcatcgtgataggaatttccctttaggccaacggctgatttttggggctgcaccatggttaggataggtagctagagaaaagacccttcaaataaaacgtgtatatcttgaataggtggtcaagcgctttataaatgtacacacgtttgaatgctgcccaaaatgaatatatgatgtggaattgcctctcaagtgtaaatagatggcatgaaaattccttctaaaaaaaaaatgcaagtgtgtgcatgacatgagattggctctccaatgtgcatatatgtataaaccaatgtgaatgaaacaacaaaaaatttgtatgttaataaaatactccaaatatgcgtagggtaattttggtagcaaaatactttgaatatggacatgtgtaattttgacacaata

SEQ ID NO: 149573 - DNA, 376 bp, Glycine max
  unsure (1)..(376): unsure at all n locations
gctagagcatagctactctatatctctctaatagctaagctcaccagcttgagatgagaagctagagcttanctgcacaccccctatgatagctaagctcagccccatgacgaaccacatggaagtacaattaaaagcccttagtagaaagactactctaaatgccctgaaatacaaagcttataccatatagctactacaatggccgagagtcaaggcccatagcgaagaaaaacctattctaatatttacggagatatgcgggctcatacttaacccatgggctcacaatctaccgtaaggctcatgagaaccctagggccttctctaggatctatagcccaatctactcggagtcttctacccaatgccctta

SEQ ID NO: 149574 - DNA, 453 bp, Glycine max
  unsure (1)..(453): unsure at all n locations
agcttccaccattgatgaataacaagtgattctttgctgatcattttctctaagnggttcagaactctcttcttcccttatgatttcatgtatcattaatatggtatcagagctcttctagtgaagagttctgctgcgcattcgttcctccttccactacccacagaaatccaccatgaatgaaacatccatcaacaacatggagagttatctctacctccatccgagcaagaacccggccactgccctcatttccccaatcctagattcgaccaactaccactcatggagcaggtccatggtcactgcattaagtgccaagaacaaagtagagttcatagatggcagcgcacctggacctctgaaaatagatagaatgcatggagcgtggcgtcgatgtaacaatatggttgtctcgtggatagttcactcggtggccaccttcatacgtca

SEQ ID NO: 149575 - DNA, 466 bp, Glycine max
  unsure (1)..(466): unsure at all n locations
tgtagggttaaagtctcacgattgtcacgtgcttatgtttcttttgttagtcgtggctatacgagacatcttgccaaacaaagtcaggttagcaataactcgcctgtgctntttcttccatgctttatgtagcaaagtcattgatccagtcaagtttgatgagttggaaaatgaggccgcaattatactgtgccagttggagatatattttccccctgctttctttgacatcatgattcacttgattgtgcatctggtcagagaaatcaaatgctttggtcctgtttatctgcgacggatgtacttggttgagcgatacatgaagatcttaaaagggtatacaaagaatctatatcatccagaagcatctattgtagagaggtacaatgcaaaagaagtcattgaattttgctcagaatacttagagaatgctaaacctgttgggcttcctgagtctcggcatgat

SEQ ID NO: 149576 - DNA, 434 bp, Glycine max
  unsure (1)..(434): unsure at all n locations
agcttaaccagaggatgccactntntgcagtttttatttgcctattctgcaacactaacaatgcagggttgagttagctagatctgttgctgataaaaagagcctcaaaagcctcaagatggaaggttgttctaaccttggaggttttgttctttgttcttcgagtctttctaccctttggttgtccgatctgtactctctntctaagatggtgattaacttttctatcttcttttaatcttgtgtgatgtgatcaatctcttaatttgatatatccctttgatcttactcagagtgaaatctagttactaacagatactctgaaatggtaggtcttcaattgtcctcagttgagagagatttcattggagtttgctcaccgagaaagtgacagtactgatctttcaaacatggttcaatgtttgggaagaatt

SEQ ID NO: 149577 - DNA, 302 bp, Glycine max
  unsure (1)..(302): unsure at all n locations
ccctacccactggccatatctacattaactccctggtcagcctgtctgatgataatgccaatgctcctacagtctccataccgagagttacccctcatagctgaactgctgatacgggaaccgttgcctaagagactgctgcaataaacatgatcaactagcgctgtgcctattcacagttacgtcgtaactggatgaatttctggatgatgttatttacacctctcccctcccttaagacagtggcaacataattgagactctcatctanaaacacaacgtcttaagtctccttggcaact

SEQ ID NO: 149578 - DNA, 435 bp, Glycine max
  unsure (1)..(435): unsure at all n locations
agctttatggcaaacccatccgtgtctattatgtatgaatacttacttataccaacgggtacaactctcctgtgcttgcttcccttctgaattcaagtntttattttcttccattctaaaatgtttggtatgtgtgattgaaagtattaatgcaaaacaaataacaaaacaaaaacagtcatttactaactgattcatgatttccgtgaatctctatgaccacttcttcttgaggggtgttagttctcttgtatctcaggactctaggcttatttatagccttttgaatgagaatgtgtgctaactgctaaacaattttgttacataaccattatagtgccaccataacactataatgcggcatttttcaacacctctgccattgtgcaattgtgaatggagggccaactatggcctgttatgtgacagaattct

SEQ ID NO: 149579 - DNA, 427 bp, Glycine max
  unsure (1)..(427): unsure at all n locations
tctatcgtangggcggacctattganggctgttatgtttttttttataaaggttcagttttttcaaagaaccgaacctaactactttatgcaaacagttcagtttttactttttatggtttggtttggtttttgagcagttcagttttttggcaacccctaaaatgtagtagatagatagatcgctaggaataaagaaatcagagaagaaaaaatctcttccagaccatccaaaactacccaattgatcgtctacctctcatttccggttcagtttttcaaagattagaaccaaactacattattaaaacagtttggtttttttgaacaccccaaaaatgtagtggatagagagctagttataaagaaatcagagaagaanaacatctcttccttatggcaagagtcatccaagactacccaatttg

SEQ ID NO: 149580 - DNA, 461 bp, Glycine max
atgcaagctaactacttctatttgagaacactcttattgatccctcttcttaaacttggcagggcacaataccaaagcaaagcagagacagcggacattgttttgaaacatatgcacgaatatgaaagttcatatattatgtggatagtcaagagctgtcattactgttcctgaaaaattgcaacagttatcatgaaatttaaagaaaattgctattcaagatttcaagtttagcatccaagatttcaagtttagagtccgtttgtactactatctcattagaaacgagttatggccaaagcaaaatttgtttggtttggaaatcatgcaaaacttcgtttcacacaaaaaaacaagggcttacaagggatggctcatgactgattaacttttccatagtgaaaggccaaaagcacctaatggctggttgtagaaatcacaaaagcaattaaatatacaat

SEQ ID NO: 149581 - DNA, 353 bp, Glycine max
attactcatgaaaatgattttatttacctcataccagaaaaacgaaatatcactgattacatcttgtgctatagctgcacggataatttattccatttattcggacctatattttcttttgttttgcgaatttataaaaaattcaattattggaaaaattattacattaataccatacaatattagtgaaaaactttatgactgttttattcttataaaatcgattcatactaactaactcacacctgatctatatgaatatctagtattaatgtgataactaaaaaaatggctcaaccataaccaggatcattgagtcttaaacacatacacttatgtaacgtataatcatt

SEQ ID NO: 149582 - DNA, 481 bp, Glycine max
  unsure (1)..(481): unsure at all n locations
acctgaggcatgcaagctttgagccaaaatcctaactcaccatattccttgacttatgtgagaatgtcaatccttaccctcggaagcaaaaaaaaagagaaggaaaatttccaatcaaaaacaaagctaaaaaaaataagagagaaggaaaatttccaatcaaaggaaaaaagagaggaaaggaaattcccaatcaaagagtgggagaaagcgaaaagaaaagaaagaaaattcctaaccaaagagtgagagaaagtaaaaggaaggaaagaaagctcctgatcaaggatcgaaagaaaacagaagaaatgtgcagaaaggtctntggaccatacaatatctgaacaatacagaattgtcaccaaatgaacaaaaagaaggaaaggaaaccacgacctanagtggtcttctccctttaattaccaaccaaaatcctttgcgtcggtgactttttcgccccgcactaaacaaaaacagaaaa

SEQ ID NO: 149583 - DNA, 471 bp, Glycine max
  unsure (1)..(471): unsure at all n locations
tctcagctacatactgagtttatgactccattgtgtatgggatgctctttgtttcacggntatcagcggtcttaggtgtggtgatatggaaagcaagaattgggtggagtgacaaaagcttcaacaaattacttttgttattgaagaatatgcttcctggtaataacacattacccaagaaccattacgaggcaaagaacatattatgccctgtgggtatggaataccacaaaatacatgcttgccctaatgattgtattttgtatagacatcaatttgctgaaatgcgcaactgccctacatgtggagcgtcacgttacaaagtgaagtctgatgaaagcagtgttgatggaagcacatacaaagattgtccatcgaaagtgtgttggtatctttcagtaataccaaggtttaagcgattgtttgctaatgcacaagacgcataaaacctaacatggcatgctgatggga

SEQ ID NO: 149584 - DNA, 454 bp, Glycine max
  unsure (1)..(454): unsure at all n locations
ctgcagctgaagcttggcaataaacacttggcatttttctctttctttcattctttcatnctttacccactcctcacgtttggttttttagggaaaaacaccataactaaacgcgccacaaggcattcctatcgcaccagatccaaatctagaacgatgggtgatcaagaggagacacaggaacagatgaaagccgacatgttggctctgaaagaacagatggcttccatgatggaggccatgttaggaatgaggcagctcatggagaaaaacgtggccaccgctgccgctgtcagttcggctgccgaagcagacccaactctcttggctaccgcacgccatcctccctcanacatagtaggacggggaaggaacacgctggggcatgacggcaaccctcatctgggatacaaccgagcggcttactcttatggattgccgcccaactactcac

SEQ ID NO: 149585 - DNA, 252 bp, Glycine max
cggaccatggaggggcacaggatggggtatgcccatgggagagagctgtggcactcgccacgcacctatccactggagggtcccatatctacagctgaatgagaaggtgaagggacttctgcttatgaacacgatggtcctgagatatgtgggggtagaacctgggacgccggggggcttgcaaacactgccatccaccaccgctatggtgtaaactggtgcctacagcactctgggcaaataagaaacaac

SEQ ID NO: 149586 - DNA, 455 bp, Glycine max
  unsure (1)..(455): unsure at all n locations
agcttcaactggtgaaacgccatagggaagttgtgttcttgtttatncacttttaacttaaaatttaacaaagcatgattatctttacaaaactaacgaacatggtgtcaattgatttgcaacttctttactgttgatggcattctcaaaaatcatgaacaagtatgacaaggtctcatttggttctaaaatattatctatggcagcaaggttcttcagttatgttctttactactaactattaataaccattaactaatgactgaatttgtaataccataattttctctgttaggatgggttctggtcataccgtacaacattatgctgccttggggagagacaaggtaaaggcctangtaactnttctttttttcccncaattctcttgtcctatatattataattcaagttagacgatcaatatcagttttaaacatgttgtcatgtactga

SEQ ID NO: 149587 - DNA, 399 bp, Glycine max
aagctacaatggatcaagtagaaatgatgtttgaattccttaattacttgtattagatctgggcaagtaaacaacaatgacaagacgaaggtgttcttttataaaaacatacgcgatatcatgagaatttagattaatggcaagttgggttttggtaggaccaatgacatcaacaagtatttaggagtcaatatcaatcatgggagggtttccaaaaaatccttgcatgggatcattgacaaagtctaaaagtggctcagtgtttggaaaaagaggtcattttcctttacaaggaggttgacattaactaaggcagctctgaatgttcttccatcctacaccataagccatcgcacattctttattcagcttgtgatgagttagacaaattatgtcatg

SEQ ID NO: 149588 - DNA, 463 bp, Glycine max
  unsure (1)..(463): unsure at all n locations
agcttcaaaccacagcaacacaaaatctatgtgtccaaatctcttcaatttaatggattttcaaggttngaaaagtgaaatttataatgaggtaaatttgaagcaaactctcacctcacaccagtccataacatccatttatacttgttcaaactggattcacacctaanatctcaccgaatcaaaatttgactcttcaacacccaaatttgccctaaaaaaggctctttgttcactttggtcatttatttttttctctctagcacagtccaagctttctcataagtcctaaatgacatttcaagctagtattaactcactttaacctccatttaccacagaattcagacttagccttcccactctcaaagcctcactctttttccactcataacaccacattctcactttctaaccctaagttagttctacccttcgtctctaacagaatttcatcagcaat

SEQ ID NO: 149589 - DNA, 490 bp, Glycine max
gtgacacatgatactaagcttaagaaaaagatggcctcagcaaattccttatttccatattggttttctatcaatagacctccaatctttaatggagagggttaccactactggaaaacccgaatgcaaatttttatcgaggcaatagatctaaatatctgggaagccattgaaatagggccttatatacccaccacagtagaaagagtttcaatagatggtagttcatcaagtgaaagcataaccatagaaaaacctagagatagatggtctgaagaggatagaaaacgagtacaatacaacctaaaagccaaaaacataataacatctgccctaggaatggatgaatatttcagagtttcaaattgcaagagtgctaaggaaatgtgggacactcttcgattaacacatgaaggaactacagatgttaaaagatctaggataaatgcactaactcatgagtatgaattatttagaatgaatacaaatg

SEQ ID NO: 149590 - DNA, 451 bp, Glycine max
  unsure (1)..(451): unsure at all n locations
agcttgctgaaggaacagatacaaaaagttattcctatagagaaatcacaaaattctaaaaatttagcttagtctcgagaatcaaatgatgaagttggttggtcgtggtgaacatattatgaagtgggcgtgcggntagttttccttcttggttctttagaatttcctatagaatttttaagaacaaaattgagatatcatacatatatctcttcttctatcatatttgttatcacttttgtgtttgttgccaagtttcgtttggttaactgtgccgtttaagggtaatggtttatgtgttgtgtgtgatattggtggacttctgtgcagtggcggatccaagaccctaagttaatgggtgcaaaatataaaaaataaaatcagtgggttcaattatataaatataaataaaatacaatataaaaatataagattttatttacaaatttag

SEQ ID NO: 149591 - DNA, 470 bp, Glycine max
  unsure (1)..(470): unsure at all n locations
gacctataaaactcagcttcattttctggcgctatgcttagcggggctcgttatttatatgtgngcggttccacaaggttcaggagcggaccaagcgcttgagttngtgtgcaccacttgggcgccgcagttgaagattntggggcacatggcggttggtggcttcttgactcactcgggttggacctctgtggtggaggctattctgaatgagaagccgttggttctgttaacgtttttgtcagaccaaggaataaatgcgagagtattggaggagaagaaaatgggctattctgtgcccagaaatgaaagagatggattgttcacgagtgactcggtagctgagtcactgaggctggttatggttgaagaagaacgaaggatctatatggaaagaattacagagatgaacgacttatttgtgaatagagaaagacaaaatatgtatattgataatctcctacgcactc

SEQ ID NO: 149592 - DNA, 372 bp, Glycine max
tattccaccacttaaaccatgtcttcaatcttcttaatttttcttttagcataaatacgacctatccaatgagctggtgtgactgccaacaatccctcgctgttgacttataagatctatcccacaaccaacaatcacggattctaaatggcttatggccccaatcagcgaacctatatcggagtaacacatgacagtgatccgagaaatctctctatatgggttgctgtaagctgctggctctcttgcgatccaatcacgagacacacggaaactatctatctagctccttgctgatccattggctcaataccacgtataatctactgcattccaaagcgctttcccgccttcaagtcattatacctcatt

SEQ ID NO: 149593 - DNA, 173 bp, Glycine max
actaagcttgcggtaaaaagagagaagagagaattcttttttgttgacgccaagcccttcatatcctcaatgtatgctcctttcttgtatccgagaaatgttgataaactctttttctggcaaccccggagaataatcaggatgtcgctgtgaaaggcacctgttcttcactc

SEQ ID NO: 149594 - DNA, 394 bp, Glycine max
  unsure (1)..(394): unsure at all n locations
ttctaaatgaatctaaattttgtgatgggtttcattctgttcttaattacaaaaagtaattcacatacttctacaacttaagtactcactccattgcatcatttgtatgcaccttctaatgttctgagtgttgtgatacttaactatttccaaactttaaatttcacgttctatggcatttgaaatcttaaaatatatataaattaattctctgtccataagattgggccaaactgctctgttttactgcaaatccattgatttgcccncttgagcatatgagattagacatcgttagcctttttgcttctgctctaaatttttaaaatcaaaattaaatcttaagaagccttatgtgaaacatatatatttntaattatactatcttaacttg

SEQ ID NO: 149595 - DNA, 462 bp, Glycine max
  unsure (1)..(462): unsure at all n locations
actcagcctcaattaaattatatgcgcaggatgttacattttctattgttaatcacttcatgggattatgtatctgatcgatatgaatgaagttagccaaattgtatagaagtagctagtaaaatataattatggtcaccgtcacatacctgtttagctataaactctnttacagcctcttcagttagatcaaagccgtttgatctcacaacgaaggcaacaggaacttcaccagcagcaacatccttttgtctgttaacatattgataaaattattagtcagtcagtcagtcatgtccactatatatgcacaataataagccattaaaattcagattaagaagcttacgggacaacagctgcatctgcaatggagggatggcttacaagaagcacttcaagttctgcatggggcacctagcacaacacaagaaataatattattaataaatcttgcacatt

SEQ ID NO: 149596 - DNA, 267 bp, Glycine max
actaagcacgagctcactgctattatgggttttttgagagtttcctttgtttagatagtcactgtaactacttcaagtgcttccagatgccaggaactgctaaagtcgaagacagcgcaagacttcccccgaacacagcaccgttagacatggccccacatcaacctaagaggcgtttcgacgacctcactaggacacattctgtttcaagaaagcccgcgggccatggtgtcctgcattgacaaatctattatcctgctgccaaga

SEQ ID NO: 149597 - DNA, 446 bp, Glycine max
  unsure (1)..(446): unsure at all n locations
gagaggatgcttcaatggaggagaagattagtatgatttatataaacagagaggcgggagcacgaaattgaaggaagaaaaatggagagaagttgaactctgagttgtgtctcacaagactctcattcatcaaagttacaacaagtgttacacatgcttctatttatagactaggtagcttccttgagaagctctcttaagaaaacttccttgagaagcttccttgagaaaacttccttgagaagctagagcttagctacacacacccatctaaaaacaaagctcacctccttgagaagcttcctagagaagttagctacacacaccatctaaaaactaagctcacctccttgacaaaatacatgaaaatacaaaaacaagtccctactacacagactactcaaaatgccctgaaatacaaggctaagaccntatactactagaat

SEQ ID NO: 149598 - DNA, 484 bp, Glycine max
  unsure (1)..(484): unsure at all n locations
gatcctctaatcacctgcggcatgcaagcttcaactaaagtccatactttgttgatcttcattgattctatttcagaatccatggctctttgccatttgttgcaatccgagcttctcatggcctcttcatanctcttaaggtcatcatcattatgataaacctcatttgacatgtcatcttgtaccattaagtttaatttattaggtgcacgatgcattcgagtagatcttctaagaggttcttgtgttgggttcaaaggttgatgcaattattctaagattggttcattaacttcttgaacaaagacttgttcttgaacaatagttggttcttgagccataatagtttgagttgaagagctttgtcctaatttcaaaacatcaaagaaaggcctctcagtttccatctcatgttcttgagtatgttatcactggtgacttgagtctcatcaagttcaatttctttaccatggtttccttctac

SEQ ID NO: 149599 - DNA, 483 bp, Glycine max
  unsure (1)..(483): unsure at all n locations
tgaccttgaaactcagcttantggaaattaaagagactaaccaaatttcttttaatgtttgtattggaggattaatttgaggatgaatttcctcaaagaaggaatgaatgatggagatcaatgaaagtcttcaaggggaaaacaaagatcttaggagaggaagaatctaattggggtaggagggccaacaacaagggcaaaagctaaggaaaaaaaagtaggtgttgcttgaaagagaaatcaacacctataagttcaagcctaaagtgagaaagaagagctcaagatgcatttgatctaagggaaataataatgtgccaatcatgggcttgcgatctaatttatttttagattttatttaagtattttgaactgttctaatggtaataagtaagtaattatgataccataaatacaaaaatgattttcaaagtcgattgttttaacaccttttacgatagttttcaactgtctttgaatctg

SEQ ID NO: 149600 - DNA, 458 bp, Glycine max
  unsure (1)..(458): unsure at all n locations
agctntaacaatgccacaagactnttccattctgaccatgctgatctttgctaatgtagaatcaacaattgctagtctactgaaacctaataactaggccaaatttacggctaaattaaaatacatgttcttatgcgctcattntcataatctacattaatccattctttccaaaataagaaatgggaaatactctttatgtgctaaaatcangttttcatgttgcagatccatattatgtccattgattttattatactttccacatttgcaccattctgggtttacaatgatatgacagctcgaaaaaggtatgctccttgccatataagttnttatttcactgtttacaacagatcctagtcctagttatataaaacaatctatagaatatattttaatgctaatccaatatgcaggtctgacaaaagttcttggcttcttctcctatcattgat

SEQ ID NO: 149601 - DNA, 460 bp, Glycine max
ttgcgaaaggcttgtcactggagctgacccatcaactgttctatctcttttagactggcgattcctaggctcttgatcttgacttgatagaacctctttttaagccaaggcgtttgactcgatcccatgttttactaaaatggaataaaaactagtgcgaatcaagactttgacacctatcacaggtgaaatggatgaatgcatgaagaaatggtatggcacaaatgcattttacggatacgagagctcgggagattatctcattcttacatacaacattcgggcggcatagcgcccgatgcatgcatttaagaaggtgacatggaccttttgtcttctcgtgacaaagtgaggggatcaagacgcaacccgtgcatgatgacatgatgcagatgcgaaaaagaaagggataacaaggagatgtacacaacatggcaatatccacaaataatcatacagc

SEQ ID NO: 149602 - DNA, 466 bp, Glycine max
cacctgcggcatgcaagcttgggaatctaggagattgatagagatgtcgctatttttgtttaatacacacgtgagaccgcttagaggtaagcgatgagtttatcgcaattggggttagaacgaacatgtgtagggatccttagaggattaaattggggtttattttgggatgtctattgaattataatttttcctttatgattctaaatacaatattgatgtcctgatgcgaattggttgataaaattgagtgctcttggtgttttcatttttttatacctatgattttgattaattgattttgatataattgtgtgaaattatttgaggggttttactccccatgttgtgataaaccttttatataaattgttatattgagattatgaaattgtgcttcaaattatgagtatgtgataaattgaacctgtgatgaatggagaaatacatgtgaattgatttgtga

SEQ ID NO: 149603 - DNA, 452 bp, Glycine max
  unsure (1)..(452): unsure at all n locations
aactaagctgacagagttcacgccgagcaagtttcatccgtgcttgtttttttntacaactcgaaggtgaattgttattttattggtttgggtttgactgggatgattatgcttaattatttggtgttcactttgggaacatttttaggagattaagaccgtggaactcgtgaagccaactgggtgggtttatctatccttgtctggagctgatcctaggtaagtacagtgttctttctgtatccagcttttgttggtttaagtntgtatctagtttttgttggttggaggcctggatttttttttcaaccaaattttgtgtgcatgttttggtagatttctagcatagtgtgaaaatgaattagtatacttttcttcattnttttctataaaaacttagtgatgttcatattaattgaatgatttgctttcattggaaaagattgtcatat

SEQ ID NO: 149604 - DNA, 348 bp, Glycine max
agcagaggagcacaaaccacagacccttgcaacaagtacagatttctggttcaaggccagctgggttaccaagttaaccaatgcatccagtttgccttcaagcttcttagtttcagatgatgcagttgagtttgtagctacctcatgcactcctctaatgactatatcatcatttctggcgctaaactgctgggagttggaagccatcttctcaattaaatttctggcttcaacaggagtcatgtctccaagggctccaccactggcaacatctatcatacttctctccatattactgagtccttcataacaatcatggagaagaagctgctccgaaatctgatggtg

SEQ ID NO: 149605 - DNA, 418 bp, Glycine max
  unsure (1)..(418): unsure at all n locations
caagccgaacngattatcatggatgaaaatgttgccttatctaactttcttatgttgttaattgatattgcatggcgctataataatttatcttttcggattattacctttggactatgattnttgttctcgcaggctgaaaagattcatgtccttataagaaaagaggagttaaagacatggaaattgactcaaaaggagaacaacacttatatgatgcacaactttaaaattgttaacaacgagggccagtataagtaatgtttgcatcaatataagttgatttttactggtgtcattgttgtcatagaacacgacctgcctaatattcctttaaaggcatatgagtctgttaatnttgctgatatctatgctagaacctaccgacgcgatcaattagttggtaatgctatttatt

SEQ ID NO: 149606 - DNA, 454 bp, Glycine max
  unsure (1)..(454): unsure at all n locations
aacccaaacttgtagcttcaatgctttgaaacatactcatggctaagaaacccaattttggttttagaattaaaaaagcatgaaaattaggacttgcttgtgagagtttttgctcaaatttgggctgccccatgtttgatactttgcatagaggtagcatggaaaacaccttgcaatagtgtgtatatataggtaaataaaaggggcatgaaattctttgcaaagggtgaatgaatattgaggtcgcttcctaaatgaatgtatgataacacgaaattcccttttaaatgcaagtgtgtgcataatgcaaatagcttgccaatatgcataagtgtgagtgaaacaataaaagtntgtatgatatatatttcaaatatgtgtaggtagtttgtaatagcaaatgtttaggatgtaattaagtgtaaattttgacgtaatgcctcgagcgtaaaag

SEQ ID NO: 149607 - DNA, 464 bp, Glycine max
  unsure (1)..(464): unsure at all n locations
ngagatgaggaagtgtanaagggtgaaacttcttgcttttattctttgaccacagagtggtacctggagatatgtcgcgggggtcaggagaccttggggacgttaggtggggtgctattgcccaaaaccaagcttgaccaatcccgacccaacccgggcatagtcagttagtgagaacctgtgatgtacctaaacagacaagctcctagcagtcaacagataaaaggaactaagaccacaaagcaaggaggcttgtgtggtggctggccagctgtgaatattgattgatatatgggatatggcctctggtaatcgattaccaagggtgggtaatcgattacaaggcttaataatgaagacagaatgctaagatggtctctggtaatcgattaccaaggggtgtaatcgattaccaggcttgaaaacagcgtcacgaagctacgagagcttctggtaatcgatta

SEQ ID NO: 149608 - DNA, 443 bp, Glycine max
  unsure (1)..(443): unsure at all n locations
agctntgatttcctttgtttctgaaacctttcttttctcatgtgcacccaaacccaatctccgggttcgaagacaaccttctttctccctttgttggcttgtttaacatagcttttacttttcctctcaatttgatctttgactctctcatgaagcttcttcacatagtccgcctttgcttgaccttctttatgcttaaaaacagaaacattaggcaaaagatcaagaggagttagtgggttaaaaccataaacaacttcaaaaggagaacaattagtggtgctatgaacaactctattgtaagcaaattcaacatggggtaaacaagcttcccaagtttttaagttattcctcaaaactgtcctaagcaaagttcccaaagtcctattaacaacttccgtttgcccatcggtttgtgggtgacaagtggttgaaaataacaa

SEQ ID NO: 149609 - DNA, 459 bp, Glycine max
  unsure (1)..(459): unsure at all n locations
tcaggttgctcaatggctccaggttgttgcatggaatgttatatgtctgtatggcggtcagcagaggagcacaaaccacaaacccttgcgacaggtacaaatttctgattcaaggccagctgggttaccaagttgaccaatgcatccagtttgccttcaagcttcttagtttcagatgatgcagatgggtttgtagctacctcatgcactcctctaatgactatggcatcatttctggcgctaaactgctgggagttggaggccatcttctcaattaaatntctggcttcagcaggggtcatgtctccaagggctccaccactggcagcatctatcatacttctctccatattattgagtccttcataaaaatattggagaagaagctgttctgaaatctgatggtggaggcaactggcacatagtttcttaaatctctcccagtactcatacaggctc

SEQ ID NO: 149610 - DNA, 417 bp, Glycine max
agcttgtaaaattcaccccaattctggtgttctatgctaactcgctccattatctacttgatactgcaatggtagccataacccctactaggtttcctcaacctccatttttcccaggatacgactcaaacgcaatgtgtgcttatcatggaggaaccccgaggcattccattgagcattgtatgaccctgaagcgtaaggtgcaaagtctagttgatgcaggctggctgaaatttaaggagtatcgcgtatgagtcctgacattgacaagcgacaccacacatggggcaatattgaaagctgttgttaggtgtctctaatgactcataaggatttccaagtttatgccattattgtaaaagtcacaatgctaaataaaatggataaaattgatatctttgtccctcatcctctcac

SEQ ID NO: 149611 - DNA, 424 bp, Glycine max
  unsure (1)..(424): unsure at all n locations
gggaccctnactggtttgaaaggtgatctgtttgtgtttaattcgagtgaacgaatatatacctaagtgtttctgcttctccccaaagctaatgtgttaggattctcttgtgtgggttctgatatgcgtcatcacacaagtctacttttggaaaacctttgtgaaaactttattatatcaagtattggatgatagtattttgtttcaacgtttttcattcactggacagtattttcactaactaggtttaaacatattttcctatgataaacttctctctgcaaagaagctttcatatttagtctaccacactattcagacctctcttctagtgtgatatttggtatatcaatatgtgtgtgtgtgattgtagttccattgatttagaaagttgtttagaataacatttgttgtataaatcaat

SEQ ID NO: 149612 - DNA, 467 bp, Glycine max
  unsure (1)..(467): unsure at all n locations
gcgacctgcggcatgcaagctgcagccttcaaagatctnncncaattatctatgaaangnncgagactngatctttgtaatatgctttgccttcatttcatgacgaaaaagaaggctccgcatnttagcaatccgattttgcctatccttctcatcttcaatagagacctgtcagacataagaaattacataaaacaattgaaaaacaccaatacaaaaataattccatgccatattgcataaaaaacatgggttgagaagaagaatcagtacacagacctttaaagatgtaatcaatgcaaattttattcttagactccaacaggcacacaaggaaacattgtatggcacttaaaagttaaaattaaactgtggtaaattgaacgcatcactctagttgggacatatatggtttgtctacctccatatatattgctagaatcataaaagtgctatttcagcttatg

SEQ ID NO: 149613 - DNA, 391 bp, Glycine max
cacaacgcgcgctacagataaattgcacggaaactttgctccctcactattaaaattcaggaacttaaacagaggttggcttctggtgaaactggaaatgttgattactatgctttgattggtgtccgacgaggttgttcccggtcggagttggagagggcacacttgttgctttccttgaggcataagcctgataaggcaactgggttcatcgaaaggtgcgagcttgcagatgagcgtgatgttgagtctgttaaagaaagggtgaaaatgtcttcgttgctgctatatagattggttcacaagggttacactaatgtgatgggtaatattatggatgaggaagctgctgagaagcagagaaagaacgctgctttgcaagctcttgaag

SEQ ID NO: 149614 - DNA, 297 bp, Glycine max
cacggagcgccgaacagcggatttggttgttgcaccctttgctatgggaaaatgagtggaatctgagtttcttcaactacattttgatatgctgtataattagcacacgcgagtgctcattatatagtcttaatataatggcttctctcgtattggctatttatttctaggtctatagatctggatgcaaacatagcgcatttttatacaagaactcgaatcataaactagtcagcaacccttacgaatcgacaccacatgaatttcacaacctgtttgattaatgttcaattcaac

SEQ ID NO: 149615 - DNA, 442 bp, Glycine max
agcttctagtcaaatggacttaccttgaataattctctttgatagccctttgagccttgtttccctttccttgttttgaaactaactacaagccttaaatgaaaaaccatgatatcaccatatccttaaggaattttggagcttcggaattgttttgggaataagtgtggggggatttgtttcattggataacttgttttgttggctatgcttcatgatgtattttgggccatacttgatgtacattgcagtatgcaacaaaatttactaattgcataataagagaatggattaaaatgccctcatcacttgtctttcacaaggtatgcagttatccaaagagaagaataaaatgtaacctgaacaaatagatggagttaggcataagacagatatcaaggaaagtagcttaaaccacagtctcatggctactgtctcactc

SEQ ID NO: 149616 - DNA, 389 bp, Glycine max
  unsure (1)..(389): unsure at all n locations
ggggtttcttctattcttgaaccctaatgttgttgtctgtggaatgaatgtacattacgatgttcaaaatatgtaattattgtcttggctggaattgtgtgatgtgtttgttctctcaaaattttaagggtaaaaatgatttccttgcgtatcaaaacttaggggtagccttaaatgtcacctaaatcagagtttcctaataaaagttatgaataaaacaagtttaaggaagtttcttttatgactaaactgtcacaaaaataaattggttgttatggctgtatggactatttttattatagatttgagttcaaaaagagttttttatgtgtganaatatggcgtagcatgtaaaattatgaaaaactgatctctgatacactataaaa

SEQ ID NO: 149617 - DNA, 432 bp, Glycine max
  unsure (1)..(432): unsure at all n locations
agcttcagcctactattgttgntntgattttaactagggttaaacaagaaaaagctcaaaaaattcgagataaactctgcttgaagggtagatacctggataattacaatcatcatgaaaatggtagattgtggatagaatggaatgataacaaggtagatgttagatatgttaggagtactagtcaatttattcactgtggggtttatgatttggctggcacttttaagttttggttgacagcaatatatgcccacaaccaacttaatgagaggaaaaagctttggaaagatttggaggaaattcatgatatgcaacaggggccttggtgtgttgttggagattataacaatgtggctaanagtcaagacagggttggaggtaaactggttactgaggcagaatatgaagatcttcaagctatgatggatg

SEQ ID NO: 149618 - DNA, 461 bp, Glycine max
  unsure (1)..(461): unsure at all n locations
tctgccgctcanatgtggaatccgtgccttatattttctcttntaatatcgnnggtttagacaagtgaagtgtgtgtaattcgtgctctctctgtgttcttcgattctggatttagcttttgttcaattaaattatggttcggcatggtttcaaatacagcgatagagaaggctgggaaaatggtattggcaaaaaaaagaagcacagggaatgagaaatataggaaaagtgttggcgcagacggcaagacaagcagtggaagaaggaggatcttcttactaaaatttggattctttaattcaggagttggtcggcaaattgctctaatcggtgcagttttacaaatttatttctcaaatggggttgtttcaaaacttattccacacgggtgccgttntggcatgtaaagatcatgtatggcgtcaatgattgtggcactttccggcaagatgtgccatgt

SEQ ID NO: 149619 - DNA, 464 bp, Glycine max
agcttgttcacaccattgtcgcgcatctatgatatccactccacattatttgaagtaaaggagaccttcaatcctataacgcaacgtgacggacaaaagtgggcagttaacttgaatgatcattattgtcaatgcggaaagtattctacacttcactatccatgttcacacattattgctatttgtggttgttacgtcagcatcaactacttccaatatgtagatgttatttacacaaatgaacacatcttataagcgtactccgcacaatggtggcccttgtgaatgaagcgacaattcctccttctgatgactcatggacacttatacctgatccaagtacaattcgtgtgaaaggtcgcctaaaatcaataacgataaggaatgagatagattgggtcgaaccatctcagaaccgacaaatatgtagtagatgtggaagtctgtaaattaattgatttatg

SEQ ID NO: 149620 - DNA, 463 bp, Glycine max
  unsure (1)..(463): unsure at all n locations
ttggcgcaagaatcagtccctctagtggaatgatgactgtctattggctttctgaaggatcaagcaatgccttatgaacccttatgtgctcatgccaccaatgccagggagacctcttatcctatacatgacagtgttggatgagtcgatggggtgtatgctgaggcagcacaacgagtctgggaagagggaatgggtcgtctattacttaagaaagaagttcactacctatgagatgaattactctctgcttgaaaggacgtgttgtgccttggtgtgggtagcccatcgtctaaggcagtacatgcaaagccacaccacttggttggtatccaagatggacccagtcaagtacattntcgagaaacccactctcaccggatggatcgctcagtggcaggtactgttgtctgagtttggcattattaatgtcactcaaaatgaaataaagggaagtgtcttg

SEQ ID NO: 149621 - DNA, 455 bp, Glycine max
  unsure (1)..(455): unsure at all n locations
agcttcctcggggccatttcctgcgaatgctaatatttgtatagttagttctaccaagaaattctattcttaaaacgaaaatggcatacgacctcccccaataacacaaacatcaatgtaaatttagagcgaactcatgcacatacttcctttcgaacattcactcgcaccagatattcttctaactaagaaaaatgcacccaggcacaatcaaggcaccttcgttacctagatcacttatatgtacttccaaggtgtatttgctacctacatcacatgcacttcctttgctaaatttacatacatgcatactcaaaacattttggctaccaaaaattgcatacgtgcacattctggtatttctaatacctatacatatacaaactctgtgatgaatcttggatacctacacaataaggtgctacatttcatgctntattcaagtgttttgctac

SEQ ID NO: 149622 - DNA, 445 bp, Glycine max
  unsure (1)..(445): unsure at all n locations
ttctttctcaatcaacctatctactgactaacaattcttatatgcagttcacattnttgctctttctttgactaacatacatactagctcaaactcatgaaaagaaacacaaactgcattacaatcatgcattcaatcaattcataacaccaattttcacaaaaagataaaagtgtttcactgcaatatcatcaaagtcaagttaaactattccatatgcttcaaaacaagtatactagctaatcacagaaagtataagaatataattataaatggaaaccaaaattactcaaaacaatgtactaaaactaatatagttataatcattatccaaaaagcaaaatcatcaggaatntaaaagtcctaaggtaaatcctgagtatcctgagttcgaacatcctcttcatctgtcagatgaagtattgaagtagctggaggtgaagtg

SEQ ID NO: 149623 - DNA, 429 bp, Glycine max
  unsure (1)..(429): unsure at all n locations
cacctgaggcatgcaagcttgatgataaaggagaacatatgaaacttattggttatcattctacaggtggntacaagctatatgatccaaggaataagcaagtaatagtgagtagagatgtggtgattgatgaaacaagaggatgtgattggaaacttgaagctgggagtggatcaaccacgatgatagttgatactagtaatcctattgaatctgaaatgaacacaagtgcccctacagaactcagaagatcaacaagggtaaggtagcttcctcctaacctgaatgtttatgatattgtaccagattctttagtggattcagagggtgaattggtgcactatccactgatggcaaaggctaaaataattgagtttgaaaagccagtgcaggaaccaaagtggattaatgctatgaaagatgaaatcg

SEQ ID NO: 149624 - DNA, 447 bp, Glycine max
  unsure (1)..(447): unsure at all n locations
ntgtgtaatcgattacacttatttggtaatcgattacctatgatctgtttctgaaaaatcaaaagatgtaactcttcaaaaaggttttgaccttttcaaatgggttttaagtntttctaaaagttataactcttctgaatggccttcttgaccagacatgaagagtctataaaagcaaagctttgttttgcattttcaatcaatctttctaacaacaatcttgaacacctatttcatacaatcctttacaagccttgaatctcttagaacttcttcttcttctttgtaccaaaagctttctgaagttttctggttttccaaaacttgaaaacttgtgctattcatcttttcattctcttctccctttgccgaaaagaattcgccaaggactaaccacctgaattctttgtgtgtctctcttctctcttttccaaaagaacaagggac

SEQ ID NO: 149625 - DNA, 457 bp, Glycine max
  unsure (1)..(457): unsure at all n locations
agcttgtagggttaaagtctcacgattgttacgtgctcatttattaatngntagccgcggctatacgagacatcttgccaaacaaagtcaggttagccataactcgcctgtgctttttcttccatgctatatgtagcaaagtcattgatcctatcaagtttgatgagctggaaaatgaggctgcaattatactgtgccagctggagatgtattttccccctgctttctttgacatcatgattcacttgattgtgcatctggtcaaagaaatcaaatattgtggtcctgtttatctacggtggatgtacccggttgagcaatacatgaagatcttaaaagggtatacaaagaatttatatcgtccagaagcatctattgttgagaggtacattgcagaagaagccatttgaatttgttcagaatacattgagaaggctaaacctgttggccttcctga

SEQ ID NO: 149626 - DNA, 445 bp, Glycine max
  unsure (1)..(445): unsure at all n locations
ggggaggatngatggggacccggtgttgagagaaacgaggatatgtgctacgtgggagtacgtgagctcagttggaggtgggcaacaggggatggtgggtttatgtgcgctctgtggatgtggaaaacttgttgtgcaccatcgcccgaccgccacctagtaccacatgtgatgggtaccccataatcctacaagcttgagatgaggaagtgttgaagggtgaaacttcctgcttttattgttgaccacagagtggtacctggagatatgtcgtggggatcagaagaccttggggacgtcaggtggggtactattgcccaaaaccaagcttgaccaatcccgacccaacccgggcatagtcggtcagtgagaacctgtgatgtacctaaacaggcgagctcctggcagtcaatagataaaaggaacaaagaccacaaagcatgga

SEQ ID NO: 149627 - DNA, 452 bp, Glycine max
  unsure (1)..(452): unsure at all n locations
agccttgtgtaatcgattacactgagatagcttccagtgatatctttctgaacaaaatcaaaagatgtaactctctcaatagttttcaagtttttctaaaaagtataacttttcccaatagtgtttaagtttttaaagggtataactcttctaatggttctcttgaccaaacatgaagagtctataaaagcaagactttgatttgcctttcaagtatcttttcaattcattctttatacaacaaanctttgccaattgatatctgaatctctttgaacttcttcttcttcttcctttgccaaaagctttctaaagttctctggttgttcaaacctttgaaacaaaacttgtgctattcatctttttcattccattctncctttgccaaaaagaatatcccaaggactaatcgcctgaattcttttgtgtctctcttctcctttccaatgaat

SEQ ID NO: 149628 - DNA, 442 bp, Glycine max
tctcatctcaaagaggagagcttagctattatagaggtgtgtttttcttatctctagcttctttaggaatcttttcaaggaaacttctatatgaggtgagcttatttattataggggtgtgtgtagctaagctctaacttctcaatgaagtgttctcaaggaagctacctagtctataaagagaaacatgtgtaacacttgttaggactttgatgaatgagagtcttgtgagacacaagtcacagctcaacttctctccctttttcttccttcgatattgtgctcccccctctctctttctctccctctttcttttcctccatagaaacatcctctccaagcttcttatccaaggctcatcttggaggagaagctccttcttccatggcttattccctactggatggcgcctcttctcacttgccttgcgctgcatctccat

SEQ ID NO: 149629 - DNA, 414 bp, Glycine max
  unsure (1)..(414): unsure at all n locations
agcttccacttgtatatagttactgatgctatcttaccccccatgggtatnggatagaagactccaaaaggcttgggctaaagctactaaagaaggccctagggttctcatgaaccttaaggtagatttttgagcccatgggtcaaggttggatccactcttctttgtaaatattagaataggtttttccttcgtttgggtcttgtattttggccattctagtagtatagggttttagccttgtatttcgaggcattttcagtagtctttgtagtagggattttttttgtttttntcatgtattttgtcatgggggtgagcttagctattatagggggtgtgtagctaagctctagcttctcatctcaaggaggtgagcttatctattagaaaggtgtgtgtagctaagctcta

SEQ ID NO: 149630 - DNA, 464 bp, Glycine max
  unsure (1)..(464): unsure at all n locations
tcatatacanngatctaaaaagcttcaaatacggtattggaatttatatatntcacaacggacacgtgtctgctaattatctagatgacaatttttaaaaaaattatttaattaattaaaaaatgaattaaaaaagtaaagagtgaacaagtctaaaattaatcaaagatattaaaatcacaatttttaaaagtacgaatgaaatgtctcacttaaaatgagattaaaatcacaaatttaaaaaataaaaggacaaaaattatattttaatctaaattaatatatatatatatatatatatatatatatatatatatatattatgaaaaaaatgtggtatttataacataataattggctttcttgaagcccactcacagcatcttaatatgctattcaatgttactacataatgcattgtggcctcaccagatatgagggtatcgtctacacaggtgttggtg

SEQ ID NO: 149631 - DNA, 279 bp, Glycine max
  unsure (1)..(279): unsure at all n locations
ccccccaccccncccccccactctcccccagaggttgtctctgcaccaaaaaanagcggaagccgacagcggaagtttcgccgccacaccaccaaggagccacacccacgcaagcagagccgacgaaccctcgcgaaacaagccctgatcaaaacacacacccagcaggacgagacgggcacgcagggccgcaagcaccaggacacaaccgaggacaggaaaacccacccaaaaaccccgaaccccaaacagccaaaaagcagacacgcaaccccacac

SEQ ID NO: 149632 - DNA, 418 bp, Glycine max
agcttagatggagaagaaagagcacgatgtaatatggctcgcgttctaatatttttaaatgtaggttcaacatcggttttcaataaaaaaaaaaaaataaccgatgttaaccagatgatgttaacattaacattagtttcttggaagaaactgatgtttacttatcatacgttaacatcggttttccaaaaaactgatgttaaagtatacacattatttacaattatgccaccgcgtttatgttaacatcagttttatcgaaaatcgatgttaacctgacaattttaattctacattttctagtagcgcttgtgaaagacaaatccatatccatttgttccgcaatgtacaacaccactttcttgtatctgttttgaaataaaattcacaatataaaattctccatgcagtggaaaaa

SEQ ID NO: 149633 - DNA, 438 bp, Glycine max
tgtaatggtgagaaaagagcaacacacacagtcatctatttgtttcaagtatataaaaaaaaaactgtgagtataaaataaaagtgtgtgtgctgctatttaagaaaaagaaaagctaagtgcggaaaggcaagtaatatagttggaataaaaataaaaaggttgatctatgtatgaatgctctcttagaacctaagcttttgcatcctataaaaaccatgaattgattgcagcccagcctcgttacaagcctaataaagtccttcagattcaatttgtgtgttcttgactatatggcatgagatgaattgcaaagattaagacttgtgttagttgttgattgttgaataagcctaaacacttgtgtttgagtgaaacagtagctgtgtgaccttggttaatgatccttccttgatatcctttgctcttactagctta

SEQ ID NO: 149634 - DNA, 333 bp, Glycine max
  unsure (1)..(333): unsure at all n locations
agcttgtatggangctggatgcatngagcaatangttgacccaccagggcgagaacccgacatgggtacgcttcgcaagatactggagaatatgctacacgacgcaccacgctacagagcattgcccttgcatgcaagaacctggaccccaagaacgtgcctaggcttatactgcagaagatgacgctatacctgctgaacctaaagggcgaaggcgggcgcactagatcgatggtgacctctacggcgacaaatgcaaccctggatggaggaataaccataatcttatgatggtatatccctcaagagcaacaacagctgcctgctacttac

SEQ ID NO: 149635 - DNA, 393 bp, Glycine max
gacctatgaaactcagcttcggctgtgaaaagaccagcggtgaagcttctcttcttttgtgatgagagatcatagacctgatgcatggtatatgcctcagaacacgtgtaatggtcctcacgatgagaacaagtatagatgacgatctgatgccgcaaaagaaaatactgtgaacattgtaagtccttgcccacttctggattcaagccctatgcttcattagttactgctatgtgcatctgtgagcattctattaccgatttgggtgcggatcatacaacagcctgatccttcgaccctcatggactttcagatcttctcaccgctcctaatgggcttccatatcagactggatgtgggcgcgctgcactagcactttggacgatgaagaat

SEQ ID NO: 149636 - DNA, 443 bp, Glycine max
  unsure (1)..(443): unsure at all n locations
agcttaagccaccagctcatctattttggtanttaagggtgngggaggctgaaagaatgggttcggcaccttggaaaagcatatttcacttaaaattagtgaaaagaaggagaaaaaagaataaaatcaaggtcgaagctcttcagtaacactttcgtaacattgttgtaaccatatcaccatttaaatgaatttcaaccgatcgtttgtgttgtaatctcacttaagcaccatttaaataagttttgaccgatcgtttgtattgtaaactcttttcatcaaataaaaaccaactcataaacttcttcatttcatcaaaaaatcaagagatcgtttcaaggtccaacaccttaacgattctctcctttcaaaaatcaagagaacgttcaaggtccaacgccttaacgattctcgcttgtcaaatttgagaagatcgcttcaag

SEQ ID NO: 149637 - DNA, 417 bp, Glycine max
  unsure (1)..(417): unsure at all n locations
tcaagaattatggcctcatcaaactacttgtttcccgattattatttatacaaagacctcccatctttaatggagtgggttaccactactggaaaacccgcatgcaaatctttatagaggcaatagatttaaatatttgggaagccatagaacaaggaccttatgttccctctataatagccggaagtccaacaatagaaaaacctatagcagattggactgaggaagaaagaagattagtacaatataatttaaaggccaaaaatattattacatctgccttangaatagatgaatactttagggtttcaaattgtaaaagtgctaaggatatgtgggatacactacaagtaacacatgaaggcacaacagatgttaaaagatctaggataaacactttaactcgtgaatatgaaa

SEQ ID NO: 149638 - DNA, 436 bp, Glycine max
  unsure (1)..(436): unsure at all n locations
agctntntggctaatatcataaacaagtgttctttatattccataagcagaaccctatatagntacctgcattttcttaaatataagctacatgcacaatatctgctactaattaataaacaaataacaattttattagtatgtgatacggtcatgtttagacgactatgactaataaagcaattgtttttaaattaagtgtgggtctcccaccattaattcctccattttcgatgacaaccccatgcttatgcatgcccatcacgtaatgagctttaaatatatatttcattcttcatgtgagtataggtcattatgtctactagcaatgaaaccaaccaacaggatcattctgatggtcgatcgccgctaactacagagattttctatgcttcatggttcactntacataagatacacagttttgaataatatg

SEQ ID NO: 149639 - DNA, 454 bp, Glycine max
  unsure (1)..(454): unsure at all n locations
tcgataggcagncgattgagggaatgactacgacagatttaatttcagaccttnttcttttccattagaaggacaatatcattctttggatgaagcatgcgtttgatatatttacttttttactcgtgtttacttatttttgtttacttattaattatgatgcatagaaaactctatttttgtccctccttctggttttgtcggaagtgtgccgtgaatttctgctgctgatagaataaaaatatttttagatggacttggataaacgacaacagttgttgagtcttctaccgctacaaactcgttaccctcgtattgtttaacgttcattgctactgtttagttcataatagtcgtgcttttttacactctcttgttatctagttgtcaaaggaccttgttcattggagatcatgttgtctggttttcttctttaccatcatcatatatatat

SEQ ID NO: 149640 - DNA, 294 bp, Glycine max
accaccgaggcatgcaagcttgagcaatggaaggacaaaacttttacactgtagtcggttgttcccgtagagaacgagacgcccaaattgaatcggaacttatcgaaattacacgacaatacttttactcggtgtccgatgaatcgggtagatatcgagacctcaacatgagacttaagctctgacaaattgaaagacaaaactttatacaagatgtcccgtgagcccgaatatatcagacgctccaatgaaacagaaccctatagaattccacagaatcctctctactcgatc

SEQ ID NO: 149641 - DNA, 352 bp, Glycine max
gaattcctacaagcttccgtttcgaatcgaacgtctcgaatatattacagactcaactcgacatccatgataaagtctttgtaattcaatttcctcagaacttctgatctaaatcttgagcgtctagatatattacaggactcattcacacatccgagtgaaaagtcattgtctttagaatgtgatacgagcttccgttttcatattgaagcatctctcgataaatcactacactctgtctggcatccgactaaaaggttatggtcttttgaatgttataagagtttcctttataattcggagcgttctatatattacggcactctaccggacatccgcgtataaagctatt

SEQ ID NO: 149642 - DNA, 356 bp, Glycine max
  unsure (1)..(356): unsure at all n locations
agcatgcagcnncacatcaataggagcgcacgatttattacggttctttttcgaacacccgagnaaaaagggatcgccgctagaatangctcacagcctccgtattccatttcgagcgtctcaatatattacgggactcaatccgacatctgagaaaataggttattgtcgattgaatatgctcagagcttcaacattcaatttcgagcatctggatatattacggctctcaatccgacttccgagtaaaaaggctattgtcgttggaatatgcttacagcttcgacattcaatctcgagcgttcggatatattactggactcaatcctaccttccataaaaagttattgctcttg

SEQ ID NO: 149643 - DNA, 383 bp, Glycine max
  unsure (1)..(383): unsure at all n locations
cagccataaaggagttaaattgtcaaaaatagttggtaataaaagcataataaaaagntggcaaacaataaagatactgtgcagtgtagggctctgaggtatctattagtggcttttggcatgaccttgtggcaaggaaaaatgaaagaaactttgcaggctctcgaaaatgaattttcaaggaggagaaatatttaaaggattttcaattgacagattaagtcaaatgactcttgcccttgacaactcacttttctcgcaaaaagacaactnttaagaatgataaaatgagggcacatgaagtctgtctttttatnttgatttgaacacaatcatcaaatattttttcctactctcattacgaccccttcacaacatgagac

SEQ ID NO: 149644 - DNA, 471 bp, Glycine max
ttatactgttacctctatgtttcttctgtcctttacagtctgttctatatattagtttcaagactactttatattggtggaattagtttgctactgtccttgttttgatactcattaatttctatttcctatagtatgtttatatttgattgctttctctgcactaatattaggtgttgacaatgcccttatgcagcaacaacctaatacaatgactattattgtccctcggcatcgacagcaaggacgagagattggcaaagtaaggtttatttctcatatcctttcaaatcatgattttggtttcctacagatatctttcataggaggccatccttacttcagactaagggaataaaaagaaaccaaaacagcaagttaacccatatcgccaaaagaacagaattagagagagtaaaaaaaggaaagaaaatagcagcatctgtgaaacaccctgtgttgcctttcatt

SEQ ID NO: 149645 - DNA, 439 bp, Glycine max
  unsure (1)..(439): unsure at all n locations
agctnttcaatttaatgatgttgaatgacttgcctgcttggtaccaaaagcgagcaatatgttgatgcaccttcaatacttcattcttatccattgactctcttatgttcatttgccacaacatctccatttttctccgattgattgcattttttggattcttacaaaatttgtccattggtcctttnttagtcccacactttgtctttgcacttgcagcaacattacaagagtccgcaaactcatcttcttcacttccatcacatccaattggttcaccaaattcaaaatctcttatatttgtcatattaccactaccagaagtactgtaagtggtcccactttttttggtagccatatattccttcaactcttcgactacatntggtggagttttcttgcaagctgcaacgttaccagacttcccaaccaggtgttg

SEQ ID NO: 149646 - DNA, 434 bp, Glycine max
  unsure (1)..(434): unsure at all n locations
tgctatntatagagaaaacatatatgagggcctattattgattttatctataagggaatcgattatttcaatgaagtaattgattatattatttaagtaatcgattacagtgttcatccaacatctagaaaacacctcaagaataatgtaattgattagatgacctatgtaatcaattaaagtgttcttgttcacctctgaacaacttaaatgagagagaagtaatcaattaatccacttggtaattgattaaagcagagactccaaaaaaaaaatcaatcattgtgtcaaacaatagtgtcgcaatctacccttcggcgggcgtgcgaaaaggccaaaatagatgggccgaagcatttgtctccaagggagaaaatgagcggagtcgccaccaacgtttattcgaggaanaagttagtgtcgcaacctaccct

SEQ ID NO: 149647 - DNA, 451 bp, Glycine max
  unsure (1)..(451): unsure at all n locations
agctntcaacaaatgtcttcttaaataattatctcacagcagaaacctagcaagactacccattatatctccccaaaccccatacccacgaaaatcaaaggagaaagaagtccatccaaacctgaattttcgaagtcccactcgtagccacgcacttcacgaccccgaaaatgccctccttttgcgatttggggcagaaatgatggccaaaggttgaagctttgcttggagcttcaatggagaatgaagaagaagaaaatggcaacgtgagggagagagagagctgtctgaaaagtgtgggggctgagtgaagagagagaaaagctntttggttttaaataaaagggttttctctttttctattattatattcaagctctgccacatgtccctatttgagtggagcaaaagggcccactttccctttttactgtgacccacactcagccac

SEQ ID NO: 149648 - DNA, 458 bp, Glycine max
  unsure (1)..(458): unsure at all n locations
tgaaaagattcccaatattttgttcttaggaggtgttgtatattgttatgtccatgactcgngagtcattacctcttcatcatgactatcttgcttttcttacagagacctaagctttaacatgttgactggttcggtcccagattcaatacaaaaattggataacctagactacttgtaagtgaacattccatttcctgaccagaagattaaccaaaaggatctctctctctctctctctctctctctctgtatatatatatatatatatatatatatatatatagaaaattggctgcttcttatttattgaattgatgcaggttcctaacaaataattctctaagcggaccaattcaggactggatactgagcttcaagaataatatgttagcatatgttattcatcgcgttttctctaatttcataatttagaaccttctcagaattacaccata

SEQ ID NO: 149649 - DNA, 381 bp, Glycine max
  unsure (1)..(381): unsure at all n locations
agctngaaggcggaacctatctcttctattttagaacactagtaacgngtctactatcatggatatcatctccctctccatcattggggcgctacttgagctgccagatccctccacctttaggcatattctttgaaagattcatgctccctcttacacatgttctatagctacattctatccggagccatatcagaattatactgatactacctaatgaaggcaaccattaggtctttccaagaacggaaccgggaagactccagattggtgtaccaagtgatggctgccccaataagactttcctggaagaaatgcatcaacaatttttcatcttttgcatatgcccccattttcctgcactacatcttcaagtgattt

SEQ ID NO: 149650 - DNA, 464 bp, Glycine max
  unsure (1)..(464): unsure at all n locations
ctttacgaacganatgatgtaagctccattggagcttgtttgtcttgatcgttcgtcttcataaatggattcctttgcttcttggaagatgaatggcagaggaatggagaaggaagagagaaaggagacgccactttaagaagaagatgagtctagaagaagctcaccaccataggaggccatggataagagcttggaggaagaaggagatgaatgaagggagaggaagagaagagcacgaaattttgtgctctaaaagagctctgaaatctgaagtttaattttcaaatgatcaaagttgaaaaaaatgcatgacctctatttatagcctaagtgtcatacaaaattggagggagatttgaatttctattcaaatttcacttgaatttgaaatggaatntgtggagccaaatcttggagccaaaatttcactaatcatgattagtgaatttcagttatggttc

SEQ ID NO: 149651 - DNA, 218 bp, Glycine max
gggcaagactaccatattttgtaaaacgggaactctttcaagaatacaccaagtgtgtaaactataatggcgacctatgcagccccttgcagctagtcccttgctagcccacgacccactcatcttaatcttactatccaaactaaatgtgtgtggcttatttgcttggcttgaagcaagtcctctttggcagcagtttcatacattttagtgaactc

SEQ ID NO: 149652 - DNA, 404 bp, Glycine max
cccaccagagccagagaagacaaaagattagttgggaattgaactactccccttgtgtttatagatattctagcgcaactgaagagttgaactctatgaaaaagctaaaataagcctacccacaccaagaagggtaggaagagatctccagctaaagattttgtaatttctctgcagccaaatgcaccacactcaaactggaaaagcacaactccaaactaccttactctccttagagtcctttcatctccctaaccacaatattcgatagaaacgaacactaacaaataaggtgcagagtgaataatatccagacagaacaagtcattactgttatattcttattatgtaccactatccaagctaaaatcattaaccttagaaggagctttggctaatctgat

SEQ ID NO: 149653 - DNA, 385 bp, Glycine max
  unsure (1)..(385): unsure at all n locations
agtcttgttagaagaacatgaggataatatcatatttatgtcttgtacgcacatcgntcgcgtgtatgatatccactccacaatgtttgaagtagaggagagcttgcgccctatgacgcaacgtggcggacaaaaatgggcantaaacttgaatgatcgacattgtcaatgcggaaggtgttcttcgcttcactattcatgttcacacattattgcagcttgtggttacgtgagcatgaactactaccaatatatagatgttgtttatgcaaacgagcacatcttaaaagcttactcctcacaatggtggcctcttgggaatgaagcggttatttcttcttctgatgacgcatggacacttatctctgctcaactacattcgtgc

SEQ ID NO: 149654 - DNA, 463 bp, Glycine max
  unsure (1)..(463): unsure at all n locations
ctctttcaatttggtctttggcaaatgtgtagaaagatttctttaactattgattaataggaacaattcaacacttgtagtatatgaagaggcttttggtgtattgctaaattgccgatttttggatctgatgcagggctaactcgatgatgcttactccaatatcaatgatatagagtcctcagaaatggagggtttttgcttataaaaaaataaatattgaaagttttattttaatatcttggtttagtgaagattctaataaacaagaagaaaagagacacttatcttcaaataattgtattgtctcttacattgaaggagttcaaataaaaaggacgattcttttttgttagttcctataactatatatatntttggttgtttagacctcattatgaaaactgaaaagtttcagtctttaatatgttaattcttaaatatctttagaggttgtagggat

SEQ ID NO: 149655 - DNA, 447 bp, Glycine max
  unsure (1)..(447): unsure at all n locations
agcttgagagaaaatcttatcgngagagttagagtgaaatcgngagcgagagtgagactgacagtcttgacaccgtgagtgacacgacagtgatttcaccatgagcgagagtgatttcaccgtgagcaaaaggtggtttcatcgtcgcgagagtgagagtgacatcatgagcgacagtggttttagcgccgtgagagtgagtgagactgacagaggagggttcgtgagggagacgaagcatgagggagagacgagtgaattgtcataagcatgaaaaaaattataaataggacaatacaacgtatcggtttctaaaccgacgttaacaaactcatgttaacatcgatttttcagagaaccgatgttgatgaaatcagattatttacaattatgccaccgcattttggttacattggttttgataacaccaatgttattctaactatg

SEQ ID NO: 149656 - DNA, 449 bp, Glycine max
  unsure (1)..(449): unsure at all n locations
ggcttgagtggcttctatggaggctggatctttgagcattaatgatgncctnnaatggngattttccaccatggagatgcagcggaagacaaaggagaagaggtgagaggaggcgccatccactacggaataagccatggaagaaggagcttcacctccaagatgagccttggataagaagcttggaaggatgtttcaatggaggaaaagaaagagggaaagaaagagagaggggggagcacgaaattgaaggaataaaagagggggagaagtagaactttgaagtgtgtctcataagactntgattcatcaaagtaacaacaagtgtcacacatgcttctatntatagactangtagcttccttgagaagctttcttgagaaaacttccttgagaagctagagcttagctacacacacctctcgcataactaagctcacctccttgag

SEQ ID NO: 149657 - DNA, 412 bp, Glycine max
  unsure (1)..(412): unsure at all n locations
agcttatgcgcatatttccctacgatcttttatttgcacaagacatcctattaactaagaaaaatgcacccatatacaatcaaggtagcttcattacctagattatntacatgtacttccaaggtgtatttgttatttacatcacacacgcctccttggctaaatttacatacatgcatactcaaagcatttcggggtaccaaaaattgcacatgcgctcatcttggtatttctaatacctatacatatacaaacttcatgatgaatcttgactacctacgcaataaggtgctacatttcatgctcttttttttttttttcagtttttgtacctaaagccacagcaanatcaagcatatttcctttgctgactaaaatgtattaaattagaaggatatattttttgaatatg

SEQ ID NO: 149658 - DNA, 468 bp, Glycine max
  unsure (1)..(468): unsure at all n locations
ntgagccanaatcccaacttaccatagaccttgatctagtgntataatatcaatccttgccctcgaaagacaacacaaaaagaaggaaaatccccaatcaaagaaagggagaaagcaaaaaaggaaagaaaattcccaattaaaagagggagagaaagcaaaaaaagaagaagaaagaaaatccccgatcaaagatcggaagaaaatagaagaaacatgcagaaaggtctttggaccaaacaatatctgaatagtacagagttatcaccaaagtaaatatgaaaagaaaggaaaccacgacctaaagtggtcctctccctttgattaccaaccaaaatcatgtgcgtcggtgacttgttcgcctcgcgctaaacaaaaacagaaaagaaaaaggccaaaaatactcaaagccaaatttcccaccaagaaaaaccccattcccaagaaaaagtcctactgatccatgat

SEQ ID NO: 149659 - DNA, 444 bp, Glycine max
  unsure (1)..(444): unsure at all n locations
agcttctcccttatttgctataaataggggtgttaagtgaagaataaaagagttcagcctctttgccacttctctctctctcgaaattgctgaggaaaattatttccgtgaagaaaatccaagccgagacgcttccgtaacgtttccgtgagtaattacgcgaagattctcgaccgttcttcaagattcattgttcgttcttcgttttcttcagtcttcaacgggtaagtacctcaaaccaagcttttcaactcattctatgtacccgtggtggtccacattttgtttcatgtatttttattctcttgtccatttgctttttatacccctttttgacatgcttaagccatttatttaagtcatttctcgcttaatctaaaaataaaataaatttccactgatcgtttaaattatatcantccgttaatttggttaaaatgaatt

SEQ ID NO: 149660 - DNA, 411 bp, Glycine max
  unsure (1)..(411): unsure at all n locations
gaacagcgctaggcaatcaattcgcgggtctcccgaactcgtggtggaggatgcatgaatgacaatcaactcatggcgctccgaataaaagtggagaatggaggataggcgaacagcgctacgcaatcaattcgcggggctgcatactcgatggtggaggatgcatgaatgacaatcaattcatggggctccgaataaaagtggagaatggaggataggcgaatagcgctaggcaatcaattcgcggggctgaaactcgatggtggaggatgcatgaatgacaatcaattcatggggctccgaataaaagatgataatggaggatangcgaaaagcgctaggcaatcaattcgcgggtctcccgactcgttggtggaggatgcatgaatgacaatcaactcatggcgcttc

SEQ ID NO: 149661 - DNA, 453 bp, Glycine max
  unsure (1)..(453): unsure at all n locations
agcttgnaatcgattacacaagaggggaatttcttaaattatttccaagagtcacatatattcaaatggtttatgaatggccatcaaaggtgacttggaatcacgaatttaaagagagtttttattgcccaaaaagttttatcctctcaaaaaattaagagtctttctgaactgaaatgtcttatcctctcaaaaagattccttggtcaaccacttgcatattcaataaggaattttgattgatcttcattgtacaatctcttttaagagagatttcttcttctcttcttcttatttttgaaaagggattaagagatcgtgggtctcttgttttagaggattcgtgaacacaagggaagggttgtccctgtgaggttcagactttgtaaaaggagctttacacagagagtggaaaatctcaagtgggatgcttgaggactggacgtacgcact

SEQ ID NO: 149662 - DNA, 399 bp, Glycine max
taatttccaagaggcacatctgttcaaatggtttttgaatgaccatcaacggtctatttatatgtgacttggaacacgaatctgcttagagtttttcacaacaaaaaggtcttatcctctcaaaataaaaattgttttatcctctaaaaaattccttggcctatacactcgcaattcaataaggaattatttgagtgctccattgttcaatctatctctttcaagagagatttcttcttctcttcatcttatttctgaaaagggattaagagaccgacggtctcttgttgtaaagcaatctgaacacaaaggaagggttgtccttgtgtggttcaaaactcgtaaagggttcttgcaagttagtgaaactctcaagcgggttgcttaaggactggacat

SEQ ID NO: 149663 - DNA, 127 bp, Glycine max
ggcctgaaccacttctcaagtcttgggtaacaagattgtcctttcaatcagcactgcctttcacatgaggattgcgaaaccagccaaaaccctaagtatgaatcgtgaacaaagataaagggggggg

SEQ ID NO: 149664 - DNA, 471 bp, Glycine max
  unsure (1)..(471): unsure at all n locations
taagcttctcaacgtgatcatacattcattggcatagagngaagttgaatgtttggngcgcgancngnctgggtatcacccagatgcaataaagttatgcaatgcatgtcatctggcgttntttatagatagtacctacaaaacaaacaggtacagactcccactacttgactttgttggggtgacaccaacagtgataacattctctactgggtttgcatatctggagggtgagcgtgttaataatattgtatggactttggaacggtttcgaggtgtatttttaagaaatgatcatctccctattgttattgtcactgacagagacctagcactaatgaatgcagtgaaaactgtgttcctggagtgtacaaacttgttgtgcacgtttcacatcgataagaatgtcaaggcgaagtgaaaatctttaatcggtaaaaaaaatgtctgcgactatgtgatggataactg

SEQ ID NO: 149665 - DNA, 441 bp, Glycine max
  unsure (1)..(441): unsure at all n locations
cagctggtattcatctggtgtgtcaaatgtgtgtctcanatattttttcatcaacatccgacattggcctaggacaaataaaaccacctctatgatctgtctcaatgatatcctcgcttgcttccaccaaagatgcttcaatgattgactgaagcatggcttcttcaaaagctttcctttcagcaaggtccatgtctttatgagtagtggcaacttctatttttgcttgtcttttagcaagatctacaaaaaagatttgtgttgcaagttttgcttcaaattgagctcactctaattcttccatctaagcattcttcatctcttgtgtaaattatgcatgtatcgattcaacaatgacaaaatttggcactaccttcaatatataagacatcgcctgtggaggctaaagagggaatatcaattttacctcattcattaatc

SEQ ID NO: 149666 - DNA, 463 bp, Glycine max
  unsure (1)..(463): unsure at all n locations
actaagcttntctcgtcgctggtcatatgtcaattcttgaagcgtaagcttgtggtctcacttgcggcctccataaggttgcttctatcaactgtcttttagtggaaaaagagtctgactctttagtgggggtgaatttcatcaacaatgggtgtccaaattcctactcatgttttgattaaatagaagaaatcaagaggatcaaatctagctttcaaaattgctccttctcccatatgatttgagaagctaactagttaattgattcctttatccagtatggattctctcaatacaaagagttttattctttatttcttgctagtttttgcgcgagatccctttttgggtgacttaaattgtattcgcttattgagtaataataaattttgtgtcacaggctttgcctaacccgtaaagaaataagctaactgaaacatgataatcttcaaacaattttaat

SEQ ID NO: 149667 - DNA, 473 bp, Glycine max
  unsure (1)..(473): unsure at all n locations
accggaccttaagcaccgcggctgcagctnttatgcaaaaagttgtttagtttattcaangtccaacgccttaacggtctcttttattcttattggttaaaatgaattgttcaaaagtttaaaagcaactcaacacacaatgttcttgctttttaagaactacctaagtctgagttcctcatcgcacttgaggatacatatgagcaagggccacgctcttgtcgaccccaaaagatgaaaaacataagaaaggaaaaaataaataaatattaaagtcatgattttgcacaattgattaaaggttgtcgtcccttgtgacgagcatgtggggtgctaatacattccccgtgcgtaaacaactcccgaacccttattcttaaaattcgcagacccctttctggtttttctaacgttttcctcaaataaacgttggtggcgactcccacacactttcttntttggaagacgcaccc

SEQ ID NO: 149668 - DNA, 461 bp, Glycine max
tagaagatctatatatgggctaaaacaagcatgcttcttatgttatataaagatccataatgggggctccaaatatggattggaggaaaatgttgtaagccaatgcatgtatcttaaagtgtgtgggagtaagtttattttcttagtcctatatgtatatgatattttacttgcaagtagtgacttgggtcttttgcatgataccaaaaatttcctctcacaaaactttgatatgaaggatatgggtgaagccttctatgtcattagaatagaaattcatagagatagatctctaagaacatcgagattatctcaaaaggcttacatagaaaaagttctgaaaagatttaatatgcacaattgtcatcaattgctacaactatagttaaagggaaaaaatttagtctcaatcaaggttcccaaacaagattataacaaaaagagacgaatagtattcctta

SEQ ID NO: 149669 - DNA, 449 bp, Glycine max
  unsure (1)..(449): unsure at all n locations
agcttccaggtgctactattgtctatgtcttgttntaagaattttttttattgtttgcattatccatttgccccttaggtgtttgatatgctgaaatctcataggcatcttggatgtcttggcataagattatttgggtatataatttgttggtattaactacttcggagtcccatatttggtatgattcccaagcatgattggacttaatagtctcatgcattttcaatttctaacattacttgtagggtttaggtagggaaggagaagaaagagaaaaagactctgaataatattattatgatattgtatatagaaagtgaaataaaatacaaacactgaccgaaccctatttatattatttctagacacttaatcctaaatctctaattaaattaaataacgaaacacagcatgaattataacgaaatgtggagaccacaactaac

SEQ ID NO: 149670 - DNA, 443 bp, Glycine max
  unsure (1)..(443): unsure at all n locations
actcagcttggaatggcttnaacatgctggtttctgcttttctctttcttggataccattcacaggcgagacaatagtatgctgtcttgatctccaagtctgtagctgacatggaaaggcccgtatgaagtcactttgtcttgggtacggagggattgtcagctatgagttcaaacttgcacatctggaagatgtattttctgatttcgttgttttttcaactacgccatactcaagagtagaaaaaggcttaactttgaagtctgtgatcattgaccatattgggagaatgttggatcacttatgcaacattttagaagtggatacaggtctgagtgacgttgaagagctccacatacgatgggttggtgtctaatccctggaccaatataatgttgtttagagggcatacccattgaacatgcatgatcagtcctttcact

SEQ ID NO: 149671 - DNA, 341 bp, Glycine max
  unsure (1)..(341): unsure at all n locations
agcttgcttgtggagcttctatggaggctttatctttgagcttcaatgaggtcctttaatggtggttttccaccatggagatgcagcggaagacaaaggagaagaggggagaggaggcgccatccactatggaataagccatggaagaaggagcttcaccaccaagatgagccttggataagaagcttggaaggatgcttcaatggaggaaaagaaagagggagagaaagagagaggggggagcacgaaattgaaggaagacaaaaagggagagaagttgaactttgagttgtgtctcacaagactctcattcatcanagttacaacaagtgttacacatg

SEQ ID NO: 149672 - DNA, 334 bp, Glycine max
  unsure (1)..(334): unsure at all n locations
agccccacagcccaaagttcacaaaaccatgctcatatgtcgttgaggcatatcaccgagcacttggcgggcacatgtctaggcatgaatatcaagagaatgggggcaatgtggcatgccccattacttcaaaatgcaccctaggcctaaggccatcccttacaacccttcaattcaacaaaaacaagcaacaattcaaggataaatccctcacgtcttttagcaaatacatgcaacttagagcaccaaaatacatcaatggaaagctagagagcccaagaatgagggacttacttgctgcagatgaataatagcgcanaacggaatcaaaaac

SEQ ID NO: 149673 - DNA, 242 bp, Glycine max
agcttactgatgaatcttttccacatttttttcaagcggccaaaagagacatagccggatgagcggactcttgctatcttttctggtgcctgctggtacatgtcctgcttacaagtaacatgactgtggcactgtgtatttgacatacacgcgtgcacccttttatttgttttaaatcttcctcgcaaagaatctggccgactactcgccgcacttggtcattgctgtgcacaggtggctgg

SEQ ID NO: 149674 - DNA, 473 bp, Glycine max
  unsure (1)..(473): unsure at all n locations
gacacataaaactaagcttatattatcatactaccctaaatagttggttatctntttcactgcaaaaattgggtttggtattaaaaaacattggcataacacaagcattgaacactatgaaacacgaaaaaatgaataattntttttacacttttcgtttaaagaaatggtagtaattnttttctccttacaattgctcccttggccaattcaaacaatgcattgaagtgtgtcttcctattatttgaaactttattacacaaactatgccacgtgtttgctccttaaaaaagaggcaaaagtattgttagtgtgtttgaattatattcattttcttataatcaatttcatgcgtttggttgggtgaaccaactcacttaacgtgctgcaaaagtattnttactttcaaagcaacaaatgcacaattntttactttaaagatagaaatgctagattctatgtcattttttaaa

SEQ ID NO: 149675 - DNA, 439 bp, Glycine max
  unsure (1)..(439): unsure at all n locations
agctgttggtaagtatacacatgcatcttatgtttgtcggnntttggtaacacaagtaacttctttaggtattggagacacaatattagcaaacaaatgtcattagaaaaacagttcagatacactaaagaagacatacctgataagccagttctcttgtgtggcaaagaacaagagctgcaacttgaccaggaacaggatcaacttgctgaagtgttgacagaacaaaaacagcagtctttcccatcccagatttcgcttggcaaatgacatccattcctaaaattgcttgagggatgcatccatgttgcactaatgaagaagcaaacaaaatcgtagtggacgaatcctcagtaagtatatatgatctgccacatcctcttaatgtaaaggttaccaaccaatttcgtgacatataatatgctgcatggatctacct

SEQ ID NO: 149676 - DNA, 447 bp, Glycine max
  unsure (1)..(447): unsure at all n locations
gacctaagaatactaagctcgtatcatagtagacagtatcaggagcagagcgttttttcntctaagaacacaccagccatttatgttggtctttccctcgccttctgctgcatgaataagattgatttcagttatccattgagtgaaaagataaaatacaaagcataattgagtccaaagtttgaatataaaaaatgtactttgtgaagtcttgcaggtataggaccaattgaacagacactctggtatgctcataacagttaatcatgcataacaaactaacccttaatgtttcttactctatagcccagattattattgctaaaaccagaatccaaaaccctctctaatattcattttctaccaatatctacttcaaaaccaatacaatcacgcacgagacacatttaacttagattcgcgaatttttgcctaccgactcgaagc

SEQ ID NO: 149677 - DNA, 342 bp, Glycine max
  unsure (1)..(342): unsure at all n locations
taaaatacgaatagaggcgcacctcacgtattgtcgatgatgatgatggaaggatcaaccctaacatatatttgataccccctctcccttcgaaaaataatactctcaagggggagaatcaattgtaataagctaaccttgataactaatcatacatgttcatccaattctgagaacaaagagggggttttaaatatcatcactttctctccgccactacttctttcagcacgtgaaaatatattngttgaaatgacgggagtagtattttcagttttacacggccgatgaaatatattcctgtctattgaatctgtttgccactatctctagttatttcaa

SEQ ID NO: 149678 - DNA, 440 bp, Glycine max
agcttcagctctgaccgtacatggtatatctatacatgaccaacacaatggtccctgtaaggtcaaagcaaggacatcaactggacctcctccaaatagatgtccaagaatgcccactagttgtggctctacatatggtccatgtggctctggctttagccctttctgatggcattagccatgtgttgatgttgttagcctcagatgcctctctgtagcatcttcctcttcatgtgagaggccctcataagaagggtcacgttctacaacgtatgaggtctactttatctgagccatttgaatttaaaccaacaacaattaaactagttataaacataatacaaaaaacattaacatgctcaacaaaaacacgaatctgatgtgtgtcttgataattatacaacggaatcatgattccgtgtgtgttcacaacatgatat

SEQ ID NO: 149679 - DNA, 466 bp, Glycine max
  unsure (1)..(466): unsure at all n locations
gacacaanaaactcagctggtctgactcatcttctcttgaagggtgtttcctttcattttcttcnntcccattccgctgcattgaactccaagaaacaaaggattccattgatgaagaagatccaaggcctacaagctccacatggagctacatcattaagttaattccatagtgtcagtttaatccttaagtctaggaagtacgcctgtctagggaagtgtttcatcaccaacagcattgttgtggctatattgcaaacttaaggatcattgcaaagaaaagaagcactactgcaattcaaggttcagatatttaaaatgacagctcactgcatctttattcaatagagagatctattttaatagcacttagagatctaanagttggatgcaagtaaatagtcaaacgaagcccaccctccaattaataacncaaatgatacgccatatttgagggccatcatac

SEQ ID NO: 149680 - DNA, 396 bp, Glycine max
cattgcaaccaatcaaaagtgaacaaaacaaagccagagaatttatattggttatggatgaataaaacaaagttgccgaatgccgtgttaaatcaagtgctttttcatggcaaccaatctaaagtgaacaacacaaagtggccgaatgcgttgtaaaatcaaatgctttcatgacaaccaatcgaagttgataatttcccaaaacttgaattgccaaagcaatttgtattattccatcagaaagtgaaaataataatagtaataatttgcggcgggtggtggtggcagctgaaccctcttcagctagtgaagtcagtggcatgggtgccaatagaagaatatgatcatcatttttagctcgcatatattcatgtttattggccatatcatatttat

SEQ ID NO: 149681 - DNA, 372 bp, Glycine max
  unsure (1)..(372): unsure at all n locations
gcctccattctactgtctagtgtgatgaacatttntctcttatagatataattgtacaaatcccaacgatgaatatgtgaggaaaataatctggaatcacatatctcattttcatgataattcaataactaacgagtccgaaatcataattttagtgatatagttcaatagctcgtgattggtggaaatactctattatttgaacactaaaataagcttggctagtcatcctcggttgttaaagtatagatctaaaccacctaattttaatttcaatttggatattctatccccagtcactttgggtccttagtacgccacttataattgggatgggagaaaagcgaataataaaccgcattagaattcact

SEQ ID NO: 149682 - DNA, 399 bp, Glycine max
  unsure (1)..(399): unsure at all n locations
catgcaagctgggtccttggtagtgtaaacttatccttgcagtcaatttctgactttggaaccaccattgnatgttctacgcttcctttggaaaaccctacagaaagagactttgtcaaagctatccttttctgaaatgggtgttattttcgtgaccttcattgaactccgttcgcattgacgtgattggaatttcaaaatgatgctccttttgtagaacccgtaataccccttagccttttcatgtagtgacatgagtatttgactcagggtatcgctgtcaacattatttctgaaatccgtatgaagtttccttcattttgacgtatagagactagtcgtggaccgacaagcgtgaacgatgaagagacctctaagtgacgcaaagaggaacccggc

SEQ ID NO: 149683 - DNA, 451 bp, Glycine max
  unsure (1)..(451): unsure at all n locations
tggggacccatacatgtggactaggtggatttcttctatttgcacaacaagcntccacatccacatagcgcgcataaacccaccatcccctgttacccacctccatctgagctcacgtactcccacgtagcccatatcctcgtttctctcaacaccgggtccccatcaatcctctcaagcttccacaacatccaagcaaaacaacattcaaaccgcacaagctatcacagccaagcaaaacagagcataggcagaaaactctgccaaaacaccaaccaaatcacaatttttctcacttaaagaccccagtaacaattccttcgttccggttcattaaccgttggatcgaatcgaaaattttactggaagtctctaatacttaagcctacatcttgaccgttgggatctactagcacacatccagaactcattctgcactactctntccaca

SEQ ID NO: 149684 - DNA, 362 bp, Glycine max
ccgagatcagctgataacagaggtagctagatttgaatgatcattatttggccgaagaacatgactgagtataactcaatgcaccagcacccatactactgtttgagcagcccaactatttaactattcaccacacaataatctcttaagctacacccaaaattcgggctggaagatacgagattcagcttatcattgcagaataattgtttcaaaaatttaaacacagattaatccctcatgcagaatgcaatcatttcttgttggatgaccggaaacctccaaattccatcatggcagcaacatcatgatcaattttaggtacttcaactgccttcttcttgtgaatccaaaaattaaac

SEQ ID NO: 149685 - DNA, 186 bp, Glycine max
agccaccaaaacaaccagaccccagaggccgaaccccatagaaacgcacccgccgcgcaccgcggaaaccaggcacgacaaaaaaccaccgcagaaaaaacgccaacaacaaacaggcaaaaagccaaggacagacagggaacaacaaaaaccgacacacaaaacgaaccagacaaaaaaaaagcg

SEQ ID NO: 149686 - DNA, 434 bp, Glycine max
  unsure (1)..(434): unsure at all n locations
gcatgcagcttaaagggaagatatagaccaatcattatctcatagcatgatcttgaaagaagaattanctgcttgctcaatgtccaaaagaaactggtctcatcgtttatgcgagacaaataccaacatgttatccatcgtcagcacgtaccaagaagaattaaatctagccgcggcccacaagcacaaagtggcagacgagtatgcccaagtgtacgcgaaaaaggaggctagaggaagggtgatcgactcattacatcaagaggcaacaatatggatggaccgatttgctcataccttgaacgggagtcaagaacttccccgattgctagccaaggccaaagcaatggcggacacctactccacccncgaggagatccacggacttctcagctattgtcagcatatgatagaattaatggcccatataatta

SEQ ID NO: 149687 - DNA, 466 bp, Glycine max
gtaagccatttggttgcatgagtattgcatattcatttgtccgcttcatatagcatcaaacacaaatattttaattactgtcattctgtcaatctatcaggtgtgactcgtgcagccaaaggaaattactacatagaatccccaccccgttaccccccaaaatgtgaacatgataatggttaccttgcagagagtggtgaaaaaaaccctggagtcctttcatttgaagcaataaacaacgttcttccaggtgggacccactttgctatcctacaaagcataaactctggccgagtgtctctatcaaggtgagggtgcaagctcctcgctacaccaaatctatctttccgggtctttattttatccccacgacgaacatggatggcatcataatcaccaagtaatgctttgatctgtgaacacgagtctgatataatatagaatgtgtaacacagagatactgttg

SEQ ID NO: 149688 - DNA, 452 bp, Glycine max
  unsure (1)..(452): unsure at all n locations
agcttccaacatacatataattcaccatcatanattcttcctccggngagtagaataggttttagagtttatcatcctgagcccaaaacaaaatgttcaaaaaatcaagtcacgacctcaccaccttgtacaagacacacttcgtcaagcttcttatgaaggtagtcaagcacatgaactgtgagttctgctgccggtacagacagaccaaactcaaagtatacagcaggaatagcctcatgcaccactccaaataggaactcagcgcctgagcaaagactgaatccaacgaatggccatcagatactatgacaaactcacaaccgccaaaacaaactaaatntcgagagatgcctttcaaagaaaattccaaatgtagaaaccaactgtaaaaaccaactagtctacatacaaacataaccctaactctgctagagtttagaatttaaaga

SEQ ID NO: 149689 - DNA, 447 bp, Glycine max
  unsure (1)..(447): unsure at all n locations
tatggaaaagatccgagtttgattattctacagtatattcttttgaagaaagataataactcttaaatatgactaagtctagaggacagaagattaattttctagtcaatctacaagattaaaattgaaataatacctcaaaatcttaattacactcggaaaaaaaaaatcgaacatgagaagatccatcatccccacatgcttcacctgtatttctgtctaatgagaagaaagggacaatctctttctcttacctccttgaattgcagtaccatgaaagttcttaaaaaagtttaaggaactacaacgaaattcatgttggagtttatttttttaactgcacaatttcaattntgaagttgtcaatgaaagctttacaagttctgtatccatccatccatagacagtcattacatttgacgtacacacagattaaggaacctaata

SEQ ID NO: 149690 - DNA, 449 bp, Glycine max
agcttgaacttgcctgctaagcgagagtgttttctgtcttggattacacgctgagcgagctgtccaattcttccaactcttcttcaattcttgcatacaatttcctctaaagcacttgaattcttcttcttttgacttctgctaataaaaaattgcaaagatgttaatttcttcgttatttcattcaaaacaatagtaaagtgaagaaattacaatcattattagtcaaaattgactatcaagttaactcagatttcgcagttatcaactcctccaaattaaaacatttgtttgtcctcatgcaaaagacaagttctgagtgtgccaacacatgagataactatgaatccattaaaacatttgtcttgatcttgtgatggaagcatgaaggaatacacatggagatgaaaaacgttagcacataaaacttcatcaaggcaaaatacaac

SEQ ID NO: 149691 - DNA, 458 bp, Glycine max
  unsure (1)..(458): unsure at all n locations
gacacaagaaactcaactaatcggtttcagaatgtcaaaaatggctgttacaattttttctagaaagtggtgtccatatatacaaacctgagttactcctaatatatgtgctaacaaagaggcaacaatgtttccatcactgtagtttccaacgatcagatctggcttggcttgcaactccttggcaagttcaagggcaacatcctaatgttgacaagaaaatatagttagattggaaattgattcaaagtgaaaacatcaaaatgcttgaaccttgtcacagttctgagtaaaagttaaaattcacctcagtgtaagtctctaggtatggccagacttcgaatcttgagatccatttgcgaacaattcccttttcgggtctgaaaggaactcggagaatgtcacaatattcagtatcatataccctctctagacgttggccacaggtagttnctact

SEQ ID NO: 149692 - DNA, 361 bp, Glycine max
agcttgctaaccttcacctatcccggaacttctctatggagttcctgtctatgctacccatgttactggtgatataattgggacatgtagttatatagacccagagtatttgacaaaaggccggcttatcgtaaaaaatgatgtttatagctttggagtggtgttgtgtgagctcttctcatcaaagctggcaaagaattgggttatgaatgaagaggatagtcttgctaccattttaagcagaaaaattgaaaaccaaactttggtggagctgttggatccaagactcggctttgaatcaaaccttaagatcaagcggatgatgactgctacagctgaacttgccatttatgcatgaaat

SEQ ID NO: 149693 - DNA, 228 bp, Glycine max
gcttattcttcgacttagagtagtagcagatgttctggaactctatggaaagggggggggggggtcactgttttccaaccccgtgggctccttcatcgactggaattcgtccaacgccttgatgcggaacttcaacatccactgcaactctcctttcacggatgggatcacacccacagcatcacccttcgacaatggtgattctgacgatgacaatgggtctcaaca

SEQ ID NO: 149694 - DNA, 400 bp, Glycine max
  unsure (1)..(400): unsure at all n locations
agcttcgactntactattcttctctcgctttcttaacccctctcttcaaaggtacttcctctctttgttcaaaggtcccttgctcttttcttatattttgtttaattaatcgaatcatcatcttcgctttcttttttctttttttttatgtatatattcggacaaaatcaatacacacttgatacaagcatgttgtttgcttgcagggtatacaacaagacgaagagattcgaaggattcaaagagaaaataaggccaggtattgctctaaccttcgttaaattagttatcaggttcagttaacttacctagttgttgagagtgaaaactgagaatcaagatttttttaaaacaaactgcttttgacaatcttctggaattcctttgcattatgactcac

SEQ ID NO: 149695 - DNA, 438 bp, Glycine max
  unsure (1)..(438): unsure at all n locations
tgtaganaccaaagagatcgagatatatagagaaaatctatcttgtataaaccatagaaagaaataatttttntgaattgatttttttactgctttgagttgcttactaattataacaaaatttcacatgaaggcttgtctgtttggccttattgtgaaatattgtggagtacacacgttgacaacaattttgtgtgtctgctactctgctgtcatataaaaacactaaaaagaattttggcaaaacaccatgaagagttaaaagatatgtctagttttctacatcggttcaggccaaaaccgatgtagaattctagacattctacatcggttattagaatgaccgatgttgaaatctgatattctacatcagttacaatgacacgtgataaccgatgtaaaaaggtgccgataaccgatgtataaagcctatttttt

SEQ ID NO: 149696 - DNA, 444 bp, Glycine max
agcttcaacctagaggagacggactttttctttgttggagaagatcaacgaccatgcctacaagattgacttgcctagtgagtataatgtaagtgccactttcaatgtgtctgatctatctctttttgatgcagatggaggagccttggatttgaggacaaatccttttcaagaaagagggagtgatgaggacataaccaagggcaaggaccatgaagcacttgaaggtcccatgaccagaggcagacttaaacaagcccaacacgtcatagagacaaggctggtcatttgtatagctgccattgatgatgattgaaggcccaagtggagaaagatgaaggcccacaggcagaggcactaccaaaactactaattgttgttgaaggcccaaactaacttgaagcccaagttaaataagtttttagttataatttattcttattg

SEQ ID NO: 149697 - DNA, 454 bp, Glycine max
  unsure (1)..(454): unsure at all n locations
tgcaaaggctgtcactggagctgactcttcatcntttctatnctctttagactggcgattcctaggctcttgatcttgacttgatagaacctctttttaagccaacgcgtttgactcgatcccatgttttactaaaatggaataaaaactagtgcgaatcaagactttgacacctatcacaggtgaaatggatgaatgcatgaagaaatggtatggcacaaatgcattttacggatacgagagctcgggagattatctcattcttacatacaacattcgggcggcatagcgcccgatgcatgcatttaagaaggtgacatggaccttttgtcttctcgtgacaaagtgaggggatcaagacgcaacccgtgcatgatgacatgatgcatatgcgaaaaagacagggataacacggagatgtacacaacatggcaatattcacaaataatcatac

SEQ ID NO: 149698 - DNA, 446 bp, Glycine max
  unsure (1)..(446): unsure at all n locations
agcttcttggacttgggttttctctctttatttcacacatgccaatcttgaagagtggaatctctctgtctttctcctcaactntgcacacaaccttggtttcttcaaagttgttcttcttcttgttgttgttgtcatgaaagccaatctctgcatcctccaatgatggtggaagtggtggtggtggtggcggctcatcactcccagggtcaagctctgacaatggcattgtgaacccatcagcagcaaaagggtatgctgctgatacttcactgctgtaagggctgtcaaatcttggagctgaaaatgcaccaaatgttgggttctcaagagaagtgtcaaaactccaacaacagccattagacaatagctcacagaatccagtggacaaagcattccatgagtctcttctaggagctaccaactcttctaggaaaccaagttga

SEQ ID NO: 149699 - DNA, 439 bp, Glycine max
  unsure (1)..(439): unsure at all n locations
tctaaactntatacaagaatgaagctctgatacttcttttatacaagnggcctcagatatcttaagaagggggggttgaattaagatatcacaaactatttccccaattaaaattctatttcactttctattcaagttacaaattcccttaataatgaaattcttaaatattgattcagatagaacaatttgaatataaatataaaacaataataaataaaggagtttaagggaagagaaagtgcaaactcagatttatactggttcggccacacccttgtgcctatgtccagtccccaagcaacccacttgagagttccactatcttgtaaaatccttttacaagttctaaacacacaaggacaatccttcctttgtgttagagttctttacaacaagagaccctcggtctcttatcccttagagaattagaaagaga

SEQ ID NO: 149700 - DNA, 440 bp, Glycine max
  unsure (1)..(440): unsure at all n locations
agcttcataaccatgttcccattggacattcttatgtaagaaacaactttatgcattcaatattaacacaaaattaaaaacctcaacattaacatcaaccataggtatattggcacaaacctaccttcattctccatatataattttctgaagttacaatagtttagatagacatgtacctctttccaataacgtggcacttgttgaacttagaaacgcgtacacaatgctgcatccatgcaacacattagtaattttgatgcaacaaaacatataatttgaagtatgaattagttcaaaaattggtaataaacacaaattataaataacaacttcacatgaagatacatcaatgtagttgtcaacctcatatntgtgtaggttgattgggctatcatcaacactatcgacatcctcagctacacaatgacttgtaaaat

SEQ ID NO: 149701 - DNA, 465 bp, Glycine max
  unsure (1)..(465): unsure at all n locations
tactaagccaattaacttgttacaagagaatttattccttatatataacatanaantgagctccactaanaaagacaatacgttgaatgacaactcacggatgttggcgaagttggggtatattgctagaaagagagagctggaatttgaagacgactcaaggatcttggtgaaatcagggaatattgctaggaagagagagctggaatatccatcagcctaagaaaattcaaagcaagttccgatcttcttaaaaccaagatttggaagcttcaaacaaatattagtgaatacccaaaattatttaaaacttgaaaaagagaaaatcttcatcaatagcaagatttcccgagtgtcataatgggctaaaacaagacaagcaaagcatatgctgcaacaaaggtgccacgggtttgaagccgtcaagggaaagaaaccatatgcgagcaaacagcaacatgtatg

SEQ ID NO: 149702 - DNA, 408 bp, Glycine max
  unsure (1)..(408): unsure at all n locations
agcttataaaaacaaaattgccgcaatcattttatttatttcatgcgaacnacgacgcatcaacaagaatcaagccaacgctattgtgcaagcattcaatggggcaaatcacaccaaatgattatgatgatggatggctcaaattctcacaaaggtaaactcatcactttcaaattgagctttcacaactatcatgacatgtagagaacaatcaatgatttcaagtcacaaaatgtcaagaactgttattttcaaaacaattacccatttcttgaacatatcctataatccaaagaaaaacatgcaaagtcgtacatgcacacaaaattgacccaaaatattaaactaaaaatctgacgaaactaacaacattaacaaattaacacaactaacaaattaacaaaacca

SEQ ID NO: 149703 - DNA, 459 bp, Glycine max
  unsure (1)..(459): unsure at all n locations
ctggtgtttggtacccacatcatctgctgtctgctggggtttctntgagttccatgaagtggatggccatgtagatgatagcaaaagggctttatgtgaccatacttgccacagtagtgacacctccacttctttcttttgctccttttctgctgcgttccatgatgtcgagaccgatgttgtgacatcgtggctccagtgctgtttttggcaggaacaaattctgtcatggttgttctgccagcagacttaggattaaatccaagtcctctctggtttccaacattctttccaagctgcagcacctcatcaagcgtatctgagcctttattcagcatctttattgatnttgtcatgttgtccagnttagagttcagaaaaccaacttctcctttaagctcagagatctcctcttcatgtgcctccttttcagcctcagatctgaatgaccttcttcag

SEQ ID NO: 149704 - DNA, 426 bp, Glycine max
  unsure (1)..(426): unsure at all n locations
agcttgaatgctcatctactctttcattctccatttttatgactaggaagnattcaagtttctagctcaactcacactcttttctttgcttcattgagtcaacaaagagttaagggaggattatttcatttcttaaggcccatactatgttgctaggcactagaacttcatttacatgatgattgtgtatgtttaacacaaatcctgtaacgctgtaactgtggtttgatataaaatttgcatgaaatgaatttctacaactcttggaatttaagaaacaagtttgggaactttatgggccaagtgcacggaatnttcgaaatctaaccaaatgagagaggaattggagaattctgagtccaaaactgaactccttacatatatggtctgcctcacttggatttctacatcaataggaatgttgtt

SEQ ID NO: 149705 - DNA, 476 bp, Glycine max
  unsure (1)..(476): unsure at all n locations
cctacagcaacctcaccaatagaacacgatatcgtgtttacttcaagatctttgngcttgggtggaagaatgcattgaatcacaacactacagttaccttccacaacaattttgtcactatggatgtaccgattcttcttggttaacatatccttcaaaaattttgcatagaggggcatttgttgaagtgcttctccaaatggcaaagtaatttccagtttcttgaagatatcaagaaatctatccaaatgtcactctttatcttttctggagagtgccaatggataaggtgtctccttgcattcagtaggagtagcctctttattcttttctattntagcctcactcttgcctttcttcttctcaatcttgacaaccttctctttttgtgtttcatctttcaactttatatggtgtttcttccttttctcttggtccttcttcttgttcttattcttccttcttcttaatctctc

SEQ ID NO: 149706 - DNA, 453 bp, Glycine max
  unsure (1)..(453): unsure at all n locations
agcttatgcgcatattttcttacgaacgtttatttttattatacgtnctatcaactaacaaaaatgcacccatatacaatcaaagtgccttcattacctatattatttacatgtacttacaacgcgtatttgttatttacatcacacacgcctccttggctgaattcacatacatgcatactcaaagcattttgtggtaccaaaaactgcacatgcgctcatcatggtatttctaatacccatacatatacaaacttcacgatgaatcttgactacctacacaataaggagctacatttcatgctttgtgtatcaagtttcggctacctaaagccacatgcaaattcaagcatattgtccttcgctgactacaattgtatacaaactagaacgtatatattttctgtattatgttgtcttcacactacctgcaacatatatatatataatttt

SEQ ID NO: 149707 - DNA, 416 bp, Glycine max
accttagaatcgtcaaactcctccaccatatgactatagatccggggagaagtgaagattatactggttccgcccctcctgcactagtggtctttctcgaaatacctgaggacaacttatttacctgaagaaaatccaagcgcgaagctcttgcgtaacgcttacgtgagtgagctctccaacgctctccacatttccccctcgacatcatgacggcatggtctctccataggcaaagtcctctgaccatcactctttaatattgctaacgcccggcggtggtctcccatacccgtgcatgtaaagcatctatctgatgtggcaagcccggctacccccacttgacgtctccacccaagcttgtacctctgttcttgcttgacccgatgctacatttcatgtccgcccgactgggc

SEQ ID NO: 149708 - DNA, 421 bp, Glycine max
agcttgcttctacacaataacgtcaagcccactggttgtatcttacaacctggatgcatgctgcatgggtcattggctggatggatgacatgtgtatcccgccagtgccaccaaccggaatctttaggttggtgatcgcttttcccaatggcgaaatcagtacctatgtgcatgcggcatgggtcattggctggatggatggcatgtgtatcccgctagtgccagcagaagaatattttggttagtaatcactttttccaatgacagaatcagtgcatgtatgttctgcaaccctaaccctatacctgaaaccctacaaaaactacaaagaacgcagcatgcatgaacccctgctacactgcgttgaatccctgctccctctgccctctgaaacacgcctgtcctactggcggtatcaatg

SEQ ID NO: 149709 - DNA, 415 bp, Glycine max
accttgaatctaagctgctcataagctgaaccattttatcaatgaacacaagtttatttttattcagaaaattagagtttatctcttttatcttagtgagagtgattctcctaaattcttgagtgattcaagaacaccctgtctgtatcaaaggactttcacaacctttgtgtgttgccctcgccggaaagagtgattatttccttcctttcatcttcaaccttgttctctcaaaccacaatttcagaaaatacacttctgcccagaattatctcgtggccataacttccgttttacgcactcaaattaagtgattcccgagctttaattgaatttcaagacacgacctttcacctcgttgtggaatcatctcattctgagccctatagcttgagtgattggcatgtctatatta

SEQ ID NO: 149710 - DNA, 185 bp, Glycine max
agcttcaagaaaaagatggcctcagcaatctttcttatttctttgattggaattctatcacatagacctacaagtctttatatggagagcggttaccacttacatggaacaacaccgagatgcgaaagtttttatttgagggcaatacgactctaaatatttcgggaaagccatatgaaatacgg

SEQ ID NO: 149711 - DNA, 351 bp, Glycine max
atagatgtctaattcctgactccacacttgagatgtaggaatattcatcactagactcattttactaacctggcctgacatataaagattgaccatgaagagatttttttaataggttcgagcctgagaaactatatctaatgcattttgagaatatgttcaagttatattttgggtcgccttatttctagttattctggcttttcaggttgccttaacctgagaaaatgccacatattctctgaaaatgtccaatctattaaaaattgtggaaataatataacttctaactatataatgtttcgtctacataatatggcctctgatataatttatacaattcatcttcga

SEQ ID NO: 149712 - DNA, 417 bp, Glycine max
tcacctgccgcatgcaacttctactaaggagaggtggagtttttatatttgggggacaaacagacttatattttggggactggaaccagtgaaggggttccacgtgtcagctgcttgactaatcctttacacaaatgtgaggtacataacattatttaacacacaaccatgttcatgttattgtaatggatgaatgaatctgacatcatggaattaaatcttttgggtttttattggttttggtgttatggttattggttattgcaggtgtgttcaaaagctgctcaaccgggtaataagaataggagacttaacacaagcatcctcattcgtcaccccggttcctcatgaacacacaataatacttctatagatgctggaaagtatgtttttacgtgcactatgtagtatgcattc

SEQ ID NO: 149713 - DNA, 392 bp, Glycine max
gcttgtgcgaatctttccctttgtgcgagtgatattatgtgttagatagaattcattagtcaaggcaaggttgtttggttttgtctttatcgggtacccaaattgtcgtcgagcgaggagtgggttgtagctaattccgccacgcatacccaaaagaggtacgttgggatattcaccacaactcacaataatctctccaacatcactagctgcttggtaccaaacaatgtcggatgggtcaagagtcatgattctgctaggccaataaagcttatcatcattggtcttgaaggcactggattgaggtaagtggaacgtaaaccactgattgagtaaatgtgcacaacaagacatggttccactgacagcctcggtactgtcatggatagaat

SEQ ID NO: 149714 - DNA, 467 bp, Glycine max
  unsure (1)..(467): unsure at all n locations
gatccttaagtcacctgcagctgcagctgtattttctccacagttgttttttgtccatgatggattggaccaattgacaccaacctgtgtgagtaatgcttggcaaaatgttttcgatctcggagataatgtgctaccctttgtatctttggggctgaagtttgtggtattagctttgctttttctagttgggtaaactttatgctgaggtgtggtgtttcagtcatgttgtaaaataacgttattgaaggattggtgtggggtatatgcctaggttttctaaattaatacgattcacggttcatgaaaaccacttcaagttacagtntatataatcgaaattaggagtatatatagcaaacgcctgatcatctgaattatgattagtagagtatataanattcaaaatgaattacgacaacaaattaaaagtactttcggctatatgaattatataaccaagtact

SEQ ID NO: 149715 - DNA, 347 bp, Glycine max
  unsure (1)..(347): unsure at all n locations
agatactaagcttgcatgattacattctcccctttctaagcatattctttattcttctngacatcatcaagatcttcatgatttacattctgcccctttttgatgatgacaaccacctgtaggttaggagcaacaacaaagaaaaaatatctatttgcatatagtttactcccccttggttttgcaatgattgcttatatgagacaattgaagatttcatatttttcatatgtaaacaaattgtctcataaacaatagataattattcttactattttatcttttatctctctctccncctttgtcaacatcaaaaacaaatcatgaatagagaggagaaagatgtt

SEQ ID NO: 149716 - DNA, 420 bp, Glycine max
agcttgtagatgtgaaaggtactttctattctgtatttggtgaaggttttctacactactactcatatagatagagagattggttttttgtgtgaaaaggtaaaggggaagtctattgtgatggcccctgagttatggaaggacattgatggactgcctaatgaagggatgattgccaatgaaaagggtctcaaggatgttggggtaaaattcaacaaggtgtctacccaccaaagtctggcgaagaatccatcaagtttttaagctaacggttgcaaaaataaaaggaacgaaagatctgggtctggacctttgaagatggaaacaaggttgttggcctatgtgatagcatggatcatcactcctaggggaagcaaccatgcacaacttattgagaacgatctactcttaatctatctg

SEQ ID NO: 149717 - DNA, 404 bp, Glycine max
  unsure (1)..(404): unsure at all n locations
ctcagcttataacaattcctatcaaggttagttgtcaagctcatcttttcttctgnngaacacctctagaccaacggttaagcagaggcaggaaacaaagttatccttaaagccctatgctccagaggctcgacaaacccaatggaatctaccactcaattacctgaagccattaccatggcagaagagcatgaccagaggattacccttgaggattattcaagtagttcagtacaataattttttaccagcattgcacgtcttgaagtgcaagctaacaacattaactatccacattccttaattcatttaatacaagggaacttattncaatgattacctaatgaagacccctatgcacacttggcaatgttcattgaaatatgtaacactgttaagattgt

SEQ ID NO: 149718 - DNA, 463 bp, Glycine max
  unsure (1)..(463): unsure at all n locations
agcttggaaggtgacaaacgactctctgttctatctgatgacacgctgagcgcatgcctgcgtgacagatttccttccagattcctcttatccactaagcgagttgatgcctcacttagcggatgacactcgctaagcgcattaagctcgcttagcgagacatcaactttagcacttcttcaaaataactcctttttgcttgaaattgaagagaaattgacattaattccattcataaggcttctactgagcacaaataaaaacaaagcaaaatttatttacaatcctgcaaaaagaaccataaattgggaaaaatatatacattgtgtaaaagttgtctatacaaaagttagtcgtataatacgactaacaaactctcccaaattttataatttgcttggtctcaagcaaagaaagaacaactcacttgtnctcaagtggacaaatcacagtggttattcac

SEQ ID NO: 149719 - DNA, 447 bp, Glycine max
  unsure (1)..(447): unsure at all n locations
gtagttgaacagaataatgcaaaaatgtgcattttngtttgttgaaaaagcataacaagactttctgtgattggtttaaagatacaatctttgcagatgagaatgcttcataaacattaagaaagctagcagatgggcctaaaagaaatgttataacttggcaaggatacgacataaacaagtattcattttacacaaaagcacaagatgacaaatgtacaatgcagaacagcggggttaccctaagggctgaatctcaacactttgcaagtgtcaatgacgccaatccctgtgtatgctccatcccttactttgggttcattgatgaaatttgggagcttaactatgtgaaatatacggtatgtgtgttcaaatgtaaatgggtgacaacaacaccggtgtgcgcaccgatgatataggatttgttggacaagtggcctcagatat

SEQ ID NO: 149720 - DNA, 416 bp, Glycine max
  unsure (1)..(416): unsure at all n locations
agcttagaacaataaacttggccttctctttattgtctttgggcttggcgaccacgatcaacaaagtactttcggcacctactatatgttgacttgaccaatgctgttattggaatgttgcgacaatctttcaacacctttttcacacattctgataggttgttttcatgtgaccatatcgtcgtccacatgtatcgtaagccatgctccatttttcttttgaaatgcgatcaatccatcttgctatggctggagtcaattgacgaaattattctaagttttgatcaaacacatgcttgcaaggagtgtacgctgcatcaaatttgttatcatcaaaagtggtacatagacatgaaactcanattatattaatgtataaaatacatcttacccaatttcttgaacatctctttttg

SEQ ID NO: 149721 - DNA, 475 bp, Glycine max
aactataaaactcagcttgttcttttataaatgaaagttctgtactcattctttttctaaaacctggggtggatccaagtgctccgatcatccattgcatactcatgttttggtggcatactcacggttgtttttttctttaggaatttcatcataactaagaaaacaccaaggcacccctataacactcgatccagaaaaatggataatgaagagggcgtgcaggaacagatgaaggccgatctatcggccttaaaagatcaaatggcttccatttcggaggtcatgttaaaactccagaaaaccatagaggataaagtcacggcaaccgcctccaatacagttagggaagcggagccggtgctgcagcccgccttgaatccggtcctagacagaaacacggccgtgttcggtcgaatgtatagtccgcaagcttatccttatggcctgcctccgaacttcacctcccatgcca

SEQ ID NO: 149722 - DNA, 394 bp, Glycine max
tgggatcataaacattgaaaaactactagcaattattttcctcgtcatgatcaaaattatccttgcaagttgcactttatttttgtcttgatatgccatgaaggatagcatttgatcgttcatgtccatttacttttacccataacctgctgatagtgtttcaggatgccaactgtaataattccacatattttttgtgctgtaggttgttgatggaaagctttcacaaacttgttacctcatggctgttgattcttgctataagaatttctgtcacaagtaagtctctaatgttaaatttagttctaatgaacatatgttttataaatataacatgtgaatataaaatcagaaccattcaaattgattgataatcaactgattgaaagagtca

SEQ ID NO: 149723 - DNA, 471 bp, Glycine max
  unsure (1)..(471): unsure at all n locations
gaactataaaactaagcttgattgaatgatgtgttgataaagttaattcttatatggaaaaattataagttaaccgaaaagctaaaagactattggagttagcaaagaatgttaagttaacttattaaattatcaatgttttgataaaattagttattgaaattgttttttacttgtgtaatttgctttaaagcttgttggactgaaatggaatcatttggtaaaggagtttattttacaaggttgtaacattttttttaaatgctacttaatgtagtatttgagtttataagagtgttttcaatgcaagaatttaatttaggttcttaaatcttttntagtaggttgctttctatcacataagaattaagaacagtcattattttaaattctggtggtaaaatctaacttgagtcttaacatatatctctatatagtgtcattttatctctccactgtcaaaaacaccct

SEQ ID NO: 149724 - DNA, 395 bp, Glycine max
  unsure (1)..(395): unsure at all n locations
tcctcacagtcacctgcggcatgcaagctntgactganatcaggcaccacatttttttttttatataaagtttagntntttagtgtaaaggttgaagattttttgtaaacaattttcattaaaactcatgtgatatgtgtgtgattcggttctatacataaattaaatgtcattaatgagtaaggggaagataatgtaacgtttagtaaataattacgagaatatttgtaggttttaaaaatagaaaaaaatatgtgtaattntttcaaatttttgagagaaatctatatcatttactcatataaacattgcataaaaatatatattgaatataacaatatcttttacaaataattaatataagtttattcattaagaaagctgcctagcatgca

SEQ ID NO: 149725 - DNA, 478 bp, Glycine max
  unsure (1)..(478): unsure at all n locations
tgtagacactntatcagttaaaagtattgatcatgtatttggttttattaattattaagaagtacaagataatagtctattaatttgtacatgacagatgttattttttgttgataaagaaaaggtagaaagaaagaaacaaatgaaatgaaaagattttttattgtttttttattttggacacgcttgcattgctttgcaaccagagatattgggtttttaatggtatggcccagtcttccatctttaaagttgtttagaactagagggtgatgctttttaaccaaacaaaaacaaaaaacaacgaaagagtgatgggcctgaaaagattatcacacaaacagttttattagatacgtactgnggaatttctcgtgcatccagattttttctacatccaacactgtntcgtgtttttccaaaattatctctactcgtaatctataagagacccactgattcttaatccattagagta

SEQ ID NO: 149726 - DNA, 460 bp, Glycine max
  unsure (1)..(460): unsure at all n locations
agcttctagccaaatggacttaccttgaatttatttctttgatagcccttntgagccttgtttccctttccttgttttgaagctcactacaagccttaagtgaaaaaccatgatattaccatatccttaaggaattttggagctttggaattgttttgggaataagtgtggggggtttttgtttcattggacaacttgttttgttgactatgcttcatgatgtattttgggccatacttgatgtacattgtatattggttaaatgttggacatgctgaatgaaatgttgtttctcaaaggtaaaaaanaaaaaaaagaaaaaaaaaagcaataaagttgagtgaataagatctttaatggcacaagaatgatgaaactcttggctctactcttcatgtntaatgtgtatccttactctcttntattttcttaatttctttcttaatatgcacttattccc

SEQ ID NO: 149727 - DNA, 457 bp, Glycine max
cgaatgtgatgcatctaaggatcgcataggggctgcgtttatgctagaggggcatcccattgcatatattagtgagaaattgaatgaggctgctcttagctattctacatatgataaggaatagtatgccttaattacagctatgccgatgcggcaacattatctcttgcccaacgaatttgttattcacaatgatcatgagtctttgaaatacttgaaaggacaatgaaattcgaacaagaggcatgccaagccggtggaatttctagaacaattcctctatgtaatcaaacacaagaaaggcttgcctccgtccaagagaggaaagggcttggatctctaggcggttgataggctttctaagatggctcacttcatagcatgtcagaaggtctacgacactagtcatgtcgttgatctagttctcagagatgtggtcagactacatggtctacct

SEQ ID NO: 149728 - DNA, 439 bp, Glycine max
  unsure (1)..(439): unsure at all n locations
agcttgtaatcgattacacatatactgttatctattaccatagcaaatnntcagaaaatattctcaacaatcacatctttttatgtggttcttgaatggctatcaaaggcctatatatatgtgacttgagacacgaatttgctaaaagtttttcagaacaaaaaggtcttatcctcttataaagcaaaattgttttatcctcttacaaattccttggccaaattacttgtgattcaataaggaattatttgagtgctcaaattgttcaatctatctctttcaagagagatttcttctttcttcttcttcattctgaaaagggattaagagaccgacggtctcttgttgtgaaagaattctaaacacaaaggaagggttgtccttgtgtgtttagaactctgtaaaggaatttacaagatagtggaactctcaagcgggt

SEQ ID NO: 149729 - DNA, 404 bp, Glycine max
gttcagaatagactggttattgcagagacgtgtttggtttctgagtgcaggatgcagatgctggaccgtattcaaaactctcatttcagaggaatgccatatctatgaaggccgggtctatcatgggacgagaggacaagaggtttgtgtaccgcttacggggctcggtccgtgacaacaatgatcgcgaggggctggctgaacgcattaactgttatatgccctgcagatgccccagactccgactcgaagtgccggcgcgctaccgagatggcttgcccatttgaggagttgtctccggatttccacccaggaatatgagacagactgaatatagatgaacacttgggcttagaaaggaggcatcaggacgaagatgggtgcacatctgctggagaaaaaaa

SEQ ID NO: 149730 - DNA, 180 bp, Glycine max
actgaggggacaaacatacatgcaaaaactaataacaagcaaaaggattaacctgattaacacctctgctacgtcacggaccgtctaaaaagtacttcacttctcaaagtgattcaaattcgcactcacttgtatagcgcgtatacccaaactcacctcctcactaagggttcggaagtc

SEQ ID NO: 149731 - DNA, 450 bp, Glycine max
  unsure (1)..(450): unsure at all n locations
agctggcaaagaatatatgtggcattatcttctggttcttattttatttgatccaataagatgaaaattataataaaagtaagatgttcaatttttttaataataacatatttaccattttaattttttttaaatacattctaagacagttcttagaaaaaccgtcttaaaaagtatactttctaagacagtttttgaaagaaccatcttagaattctcaatttttattttttttttaaaaattcattttaagacgatttttaacttagaatcatcttagaaagatattttttaaagatgattgtatgttaaaaaccgtcttataatagtatccttctaagacgaattttacttcagaaccgccttaaaatgatattattattctaagatgattttatgtaagaatcgccttaaaatgtgtaattctaanggatcttttctaattatatg

SEQ ID NO: 149732 - DNA, 425 bp, Glycine max
atatgtgaaaggatgtgactcttcacaataaatgtgtttttcatcttttacgcacactgttaatcgattacaccattttgaaatcaattagaatgttgtaaattcagttgaaagcttttttaaaacaattttgctactggtaatcgattaccagagagtaaaaactctctggtaaaaggttgtgtgaaaattcatgtgctattcaaagctttgaaaaactttttagtacttatcttgattgagtattttcttgattcttgaatcttcaacttgtctattcttgattcttgattcttgattcttgattcttgaaacttgattcttgaatcttgaatacaaatttctcttgattcttgaagtgttcttgactcaatcttgaactcattcttgaatgtcattatctttgttatcatgaagtgatcttg

SEQ ID NO: 149733 - DNA, 426 bp, Glycine max
  unsure (1)..(426): unsure at all n locations
aattctatcaacagacctccaatctttaatggagagggttaccactactggaaaacccgaatgcaaatttttatcgaggcaatagatctaaatatctgggaagccatagaaatagggccttatatacccaccacagtagaaagagtttcaatagatggtagttcatcaagtgaaagcataaccatagaaaaacctatagatagatggtctgaagaggatagaaaacgtgtacaatacaacctaaaagccaaaaacataataacatctgccctaggaatggatgaatatttcagagtntcaaattgcaagagtgctaaggaaatgtgggacactcttcgattaacacatgaaggaactacagatgttaaaagatctaggataaatgcactaactcatgagtatgaattatttagaatgaatacaaat

SEQ ID NO: 149734 - DNA, 477 bp, Glycine max
gggaaggatgcttcaatggaggaaaagagagatttagatttattagagaggggggagcacaagattgaaggaaaaaaagggagagaagttgaactttgagttgtgtctcacaagactctcattcatcaaagttaccacaagtgttacacatgtttctatttatagactaagtagcttccttgagaagctttcttaagaaaaattccttgagaagcttctttgagaaaacttccttgagaagctagagcttagctacacacacccctctaataactaagctcacctccttgagaagcttccttgaaaagattcctaaagaagctagagcttaactacacacacctctctaatagctaagctcacctccttgagatgagaagctagaacttagctacacaccccctataatagctaagctcacctccatgacaaaatacatgataatacaaaaaaagtccatactacaaagactactca

SEQ ID NO: 149735 - DNA, 449 bp, Glycine max
  unsure (1)..(449): unsure at all n locations
agctntaacctcatcgtctctcattgtctttatatttgggagccaatccaatccttgtgttcggactctcagccacttatgatagccgtcgatgatcccattactgcttcccctaagctctctgtcctttcttcacgccgcatcccatgccttgcgaactccttggagtaccctcgcgttgtggtcactgaaaccccgtgcgatgaaaggcgtgatgctttcgtctaatggcgctcctctcatggggtagccaagctgtcttatggcgagaacgggattataattaatacaaccccttgttcccatcaagggaacatttggacatccttcgcatgaagatagaatcttgattcttccttccttctagcgagggaaccaattaacagaacgccccccatgctagccaagaggttggcccaattcgccttttctttntcaacgcacgagcg

SEQ ID NO: 149736 - DNA, 394 bp, Glycine max
tccattgttcaatttcgagtgtctcgagtagtattatgcgtttgtttcggacctccgaatgaaaagttatgaccatttgaatttctcgagagctacctttgttcaatttcgtgcgtctcgatatattatgcgcctgaatcggacctccgagtgaaaagttatgaccatttgaatttctcgagagctaccgatgttcaatttcaagcgtctcgatatactatgcgactgaatctgacctccgagtgaaaagttatgaccatatgaatttctcaagagcttccgatcgtcaatttagagcgtctctaactgttatgcgcctgaatcagacatgcgagtgaaaagttatgaccatcttgatttctcgagaacttcctatgcttcattatgggcgtct

SEQ ID NO: 149737 - DNA, 423 bp, Glycine max
agcttctacttatgtggcagggctggctttcttcactttcttgtctccaacgcgagctttgaccactgctcttccttcccgcgatgcttcttttcatatccgcctgagtgggcttatagcctaaaccatacttcccacgatttcctttggcatttatcaggctagttatgccgccgttgtctttgcctaaacccattccgggttcgtaaccgttccccaacataactcgggccatcattactgctgcatcggacaggcaaggctgcccagagaaggagtccacggaggaaatgctaaccacctcaaaagactggaaagcggtttctaacgattcttctgcggcttccacataaggcatagaggatgggcaactcaccaagatgtcttcctcgcctgacacgatgaccaagtgcccctacacta

SEQ ID NO: 149738 - DNA, 443 bp, Glycine max
  unsure (1)..(443): unsure at all n locations
tatntctggtaaacttcgatctacatgggattgttcttttgttattactaatgttttttcccgatggtgcagttgagattaaaaatgaagttactagcaaattttcaaagtgaacgatcaccaactcaagctttttcgtgagagcctccaagtagagaaggaatttgtggtggacctctctttggtcttgccaattttatgtgataacgtgccttgaatggcatttgaggagtttcctttcccttttcttttataagttgtctctttgttttcatttcattgcatgctcacattgaggacaatgtgcatctcacgtgtggggggagggtttagaaaaatttgtttctattcttatgtttccatttctgattctggtttatttttgtattgaatctgaactgtatgctgttttggttgctgatcgtttgtgtgccgttattgtc

SEQ ID NO: 149739 - DNA, 452 bp, Glycine max
  unsure (1)..(452): unsure at all n locations
agcttgaaggtgtgtagcccaccttctttttatattanaatactggtaatgtgtctactatcattgttatcatttcttctccatcatttgaggtgccacttgagctgccaggtctctccacttttggaagtattctttgaaagattcgcgcccctctttgcacatgttctgtagttgcatcctatccggaaccatatcaaaattgtactgatactgcctaacgaaggcaaccattaggtccttccaagaatggactcgggaaggttccaagttagcgtaccacgtaacagctacccccgtaagactttcttggaagaaatgtattagcagttcctcatcttttgtgtaagcccccatcttccgacaatacatctttagatggttcttggggcaagtagtcccctcgtacttgacanagtccggcacctttgaacttgggaagggtgatgata

SEQ ID NO: 149740 - DNA, 320 bp, Glycine max
cccgaccgcacttcggctcttcaacgagaaagtctctaaaatcgagtccctctatagattctatacacccgtaggggtccatactagtcttatggactatgactctgagttcgcttactctcaccattctcttcttgcgatataacgagcgttgagtcgctcaataaactgggttcttcacacattattgacatatagagagaccactcgacatttgtgtagcaacccgctcaatacagttaaaacatatgtggaactgagcgctacttcgttaccttgtcgaaaccgagagatgaaactgataatttaaaatcaaaatg

SEQ ID NO: 149741 - DNA, 451 bp, Glycine max
  unsure (1)..(451): unsure at all n locations
ggatctaagcactgcagctgcactctacttggggctttttctttttatttaagaangaatattcttattattagtatttaatgttgagggtttcacagtctttgcttgggaaaagtaattaattagcgatagtagcgagaacaatgttgttgaaaaaggttttgtttgcgggagtgaagtcaaagtgttggaagaaaaaggtgtatgatcgcgtgaaatggaagatacgagttgttcagtgcttgtcggccgtcatgcatgcaaacgaggaaaacttgtttggtccttcttccatgatgctccagttcctatgaaactactacttcatttacctttttcgatctttgccagtactttgaaaacgcattttagctcatttacctaacaaacatgtacctaaggtttgttcatatttattaatattctataattaaacagcgatctttactta

SEQ ID NO: 149742 - DNA, 395 bp, Glycine max
  unsure (1)..(395): unsure at all n locations
ggaacaagaatctaagcttgacatatnaaggaaaggagcgaggcctttcgcttgttacaagaatccttaaaggaagcaaaataaagcaatctgttcgttggttttttgttcagaagattatgataaaatttggcggcttcaagattagaaagaaggtaatggcaaaaaaataatctatgaaggtatgttatttgtggatatcacaattggttcattctttcatggtacaaatgtagtggcatttgagcccggcttgttttatgtgcaatttgctggttaataataatcaatagtttctaattggcttcacatctaagttcttctcaacttcctaacattctgcgtctgtgtcatgccatcattggctgaatatgattacccatttttttttatcc

SEQ ID NO: 149743 - DNA, 446 bp, Glycine max
  unsure (1)..(446): unsure at all n locations
agcttgaagatagtatgtcttntacatgttctactctntngagtgacatttgtattgattattgtatgtgtgttgcatcttactctctatcttttcatatgtgcatcatgcatcatcatgtaggagtaagaagaaaggttctaaagttagaaaatttcttctgtgtttaaaactctctatttttatcgattacaggctaatcgtaattgattacataagtgttcatagcttgcagataagttttcatatcggtttaatcgattacaagcttatcgtaatcgattacacagttctttttgagacaatgattggtttttcagcactatctgctttaatcgattactaggtgatcataatcggctacttctctcttanagtattttgaagtgtcaagaacatttaatctattcatcgancactaatcgattaaattttcttgaaagttt

SEQ ID NO: 149744 - DNA, 481 bp, Glycine max
  unsure (1)..(481): unsure at all n locations
ggaccttaaatactcagcttgtttgatgcccgatgcggtggancataatcattctgtgggcatcccctatgaatgacatgcatctctntatgtccttgcaaactaaaattaatttgttctttgttcctttttcttttccactattttaacttacagggggcaactctatttgcaaaggatttacagaggtaaatggagtaaattaaacctaagcaccctcatgctgtgaattgaagatatggaatagaaagcactgaaatttttaaaggatacatttcaagtcttagttgcaactaaaaatttcagagctcatttctttcatacttaatgaagaatgaaaataatctatcaagtatcaactatttccaatgcaagttgcaaactcatcttgcttaaatngaaggcataaatcaatatatctttcttgtaaattgcttgcttagcaagttctttagagtatcaacannatgtgaattgaaag

SEQ ID NO: 149745 - DNA, 447 bp, Glycine max
  unsure (1)..(447): unsure at all n locations
tgtagcaaatgcaaacggcaataacatgttactctatattttctatttagtcacgtaatgcatcaaaatgctcgaaattgaaaacagaagctcggtgcaaattcaaacgacaattagtttttactcggatgtccgattgagtcccgtaatatatcgagacgctcgaaattgaaaacggaagcttgttctaaattcaaacgacaatcattttttactcggatgtccgatggagtcccgtaatatatcgagacgctcgaaattgaaaacagaagctctgagcaaattcaaacgacaataactnttttttcgaatgtccgatggagtcccgtaatatatcgagacgctcctaatggaaaacagaggctctgaaaaaaattctaacaacaataactttntattctgatgttcgatggagtccagtaatatatcaagacgctcgtagttgaa

SEQ ID NO: 149746 - DNA, 314 bp, Glycine max
  unsure (1)..(314): unsure at all n locations
gcactgcggctgcagcttgggaattaccctgatcccatgtctattttgatctgctaccatccttgatcaccaaccagatggtggtggtgaatcctgagaagatctaccaatctcccttccctcgatggtacaaccccaatgcaacttgtgcctatcataagggtgtcccgggacattcaataaagcaatgtgtggcctttaaacacaaggtccaaagtttgattgatgcacggtggctgacatttcatgagtacaacccgaatgtgaggacgaatcctcttgccagncatgggggatcggcggataatgccgct

SEQ ID NO: 149747 - DNA, 346 bp, Glycine max
  unsure (1)..(346): unsure at all n locations
gctgggaactttcgtgtccnngngcgcgtgcatgagaggattttatttttatttaaatgcantcactgtgattaatggtctaacatctgttttaaatattatgtagtcgttataattacaacttcacagttaagtccatggaaatgtaaatcatgagggcataaatatatggatgtgagattctttcatctgagcaattatttagtctctaaattctatatattgatgagtgaaaaattcgaaaagaaagcaccgtaccaattataagattctgatttaaacatgattacctctagcccattcttaactaagttcattcatatgtaagaggtgatcttagatttct

SEQ ID NO: 149748 - DNA, 476 bp, Glycine max
  unsure (1)..(476): unsure at all n locations
tctgagtcacctgcggcatgcaagcttccaggttaaaggtaaatattcaaaaatctgtttttatgccttccaagaatattccaaggaggaagttgagtaaatttacttcgattatagaatttgctcacacaaccaatttgggaagatatctgggatttcctcttcttacacgaaaggtgaagaaagatgattttgcttatattataaataatatcattcttaggctggctggttggaagggtaaggttttgaaccgagttggtagagtgactatagctaatttagttgttgctgctatccctacttactctatgcaaaatttcgctttcagcgacatgtgtgttgatttttattgtaacaagtgtggcgcgggattggaggacattactcattttcttagagaattttctttntctagacgtgctggattgttggcttccgattttgcgactacacaancatcacttatgctgaat

SEQ ID NO: 149749 - DNA, 478 bp, Glycine max
taagctccttcaactgcacaaggctcttaatatttgaatatgtatctcttgtggaaccttcacttgatgaagacactgacaaaaacttatcttctcctttttggacaaagtgtgacaagcctggggcaagtaaattttcttcccatcagaccttggatgcaactgtgctcgtatccccatgtcagctagatcttgacggatattcaagccatccttcgtcttgccttgaatgtttaggagcgtcccaatcacattatcacatacatttttctccacatgcataacatcaatacaatgtctaacgtccagatcagaccagtatgggagatcaaagaaaatggacctcttcttccatatgcaagtcttactcttatccttcttttgggtctttccaaatacaatattcaggtgttgaacccgctggtatacctgttcaccagtcaacagtatcggtgcaatatcgtgctcttgacttcca

SEQ ID NO: 149750 - DNA, 429 bp, Glycine max
  unsure (1)..(429): unsure at all n locations
ctaagctgaaaattgggagnactattggcactacctaaacattattgactctaccaattttactgaaattactcttttgctcactctaaatccctacacctcctccccttctccttggacttctcactcccctaatcgtgtcgtcttgttgttcaagcatcaccacaccatgtgaccccacctccattcaccaccaccacgcgatctcaccccgtcctccaccactatgcacgaccccacccccatcctccatcactgcatgccacccctcccccatgtagatccatcatacgctccaccctaatcgagatcttgccctgatcaatatccactccatctattgagggtgttgctatcatacaacaattgctagcatatgcgacataagctttggtggagagagataattcacattatatgttaattgaa

SEQ ID NO: 149751 - DNA, 407 bp, Glycine max
agcttgagtatagcaggtgttatatagttatttcttatattgacatagcatttgtcagggataaaaccgttttagctccagaacctctagctgattatcctaccccatatgaaattcctcctgttgattcagctaaacaaccttcactagataatagcccttctgatggctcagctgaatacactcgagtatattcaacgctcttagaatatttcgatctaactcgttatggagcagtggctgatgggaggacaaattctagctctataagctcttgacttgcatctaagaacttagtggtggaggataactttgcatgatctgcagctcctttcgactatttatgcatcttaccaatgtagaataaaactattgtagctagaagcaagtaaacatcatgttctatg

SEQ ID NO: 149752 - DNA, 367 bp, Glycine max
gctataaatactcaagcggcgcgatgcatcacctatcttgctggagcgagcctaccctaatgttcattggcgcgggggctgaggggagaggggttcaacatactgagaaagcatactccactgaagatagtgagaggaaggagaaaaaagactaaaaatcgccgccgatgcacttacgtgatgcttctatgacgtccccctgatcgacttcctgaacatgcttcgacctacctcgtccgttctacatcgatcatcgttctctgatctgttcgttttctatggcaaagcttaggattcattctatgcacccttaagggtccatacttgctttgtatgtcttcaactgcatgctgccaccatcaatatt

SEQ ID NO: 149753 - DNA, 435 bp, Glycine max
atccttaagtcacctgcggcatgcaagctttatgtgtcatattctttcacaccatattattattttgttcaataatatgagttacaccattgcaaatgttcatgttccaaattgtgacaaataaattggtatgaaaaataccacaaggtgtcatttatttcaattgcatttgttaaagcattataatcatgagcggttcgatccgtgtacaaaagcctactcctttcttattcatatgttgcattcaatatagacattataagttgcatccaacataatcctaataagacaaaatggagaaagagagggacgtagcaagcttgtgtagcagcaataattcctactacatatccaataaaatgaatagattacgggtgcatcttccaaggaggaaggcgcgtggagtcgccaccaacgtgtattctaggaaaacat

SEQ ID NO: 149754 - DNA, 478 bp, Glycine max
  unsure (1)..(478): unsure at all n locations
agctggttaaaatgaaagaaaaggataccgaaagtaaacgaattgatgtcttatagcatacaaagcaagaatggaccactaagggtgcatagaatgaattgaaagcttcgagattgaaaactaaccggttgaagatcgaggaacgatgaagaacaaacgaagaacggcgaagaaactttcacataatcgatcacgaaaacgtctcgaaagcgttacggaagcgtcttggctaggatttttttccttccttcttcttctcttcgctaattntaagtgatttttgagctaccaaggtgttgaacccctaaaaattcctcccttcatgccattttataaggaaacgagggaggtggttgtctgccanctcacccaggcaagctgggttgcttccacctgaaccaacctccttctaacaccttccagatgggcccaagtgatatgcatacccccncagttngataagtgcacccctctattt

SEQ ID NO: 149755 - DNA, 390 bp, Glycine max
  unsure (1)..(390): unsure at all n locations
ttattgtgatngacatcggcgatagtctctctctattcgtcctagaagcaaccacatgacaggttatctactctcttcaacaatgcatgatcggaagatgattagcccataacaagagtagcactcgattgatcacgacacgataatatgaaatagaagtccattccactcctataagtactggatctcttcgaacccgtcacacatctcgaacacaagtacacacctgcttacatacttgngtattcatatgttttctcttcttctcctaacttatctacggacttgaacatcacactcttttgtttgcagagtccccctcttgtcactaactaagagcactctctaccgacgagtgacgtacacaactcatcttagccccatccactc

SEQ ID NO: 149756 - DNA, 344 bp, Glycine max
  unsure (1)..(344): unsure at all n locations
caagacacttgcccttccaccatatatgcgagcaagcacaattgttacatcaggtaacaagagtatgtaaagaggcctagaggccaaaactctctctgaaatcatgtaataaaaaactaccagcaatgctattatcagagaactgacggcgcgtgtgggctcagaagctcaaatgcagatattcagctctcttgaagagaaaaaagtatccttattatgcctgagaggttgctctagctgttgtgcgtcatgtgctggatattatgtgtgtgacgggacagaatgaggtttcattatggcaacattacccttagacacttgattatnggctcctgaatagtatc

SEQ ID NO: 149757 - DNA, 452 bp, Glycine max
  unsure (1)..(452): unsure at all n locations
agcttagctattaagaatggagagaagttttactgttatgtttttgggaagttgcaagtgtcacgaattggaacaatgtttctcaaatgttttggagacacaaattcatgtcggagacagtatccaacagtaatagaagagctgtgccgtcattttttctctgcccgatcttaggaagtcaaccaccaacttcgatctacggaggaggagaatttactatagtatataaaggttgtctccaacataacggttcttctgattatatggaccattcttttggatcacaacatgcagccaaaactcgcaggtttcagccatagcgttcatggagcacgtnttatgtcaaagccaaaaccagttagagttagatgcttttggaggtaattctttagtctgaggttactgcattgaatctttgtctattaaactaaattaatatattaataattaat

SEQ ID NO: 149758 - DNA, 470 bp, Glycine max
tactccgcacaatggtgacctcttggaaatgattaggttatttctcctcttgaagactcatggacacttatccctgatccaactacaattcgtgtgtaaggtcagccaaaatgaactaggataaggaatgtgatggattggctcgaaccatctgagcactgacaacaatgtagtagatgtggaacagaaggacacaatagacgtcaatgtccaatgcaatatgaacgaggaagttgctaaattaattgatttatgtatttagtttgtgttcttcaatgaaatcgtagctatccatgattagtgtgttttgaaggtatttattatgttatttttgtgcacgacataaactgcatccattagtaaatcttcataaaataaacaatcatacaagtctcaaattgaaatgacaaacatactacaacatatttaaatagagacataacaatcattcattatgatgcccgtgatga

SEQ ID NO: 149759 - DNA, 474 bp, Glycine max
  unsure (1)..(474): unsure at all n locations
ggagctntacttagaatcttcattgtatattgtgatatttcnttgttcataatagagttttaaattagtggctgatattgacatagaaagaaaaggcaatgaccataagagatttatttacattgaaatgaactaaattgtaacacataataatctcttaagagattgaaaatatagttttaaaaataaaaaaaaaagacattataattttattatgcttagaagaggggagtgtactttaatcaaaagaaaaaaatataaataaaatatataatgtggtgaaaaaaaataaggaaatctagctcatttagttgaataatatgtatgaattattggatatttttttatatatgttttatgaataaattctctttataaaaaaggtgtaaatataaaaaatctagaatgtagaaaatcatataattaaatctgtggttatactttgactaaaataattttcattaagaagtcttt

SEQ ID NO: 149760 - DNA, 471 bp, Glycine max
  unsure (1)..(471): unsure at all n locations
agcttataagcagcctttccaatacgttcctttatttgatggggcccataatatctcttagcaagcttagagtaagcttctaaagttttgaaaatagtggactgatgatgagggcacaatttcaccatgagttagtcctcaaaattaaaattgacatattttcatttcgtataagcaatttgcttcataagagcccgtgccttcaaaagcttcttcctgattttagagaaaacaacttccctattagttaggaattcgtcaatggcctcgagattagaagttctggcaatgtattgaggaatgttgaaaggcttcttgccgaaactaatcttatacagagaagcctcataacccaaatgacatgatgtattttaagaccattcgacccagtttanaaatttacccctcgaggatggcttcttatggacgaaagctctaaagtactatttaattacacgattaaacacctat

SEQ ID NO: 149761 - DNA, 442 bp, Glycine max
tgtactgtaattcagggatcatggcatctcactatcaattcatttctaacagcaacaaaaatgttataaactacaaagccagtcagttgaataaaatagggaattagcaaacaacatataaaaaatacaatgtaaagttgcagtaaactcacccggtccaaacctgctggaaggggatcaaccacaacagtaggaatttcattcatcaagttgtcaggatttccagaatgcagaatcctggtgaatcctcccatctcagacccaggtaacttcttgtgttgtttataccaataatacatgacgcggcattgccatttgttatatggagcatccgttgctgctaacgcgacatgaaagggcgctttagatgtctttcgattcttacatgatcaggcatctcatttatacggtcaaaaacaatgcccatcatcacagccacacc

SEQ ID NO: 149762 - DNA, 367 bp, Glycine max
  unsure (1)..(367): unsure at all n locations
agcttgccacccactcgccatctagttttgtttttcctccacaacaacagccttctggaggaatcttctggagggcccaagtgggcctggttgctatttgcacccccatttntactaaatacacccctgcccttttttggtgattcttttttcgtagagctacggaaatttacgaatatcgtaacgatacttgttttctttccataatgttacagaaccttgcagattacataatcatcccctttttgacttacagaatgttacggaacctcactaattgtgcaacgatgcttccttttgattttcggtgtgtcatggaaccttacggattgtcatcaatatttcttttgattcaggccgcacgaaa

SEQ ID NO: 149763 - DNA, 310 bp, Glycine max
tgccacctagcttgcccaggcgagctaggttgttttcttatatacaaccgccttctggaggaattttctggaaggcccaagtgggcctggttgctatttgcacccccatttatactaagtacaccccctacctttttttggtgattctttttctgttacgttacgaaactttatgaatttcgtaacgacgcttgttttctttccgtattgttacgaaaccttacggactacgtaatcaacccctttttggtttccgggatgttacgaaacttttcggattgcgcactaacactttcttttaatttctggc

SEQ ID NO: 149764 - DNA, 443 bp, Glycine max
  unsure (1)..(443): unsure at all n locations
agcttataagaacaaaattgcctctttcatttccaaatatgcatgtgaattaggacgcatcaacaagaatcaagccaacgctattgtgcaagcaatcaatggggcaaaacacaccaaatgattatgatgatggatggctcaaattctcacaaaggtaaactcatcactttcaaattgagctttcaaaactatcatgacatgtagagaagaatcaaggatttcaagtcacaaaatgtcaagaacttttattttcaaaacaattacccatttcttgaacatatcctataattcaaagaaaaacatgcaaagtcgtacgtgcacacaaaattgacccaaaatattaaactaanaatccgacgaaactaacaacattaacaaattaacacgactaacaaattaacacaaccaaccatactagaataaccaaagacactctctccccc

SEQ ID NO: 149765 - DNA, 467 bp, Glycine max
  unsure (1)..(467): unsure at all n locations
ttggtgggacatcttgacttgctgtcaatctgacttcatcacaaattctgccttcttctattttcagattgggaatgcctctaacagcacttttgtcaaggattttcttcatgcctcttaagtgcagatgtccaaacctttgatgccatattctgacttcatcttctttggaggatagacatgtggaggagtagctggtttcttggggtgtccataggtaacaattgtcctttgatctgctgcccttcattagaacttcactcttctcatttgtcaccaagcattctgactttgtgaagtttacattgaatccttcatcacacagctgactgatgctaatcaagtttgcagtcagtcccttcaccagcagtactttgttcagactatgaagtccattatgaactagctntcccattccaatgatctttcctntagagccatctccacatgtcacataactagtggag

SEQ ID NO: 149766 - DNA, 202 bp, Glycine max
  unsure (1)..(202): unsure at all n locations
agtcactcgcttttatggagccattgtgcanccagccagcgattcgaagccatcaaggggatggtcgtttctccgggagcgacgcgtccagctcatggacgactagtatactgatttccaggaagaaatatggcgccggcggtgggcaccactggttgctcccatggccaaatttgatccacaaatagtccttgagtttatg

SEQ ID NO: 149767 - DNA, 458 bp, Glycine max
tggagaggatgcttcaatggaggagaagattagaatgatggagagaaagagagaggggggagcacgaaattgaaggaagaaaaagggagagaagttgaactttgagttgtgtctcacaagactctcattcatcaaagttacaacaagtgttacacatgcttctatttatagactaggtagcttccttgagaagctttcttaagaaaacttccttgagaagcttccttgagaaaacttccttgagaagctagagcttagctacacacacccatctaaaaacaaagctcacctccttgagaagcttcctagagaagttagctacacacaccatctaaaaactaagctcacctccttgacaaaatacatgagaatacaaaaaaaagtccctactacaaagactactcaaaatgccctgaaatacaaggctaaaaccctatactactagaatggccaaatac

SEQ ID NO: 149768 - DNA, 452 bp, Glycine max
  unsure (1)..(452): unsure at all n locations
agcttatgagtgatacttgatatgtatactttcaatatacaataaaatatgggtaaattaagtaggtttctcaatccccaactggtgacagcttgctctatacaaacgtaaaatcaattaattattgatcaactcaaactcaattgctccaactaatttttgcctcaaaaaaaaaaaaaaaactgctccaactaatttcattgattcagtacctttttctaatactaacatgattggtgcgtgcaattttaatcaaacttggtcaacaaaatcaaacagggttatttggattttaccttcgccttcctttcttaagaaaaattagttttacattnttttaaggcagaaggtcacaggaaagagagttttcctagtttatatccattatctatataaaaataatcaaccgaatgaatgatcactaaaaattactctataaaagagccgtctat

SEQ ID NO: 149769 - DNA, 224 bp, Glycine max
  unsure (1)..(224): unsure at all n locations
tcaattaggtatgacgtannattttatattactattattcaattttatgttagtaatggttctagttagtaattatattacttaaattttcaatcaggtaatataattagaattgatatttaattatttgtaattatttttgttagtaattatatttaaaataaaatataagtgaattcaagaaaatattagatagtattagatagatgtatttaattttttga

SEQ ID NO: 149770 - DNA, 458 bp, Glycine max
  unsure (1)..(458): unsure at all n locations
agcttggcatcatatgttagcagtgttagcatcagttgcttgaatgaagattcaccacctggaactcacgaggaacgcccacgaaggagtatcacgcaacctatgcacttggaggattacatataacgactcaagcagtgactgcatgcatgcatagttaagtcacgatttgtatgaaccatgggttagttagttaggcccttggttagttagttacaacagtgtaagcagttacgaaaccgttagagttgttagatctctgtagcaagcgtaaactcactgtataaaagcttggcccatattcgaataaagcagagaatacacttctgagaaacttatctttagtgaggaggatccttggcctcaaatcaaggaagtatgtggtttncgtttgccatcttcatctccttctccctgaccccacaccagcacataacatcatactntaaaaatttggg

SEQ ID NO: 149771 - DNA, 489 bp, Glycine max
  unsure (1)..(489): unsure at all n locations
caatactcaagcttcacctctctgaagaaaccgagacagtgccttgttccacacaatatcatctgaaccatcatcatcatacataaacaacttcgtcgcataagctttaaactgcttcaattccaaaatgtttttcttacatttaacaacccgcgagagagtgcggagagtgacgtcatcgggacggaatccagttcgatgaaactcagagaagagaagcatcgcttcgtattcgagacatgtgtcgacgtaagccttcatcatgacgttccagagaacaacgtctctcacagccattccgtcgaacagaacgcgtgcctctctgattagtccaaatntggcatatatgttgaccagagcaccggcgacgaacacgtcccattgtaatccgatcttgacggcgtaaccgtggagggacntcgatgcggacggggaagctgagaggatgcacatcttgaagaacggggctagagtgtggcgcgtggtgga

SEQ ID NO: 149772 - DNA, 427 bp, Glycine max
agcttatggaatgaattcaacgatccaactctaactgtatatgaaatcataaaaaatgtgtcgataggcatagataaagatcaatgggctcgctttgttcattatcgtcataaaccatccacattggtacaattagattggtttaattattgaattgctcttatagctagttatatgattactattacaagttgtcaacttgaaattgctttgcatataagaactctgtaggagaaataaagagattcgaagcacgcaagttattccacacactggtggatccaaagctaatcctataagaagaaatgagttggtaatgacactaaatgttaacttctactaattaaaaaagttcaatgtgtacttactctttatatatcttagatgttagaaactgggaagctaccaagtcgtggacaattatata

SEQ ID NO: 149773 - DNA, 458 bp, Glycine max
  unsure (1)..(458): unsure at all n locations
tcggccctntaaacctgttataggactaattatgcactttattttcattcatacttaaattccttctaaatgtgtgttctgtaaattcagattctcctcactaattcttggtcacacttaaaaagtttcatctgaagatatattaggtagaaattgaatacagctccttgccgtgtgtgttgccaaccgaatcatatccattgggtaccaaatatcccatttggtgataaaaatatgcttatatgactattcttacatcaacgaataccctcaggccatgatttgattcaaaactacaaaaaattgaacaacaacccccacaaaactgatatagattatcttcatgtgcatatatgtaaaacatacctganagtgttgctggtgaatatctgaattgcggagaggtaacgaacatagtactgaacaagtgtctcctcattggacaacgtgatgggaac

SEQ ID NO: 149774 - DNA, 445 bp, Glycine max
agcttcacggccgattatgcagcctcagatacaatcttctgggtccccacacttctcattcttaattgtgtttatcattattactataataattaagttgatcactataataaaattgtgtaaaagtaattgtgtttattatttttaactttttatgattacagttaaagttattatcttttaaaataaaaattaatttcaattctgtgtgaagaagagtaaatattttcttaaaaaattattacttataaaagtacacatttaaacaattataaaaaaaataatcccccttcaaaaaagttcttaaataatcccccttcacaagagaaatttaacagtcacttgaataaaactccgcttcattcaaccttaggggctggaatatgttatctaaaagggattgtttacctaagagtaacattgcaattattaatgaacacctatg

SEQ ID NO: 149775 - DNA, 437 bp, Glycine max
  unsure (1)..(437): unsure at all n locations
gggagggcgcanaagtactcaggtaatgtgcgggctagactangattactcgagggaaagataaaatggaccagcatacaaagacagtggttataaaacccacattggataatccagatcaacgatggtgtctattaaacccattgttgtaatgggaagacgacgttgttttcaacaaaaacgccattgaaataaagtacatatatactaaaatactactgcctattaaacaacgacgtttttcagatcaccgtccttgaaagcgcgttgtggaatcaagagtttgtagtagtgaaatgaacatgatgatggtgtgagatcaaaatatacaaacaaaaaatgctggcattaaataaagttgttcatctatccaaaaaaaaaaaacttaccaaagttcacattgcattatctcatttatataattcactcgaccctgt

SEQ ID NO: 149776 - DNA, 320 bp, Glycine max
gtcacctgcggcatgcaagcttatggctacagaactatttcaattatttttatcaactattcacacaaaataattagttagcaatgaacgtttaacaattatctcattccccttgaacattcctaaaatatttttcaatgattagcatataacaagcctatatttcatgaataaacaatagaccaatgggtagaattcaaacatttaacacttacatctgcaaagatgcagcagagtggaagtagacaatataaaaaggcttttgtattaaaggctcaaactcctgaaatttaacaccaaggaaaacaaagggggggggg

SEQ ID NO: 149777 - DNA, 487 bp, Glycine max
  unsure (1)..(487): unsure at all n locations
ctcaagctggcagattccctggtctgagagatgtctttaatgtcctatatctgggcttcaaattctaaatacaactcaaaaagccatgccctttttcctggtctacagtttcaccttcagtgttcagcctccgtgactccatgtataaatttgttttaggcatgtttgcaaattgtatctatcaatctatgttatgcagactatatgcattaatcatttgatttccttttatttcatatggaaacttgatattattattgtttatgtactcttatattactttatcctcgtcttttctttttctccgctgtagccgtttgttcagagggtgcagtctgcacccctttcttcttttgtactcaatgaccttgcgtcaatatatataaaaagtctcttggctaagtattgtgactcaagctntaccaaaatagaactcttaaatctcatgttggtatcatagcgagaacggtcctgctctggagtctca

SEQ ID NO: 149778 - DNA, 417 bp, Glycine max
  unsure (1)..(417): unsure at all n locations
agctttgagccaattcaaacgactataactttttattcggatgtctgatngagtcccgccatatatcgagacgctcgaaattgaatgttgaagctctgagccaattcaggcgacaatatctttttactcggatgtctgattgagtcctttaatataacgagacgctcgaaattgaatgttgaacctctgagcaaattcaaacgacaataactcttttctcggatgtctgattgagtcctgtcatatatcgagacgctcgaaattgaatgttgaagctctgagccaattcaaacgacaataactntttactcggatgtctgattgagtcctgtcatatatcgagacgctcgaaattgaatgtngaagctctgatccaatttaaacgacaatatacttttactcggatgtctgattgag

SEQ ID NO: 149779 - DNA, 425 bp, Glycine max
tgccttgccccttgatatatttgagggactcatgtgtcactatgaatgacaaattccttgggataaaggtagtgttgccatgttttcaaagcccgtactaaggcatacaactctttatcataagttgaatagttaagggtaggaccacttaacttttcactaaaataagcaattggatgaccttcttgcatcaacacagccccaatcccaacatttgaagcatcacactcaatttcaaaagatttttgaaagtttggcaacgcaagtatgggggcattagttagcttttgcttaagaacattgaaagcttcttcttgtttctctccccatttgaaaccagcatttttcttgagcacttcattgagaggtgctgccaatgtgctaaaatccttcacaaatcgtctataaaaacttgctaagccatg

SEQ ID NO: 149780 - DNA, 231 bp, Glycine max
aggacatacactcctatgagctcgatacccacgctgatattgattcggggccggcacgtcacccttttttttgccagccaaaccaccccgacgacgaacgaatgcatatcctccccggagacggatgggacaacacctagtatacccattgcgcgctgttactcgacatcccaagaccaaacggaagtccgatgggtaataccctacatacatctggcctcgaaaaccgtg

SEQ ID NO: 149781 - DNA, 230 bp, Glycine max
ggcaacactcaagctaactattccacatcctcgattcactgatcttcttgcaaaagagacatactttattgacactccaacccatatatctaatgccacgatcggtctaacacatcaacacttctcgacactctgaataaataagaactctgatggctcgaacatccatagcccatttctatctactgatgtgcggaccacaacagcctcatacccatctgacaatacag

SEQ ID NO: 149782 - DNA, 460 bp, Glycine max
  unsure (1)..(460): unsure at all n locations
agcttgtagaatggctagacatgatacatttttttggtttggttggctcaaggataaaagggatgccccacattatttccatgacacaaatgcaaaaatgatgatttggaaattttatgcaaaactggtcatgcatgcacctatgtggacactcaagtgtcaaatttttatggtcatgtgatgctagggctcaggattcatttcctctattttaaatcaacccaatgtttccaaaatatgttcttttatcaatttgtgcattcatccgagtccatttcgggcgtccggggaaaacttcacagcattcacccttcaggtgtatacacatttntttcaaaaactagttatgatcaatgaatntttttcanagaaaagttggaaatcatctcttttcaaaagcatgtcggtttttagctagacaacttatatnntctttttctccttctttnttnttatcatt

SEQ ID NO: 149783 - DNA, 381 bp, Glycine max
gacgcatagaatgcgaagcacccattatcaattacacgcgtctcgatgtattattggatctaatcggacatccgcataacctgatattgtggatagaatttgctcccagcgtctgcttttaatgtcgagaagcctcgatatggttaccggactccatccgacatccgagatgggagttattgccattgacaattgcccagagcggatatatggagggtcgggcgtctccaaatcttagagcactcaatcagacatctaagttaaaagcactcgtcgactgagtttgcccagacctcccgtattaataactaacgtatggaggtaggacgggacatattcacatatttgagtcaaaagcgagtgtggacagaagttgctcct

SEQ ID NO: 149784 - DNA, 437 bp, Glycine max
  unsure (1)..(437): unsure at all n locations
agcttaggaacccaaactttntaaagctttaatgcaagaaaatatactcatgactagggacccaaaatntggtcgtttttaaagttagaaaaaacatgaaaattaggatttgcttgtaagaatttgggctgccccatgattggtactttgcacctaagtaacgtgggaaatgcttttcaatagtgtgtatacataggtaaatataaagggcatgaaattctttgcaaagggtgaaggaatattgaggtcccttcctaaatgaacgtatgatagcacgggattcccttttgaatgcaagtatgtgcataatgtaaatatcttgccaatattcataagtgtgagtgaaacaatgaaagtttgtatggtatatatatttcgagtgtgtgtacgtagtttgtgatagtaaatgtttacgacatagttaagtgttactttga

SEQ ID NO: 149785 - DNA, 444 bp, Glycine max
tgaaccagaatcggtgagagtgtgaccttcaactatgatttatactactcgctcgcagtgataatcatgtcatgaatctctgaattttaaaatgaaatgtataaatgaagacatgatgaaggccatgattgtacatacacaagctctctgaccaaacagcttaccttaaatgataattgcatcctttgctcccttttttagcttaatgatattgtaaaaaaatttgaatcctaaacttaaataaatatctcatgataccttgtttagattctaggagagcatatggttcaaagaaaatttactctgttcaaagaaaatttactctaagattgggggagggaagtcaattccaatgaagagaacaaggttaagcattagcacacacaacatataagttgtctgtttaataaaaagaagacagaaaagaattaactatgatgttac

SEQ ID NO: 149786 - DNA, 357 bp, Glycine max
  unsure (1)..(357): unsure at all n locations
agcttcttatccaaagctcatcttgngggtgaagcttcttcttccatggcttattccctaatggatggcgcctnccttctcctcttctcctttgccttccgctgcatctccatggtgaaaaatcaccattgaaggacctcattgaagctcaaagatccagcctccataaaagctccacaagcaagcttccatcagtaaccctgacgtttgaggctaacataaaagacagtcttcctaaatgggatagggccacacctataaataaaaaagtgagatttgcatgcatggatttgcttaaatggatcgaagttggatcaatcaaagtcgcatgagcccagaatatgaggatggcatcga

SEQ ID NO: 149787 - DNA, 363 bp, Glycine max
tgcagaggatgctacaatggaggaaccgagtgttggattattatagacaggggggagcaagacattgcaggaggaaaactggagagcctttgcacttctatttatgtcttacaacactctcagtcatcataatgaccacaagtgttacacatgcgcgtatttatacactacgtatcttcctctagaaactatgatgacataagcccctccagaagcatgttctagagaacttccttgggaagctagagatcacctgcacacactcctctcatcactgagctcacatgcttgtgaagctgtcgtaagaagagctctctataatctatagcttaacttcgcacccatgtctcatatcttacctca

SEQ ID NO: 149788 - DNA, 423 bp, Glycine max
  unsure (1)..(423): unsure at all n locations
agcttatttgaaatgaggaattctttatattatgtttactctaacatactactgagaaaatagggataaaatgtgtgaatttacctcttttaatgaagtaataagtaaaactggttacaacgatgtctttattttagcactttcttcgtcactagcatgatgtaacctgagcatgcacttgtgtgcacatattcaaaatgtggtttgaaaaaaatatcactaagaatgtacgtatgcatatttattttaacagaagaaaaaatatcagacatcttgctatgaatatgcattgaagaatcaaagttgctagctagtttattggaatctgtgggggaattgctgaactatcttccattggggcatntgaacatctatttgtacatcccaattttcataaatgaatgaatttaaaaaanatgatga

SEQ ID NO: 149789 - DNA, 448 bp, Glycine max
  unsure (1)..(448): unsure at all n locations
tcgcgtggagcaattacttcctttgtgcagaggactacttataagaagggtcaagttgttgacgtagctgataaacttacctcaatccttggatttggcataaatgaaccatgggtcgagtacttgtcaaacaccaaattttaccgagctgatagggaaaaactcagaaccttgttcgatttcttgggagaatgtttgaagttggttgtagccgataatgaattgggaagtttgaaacaagccttggagggtaagtatgtggagccaggacctggtggcgatccaattagaaatcctaaagttttaccgacagggaagaatattcacgccctggacccacaagctattcctactacagcagcaatgcaaagtgccaaaatagtggtggatagattgatngagaggcagaaagctgaanatgggggaaagtatcctgagactgttgcac

SEQ ID NO: 149790 - DNA, 447 bp, Glycine max
  unsure (1)..(447): unsure at all n locations
acacataaaactaagcgttaactgaattacaacgttccaattgatttcaaaatgttgtaatcgattacaatgatgtggtaatcgattaccaatgtgtntgaacgttgaaattcaaattcaattgtgaagagtcacatcctttcacaaaaatgctttgtgtaatcgattgcaatgatttggaaatcgattaccagtgataagttctgaacaaaaatcaaaagatgtaactcttccaatagttttcacattttctaaaagttataacttttccaatagttttcaagtttttctaaaggttataactcttctaatggttctcttgaccagacatgaagagtctataacagcaagatcttgacttacatcttaaagagaacttacaatctttaaaaacagacttacaatcctgtacaaccattgaatctctttgaacttcttcttcttctt

SEQ ID NO: 149791 - DNA, 468 bp, Glycine max
  unsure (1)..(468): unsure at all n locations
anngctggaattgatttgggcacctatattgaatcttctatgctatacctacatatatgaaacagtcccactctcccaattttacaaaatcatattcatatatcattggggcatttcaccgagcacttggtgggcgcatgtttggacataaattgcaagagaattggggcaatgtggcatgccccattgcttgagaatacaacacaggcctagggccttatcacacaaatcctcaactcaacaaatcaagcatcaaagcaacccacaactgcctcacaaatataagcacgttctcacaatttagagcaccaaaagatgaagaaaacacatcaatgagaagctaaaaactcaaggattgaatacttacttgttggagtaagtagaaacaccaaaaatgaaagcaaaatgcaaccataagtggcttaggggagcgaaaaaccgcaagccttcgtgagtcctctcttttta

SEQ ID NO: 149792 - DNA, 474 bp, Glycine max
  unsure (1)..(474): unsure at all n locations
ttgtttaatgttaganatagaggaaaggaaaggagaatgatcaaataatgcctaacgaaccacatttgccttaatgaagctgagtttgggccccaattaaaggttagtcattaacaagttggacttaaaaactagaataaaaacaaaatatgtaaaaaaaataaaagagatgaactgttgccctattttcagttatattatatagattgagacttaatttatttatttttttgtacggaagaaactcaatgttcttcatattaatatttcaggaattggatgcagagttattttcagctacaactctcactccaagataccagctacggcgtaccagctcaaccacattttaacgaatttctaatgcgattntaactccaacaataccattggttttcaatatcgcattagaaattcgntattggttcatctcattattgcttcattcactaactnttttgcaaaacaataatg

SEQ ID NO: 149793 - DNA, 469 bp, Glycine max
  unsure (1)..(469): unsure at all n locations
tgcggcatgcaagctgaatcgataaagcgatggagttatcttttctgcagctacaaactcttgtgtaatcaattacgatcaactggtaatcgattaaaatagagagctttaactttagaagaaattttccagctttagaacttttcttcttactcctacatgatgatgcatgatacatatatgagatattagagactaagatgcaacacacaatgcaataaccaatacaaatgccacttaagagagttaagcatgtaaaagacaaaaattcttcaggctcttcttcaagcttcaaggataagtcttcatgttgcttcccttatctctaatacctaatgtgtgagaacgcacaggattgggccaacattctgaacaagagtgttcttcataaagtatgttctaaaacaactctgtctgacatacattttactagatggagaacctccccttngacatttcacacaccatg

SEQ ID NO: 149794 - DNA, 470 bp, Glycine max
tcccatgtgctaggctataaatagaagcatgcgtaacatttgtcttatacttgatgaatgagaaacttgtgagcctcacttcaaaattcaacttctctgcctcttctccttcaatttccatgccccccctcctatctctctctctctcattctcttcctccattgaagcttcctctctaagcttcttatccaaagcactctcttggtggtgaagcttctccttccatggcttattctctagtggatggcgcctcctctgacctcttctcctttatctttcgctgtaactccatggctgaaaatcaccattgaacgaccttattgaagctcaaagatccaacctccatagaagcttctcaagcaagcttcaatcaataaccatgaatgaattatcttagagactcctccaccttgatgagtggatttgtgactaagctagacctgccttgatttctgaagtgccgctatgc

SEQ ID NO: 149795 - DNA, 415 bp, Glycine max
  unsure (1)..(415): unsure at all n locations
atgcaagcttngtantcncagatgatacagatgagtttgtttcttcttcatgcactcctctaatgactatggcatcatttctggcaccaaactgcggggagttggaagccatcttgtcaatcaagttgctggcttgagcaggagtcatgtctccaacggctccaccattatcatcatctatcatacttctctccatattactgagtccttcatagacatattggataagaagctgttcccaattctgaaggagatggcaactggcacatacctctttaaatatctcccactattcatatatgctctgtccactgagttgtctaaaacctgatatatacttcctgatggccgtggttctggaagcggggaacaagttttctaacaatactctcttaacgtcatcccagctcatgat

SEQ ID NO: 149796 - DNA, 457 bp, Glycine max
  unsure (1)..(457): unsure at all n locations
tagaatactcaaccgtcgactcttaaagtaccaccctaacaccccttccaaggtttcctccctatctctaaaccccatgtgggtctcttgacctttttaagcgccccatttttttaaaaagaaattaaaaaggattatatttaaaaataaatcgagttttacaaaaataatgaagattttggaattaaataaataaataagcaaataaaataaatatatgttcttaaaaaatgttttatttattcatttgataggtagtaaaatagactttatctttataaaatgataaaatcactaccacagaaatggtcttctacgatgcatgtcttattatggtcgtacaaaaactgctgtcataagtcaagcggtgacatttttgtcaaccactcccaacttcctaagaggagtttatcataactctctntgaacatgaattacgacatctggtctactatgc

SEQ ID NO: 149797 - DNA, 286 bp, Glycine max
  unsure (1)..(286): unsure at all n locations
ctctaagtcacctgcggcatgcaagcttctaccaatggactaccttgaatttattttttgataaccctctntgagccttgtntccctttccttggtttgaagctcactacaagccttaagtgaaaaaccatgatatcaccatatccttaaggaattttagagctttggaattgttttgggaataagtgtggggggggttttgattacacgacaaattgtttgtaggtatgccatagatagaactgggccctctaaaaattcattgctatttgtctactgcagacaa

SEQ ID NO: 149798 - DNA, 471 bp, Glycine max
  unsure (1)..(471): unsure at all n locations
aaatctaagctctaattattttccatatattttgattccagatatgtttgtttttggttncattntagtccgcgatattattatttcaatttctataaaattatatatttctttttataaaaatctctcttaaataaattcctgttatttagggaacattggcttgatttttaatctctattagttacattatcaatacaataggactaaaaacttgcacactctgcagattgcatctcagttgggggctctggtttgccaattgaatcggaagctgtgaatagttgaggtaccaaatctttgtacaagacttgtagattcattttactggttttaggcttttagctgggagctgaatctcgattacattgccccttacaaagcaatagttattttccactataattatgtgttaaatgaatctctcggtgtatgagattactggagcatatccttggggtgcataatgcc

SEQ ID NO: 149799 - DNA, 407 bp, Glycine max
  unsure (1)..(407): unsure at all n locations
agctntgaacggaggctctggnctctagctgaaactgtatgttctgcatacacatttgcctcacaagttcttcgagggaacgttgtggacgggcctcaactgttggctgtttctggggttgttgctgatgacggattggtggaggaatgtatggtctgcttgggccatcaacatattggatagaacgagcaagctgttgttgcttgtgctgagggctggaccatctgaggttagggtgattcctccatccagggctgtatctgttgctggacaggacataattgctctgctgtgttgatattgctgctgaggttgaggaggtctatcgtaaatatatgcagcataagcttcatgctgctcaattgctccaagatgctcgctggaaaggcataagtctgtatggtggt

SEQ ID NO: 149800 - DNA, 276 bp, Glycine max
gctcgagatgaggaagtgttgaagggtgaaactatcctgcttttattgtttaccacagagtggtacctggagatatgtcgcgggggtcaggagaccttggggacgtcaggtggggtgctataacccaaaaccaagcttgaccaatcccgacccaacccgggcatagtcggtcagtgagaacctgtgatgtacctaagcatgcgagctcctggcagtcaacagatagaaggatcgcggactcctggggttccccgcaggtcgattcacaacaccttc

SEQ ID NO: 149801 - DNA, 317 bp, Glycine max
accggatttagtcacgcgctgcacttcttttctttttttaggaggaaacaaatgtcccctctgttctgaatccttaatatgagaaaatgttcggaaaaatcaccagccttctaacctttgaagttcgggggattccaaatttcgcgtcttgcgtcttgtcgtcttcgatcttaccggatgtcccaaatcaacattattattttgccctagggccccactgtggctgctttattcattattatttgtcccctttgctgcttatgtattagtatttctcgctataaaaataataattccctctttgatgactttaattc

SEQ ID NO: 149802 - DNA, 467 bp, Glycine max
  unsure (1)..(467): unsure at all n locations
tgaacttccggaacactctcgcatccatcctgtgttctattgttcactattgaaacccttcgtgggcttggctgatgcagtaatagcagaaaaacttccttccgaagtggtggataatcaacccctcacgacacctttagctattctgggccagaagatggttccgacagaccaggggcccaaacgcatggttctggtacaatggcaaggcctgcatccggatgaaacatcgtgggaagagtgggcgtgcctttatgaacaacatcaccttgaggacaaggtgttatttgaagaccgcgggtatgttacgaatagcaactgggagtcacaggcctcgaggcccagaagaaggagtagtgttcctgggtacttgaaggactacgagctttaagtttgagaggtccccgtgaaggagcagcaacacgaatggcgttgggggtcattctagaagcttagggcatngatgt

SEQ ID NO: 149803 - DNA, 433 bp, Glycine max
  unsure (1)..(433): unsure at all n locations
agcttggaagttacaatgacaactattgtttcttttattaagangancggaaaagtactagtggatttgtgtttttcatggggaatacaaccttcacttggatgtcaaaaaagcagccaatagtcactctttcgacttgtgaggcagaatatgtagtagctacttcatgcattngtcatgcaatctagctcaggaatttgttaaaagagttgggcaggtcacaagaagagccaaccaagatctttgtgcataataagtcaaccattgctttagtaaagaatttagtgttccatgatcaaagcaaacatattgatactcgttaccactacaaaagggagtgcatatcaagaaaggatgtgcatgcagaatatgtgaagtcttaagaccaattgctgacattttaaccaagccgctcaagcaagaagactctatc

SEQ ID NO: 149804 - DNA, 455 bp, Glycine max
  unsure (1)..(455): unsure at all n locations
tcccagttatggagagctaaatcctctggggttctttttgttttactngangtaaatacctgtttatctatttaatgatgttttatgtgttctttgtgctatcagtacgtcatttcagtgtgcttttgccttgatcacaaagacgcatgctttgttaggatcattcaatagtggaaattggtctgattcttagaacttgataaggcaaggctagtttaccatattatcacgagggattgggatataataacctagttgttgtatgtttgtcttaattcagttctggttgagtgtagtccaacaagaggaatatgaagacgatgctngatcaggattaggctagactatcatgaggactcaaggtttagcattttatgagacaccatagaacacatgagcattgtaagtatagaatattcttacaatatcaagcacctaatatgaagaccnacatg

SEQ ID NO: 149805 - DNA, 381 bp, Glycine max
  unsure (1)..(381): unsure at all n locations
ctgcggcatgcaagctaacattaaagcctctaactttctttatgtatttgaggcattnatagcacatctaaaactaacaagaagctacaatgctacacagactcgcatcttgtctaggggcaagttgccaacagataccacatcaaggaaaaagtactgctcaagtactaccacattgccaaaactctaattgacaactttgaatgctttgagatgtactacataccctatgagagcaacaccagagaagacttgctctccaaactggcttgcaccaaaaagaccggtcacctcaagactattatccaggggacgctccaaactcccactatatacattgataaaattatggccgaagaagaggaggaaccaaactggatg

SEQ ID NO: 149806 - DNA, 482 bp, Glycine max
  unsure (1)..(482): unsure at all n locations
gcgacactatacaatacctaagcaattatatttactaggtcttcttgcaacaagagattgttgtttctaaatngatagatatcttcacttgagctcgtgtatgaagattctggttgttggaacatttaatgcttccaataaatgcatgtactcccatgctgaaaaaccacttttgtgagctttcgtgttgatcacttcagcagaaaaccacttgctttaagttagagtaggtctatctcgaccaatgcacgtcttttggtgttgtttggaaacttccagatcttgagcttcatttgtttttttataagattcatagatcctacgagaatgtcttttcaaagctaatctcatacacaaaccaaaaaataagttcttaaaagctatcgatttaatgttatatgagatcatgacatgactcttctatcttttgaaacacagacacagatgtataatgcatggtctaatattgcataacacataat

SEQ ID NO: 149807 - DNA, 472 bp, Glycine max
  unsure (1)..(472): unsure at all n locations
agctcgnnggngtataattttgattcctatatgataaactcaaatggactaaaaaattgaaaaaagtttgagatcttaaagagattaaaattgaaaaaatataattttttacggattaaaaatgaataaaaagacatgcttataccaaaattaaaaaataaaaatttataaagactaaaaataaacaaaatttttacagaaattagagttaaaaaaatacaaacttttcgaatcttaattcatagttatgccttttataaatttaaatatatataactctaattttagtagattaaattatttcagtcacaaattaatttaaaattcaaaataccaaaatttaacacaaaagattctttattaaaagataaaatacgtgtctatcacaagaaaattattgcctttgatttctcctcgtcacacatatttgggtattgttacaatcccatatacataaaagaaaaatggttat

SEQ ID NO: 149808 - DNA, 457 bp, Glycine max
  unsure (1)..(457): unsure at all n locations
actaagcttagggtgaaaaccatcaactaagtgttgctgatgagatttctctgctntcaaaccatcatttttaaggattaaagtcttaagttcctccctcactactatggtttccagcttttcaggagcaacctctctgctacattcagatttacttagattgatattaactgattgaccatcaagatgaatggtagttgatgcaacagcatgccttcctgaatcttcttttttcttcattacttcctggctagttacattctggaaaagattcacatcctgacttctgaatccatcacgctcattatccaacactttagaagaaatactcttcatgtctccattaatcttagattcttntgcacgagaactggcttccagatcatgnttattcctatagcgcgctgaagtagcattcatgtcagattcattgtgaatgtacttgcaacatgctcct

SEQ ID NO: 149809 - DNA, 381 bp, Glycine max
agcttccatcatagttagttaagatcatatctttttgtagaaattcactacacttcattattatacaaaacttgtgcaaaatttcattcttcttcatctgttcacttttgttccaccattttcttacaaaaattttgtggtttcctcgttggtgatgatcatgtaggactaaacaattaatcaatccacgaatccactcaaagcaaagttgaatttgagtcctagtttggtttttctattttttgtgaatgttcttcttcttcaatcctatttttgtttttcatgattaagtgatggaagcttgcttgtggagcgtctatggaggctggatctttgagcttcaatgaggtccttcaatggtgatttttcaccatggagatg

SEQ ID NO: 149810 - DNA, 441 bp, Glycine max
cgcttgagcagactataagggagctggatcttagagcttcaatgacgacctacacatggcgatttcacaaccgtggagatgtaacgcctggccccagatatgaagatatgggaggcgccatcgtctacgtaatgctccatggaagaaggaccttgcccacctacaatcgccttttatcaaaatcttgatcaggatgctatggtggtagaaaatacagagagaatgggggggtgtgttcgcatattgcgaccactatacctttgtctcccagacccgcgcttataaagcttctacttatgtggcagggcgggcttccttcactttcttgtcttcaacgcgagctttgaccaccgctctttcttcccgtgatgcttttcttcatattcgcctgagtgggcttatagcctataccatacattccacgatttccttttgcattta

SEQ ID NO: 149811 - DNA, 193 bp, Glycine max
tatctctgacatatcaaatttatgattacatttcccctttgagatgacaccactgtggtagagcacacaaaaaaaattattgcttattactcccctggttgcatgatgtattgaacagtgaattatttttattgaacaatgctataaacaaatatttctattttattttatttttcccttgcacatcaaacat

SEQ ID NO: 149812 - DNA, 477 bp, Glycine max
  unsure (1)..(477): unsure at all n locations
tataaatctcaagcttntacatcttgngtttttccaagcacgataaggtgtttgtttaaaacggaaaacactacgcatttcctaggttnttctatttgatctctttaaggtaaatgtttatgacccattatgttagatgagtatgttatagcactgattagtcatgggctgtgagaaaaagagttagaaactaagtattagagattattgtgattttctcaaaacccaaggtttgctaaaattgaggattttgtctaatcccttgttctattatttgaatgcttaggttctgtggaaaatatagcggttgaccttcctaacagcggtagaagtcagtgattgtgttatttaggtgagtagctaatatacttagcgattntcttaaagatcatttatgaagaagcaagtatactttcgaacatatatatntntggtaagctttgaaattattgtgagatcttataatatatatataag

SEQ ID NO: 149813 - DNA, 449 bp, Glycine max
  unsure (1)..(449): unsure at all n locations
agcttgtaggagtatggtgtacccatcacatgtggtactagggggccatcgggcgatggtgcaaaacaattctccacatccacaaatcacgtataacccaccatcctctgttgcccacctcaacttagctcacgtactcccacgtagcccttatcctcgttcctctcaacgccgggtccccatcaatcctcccaagcttccaaaacatccaagaaaacagggcagaggcagaaaactctgcccaaaacacaaaccaacatcacaacttttcacacttaaataccacagtaatattctcttcgttccaattcgttaaccgttggatcgactcgaaattttactggaagtctctagcacataaatctacattatgaccgttgggatctgctaganaacgtcgagaaccaaatctgaactactctttccacaaccagcagatacacaacact

SEQ ID NO: 149814 - DNA, 377 bp, Glycine max
ccaagctgctcaatagcaccaagtcgctgcttggtatgtcaaaggcctgtgtcgcggtgcctctaaagagcataaaccacaaactcttgcgacaggtctaaatttctgattcaaagacagctgcggtacccatcttaccaatgcatctaatgcgtctgcaagcttctcattgctagatgatgcacatgagattgtgacggcctgatgtactcctataatgactatagcatcatttatggcgctatactgctaggagttggaagccatcttctcaaccaaatctattgattcatctagagtcatgtctcggagggctccaccactggcatcatctatcatactagcctccatatcactgagtccttcataaaaatatt

SEQ ID NO: 149815 - DNA, 412 bp, Glycine max
  unsure (1)..(412): unsure at all n locations
ttgttggtaagaaaaattcaccaaattgatagagaanaatctaaaatcatacatcttaggcaaataaggcatgctagcccccaacattattgcatttcgattccatctttagacattcaaattgttgtttatttctcctgtgatcttttcctttgccttagtctaaatgtcaaacttacaatgcggtatctctctcttcttttgtttctcctcatttcttaataattggatttgcatcacttaagtacaaccaaagtccctctggatttaattgttgaacttcaatgtcaatctttactacttgtgataaaattacgacactngtcaatctattaacaagtgcttggcgatggtgatggggactttggctttcgtacttggtctgtacaaataccaatatgacagcaatcat

SEQ ID NO: 149816 - DNA, 459 bp, Glycine max
  unsure (1)..(459): unsure at all n locations
cngtggatttagggattgaggactgttttggtttgcgtttatgtttgtttttgtgtncgaggtttgtgttttggaagaaaaactcgaagaaaaagttttgggtttaggtgtatgtttctcttcatagagtttggccaacgaaattgttctgaggagtcatgtaggtgattgtgcaacgacatcccttctgatatcaggttttaatcctcccacaaagcaatccaatagagcttcttgtgtaattccttgtactcgattagctaaagccgtgaactgcacgtaatatgactgaactgaaccaatttgagcaagtttaaacaactgagatctaggacattcatacggtgatgggccaaattctgtctctaaggctcgcgtaaaagcaatccattgtttgaatcgaatttcacgagtcatcatttggtagcagggcacaacctctttatccaagtgaattga

SEQ ID NO: 149817 - DNA, 473 bp, Glycine max
  unsure (1)..(473): unsure at all n locations
taagtcacctgcggcatgcaagcttaaacttgttcgggtaaggatttaattaatttccaatngancggcatatggatggaggaacatacttagtgtggatatgccacgatgcttaattgtaaggtgaggaatatccccttcatataccttggaattctaattggagctaatcctatcaaagagggaacatgggatccggtgattagcacaagtatattcttaataattaactctctatttttttcattttcccttcacacaaagtccttcatgtgcttaggaatgtaactctccttctgggcctggacctttccaaatcaacttcgacttcttgcacaccctgattcctgttatatcatattccatccaattatggaaaaacgaagtgaggaaattgcttnttatataaatataaaaaacaatagctatactatatctatttctgattacgctataatataataacaatatct

SEQ ID NO: 149818 - DNA, 470 bp, Glycine max
  unsure (1)..(470): unsure at all n locations
ntattcgtagctgtattcctttgtgtaggatgtgcatttttgatgttctaaaccaaagaacaggcctttactgctcttgaagcaatcaatggaaagcatacaatggaggttggtgtttgttaaaaccatcacctgaatacttgaaaatatatatttatttggttattggtaccagtggaaccggtgtgtaatattatgattgttttggaaatttctattgattactaataaatagggagctgatttccaactcaattttttaatccttctcttgttttggaaatgtagagctgattttgagccctgcaattntataaaataagaaacatgccccaatttggtttgtgtaagataatcttctaggattaggattgacttgatatttatatgacacgattgaactgaatccaagctcggaaaaggagaaaactaaagctctggcctctgacgcctactatatgtatgcatta

SEQ ID NO: 149819 - DNA, 469 bp, Glycine max
  unsure (1)..(469): unsure at all n locations
agcttataatcccagaaatagaggaagctctttcntcttatgtgcaaagagaagaagggatcaagagaagagtgatgaaaccaacgtaacttgatgattacgtctaaggagcagaattgaaagaacaaattagtagaatcagcaccaaatcatgcttgtggtgtttgctccctcataggcaaacacgcataacaaaatctgttattagaatattccttttagatagaattgacacaaatatgttatttgaattcctctatatatagtcatgtaaataaataagcaggatatataaaatttctttcttaccttgcgtttatcttcttcttctcctttctctttggtctggaggtgctgaccttcgaagtcagtaaacaaacccagcacctaacagaatcaactctgaaactcattgtgcanaagtttgaaggaaaacatgtctgtatgataacacaaacatcttttgttc

SEQ ID NO: 149820 - DNA, 467 bp, Glycine max
tgaggaatatgagactgctaaggctgctctagaggtggtgtgcatcattgtctccagacaactcaaggtttgctactttgatcaaagaatgtgataagctcattgcaggtaaactctattctttctagtagtaaaattctttttatttgatgaaacttatttgtcttttggatttactttcatgttttagaatttgttttatatgtgaccaatgattgtgtcttgactgttggaaggtaaaaatgtggatttatgtcatttttggcttggaaactgacatgagcttgatggacatattgtgttgaacagaagaatcttataccatacctattatagaggaaaagaccacaacacaggatgctactccaaaagatgttcagcaacaagatgatcttctagagaagccaacagttgcagtgactaaacctaaatacaggtcaaacctggctttactctatggttgcgtg

SEQ ID NO: 149821 - DNA, 486 bp, Glycine max
agtcacctgcggcatgcaagcttctagccaaatggacttaccttgaatttattctttttatatgccctttgagccttgtttccctttccttgttttgaagctcactacaagccttaagtgaaaaaccatgatattaccatatccttaaggaattttggagctttggaattgttttgggaataagtgtggggggtttttgtttcattggacaacttgttttgttggctatgcttcatgatgtattttgggccatacttgatgtacattgtatattggttaaatgttggacatgctgaatgaaatgttgtttctcataggcaaaaaataaaaaaatttcgaaaaaaaaaaagaaaaaacaaaatacgaaaagccattaagttgagtgaataagatcttaaatggcacaagaatgatgaaactctcgggtctactcttcatgtagaaagattatctttacctctatatattttcttatttattaatatg

SEQ ID NO: 149822 - DNA, 476 bp, Glycine max
ctatgaatactaagcttgtaaggaggtgagcttagttattagaggggtgtgtgttgcttatctctagcttctcaaggaagttttctcaaagaagcttctcaaggaagttttctcaagaaagcttctcaaggaagctacctagtctataaatagaagcatgtgtaacacttgttgtaactttgatgaatgagagtcttgtgagacacaactcaaagttcaacttctctccctttttcttccttcaatttcgtgctcccccctctctctttctctccctctttcttttcctccattgaagcatcctctccaagcttcttatccaaggctcatcttggtggtgaagctccttcttccatggcttattccttaatggatggcgcctcctctcacctactttcctttgtctttcgctgcatctccatggtgtaaaatcaccattaaaggaccccatttgagctcaaagatccagcctccat

SEQ ID NO: 149823 - DNA, 429 bp, Glycine max
agcttaacaacattaagtgcacgcatcattttatttttactttataaaaagacaatacctgatttagaagcatgcttttactcgaggaagtcaaggatgcacagtttattgccctgaaatcttttaagtttggtggaagccctctaattttctgaagatgctcgcaatcactcacatcaagagttcttaaaaatttcagttctttgaagaattcgggaaggattgtgaaattattccccgatagatctaaatattctacatgagtaaacctcttggaacctgttaaaaaaaaatcatcacatagattgcaattcatggcacgaaaccaacgtgcctttgaagatagtattgagcccactttttcttcaccttcttccgattctacccattggcacctgttgcaatattcaatatggagttgaaacaatt

SEQ ID NO: 149824 - DNA, 452 bp, Glycine max
  unsure (1)..(452): unsure at all n locations
tgacatntacaagtgtttntttctttgtcaaaatgagtcatgattgtattggttngagacactcgtgatattgtggactttctctattcaacttttttgttcgtcctatcagtagatttcgtttgtagttccgtacacaattttctttgcttcttcagtttacagtgagttagatatgttctaattattaatttcttttctttttttttcgaatattccatttacataaattagttgcagaagcttctgtcaaacctataaaaacacttatattttgacttgacgaatttatatgtatgagcttaacttttgtttttctctttttcttttgctcaacagcttaactttaaaaataatcaaagttataattatgttcaatagtttcaattaatggaataaatcaatgtgtgtgcacctaactaaattttgattagacattgcttgagagaatg

SEQ ID NO: 149825 - DNA, 452 bp, Glycine max
  unsure (1)..(452): unsure at all n locations
agcttctcaaggaagcaacctagtctataattataagcatgtgtaacacttgntgtaactttgatgaatgagagtcttgtgagacacaactcanagttcaacttctctccctttttcttccttcaatttcgtgctccccctccctctttctctccctctttcttttcctccattgaagcatcctctccaagcttcttatccaaggctcatcttggtggtgaagctccttcttccatggcttattccttaatggatggcgcctcctctcacctcctttcctttgtcttccgctgcatctccatggtggaaaatcaccattaaaggaccccattgaagctcaaagatccagcctccatagaagccccacaagcaagcttccatcatgagtgaccagcgacgtccaacgccggcgaagtatctcttcctggaaatccgtgtactcatcgtccctg

SEQ ID NO: 149826 - DNA, 458 bp, Glycine max
ctaaagagaaacaagaaagatcaaacataagatgttttattttggttcgtctctactattagactacatccaattcttgacgaaccaccaagttctactcacttcacacaagtgaaaagtattgttcaatgtcacttctggctctcacacaatcaagctctacaccaagcttgacaaaaagccactattcttttttctaccaagccactacaggctctaaacaaatcaaaagatttgttgtttaagattgctcgttgactaaactgtgaacatcttacagacatatatccaataaactcttttagtcttttctctcaatatgttcaaagtgttttgagagcttgtgaaccttacaacaatatataaatagccttttacaaaaagaatgaaagaatgaaagtgcataagattgatatcttcttctcaaagcttctctatgtatagccttcatcttcagt

SEQ ID NO: 149827 - DNA, 398 bp, Glycine max
  unsure (1)..(398): unsure at all n locations
taagcttagatattccaccggggagacacagacgaaactctctgttgttggtnaacnngcctagaaaacagatgaacgatgggttttatnttcatcttccttgagacaagatgctgctccttcgactatgtatcctcaccagcacttcttaatatccatttcagtcctgccaatacaatcagcaattaattatctgttagaggtaacaattactaggagcactctgtatttgtttattttactttggtcatatctttaagagattgcataagagcgaaactgaaaaaaattccgaaaaaacatggcacgattttgtgtgtggttacaaaattaattctacacgaaactgattatgaagctattggtatagagatgtctttattctaacagcatgtgaa

SEQ ID NO: 149828 - DNA, 386 bp, Glycine max
  unsure (1)..(386): unsure at all n locations
tctctctgcgtcggcgaagagtagtagtgggtattctgttataggtatcgacataaccacgcgagaggaagacgaatagcaatcgtggtggaacacgtctaagcgcgtggctgggaaggcattggaaatgggtcgctctgatccaaagaagattatcttctctgcaaaatcgggtcttgctttgaccattctctccctttngatcttcctcagagaacccttcgccgatttgagcagctactgcttctgggccattctaacttgtgtcgtagtctttgaattcaacatatgtatataacaactacaactatacgtttataactcactcaaataccacaacatcttcttctcatgaggttctttctttagattatcagtatcaatat

SEQ ID NO: 149829 - DNA, 471 bp, Glycine max
agcttgttgttccaacatagtcatcgatatctcttttctaatcttgcttcagaagttgttcccactccacacaacacccttatctacaagtaatccaaaaaataaccaaaacttgtaattggcatactcaccagaacatcaaggagggcaaggggagacctttcagagtcaaaagtgaagtgattttctcgctgcacattctcttcaatgggtattcaaatgtaactgctcatctgtttaagaattttgggaacaaaaggggggcaattaaagattttttaaaatatttgattgattaattcaaggttttttaaggacagacgggtgattaaacggagatactggttcaatggttcaatcatagttgaattgtgattgaatcgcgtttaatattttttaatattatatatatcttaagtaataaaatcatatataattaaaaaaattagaatctaaaacgattattaatta

SEQ ID NO: 149830 - DNA, 472 bp, Glycine max
  unsure (1)..(472): unsure at all n locations
ctgagccaagatcctgactcaccatagaccttgacccattgtgagaatgtcaattcttaccctcggaagcaaaaaaaaatgggagagggaaaatttccaatcaaagaggaagcaaaaaaggagagaaggaaaatttccaatcaaaggaaaaaaagagaggaaagggaattcccaatctaagagtgggagaaagcataaagaaaagaaagaaaattcccaatcaaataatgggagaaagaaaaaagagaatgagaagaaggaaagaaagctcctgatcaaggatcgaaagaaaacagaagaaatgtgcagagaggtctctggaccatacaatatctgaacaaatacagaattgtcaccaaatgaacaaaagatagagaaggaaaccataacctaaaagaggtcttctcccttngattaccaaccaaaatcctgtgcgtcagtgactatgtcgcctcgcgtcatacaaaaacag

SEQ ID NO: 149831 - DNA, 213 bp, Glycine max
attctaccgtgtgtactttccatcctcaagaaacgaggctcattgcgggatcaaagaccttgataagccgctaactactacagacaaagctcctgtgatcgtattctttcacgggggaagcttctcgcattcctccgcgcacactcacatctacgacaccatctgtcgccggcttgagacgatttgcaacggtgctgtggtgtctgtgaacta

SEQ ID NO: 149832 - DNA, 450 bp, Glycine max
  unsure (1)..(450): unsure at all n locations
agcttgtcattttgggatgcattattgtcttctcttccttnaatnntatnntaatagccacatgctgatcttcacgtgttgtgcatttagatttgtgctgatgtatgaaagacaaatctttctctctttcactttaaaaagacatgcagtgggtcacacatggggatggtgaaagataatgtgaggcaatatacattgcccatatttactctgtagtctatatatatacttgatcctaaggaaggtggtgatattaatttttggaatagaatcttctgattattgaatatttatttggactgtttctatttcatagcattgatgcaggggtatttagaggcttctatagactttgaccagcaaacatagtgcaacaaataggaaggggtgcttggatgtgtagcatcataaacagagatattgcatgtcactttccacataatcttcaag

SEQ ID NO: 149833 - DNA, 423 bp, Glycine max
  unsure (1)..(423): unsure at all n locations
tatgttccaatggcaatacgctgtatcaagtcaatctgttcatctgctagagcatcctggaacatacattctgttgctgttgctcatcgtctaggcacagtgcctgttggtgaaacaagtgtcttcgttgctgtctcgtctgtccaccgggctgatgcgttggaggcttgtagattattgatagatgagataaaagcacaagttcctatttggaaaaaggaggtctattcaaatggggaggcttggaaggagaacagtgagttcctagagaggaggtctgagcttggtaacaagaatgcagcttgctgtgggaaaaaatgcagaaattaaagagtacaacaaanagtcttgctgtangaccaaggttcgggctgatgacgaatgtagctagaactagtatcaatgttggggatcanatataca

SEQ ID NO: 149834 - DNA, 409 bp, Glycine max
  unsure (1)..(409): unsure at all n locations
agctntctgaaaaccctattttttttttttgcttttaatatcaaataaatacgtttggaattggattgggcaataacaatcttacgatttcatgaatcactgagataaatggagtcagatgaagacgattttgttttctacggaacgccgatagagcgtgaggacgattcaatcagtcgcaagaagaaggccattgctgagtcctcaggtcagctccgagctctccctgcttggaagcaagaggtaagcatttactctttccacagaaattctgttatgttatgccagcgttaattgattgggattggttgtgagtgcacactgcaaaatactgaggggttttggtttgtttctcactgtgaaattgaaaatttgaagctggttgtgtttgtatcaatgatctggttga

SEQ ID NO: 149835 - DNA, 451 bp, Glycine max
  unsure (1)..(451): unsure at all n locations
cggtggactaggttaattatactgagagatgagattgttttataatggctctcaaacaatgggtgtacgagcaaatgagagaaatggcctatatgaaaactaatattaaataaaataaacagtttatcaaaatcaaacaaaatatgactttggctataaaagcttggtggactacgttaattatactgagagaggagattgaaaaagaatggctctcanacaatggctgtacgagcaaatgaaagaaatggcctatatgaaaactaatattaaataaaataaacagttaatcaaaatcaaacaaaatatgactttggctataaaagcttggtggacttggttaattatactgagagaggagattgaaaaagaatggctctcaaacaatggctgtacgagcaaatgaaagaaatggccttctctaccttntatctatctctnttcttcttca

SEQ ID NO: 149836 - DNA, 256 bp, Glycine max
  unsure (1)..(256): unsure at all n locations
acctgcnggctgcaagcttagacgactttgcttgagtcgagagttctttatttttatttggacaagtttgaatatgatgtagaagaaaatgaatgtgagcctttttcccctttgaaagtcttgtaaaaaaatgttataaaaatactccttattaatatctgaattttattcttccttattagcatatatatgttaggggtagagggtgtcacagcccccgactggtctccctatgatattacctggggagagtgac

SEQ ID NO: 149837 - DNA, 439 bp, Glycine max
  unsure (1)..(439): unsure at all n locations
tgagatgtgagcgtaaaagcatgnaggtggcggaccttttttttatattagcgcatatctagctacatgtgactctatatagactcagcccgacatttgagggccataaaatacacacgtatagaatgtgctacaatctttatatatcagggatagactacaactccagatatgcatactggaaattaagacggcataggtcaccatcattcgatgtgctcaaaacatcttatattgaagtcgagagtcatcgacgataaaacaataaaacgtgcgatatcagaccgttgtggtgaataccatgacagacatgactcgttatgtgaacaaagtgcgaagttcaccatgcggggtccccaccataaactgggcggctatccaccagagagactcttaaggtatccatacgagcaccatttctcttgcttattcacgtagg

SEQ ID NO: 149838 - DNA, 413 bp, Glycine max
  unsure (1)..(413): unsure at all n locations
accgcggctgcagctcttgatctcaatggcgctggttttttttcntgtaaannnctatgaaggctaatgcttaatatacttgaaatcataaatcattcagaagaattttgttttattaatcactttagtttatttttctaaattaaaaagtaggattgagttcattntaaattgtttttacaaaatttcaatttacatttaaaccaatggatatattaaactagcaaaagtagtgcaattaatgaggaaatatgacatttgacttaaaagagagagagagattgttacttgaataacattcccaacaaaaaaatatgagcaagtgacaagtctcttcatatgtgacttagaaagcatcttatatctcctttgggtaaaaaaagtattacaactcgatgatgctccatgtggag

SEQ ID NO: 149839 - DNA, 468 bp, Glycine max
gtcgtgatgatgaatcaagttgattcaggtggtggggagtttgacttttatgatgacaaaaagttcgagagaatgatttcaagattgagtcaacaagttcaagatcaagtttaatttcaagtttcatgagaagaaatcaagaagattcaagaatcaagagaagtttgatttcaagattcaagagaagatgaattcaagattcaagagaagaaatcaagaagacttcacaagggaagtattgaaaagatttttcaaaaaataaacatagcacaattttgtttttcataacagttcttctcaaaattctctaagttaccagagtttttactctctggtgatcgattacgagtttcttgtcatctattaccattggcaaagtttgatttcaaaagcttttaactgaatttgctacgttccaattgatctttaaatggtgtaatcgattacaatatactgggtatcgattac

SEQ ID NO: 149840 - DNA, 382 bp, Glycine max
agcttcttagtctcagatgatgcaactgagtttgtatctttttatgcactcctctaatgactatggcatcatttttggcgctaaactgctgagagttggaagccatcttctcaattaaattcctggcttcagcaggagtcatgtctccaagggctccaccactggcagcatctatcatacttctctccatattactgagtccttcataaaaatattggagaagaagctgctccgaaatctgatggtgagggcaactggcacatagttttataaatcgctcccagtactcatacaggctctctccactgagttgtctaatacctgagatatctttcctgatggttgtggtcctggaagcacggaaaaatttttccaagaatac

SEQ ID NO: 149841 - DNA, 444 bp, Glycine max
  unsure (1)..(444): unsure at all n locations
aatactcacgcgttgcgagattcctcacggaaaacgttacggaaacgtgtttgattctcctcggcttagattttcttgagggaaacaatttttccaagcaaattccaaagagagagaagtgcctaaagggctgggatccttttcttcttcattttctcccctatttatagcaaaataggggagatgcttgccgcccagctcgcccaggcgagctcagctcgcccaggcgagcagggttgcttcctccagaagcaaccgccttctggaggaatcttctggagggcccaaatgggcctgggtgctatttgcacccccatctttactaagtacaccccctctgctgtttctttggcgattctcttttctgaaagttacggaacctacnaattttggaccatactagtttcttccgtaatagtactgaccgtgcggtgacataatcat

SEQ ID NO: 149842 - DNA, 474 bp, Glycine max
  unsure (1)..(474): unsure at all n locations
agcttatcgagatccactacaacagaaaagttcatatgctctactgaagncactttgcctacacacataaattagtgtaggtaaaagtcaaaaatacttatacctataattgtttgtcataggtaaaatttaaaaatctatacttactattattttgtgtaggtaaaactcaaaataacttctacttacaaatgcttagtgttggtaaaatttcaaaaaacttatacttacgattacttggtgttggtaaaatcctataaaacttgtacctacattttatgtagataaaattntaaaaaaatttacctacaaataatagtgcaatttcttgttagtcaaattcaccacactccaataagagaaagagtaatatataaatattttaaaagtgaaagaatagtaaaacaaataaaatctaatccaactaaaatgaaaaaaatgtgaattttaatttctttagattatcaatttgat

SEQ ID NO: 149843 - DNA, 340 bp, Glycine max
tggactggcagttatggcggacgggcatgttgtttatgtgcacgtcggaccagctagaggacgtgtctaagaggggagagataaaccgaaagtcaaatcaaaagctaagtaaactattcttactgaaataatcttctctgccactccatttattcattaatgcttatataatagtttttgcctacaagatattttgctcgagtttgttatcacagaattttgaatttaacagctgaaggaacacgtgaggaaataagactaaagagtagcttctataatggcgcccatgcttcacacgaagtatttcaggtatgtgggtctgtgggtcaccctttatggc

SEQ ID NO: 149844 - DNA, 450 bp, Glycine max
  unsure (1)..(450): unsure at all n locations
agcttgccacccagctcgcccaggcgagctatgttgttttctccagaagcaaccgccttctggagggattttctggaaggcccaagtgggtctggctgctatttgcagtcctatttttattaaacacacccccttgctctttttttggtgattctttttccgtaacgttatgaaactttacgaatttcgtaacgatgcttgttttctttcgtaatgttacgaaaccttacggattatgcaatcatccctttttttgccttccggaacgttacggaactntacggattccacactaacacttccttttaatttccggcttgtcacggaacttcacgaattgcctaacggtgggtgccaagtacctcgaagttgtccaacgagggtcgcatcctaacaacggatggtgcccggacgaaattanggtatgacagttgcccctctttacttgtc

SEQ ID NO: 149845 - DNA, 465 bp, Glycine max
  unsure (1)..(465): unsure at all n locations
atggcctcatcaaactacttgtttcccgatggaaattctattaatcgacctcctatcttgaatggagtgtgttaccactactggaaaacccgcatgcaaatctttatagaggaaatagatttaaatatttgggaagccatagaacaaggaccttatgttccctctataatagccgaaagtgaaacaatagagaaacctagagcagactggactgaggaagaaagaagattactacaatataatttaaaggccaaaaatattattacatctgccctangaatagatgaatactttagggtttcaaattgtaaaagtgctaacgatatgtgggatacactacaagtaacacatgaaggcacaacagatgttaaaagatctatgataaacactctaactcgtgaatatgaacttttttggatgaatataaatgagagtttacaagacatgcaaaagagattcacacac

SEQ ID NO: 149846 - DNA, 433 bp, Glycine max
  unsure (1)..(433): unsure at all n locations
agcttcacgcagaacacataatgttaactatatatctacatataanntttttcaagaataccactggagaaatgttctancagccagcgggcagtttttgcaaaggcaattcttaacaaaggcggttttcatgtaaatcagagatattacaaaatcaaaatatactactaggacatatatactattatttatgacggtacagtatttattttaaattttgaaacagtaagaaaatgaataagcaattgcacgaagaattaaaaagagtgaaattgagcatgttaacacttgcaaacaagcatggggggaaatcaaagacacatacccttacatcaaccatataagttcgagtgcgcttgtttggaacaacatatttggtacgttcttcagacttctggtgctcaagttcataaccacctgtgacaggatgacc

SEQ ID NO: 149847 - DNA, 465 bp, Glycine max
gcttccttcatcaaattcaagagtgatggtgcgcgcatattattggtctcaaagggaaaaattcgggggcgagaacaaaaacacgaggtggaacaacaacagcagatagaagaagaaaaagaagaaaaaaagcgtgagcagttccagaatcagaagaagccttcagcatcgaattttcagtttccaaagcgagtttcgccttgggcgcaggcaataaacccgagcagtgcactgttagactctgaatccgatgattccgaggacgaggaggacaatgaagatgtcaaaggtaaagcgttgcaacacaactctattggttctgttcgtgaagaaagaaagggaatggcgagtgaggtttcttctaatgaagcagaaagagtcaatggggagaggaataagagaagaagcaatacagagttggcagagaggacgattcctgaacatgagttgcggatgctgagaaag

SEQ ID NO: 149848 - DNA, 305 bp, Glycine max
  unsure (1)..(305): unsure at all n locations
agcttattccaggttgtgcaaatgatcgatatcattctaagattagnntcgaacccaggaagaataatgtattaatatctcctcagacagtcaaatatttcatagaaatcatagtattagtctgttaattatcataattaatgttacgagtagcacagaacgcccttgcgtgaccgtacgtgaaaggaaggagcgcactactaggatccgatggcatcttctagaatagggaatattccgccttgctgctagtgatgtattctgcgtatgcgtaattctgttggtgtcgcggggaccatcgtccc

SEQ ID NO: 149849 - DNA, 477 bp, Glycine max
  unsure (1)..(477): unsure at all n locations
agaatactaagctctggacatacattatctgtgggttctgtttctttctttctatatagnacacaagttactcactcactcatactcatccattgtgtaaaattcgcgagggttcgatcttctactaccttgtattttgttgccattcacagccaccttcgttgcaacacacaatggtgggttccacggttccccacaatggttgaagtaatatttattatatattaagacaacgatgggaacgtttggaggtattagatgggattggacaactacatctatgggttattggaacccacgcccttccaatttcaaaccatttctctttgagaaaaatgtcaaaagtgcggcataatgtgaacatgatgggattgtcctacaactacaacttgaaagctttaccagtttattgtgatggcctgtntatgtggtccattacgttgattnttctaagcacacagaacaataaaaatgctt

SEQ ID NO: 149850 - DNA, 473 bp, Glycine max
  unsure (1)..(473): unsure at all n locations
cccggatccttaagtcacctgcggcatgcaagcttcacttgagcaccagctattgtgtttctgaaaagagaggaaatgcataaagagaaagaaaaaaaaaagaacaaagttgaggcgctgccgaatccaaccgcagatcattccctacatcatttctctcactagccttgtaccctgatgtgaacctgagtaggagcggattgcttgatacaggttatagagtttggatgacaccacttccgatgaaggaagataagtcagggtagacgccacttccggtgaaggaagataagtcagggtaggcgccacttccaatgaaggaagataagtcatggtagacaccacaaggattaccttgataagtctgataattggttcaacaaggaacccaaagagaaactctcaccaaattntaccaaatgccaaaagtnttttttaaaacaagaaccaatacttatagggatctgaacaaa

SEQ ID NO: 149851 - DNA, 444 bp, Glycine max
  unsure (1)..(444): unsure at all n locations
gaagcgantctctatgtagtccaagaagaacattcntttgcttccccataatcactgacagtgaactaatcagttcctcaggaactcctctaacttcacttgcatatgcatctattatatccctacattagtagatgaatttcattaactaatcaaaagtggtgttatgtatataatctttaattgtgaggagtacttacatgaatccctctggagttgtaggccaaaattgaagcttcctgtaccgggtggggtacgtgattaacatcaatgcatctgaccagtctagtgtctgctcctcagaaactacataagcctgcccatagccatgtgtgtcatttgaggccgatgcatacatgttcttctcttctattggaagtttgaaaaactcagatgatgcatccttcattttctgcaggtgttcttgaacaccatgatttacta

SEQ ID NO: 149852 - DNA, 461 bp, Glycine max
  unsure (1)..(461): unsure at all n locations
agcttgtatctatacataaaagtttatcttttattatttgaaagttgaacttaaattgtctaaaaaatgcttaatccaaaaggacagagaaaacacaccttggaacatatttttcattctgttttccacactgacatacaaaagttgattttcatttttcgtctttttattgtaatttttgcatccttcatagcaccaaccactgctgccaacattaaatgtggcaaatgtccctacaatgacaatatctatttcttagtcatagaaattttttaatctatgaaaataaaaaataattntttttttaaattgaaaacatgaatatggtaatagattagtacacacctcattaaaatgatagatttcagaaatagacatcatttttgcattagaaaggaacttgtctttctttgaatactatgagctaacaatgcattatgagcttccaatgaactgagagc

SEQ ID NO: 149853 - DNA, 414 bp, Glycine max
  unsure (1)..(414): unsure at all n locations
tgagggataagtttgtgtaagagccagaagtgattatgttttataatgtatctttgttaaaagatagtataaacttggttggtttccaagaactcgacttagtcttagtggtagaaacgaaccggtataaaactctttgtacatatgcttctctctttatctactttatatactaattgactgagggttgacatttgatttcttttgaaaacaagtttttcagtctgataagtatcgcatatatgtgtctccttgcttttacaaaaactgtgtttcctcgtttttaacatacatatgatagttgagttcttacgaaaaagtctacaaaaaattntaaattacaattcaacccttctgttacatgtgctcccatatgaagtcggggatacaatacaaatatgaacaccagcaaaa

SEQ ID NO: 149854 - DNA, 424 bp, Glycine max
agcttaagtgcatgactcaagataattctttattatataaatacacgaaggcactcgtgtttgataggctgcatgtgtgggtacctacgtgcgcttactgtttatgatttaggcatatatcttacagtgtcatattttggacataaggattaattgcataaaaaatacgcttcaagttaaaaatatactaatatatttataaatttttaaatagatttttgataaatagttaagttattttaaaaattaccttatttatagttaggtatttttttacctgtataattactacgataagagttgaacccccaactccgtataatttatctaaatcatccatcaataagttgaccctaataggtttggtttattttcattatgcgaattattatggaaaaagatgatacaatagttttaattattc

SEQ ID NO: 149855 - DNA, 468 bp, Glycine max
  unsure (1)..(468): unsure at all n locations
tgtgtcagtctcaaataaaccaatgtagttatactactttacaaaatcatggaagtaaactcaggtccacgatgaaacattaattgatttacagcaaataaatcatgataatatcaccccacacaaatgaatcacatacgttttctacaagctccaatgctaagtcctttgctgattcaccatcaggataatacaccgacccaattaaattgctgaacttatcgacaccttccaggacaagtcgaacctacataccatttggattagaaaattttcagaaatgcaaaatcatataacttatagaaacacattacttacatctcgattcaatacacgcatctcagtgaagaatttagcatcatgtgcaaaaggatcagctgcagtttcagcagatgttgaaactgcaagtctttgtgcagatgtaatgtgggcttgatggttcccangaacatctccattggtgtcatc

SEQ ID NO: 149856 - DNA, 374 bp, Glycine max
aacggatgaatgacacaatgaacactccaatatgacaaacaaaatgtaaacgtatcatctgatggcgcacaatatataatcctcaccaactgaatctatttaagctggtgagacgtgaattcattaagcctacgagctggatgcctctcaaaaaaagtcgcttgaaatgtagagtctcttgaaaatccttgaatatggtcgtcttgataatgcttctgaaataacccatcacgccattcaccgaatttatgtttattcttgcagtgacataatgccgccggctgaccagtgggtgtccctacatttttaattaccatgttgacactactctatatatgagactaactcctaagctccttctgtctctgaaaaaa

SEQ ID NO: 149857 - DNA, 458 bp, Glycine max
  unsure (1)..(458): unsure at all n locations
gtgtacatcananataaaatgaatgtggaagtactattttttttctaacattacgttcttaaatagcatttcagctctaagtattatgaatagaaacatcatggttaaaccttaaaagaagagtttctactataagaataacaaaaggaattttaacaattaagttatgtgttaatagtatacaatatatttttgtgctatcaaggagaaatatatagtacaatctgaaaaaaaacaagaacccctcatgcgtgatcagcttatgtcattttggctgtattaaacatcgcgtctccttataagatcagtgtggtgtaattatagttcccatagtcttaatgactcgatcttcagtctacacatgttgcacaactttaatcccactattaagttaccatccgatttctaaccgacgtcgtaatgtaacaatcttgtttcacactagcattcatgattta

SEQ ID NO: 149858 - DNA, 460 bp, Glycine max
  unsure (1)..(460): unsure at all n locations
agcttttagaatttataacaaattatcttttttttaaagaanctatccatgttgcttttgatgagactaaccctataaggccaagaaaggaaacacttgatgatattatacgttcattagaagacatgcacattgatgagaaagggcacaaaggcaaaggaaatggaaatgaagaagactgtctaattgatgaaaataaaacaaatatagatcttccaagagagtggagaacttcaagacatcatcctcttgataatatcattggtgacatctcagaaggggtaacaactcgacactctctcaaagatgcatgcaataatatggctcttgtttccttaattgaacctaaaaatttatatgaagtcataattaatgaacattggattattggtttgcaagaagagttaaattaatttgaaagacatacaatctaggaattagttgacacacctaataatca

SEQ ID NO: 149859 - DNA, 352 bp, Glycine max
  unsure (1)..(352): unsure at all n locations
cattgggacatcggaatacaactgagcactgctttantaagtgttaatctatctacaaaatataaatttttggtcttccaatttgatagtctttgttgcatcctatctacaatgtcaccataagaagatggtgaaactcttttaagatgaatgacgatgctcaagtatcttcctaagtcggccattctgtggaaacccgaaccgacactaatcgtgtcctcattgtcctatgcacattatgagaaaagagaatcctcgattactccttactaactttctcgccacaactctcacaaaataatgtctagcgcgcatgaatagcatctacgtttctcatagaagccttcaccaa

SEQ ID NO: 149860 - DNA, 466 bp, Glycine max
atccttaagtcacctgcggcatgcaagcttctaaactttatacaagaatgaagctctgatactctcttgttagacaagtggcctcagatatcttaagaagggggggttgaattaagatattccaaactgtttcccctaattaaaaatctatttcactttttactcaagttatgaattcccttaatgacaatcttcttaaatattaattcacatgaaacaatttgaatatgaatataaagcaataataaataaaggagattaagggaagagaaaatttaaactcagttgtatactggttcggccacacccttgtgcctacgtccagtccccaagcaacccgcttgagagttccactatctagtaaattccttttaccagttctaaacacacaaggacaatccttcctgttgtgttagagatcctttacaacaagagactcacagtctcttaactccttatagaatga

SEQ ID NO: 149861 - DNA, 450 bp, Glycine max
  unsure (1)..(450): unsure at all n locations
tctagccaaatggacttacctngacttaattcctttgattgcctttttgtagcctaggatccctttccttgttttgaagctcactacaagccttaagtgaaaaaccatgatatcaccatatccttaaggaattttggagctttggaattgttttgggaataagtgtgggggtttttgtttcattggataacatattttgttggccatgcttcatgatatattttgagccatacttgatgtacattgcatattggttaaatgttggacatgctgaatatgatgttgtttctcaaaggctacagagtaaatatatatatatattattaaaaaaaatcaaaaaagaaaaagaaaagcaaagcagtgaagttgtgtgaataagataataactgacaaaagaatgatgagactcttagttctactctttatgtctaaatgatatctgtacttctt

SEQ ID NO: 149862 - DNA, 466 bp, Glycine max
  unsure (1)..(466): unsure at all n locations
ttaagtcaccgcggctgcaagctgatntcctttagtagggaatctatcctttctattatggagccaaacccagtcaccctcattaagaactagctcatatcttcctttattgcctttagttgaatacacctttgtttggttctctatttggttcttaaccctctcatgcaacttctttacaaactctgacctacattccccttctttatgtataaaagaagtgtccaatgggatgggaatgacgtctaacggtgttatgggattaaactcatatacaacctcaaaaggggactgtttggtggttctatgaacccgccctattatatgcaaattctacatgaggaagatactcatctcaagacttatggatgtctttcacaagagcccttaataaggtggatcaagacctattaactacctcttgttgccatacatttgccatgacagtggatataaaagaacttat

SEQ ID NO: 149863 - DNA, 472 bp, Glycine max
  unsure (1)..(472): unsure at all n locations
tgatctcctntgttccgganacctttcttttctcatgtgcactctatatcccaatctccgggttcgaaggcaaccttctttctccctttgttggcttgtttagcatagcttttatttttcctctcaatttgatctttgactctctcatgaagcttcttcacatagtccgcctttgcttgaccttctttatgcttaaaaacagaaacattaggcataggcaaaagatcaagaggagttagtgggttaaaaccataaacaacttcaaaaggagaacaattcaacatggggtaaacaagcttcccaagtttttaagttcttcctcaaaactgtcctaagcaaagttcccaaagtcctattaacaacttccgtttccccatcggtttgtgggtgacaagtggttgaaaataacaatntagtgcccaacttgctccacanagtcctccaaacatgacttagtaacttagagtccata

SEQ ID NO: 149864 - DNA, 445 bp, Glycine max
  unsure (1)..(445): unsure at all n locations
agcttgcatgatttacatctgcctctntctcaagcttatncttcttgatatcatcaaaagcttcatgatttacattctccccctttttgatgatgacaaccacctgtatgttaggagcaacaaccaagaaaatatctatttgcatatagtttactcccccttggttctacaatgattgcttatatgagacaattgaagatttcatatttttcatatataaaaagttgtctcataaaacaatagataattcttcttactattttatcttttatctttctctccccctttgtcaacatcaaaaacaaatcatgaatagagaggagaaagatgtctccacttgttgcaatgtatgagaatcaagtgatatcaaaaggcattaaaacaatcattctatattaatcaagccgaaacaagttcaataacacatcaatcagacaccattcaa

SEQ ID NO: 149865 - DNA, 420 bp, Glycine max
  unsure (1)..(420): unsure at all n locations
atggactaaccttgcatgaattcctctgattgcttcttttgagcacaagagcccctcacgttgaatagaagctcactgcgagccttacttgaaaaaccatgatatcaccatagccttcatgaatctcggagctttggaatcggatcgggaatacacgcggggggtttccagctcataggacagctggcntggttggctatgctccatgatggtatttagggccgtacttgatgtccattgtctattgcccaaacgtatgacacgctgactgaaatgtcagggctgacttgcttcactaaaatgagtacaacacgagctctgaccactgatcctactaacgacaatgataatctatatgtccgactgaatgagatcttatctggcacacgactgatgaacctctcggttctactcttaatg

SEQ ID NO: 149866 - DNA, 493 bp, Glycine max
  unsure (1)..(493): unsure at all n locations
ttaagtcacctgcggcatgcaagcttaccattcccaggttttcgaaaaattattaattgataaaagaaaaataaacattactgcttacaaacagctgggttctaaatcatattcgcattttccaaatagagataactaaggccccttgagggtgccttcacaagaattagccagacatagtgagattcatacttacagtttatcggagaaaacttttggggtagagggggaaagatgcataaaagaacttgatattattgcacatacaactattacaagcttctctttctaagtttctctctctctcaatattgggtatgatattgttcagcgtgtgtgttcaactgaacctgaacaccctntatatagagaaagtttatacaacaagaacaaacccctctagtcaagaacagtaaaattactgttcctttactctgtcacacggctgtcctttancaatacatttattacagataagctccatgtctaatct

SEQ ID NO: 149867 - DNA, 420 bp, Glycine max
ttcctaagttccctaatcttttgtttagctttgtcgctaattttaaaaggttcgaacaaaggtttttccatcgggatatttggctgagattcttataaagacttttgtttaggaattgtcttggctttgaaagactctcctaaaacttgtaaatatttgttggtgtaattagcctgttccatgaggcttttgaagtccttagaagttacttcctcgttgacatcttttgttttaaatggactggccataacaggtctatcattgtcgtcttttatttttggtagttgaaattgtgttgtgggaggtaattccgattagatcatctcactgtctttgatttgccaaatggcgttggttgttgggtcacctatgatatcttgttgccacgggtaatctatattttctttaatggtataagca

SEQ ID NO: 149868 - DNA, 437 bp, Glycine max
  unsure (1)..(437): unsure at all n locations
agcttccatcaagtggttatatatcacattagcttcaagtaggtgctctctaaacctccattaattntcagctttatcttctcccncatcgttgtttcttcatttttctccatgtatctcctcacatgtcttgtgctaaattatgttaacatgattctttagaatttccaccgattaaactttggtatagaagctaaaattgattctccatggttcaaatttcttgttcttgttcttgaaccatgaattgtgtggagttttggttcctttgagtattgtcttgctattttttgtggctgaaacctaaatcataaaattcttaccaaaacattaaagtagaagaaaacctacaaaatctagagtgacttgttcacctattgtagtttttcatagaaatcatgtctagtcatgaaacatgtcacataagattacttatg

SEQ ID NO: 149869 - DNA, 410 bp, Glycine max
cgtagaactgatgaagaacatctggcggtgtataagaattaccactctcatcgcccagccggtgttgtaggttgcactgagcaatctttgattcaagctgggctagttgttctctcctccgaagaaaacaatgctctcctccagacccacttccaattcctaacttctgttttgatttcatccagaccataaagggtctttatctgtcgagatactgaacaatctagctaacatattcttcaatatcactctatctatccatgtctgtctgcagaattctgttgacgaaactacctatgttggggcgccacagtcttatatccgcatgtcctaaccttaattaatatccacacttaccactgtcttcctgggaattccaaagatcatacgcatgacgacattctctatta

SEQ ID NO: 149870 - DNA, 468 bp, Glycine max
agcttccaacatacatataaagcaccatctgataagcttcctccggtgattagaatagtttttagagtttatcatcctgagcccaaaacaaaatgttcaaaaaatcaagtcacgacctcaccaccttgtacaagacacacttcgtcaagcttcttatgaaggtagtcaagcacatgaactgtgagttctgctgccggtacagacagaccaaactcaaagtatacagcaggaatagcctcatgcaccactccaaataggaactcagcgcctgagcaaagactgaatccaacgaatggccatcagatactatgacaaactcacaaccgccaaaacaaactaaatttcgagagatgcctttcaaagaaaattccaaatgtagaaaccaacttaaaaaaccaactagtctacatacaaacataaccctaactctgctagagtttagaaattaaagaaaacagaaacctcgat

SEQ ID NO: 149871 - DNA, 429 bp, Glycine max
  unsure (1)..(429): unsure at all n locations
catgaaaaagatccgagtntgattattctacagcatatatttttgaagaaagataataacttttaaatatgactaagtctagaggacagaagattaattttctagtcaatctacaagattaaaattgaaataatacctcaaaatcttaattacactcggaaaaaaaaaatcgaacatgagaagatccatcatccccacatgcttcacctgtatttctgtctaatgagaagaaagggacaatctctttctcttacctccttgaattgcagtaccatgaaagttcttaaaaaagtttaaggagctacaacgaaattcatgttggagtttatttttttaactgcacaatttcaattttgaagttgcaatgaaagctttacaagttctgtatccatccatccatagacagtcattacatttgacgtacacaaa

SEQ ID NO: 149872 - DNA, 469 bp, Glycine max
  unsure (1)..(469): unsure at all n locations
agctntaatgcagctcttcagnttatgtttatggtgacattgagattaaagtntataatgatagcatcaacggtgaagttaaaagcattccagagatatgtgttcgccgcgacggtatggcaacttatatgcattttttctcatatagctttttttgtaagacaaacaaacattaagctctccctgaggacattggacattatataggttcctgttatgctaccataatgtctcactaagttagaacccaatttggactagcttccccatcatcaatgccaatctaattgtttaagaacatttactcccttatcttaaaccttaagcttatttttatntttaaaaggggttgctgcacagctngaggtatatatactaatggcttaattacaattaatctcatttattccaagaaatcgccaccattattatatgcagttaattacactgataattatggtggacaaaa

SEQ ID NO: 149873 - DNA, 466 bp, Glycine max
  unsure (1)..(466): unsure at all n locations
taacataaatgagtttacttctacaatctttccacgttttctatttaatattgcaactgccgggtgccaaccacaaaccgttgaatctgcgaataagtgtacacaactattttaaaagaacacagatcgagtagtatacatctatatattgagtgtttgtttgggtatccttctctgttcagcatacatggctacctcttctttcaaacacaccttaaaatttctattcgaaaagaggttgtcaaaaggtttctgaaaaaggaatggcatggatgactttatgaaagtgtcgaaacacatggaccagactccttgtcctgatgagtgtgggagtattatatatgttggcaacaagcctcctgcagaacgtgtatttcccattaagagtgggtttgtgaacgacgttgtaacttacacatgtcaagcatatcgagtataaatntactcaacaagctcagtatcaaag

SEQ ID NO: 149874 - DNA, 388 bp, Glycine max
tgactctgggcaatttctttaattctagtcacttaaaaagctgtgacttttgaaagaatcttcataaacaagtcacttgaagaattgtgacttttgtaaatgtatttttctaaatcagtcactggtaatcgattgccattaaggtgttatcgattacacatcaatagatgtgactcttcattttgaattttgaaaattaaaacgtttaaaaacactggtaatcaattacaagtattgtgttatcgattacacaagttaaaaatgtttaaacacaagttgtaactcttgaaatttgaaatcttaacatattataacactggtaatcgattactaccttcgtggtatcgatcacccgagagtaaaactctctggtaatgattttgtgaaa

SEQ ID NO: 149875 - DNA, 457 bp, Glycine max
  unsure (1)..(457): unsure at all n locations
cctccccactatactataatctgcgcgcttctatttttacttgatngtcctcagctccctaatcttttgaatacctctgagcctaagcccaactaggtagctcttaagaccgtccatgtggacattatgcttgatagttaaatgccgacgcgttcctacacttgccaatttcccagatggacatcacgagggcatggtcgtaccaaatcctaagaactcggagtatcatcttgccatatcgcgaacgcttgacctctgtctcccgaacccccgcttataaagcttgtacttatgtggcaaggcggtcttccttcaccttcttgtctgcaacgcgaactttgaccattgtactgtcttcccgcgatgcttcttttcatgtccgccatgaggggcttatagcctaaaccatactacccacgagtttcttgggtatgtatcacgctagttatgccgtcgc

SEQ ID NO: 149876 - DNA, 438 bp, Glycine max
  unsure (1)..(438): unsure at all n locations
agctnngactatactatacttctctcgctttccattacccctctctacaaaggtacttcctctctttgttcaaaggacccttgctcttttcttatttttgttttaattaatcgaatcatcatcttcgttttcttttttctttgtttttatgtatatattcggacaaaatcaatacacacttgatacaagcattgtgtttgcttgcagggtatacaacaagacgaagagattcgaaggattcaaagagaaaataaggccaggtattgctttaaccttcgttaaattaggtatcaggttcagtntacttacctagttgttgagagtgaaaactgagaattaagatttttttaaaacaaactgctgttgagaatcttctgtaattcctgtgcattatgattcaccattgctgaatgaaaactcgcgaatatagatagatag

SEQ ID NO: 149877 - DNA, 458 bp, Glycine max
  unsure (1)..(458): unsure at all n locations
tgtagaaaccaaagagatcgagatatatagagaaaatctctcttgtagaaaccatagaaagaaataatttttttgaattgatttttttactgctttgagttgcttactaattataacaaaatttcacatgaaggcttgtctgtttggccttattgtgaaatattgtggagtacacacgttgacaacaattntgtgtgtctgctactctgctgtcatataaaaacactaaaaagaattttggcaaaacaccatgaagagttaaaagatatgtctagttttctacatcggttcaggccaaaaccgatgtagaattctagacattctacatcggttattagaatgaccgatgttgaaatctgatattctacatcatttacaatgacacgtgataaccgatgtaaaaggtgccgataccgatgagaaagcctattttatatgtgttgcccctctttataata

SEQ ID NO: 149878 - DNA, 437 bp, Glycine max
  unsure (1)..(437): unsure at all n locations
agctttngttagcctaaccctattctctttttcttgtcacaaattggtggttgaactttgtgtaaactttatcttgaattgctttanaactcaaggagaattatagagtggaaaaaggcaagagtgtacattttttttaaaaaaaagccatatttgagagatacacttgagtttggtgaggttctattttctttataactatgattatttttattttgaatatgccaggtagtggtgaacatgaattggatggggcacaaagattcttgttggatgctctcaatgctcaaatgcaaagactattgagggagaacaacgaggagttgtatgaaagaattgagagattagagaatcgtgaacgtcatgaggaagaaaggagaggagcaaatggtggtgatccaaggccaaaccgaattgaaggagtcaagctcaacatt

SEQ ID NO: 149879 - DNA, 422 bp, Glycine max
cgaggttccaattgctggaacacagagctaccactctcttcaagagaaaggatgtagaatttataaccaaagactcaaaaaaagggggtcattccgaaacatctcctgtggttcttcaagaaggtgaaaaattataagattccagtgcaaatgagtctcatttggctgttgaacctgatcctccacagctcaattctggaatcaatcacagactaaaaaaggtcactgaacctcccgaaagatacggatttaaagacatggatgcctatgcattacatgcagctgaagaaacagattcaaatgaaccagccacctaccaagaagctatcaatcatcctgaagctgaaattggttgttatctatgaaagacgaaatggaatctttacataagaatcacacctggaaacttgttgaactaccta

SEQ ID NO: 149880 - DNA, 373 bp, Glycine max
  unsure (1)..(373): unsure at all n locations
agcttccatcatcaagttatggcatatctattgttcanaattaagatgaaacacttacccgtgtgagattgatacactttgagtgattttcatctatttttgttggacccagtgtttcctctaatagatcgtttagaaatgaaatgctaacatccaaaatctcatttatggttatgagaaaatttcatcagcacactctcattccccgatagacacattgtttttcatccaaaaaacatatgttgctctgatcagttggaagttttgtctctttactagagcatgctcgcattntagtgaagaaaacaccgagactattttagtctcacagttatcaagaactacgtaggtctgagttcctcatcacaaattg

SEQ ID NO: 149881 - DNA, 304 bp, Glycine max
  unsure (1)..(304): unsure at all n locations
gacacataaatctaagctcttgcaagctacggtaaatctgggacctagccatttctaagtctnacagaggccattgcctccctcgccaagtattataaccaatcgttgaggtgcttcacctntggggacttccagctatcaccaatggtggaagaatttgaagagatcctaggatgccctctatggggaaggaaaccatacctcttttatgattctatccctctttagctagaatttctaagatagtccaaatctcggctcaagaattagactcacataagcaatttataatggggtggttgga

SEQ ID NO: 149882 - DNA, 464 bp, Glycine max
  unsure (1)..(464): unsure at all n locations
agcttcataaccatgttctcattgtacattcctatgtaagaaacaactttatgcattcaatattaacacaaaattaaaaacctcaacatcaacatcaaccataggtatattggcacaaacctaccttcattctccatatataattttctgaagttacaatagtttagatagacatgtacctctttccaataacgtggcacttgttgaacttagaaacgcgtacacaatgctgcatccatgcaacacattagtaattttgatgcaacaaaacatataatttgaagtatgaattagttcaaaaattggtaataaacacaaattataaataacaacttcacatgaagatacatcaatgtagttgtcgaacctcatatcntgttatgttgattgngctatcatcaacactatcgacatcctcagctacacaatgacttgtaaaatgggcagtttggtcgtgcaacaat

SEQ ID NO: 149883 - DNA, 398 bp, Glycine max
tactaagcaattaacttgttacaagagaatttattccctagaaaaaacataaaattgagctccactaaaaaagacaatagtttgaatgacaactcagggatgttggcgaagttggggtatattgctagaaagagagagctggaatttgaagacgactcaaggatcttggtgaaatcagggaatattgctaggaagagagagctggaatatccatcagcctaagaaaattcaaagcaagttccgatcttcttaaaaccaagatttggaagcttcaaacaaatattagtgaatacccaaaattatttaaaacttgaaaaagagaaaatcttcatcaatagcaagatttcccgagtgtcataatgggctaaaacaagacaagcaaagcatatgctgcaaca

SEQ ID NO: 149884 - DNA, 326 bp, Glycine max
  unsure (1)..(326): unsure at all n locations
agcttggttcgaggtacttatccgcngattatcttttatcgacgaagaacgaatgatgaacgtcgaagaacggttgaaagctttgcgagattcctcacggaaaacgttacggaaacgtttctgaagcgcctcggcttagattttcttcacggaaacaatttttccgagctaattctaaagatagagaggtgcctaatgggcttgacccattacttcttggtttcctcccctatttatagcaaaataggggagggtgttggcgtctcactcgcccagtcgagcaggggtgcttcctacagaagcaaccgccttctggatgaattttc

SEQ ID NO: 149885 - DNA, 244 bp, Glycine max
cgtttttttatattcatggattaagacacaacagctttcagtgaaaaagcttacttaattcaaaatacattggccaacgtaatcaccctaccactcaccccttaccaaaaaatctgcgacatcactcatctgccctacccaaaatgcctacctccagtctccttgtcctcaacgcctaccattccttctcacaacggagcgcctatcccccacttccattcttcatcttcccccccctcttatc

SEQ ID NO: 149886 - DNA, 384 bp, Glycine max
  unsure (1)..(384): unsure at all n locations
agctntgctnttaaggcttgtacctcctctctttcttctggagcttcagcctcttcctttctcgcagtccttagctttgggagccaatccaacccttgtgtccggactctcagccacttatgatagtcgttgatgatcccattactgcttcccctaagctctatgccttcctttgcgccacatcctatgccttgcgtactccttgaagcacctcatgttggggtcactgaaaccccgtgtgatgaaaggcatgatgctttcctccgatggtgctcctctaatggggtagccaagttgtcttaaggcgaggacgtggatataattaatacaacccctttttcccatcaaggggacatttagaaatccctcgcatgagaacaaaac

SEQ ID NO: 149887 - DNA, 385 bp, Glycine max
  unsure (1)..(385): unsure at all n locations
agctnntgagcttgagcacccacgagtgtttatctccctantacctcgcggaaaagtgactaacaccaactgtntcagcaccctattacctatcggaggagtgtatgtacggttttcttggagccactgttccaagagcagtgtaaggttttcttctatagggggttttgtggattctagcgagcggttttcggcagtattgaaaacaatgtgggacaatgtgggtgtctagcaagtggtttccaacacatttcatgcgagacgagatagagaagaacaagtgcacggttttcgagcgcgcaggttgtgaaatttctctaacgttttaacttataaacataacaacatctgttttttaaggatacccgatgtaaccttaatatag

SEQ ID NO: 149888 - DNA, 279 bp, Glycine max
cgctcaaacacctcatttccatccaatctggtgcgtagcaacttggcaagaacactaccaatcttgggaggcaattggtggttcaacttcacagcttcaacaaaggcgacaggggcattagctatcttagggtgctccactctctagactgtgcgagcagtagccctccatttggtaaccttagcctcaaaggatgccaccttgtttagcgcctcttggtgcctttgtccattcttgtccaggatcgccaaacttcattggtcgaataagaatttcatc

SEQ ID NO: 149889 - DNA, 328 bp, Glycine max
  unsure (1)..(328): unsure at all n locations
agcttataatatatcgatacgctctataattaacatcaganactcactgaaaactcagatagtcataactttacacatggatatccgaatcgggtgcataatatgttaagaagctcgaaattgaacaacatgaaatcttgataaattcaaatagtcataactttatacacggatgttcgattcatgcttataatatatcgtaacgctcgatataaacatctgaaactatctcgaaattcatatggtcataacatttcacactgatatacgattcgggcacataatatgtcgagaagcttttaattgaacaacggacactcttgagaaa

SEQ ID NO: 149890 - DNA, 222 bp, Glycine max
ttttacatccgagcgaaagttatggccatgtgaatttctcgagagttttcgatgtttaattccaagcgtatcgatatattataagccttaatcggacctgcatgggacaagttatgaccatcttaattttccgagagcttccgaaggtcattttcgagcgtctctatatgtgatgcgccataagctaacatccgagtgaaaagatatgaccttttgaatttc

SEQ ID NO: 149891 - DNA, 450 bp, Glycine max
  unsure (1)..(450): unsure at all n locations
agcttgtagtggaaggggagaccttctattttatgagtacttatacacctcaggtatgattagaagagcactgtgaaataaaattttgggaggatttataagctttagtccatagggaataccattacgagaataatattttcttaggaggggatctaaatggtcatgtagggagaacatctagaggatatgagggttcatatatggtttacgatctangataaggaaatgtagaaggtaaatctatcctagatttcttattagctcatgacttcacaatagccaacacttatagcttctttntggtgttgctntgtctgcttactgtactaaggaaaataattgtgttattgctggtgctggctattacaatacanaactgcatgtcatagatgggattcccaacttatctatgttcctcaactatactattganggtgggtttatgac

SEQ ID NO: 149892 - DNA, 348 bp, Glycine max
tgaccgccagctaatcatttgatctaacgaattcagtaataactttcttagaaaggactttctcccggacaaaatgacaatatgtttagttctctcatggaatactggattagaagctatatgtatggcttcctgattatcacaacatagcttcatttgttgagtatttctaaacttcaattctaaaaaaaattggttaatccaaatgaactcacaagtggctacagccatagctctatattcagcctctgcactaaacctttgaacaacattgtgcttcttactctttcatgagacaagaattactccaacaaacacacaatatcttgaagtgggacgcctatcaat

SEQ ID NO: 149893 - DNA, 191 bp, Glycine max
cagaagaccatttttttttttctttacccggcgaccggtgattaaccaacccacctcagggcactcctcccatatactctcaggcaaataagggaagaaaccatctgtcctcgtctcctttaatcgcccaatgatccaccccactagccccttatcgcaaccaacccaaaaaaacgccctcctataaagga

SEQ ID NO: 149894 - DNA, 177 bp, Glycine max
gggggtttttttttttttctccacccgggtctagtaacgttatataacgaaagagctgacgaagttgaatgatgattacttcacatactccaaccagatggttggctctttaccttattggacgaaaggcaaactctatcgtggctatgatgaaaacagatcgtgacctaatgctca

SEQ ID NO: 149895 - DNA, 297 bp, Glycine max
  unsure (1)..(297): unsure at all n locations
agcttgngaaatccttttcaagcgctgcttctattcaactataatagacagngcaggaattcattggtcaatttgagaagtgtgtcgaaatggtgaaggggttggaggagccatttctagtggaagtgtttctcaaggggttaaaggaagacattatcacttgaagtaggtttcatgaaccaaagaacttgatggaagccatggttaaggctcgaagagtggaggataagaacaaaattttatggaagttacccgtgggtaatgtgagggggagtaatttgcacgaaactgttcatt

SEQ ID NO: 149896 - DNA, 344 bp, Glycine max
  unsure (1)..(344): unsure at all n locations
tcttcaacttttcctcttgagtcttaatttngtcttgattccatcttgaacatactgaactcatcctttgattgaccttagagctttttgtcatcacctttggcatcatgttttgttatcatctttgttatcatcaaaacatctttgaatcattcttgattcaccatgaagccttgcttctacagcaagggtaaggctacatacaataaccatctcctataccttcacatagtgaggagccttcggacaccggagtacgttagggttttattgatgtatttgctagtgttgccaacattggtctaaaactataatatgttgtatgtntatgttatgaagatatg

SEQ ID NO: 149897 - DNA, 431 bp, Glycine max
  unsure (1)..(431): unsure at all n locations
gatccttaagtcacctgcggcatgcaagcttcccagttatagagagctaaatcctcttgtggtttttccttgtaggtacttgatgcaaatacatgtatatctagttaatgatgttttatgtgttctctgtgctatcagtatgtcatatcagcgtgttttntgccttgatcattgtaatgcatgcttgtgtaggatctttcaacagtagaaactggtctgattcttagaacttgataggacatggctagtttatcgtattatcacaatggatcggcgtacggtaacctacttgattgtatgattagtttattgcagatctgggctaaattagtccaacaagaagaatctgaggatgatgctagatccggattaagctagactatcatgaggaatcagtggttataatttcaggagacaccatataacacatg

SEQ ID NO: 149898 - DNA, 384 bp, Glycine max
  unsure (1)..(384): unsure at all n locations
agctngcttctcgttgaaatgggntaaatgcatattggatttattcagtattacggaaacaacccatcaatgtccatgtgtactttggaagaaaggtatcatctcggtgttcaaaaagtcatgatctttgtttggatagatttgttccctctctgacttgggaaatgaaagcatgggagacaactcaagatgaaatgttgattactggtggattgcatgtcgaggatttaacataatgggtgtgttcagggtgttcaatcattttaaaattgacactttttgaagcttcatgtcttatactatggcangctatggtgaaatggttatactataagctttaatctgaaatccacaagatgtcactctactcagtgaagttatcta

SEQ ID NO: 149899 - DNA, 342 bp, Glycine max
  unsure (1)..(342): unsure at all n locations
acttcacgaaaatgctagctggagcgctttttttatttttaaatnancnatcatgaagataaataaaattatttaaaacctctttatattttctataatacttattataaatacttttttctgttgatttcttaattaatattttaaaaataatgattaataagatttttttaaggcattagaatattagttaaaaagttaaaaatattatttttatataaaaaagtgtgatcagcgtgcttttattgtgatttctatcataatttttattataatgaataacacgacaaccacataaattagcgttctgctgatcatgtgcctttaaaatgggcaacaaaa

SEQ ID NO: 149900 - DNA, 216 bp, Glycine max
  unsure (1)..(216): unsure at all n locations
caccccccacaagagccatgaacgtgcaacccaccannacaaaccgacgagcagcagcaagacaaggaaaatttttgcgccacacaaaaccgaacgaggggaccaccacgcggagcaaacagccgacgaaagaacacgacagcgaagacagacacagaacaagaagatgaaaggggggcacaaaacacggccaatgaggaaagaaaacgaaccaac

SEQ ID NO: 149901 - DNA, 282 bp, Glycine max
caacatagcgttccacaacaaaacatatctaaattcaacattatttcttaaaagatcatgttcaatatgttacagtggatttatagtttgtacccactgatgaacaatgtgttgatattttacacaaccattaacttgaaaaaggatgattctgttaaagagtcaacttggaatgatctctattaatgattgacttaatatccatatggtggctactagtgcatccaaggatatgtcatgcattggccaatgacccacactcataatggtcaatatatggac

SEQ ID NO: 149902 - DNA, 435 bp, Glycine max
  unsure (1)..(435): unsure at all n locations
agcttatgtctggtcaagtacagtatttttcttatataatactcctaacaattgatgcatactaaattgcttccatttgttttcgttccatatcatttctaggacattgtgcgagactaaatttgtctcctttctgaattggaacgggtgatgctgagcacttttccatcctaaacctctctagtattttattgatatatgctttctaagacaagcctaacaatccttgtgatctatntcagaatatttctatccctatcacatagcttgcctcacccatatccttcatttcaaagttactagaaagaaacttcttagtgtcatgaagaagactacaatcattagttgcacgccatatatcatccacatacaagattagacgaattaccttactcccactggcctctagatatatacgccgatcacaagtatttt

SEQ ID NO: 149903 - DNA, 304 bp, Glycine max
ttgatggagtttgagttattttcgatgatctcattctctcctcttaacccaatattgaacaatctctaatgccatgtgttaaggtgtaatcaacattatataatgtcttactatagatgaacataagagaaaagcatgagcctatagccaacctgaaaggaactcttcttatatactggactatcatatgacttcatatgaagcgtgatggagtcaaaataaagaattaatgctgattctgcaagaaccatgaattcacatatcccaagttgtgcagcaacacatattgacctaagtaaacttt

SEQ ID NO: 149904 - DNA, 293 bp, Glycine max
tttttatggcgtgggtcaccattattggaaaacctgcatgcatatatttataaaggcaatagatctgaatatctaggaagcaatagaaattgggccctacattcccactatgatggcaggaaatacgactatagaaaaacctatggaagaatggagtgggaagaaaagagattagtgcaatacaatttaaaagccaaaaatattattacatatgctttacgaatggatgagtactttatggtatcaaattgtataagtgcaaaagatatgggggataccctaatagtatacat

SEQ ID NO: 149905 - DNA, 58 bp, Glycine max
acatataaggaaatacgtaacattaccagattaataacttgggaaactaaaactattg

SEQ ID NO: 149906 - DNA, 387 bp, Glycine max
  unsure (1)..(387): unsure at all n locations
agctntctacaggcaacaagaacttgttcatgaagtgctgcaatggtatatatgcagaatggaagctnggtttgcttttgatgcgattatcataccactgaanacctgngatcaggcaagtgccattatattagttgaaggacacaagatcctatttcgcctaagcttctacacatgtccttttttctttatttttatacttgagtctntattttattatgaaatctcattttgccactaggtccctggttaaataattgttaatactataactgatgaattttgctttgttggagcttttatataattagcagaaatctaagtntctggcctttataaacctatacgtattatttctatacaacatatatttttgaacgcctaact

SEQ ID NO: 149907 - DNA, 374 bp, Glycine max
agcttatccttatggcctacctgcggacttcacctcccgtgctcctccagaagatataagccaggcacctacttttgaggggcaactcccaccttatgaagactattccggacaagacgatggggaaggagatacccatcttggccccctgctccacctcaaagatccatccccgcatgaacataccccacccaacatagtccgccatatcccggcctcacccacacccgtaaaagaatttgttcccttcgccgaatataagggaaagattgacgcgcttgaaaagaggttaagagcaatcgagggcctcagtaattacccattctcagacttggcaaatttatgtcttggtcccaacatcgtcgtccctccca

SEQ ID NO: 149908 - DNA, 430 bp, Glycine max
  unsure (1)..(430): unsure at all n locations
agcttattaaatctgcaggaagctgaccatacttctatgcctgcaatcatgtacaattggacaccaattagatgtaccgcattattacagtccttttcataatagataagataatntcataggagtctcccatcagatcctccctctaggtctaacagcaggtcattagttataaattatcctatcatattatttaatgtaatttcaatattctaagttaagcatgagtattacacacacaaacatttaaatccaataagcaattatctaatttagaaaagcaggcaccttttcaagcctatcaacctcttcaagagtctgagaattcacaatggcagcctgcataaagcacatacatgtctaccatagataaccaaaatagctgcctgatgtaccacttctaagagaattcactctagcttatgaatac

SEQ ID NO: 149909 - DNA, 312 bp, Glycine max
aaaatacagctacctatgggaattttgcggacttctccgaatcaactacactagattggcactatgtttgaagacatgctaacgagttacttacagaaatgatcctacaattgaatcagctcgggttaagggtctgtgtatcctgatttaaccagtctggccgaaccgagtttaataacaatgattgggagggttccttacttactattgaaaatcttgctttcaatttgatattaggtagttaagttcttcttaatggagtatgtctcattaaagattctcccgcatttcacaaatttgaagtagaaaaca

SEQ ID NO: 149910 - DNA, 156 bp, Glycine max
tttttttttcccccataggagtcgaggagttttactgggcgttttttcaacttatgactgggaaaccctggcgtacccagtttatcacttgagcacatgtccttttcccattggagtagatcgaagagttctcccgtggcccttccaataattctc

SEQ ID NO: 149911 - DNA, 441 bp, Glycine max
  unsure (1)..(441): unsure at all n locations
catgcaagcttgctggagaatatattcattccagattcatattagancactctagnattgaaaaagcgtattntcatctacctggtaaaaattcaataatctttgaagatgatgatgacattgatgctttgctctccaagccaactattaaggagtccatgtttacttcttggctacaagctaatagcattttccatgaaggaaaacatctaacatattcgaaattcatagcaaattttacatatatagccaaggatagacgttggaagccacgcaaatgaggctatacaattggaaggcttaactaantgcctccaagtactagagaattatattatcttacgatgatgttggctgtggtaaacagaccaaccaattatgaacaaattcttatagtgaatggtcaattatatccttcattcagagaacttacttttctat

SEQ ID NO: 149912 - DNA, 445 bp, Glycine max
  unsure (1)..(445): unsure at all n locations
agcttaatgaggagaggcgcangaacacttaatataaagatttactgctgcgggaggaggaactagacaatttgttgttcaggtacttcattttctatctctctctgctgtgtgttttttctctctgcagaatttctcaaatatctccattgggtgttcattcatgtgctttggaagatgcaataagcaataaatatttacttatctgattgagtttttttacatggttgtataacccaacccaatggcatattgtgcaaacagatttttcttttctttcttttttgaatgtaataaatgttccaatgtgaaaaatgtcggctacactttctatgcataaaaaaataaaaaagatgtttctaaatttttataataactcataagcttctcttattcaacaaattatatcctattgatgagacgctttctcgattcttgttttaca

SEQ ID NO: 149913 - DNA, 380 bp, Glycine max
agcttcatgaagaactatgtatgacaaatcttcattactattattcagtatatacaaatgagcttgttgcaattcttctagacttggagtgctaacatgcagtcctcttgaacccttacctcccactctttcgtcatgccaagactcaggaagcccaacaggttttgtcttttcaatgtactccgaacaaaacttaatagcttcttttgcaatgtacctttcaataatagatgcttcaagactgcgtagattctttgtatacccctttaagatcctcatgtatcactcaatcgggtacatccactacaaataaataggaccacaatatttaattttcctcaccagatgaacaattaagtgaaccatgatttcgaaaaatg

SEQ ID NO: 149914 - DNA, 214 bp, Glycine max
  unsure (1)..(214): unsure at all n locations
attccccaagacttaattattaatcagttccttcaatcaagtcttatataatttgaggtcttattttctaaatgaaatgaatttgagttcaatctttccttatgatcaaccatgattgaggtcatataatatgggaaagaatttaaaacatttgtggcaattactatgcttctcctgtatntggtctattttactacctaggactgaaactatc

SEQ ID NO: 149915 - DNA, 342 bp, Glycine max
agcttgcttgtggagcttctactgtagctttatctttgagcttcaatgaggtccttcaatggtgatttttcaccatggagatgcagccgaaggcaaaggagaataggataggggaggcaccatccactatgccataagcccaggaagaaggagcttcaccaccaagaattcccttggataagaagcttgaagaggatgctttaatggatgaaaagaaagagagaatgcgggagcacgaaattgaacgaataaaagaaagataagacgtggaactttgaagcgtatctcataagacattcattcttcaaagttcccacaacgtgttacacatgcttctattta

SEQ ID NO: 149916 - DNA, 376 bp, Glycine max
tatgttattacactcggaattaaacatcacaagctctctagaaattcaaatgggcataacttttcaccccgatggccgattatggccaatcacatatctggacgctccctattgaacaacggaagctcttgagaaattctaatggccataactgttaactcggatgtccgaatcaggcgcatcacatatagaggcgctcgaaaatgaacaacggaagctctcgagaaattcaaatggtcataacttctcacactgaggtccgattgaggatcatactatatctagacgctccaaattaaacatcggaagctctccagaaattcaaatggtcatcactcttcacacagatgttcaattccgcgcatatatgtctaca

SEQ ID NO: 149917 - DNA, 337 bp, Glycine max
agcttgcacctgtgaatacacacattcatttcgtacaatattctcaaaaaattgcatgctaaatttaccatgcaagaaaataacaggaaagtttttgtaatattaaacaaccggaaggaacacatactctcattccaatagaagtagcaccaggaatcacttcactcccaaagtcatttgcaccaggaaacttctcacggagcaggtctaacatcacatttttgctaacaacatatatacccatgctagcaatataaggcatttcttttgctctctcgtcatcaagacccataattgagtatcaacctagaaagaaaagtggcattttaagcaattg

SEQ ID NO: 149918 - DNA, 384 bp, Glycine max
agaatcttctcttgtggcaaaacaatatagaaggtatattctcataagagcttggaagctgcacacagcttgaagtcatagatttgtcagaaaatcttctcacaggtagcataccaaccagttttggtaagctatcaaatctgcaagggcttcaactacagtgttaataagctttcaagcattatacctcctgaaatcacaaattgcacttccctgactcaactggaagttgacaacaatgctatttttggggaggttcctcctcttattggcaactagagaagctcgactctctcttttgcatggcagaacaagctcacaggaaaaataccagatagtctttcacagtgccaagatcttcacgcacttgatctctcttacaac

SEQ ID NO: 149919 - DNA, 342 bp, Glycine max
  unsure (1)..(342): unsure at all n locations
agctngagatgaggaagtgtagaaggttgatacttcctgcntttattcgntgaccacagagtggtacctggagatatgtcgcgggggtcatgagaccttggggacgtcaggtggggtgctattgcccaaaaccaaacttgaccaatcccgacccaacccgagcatagtcggtcagtgagaacctgtgatgtacctaaacaagcgagctctnggaagtcaacagataaaaggaacaaataccacaaancaaggaggcttgtggtggctggccagctgtgaaacttgattgatatgtgagatatggtctctggtaatcgattaccaagggtgggtaatcgaata

SEQ ID NO: 149920 - DNA, 341 bp, Glycine max
  unsure (1)..(341): unsure at all n locations
cctactgnagactatatttcttgcatgttttaatagaatgtagcttgtgttttcttcacaaatggggcatgcatgatgacccttaacactgttaccgctgagattcccatatgctggaaagtcattaatggtacaaaaaagcattgcacgcaatttaaacgtctccttgcaaaacgcatcaaacactaaaaccccgttgtcccacaaatatctcaggtcttcaaccgaccgagctagataaacatcaatgtcatttcctggctgtcttgggcccgatatcatcatagacaacatcatgtttttcatttcatgcacaaccaacgagggaaattggaattact

SEQ ID NO: 149921 - DNA, 394 bp, Glycine max
agctagattccattgtgttatggagtgcattctccaaacataacaagaacatgtttttggtgaccgtatacagaatgaaaacgtgtttctaatttgtgtggaggacaactccataacaaacaatagcacctttttgttatatgtaatatatattgcataagggaaatacattcccattacgaatatttttcagacaaaaattacatatacaacatgatgtgaaagtagcaaatagtttaatggaataatgggcccaataagattccatcggcctaaaagaccaagcaaatgacactatggtgggctggatttctcaccttataattgctattctaaccccagaaatggttaaataacttgctgctcctcctaccttcctaccctcctaactttt

SEQ ID NO: 149922 - DNA, 251 bp, Glycine max
tgcctatatataggcacagataccatttgactttgcattctaataatggatattaccaaagagaaatagaagataattctttctattcaaaggaaattaatattaataagtatagttagtaacacgtagaaactagtaatgaagaaataaagctttgtgaaaacaatagcgcaccttataatcttacaagtagttcgagtaattatcagcacctttgtattggaagcttacctaatatttcacaaacttta

SEQ ID NO: 149923 - DNA, 416 bp, Glycine max
ctcgacccggatccttaagcaccgcggctgcagcttcatacaactgttgtttttgattactatgaggctataatcgattaaaatagaaagtttttgcctttgaagaacattctctaactaagaaacatttcttcacacaaaccatgataatgcatgatgtgatacaaatatcaaatgtactaagatgtaacaaccaatataacaaccaatacaaatgccactcaatggagttggggatgtaaaaaccaaaacttcttcaagctttatcccttatgttgtgcaaaagctagctagttagttaagttgaacattctttagatagctagctggatgaaatcaagcttaacgaggtggatatagataaataatatgaggacaaagttttaaaatataaactctattaaacctttaattat

SEQ ID NO: 149924 - DNA, 408 bp, Glycine max
tagcaaatggacttgggtgttgcccaattttatcttatcttttgtaatactcaccacctctattagatctaataattttcacttttttgtctaattgtctctctactttattcaagttaatttctaaggcatccattgcccgagatttctcatgcagtgagtaaacataaccataacgtgaatagtcatcaataaaggtgataaagtatctttcctttccgaaagaactaacatcaaaaggtccacaaatatcagtatgcacaatttcaagaagctgagtgcttcttgtagctcctttctttgtatgttttgttggtttcccttgatacaatccacacaaatatttagatccggtaaatctagatcatgaagaatttcatcccgtaatcatgcatccttctctataat

SEQ ID NO: 149925 - DNA, 410 bp, Glycine max
  unsure (1)..(410): unsure at all n locations
agcttcatacttaanaccgtttttatctattaaaccaacatttaatcatttccttagaattacaagtaaaaaccctaatagaaaaactctgtaacacactatattccaccaggactcaattatcgaataataattaaataatatctgcaaaataagtttaaaattataaaaataattattaacaaaaagcatctaaagttaatacaaataaaataattataattgaccaatgccagtgttctttgttttcttgtttagcaagaaaaaatgataggatggtgttattttcaggaagcatagtccaacttaccgtaagccagtccctgatatatcatattccaaatgtatgcaagaacggtcagactcggggttgtgaagcttcctttggacagcaacatttacccttcaaa

SEQ ID NO: 149926 - DNA, 378 bp, Glycine max
  unsure (1)..(378): unsure at all n locations
atattcttatgtcagagaagaacgcttcttttgtgcttntatctataagcacggaaaagaagctaaaccaccctgttatcacataatagaacttatggaaaaagaaatatccttgacaattgttgcatttctcttgaacttctaaattgtcgnatgataaatttgattcactttgggattacagaaagttattggcttggctttcaaacttctaatctttcctctcatcacattgatatcatctttacagacctgagtgtttgtaaacgttntatagatggatattttattgcttgaatgacagtgaagtatgaatcctttagcgtatgtgctatactgcttttaaggcatggttttgaattatggtggacaatattt

SEQ ID NO: 149927 - DNA, 427 bp, Glycine max
agcttatttgtagttcttttagatatacaattcatacatctttgatttaattctttatacatggctttatatcaatgtttgcttgttgaatgaaacttcaccaaatgacacaagttccctgagtctgatactcgatttcttaccgatctattattactttaacgattcggtacacttttcgataaagttcgggactaccctagatctcgaacaactcccaactatacaccacccatgattgtaccggtgcctgccgagaacattactaatcctatccctgtttgtactaagaatcattcaactcaacccaatcaaactcaaacctataacttcaattctagggaggaggcacaaaaaactcccgtagaccacacgataattggttgtgtgccccatccaggatatacctttgaacggcatgcatttt

SEQ ID NO: 149928 - DNA, 373 bp, Glycine max
gttctgaggattcaagctgtgaccagtttggttcattgttaacggataacaagcttggctgcctttacttgcagtatactgaaatggcttcaccttacttgagggttccacttgcggagaaggtattcttttattgtcaagtagtattcactttttagcacctcttctcaatgttaataatttttgtctgtatgttacactcacaataaatacatcacttttgattgttccttgtttcacatagacgagttagctcgaagtcacccggcattattaacattgaagagtgtggatctttccccaacaacgttggatggctgtttcttcgtgagcatagatcgcagctcttgacacatgtaacatttattactgt

SEQ ID NO: 149929 - DNA, 369 bp, Glycine max
  unsure (1)..(369): unsure at all n locations
agctttcttaagaagcttctttgagaagctagatccttatctacccacacccttctattaactaaattaacctccttgaaaataattacggataaaaaataacataacaaataataataatatatagatacatatattaaggtgttacattgactcagtgcttttatgatttgacattgttacctgcataaactgagtcatagtctcctccagcttagtagtcctctgaaagatgttaggcccttgttggattggcttgttagaaggtccaccctggtccttgttgaattgattgtcanggtgtgatctccactgtccttgttgattataaggaccctgctggaagcctgagaatcctncttgagtata

SEQ ID NO: 149930 - DNA, 379 bp, Glycine max
  unsure (1)..(379): unsure at all n locations
attacattgatgtttgtatttatgggaggagtgtttatgtcatttttgttttaagagtagtgtcccactggtaaaactaactttccaaatgtttgtcttcgcaggaaatggccccgaggaagcttgcctcaaagaggtccaggaaggacaaggcagccgaaggaactagttccgctccggagtatgatagtcaccgctttatgagtgctgtacaccagcagcgcttctaggccatcaagggatggtcgtttctccgggagcgacgcgtccagctcanggacgatgagtatactgatttccacgaggaaatatggcgccggcggtgggcatcactggttactcccatggccaagtttgatccacaaatagtccttgatgt

SEQ ID NO: 149931 - DNA, 435 bp, Glycine max
cttcttgccatcgacaatggcggcacgtttttctctccagtactgctggcggcatccatggtaaaacacaccccctttgcaaatactctaaaaagagaccctatttagtaattagtttataaaaggatccctctacaataaatttgcccaaccttgcaccttattaacccatttgtagtcaattcatttacctcaacctttcgatcttatatgcatgttgcttcctcaatgggtactactttattaagggtttattcctcttttctgtgaatataacaaagtctcttttgcctctagtacttctattacttttcatctgggcaattgtgataagaaaatcactttgaggactattcttctatcacattactagggcaaaatatcattcatcatcacatcaaggcttgttcctctgcttgctttacaaccaatgca

SEQ ID NO: 149932 - DNA, 397 bp, Glycine max
  unsure (1)..(397): unsure at all n locations
ttcacacaccttatcttcaatattaacttagatatcacatggagaattggattgactggtggttggttctttcctggtctttgggtttctaaagagtacaccaaagcaagtacaaatcacaatttctgctgaagagtatggggccaaagaaaaatccttcctatctttgatacacagacagtgaagtaccatcctcatcattatctcacatgatcggggcaattttattctttcattatagttgcaaagcgtgtgatgtctctatttctatataagntntctctcnaaactcaattaacaatgacctaaaaatcattgcaaattggaataagctttagcttggtgacttggctagtgactcataattgattgtatccactttctgtccatccatatg

SEQ ID NO: 149933 - DNA, 417 bp, Glycine max
  unsure (1)..(417): unsure at all n locations
agccttttggcagagataacagctttgggctttggttagagaaagattgtgaaaaaggattgttttgaagaatatattatatcttttgaacatgtgcccaagtcatgctcttataaactcttcatgtctggtcaaagaaaccattggaagagttatgactcttgagaaaaccatgttaagagttataactcttaactttttcttcaaaactattcactggttattgattacacacagaggtgtaatcgattacacaatgtgttttatgaaaagttatgactcttcacaattggatntgaattcccacggtcggattcacttgtaatcaagactaatatagtggaatcgatacactatattagtaatcattgtggacattacaatcatttgaaacattttgaaacaaactgtcctggt

SEQ ID NO: 149934 - DNA, 434 bp, Glycine max
  unsure (1)..(434): unsure at all n locations
atcatataaatgcatggattattatacaaagcttttatgaaaggatgtgactcttcacacttgattntgaatttcaacgntcagatacactggtaatcgattaccaatatcttgtaatcgattacacccttttgaaatcaattggaacgttgcaaattcagttaaaagcttttgaaatcaaactttgtcactgttaaccgattaccagagagtaaaaactctggtaactaagaaaattttgagacaaactcttttgaaaaacaaaattgtgctatgtttgttttttgaaaaagcttttcaatacttcccttgtgaagtcttcttgatttcttttcttgaaccttgaattcatctnttcttgaatcttgaaatcaaacttctcctgatctgaatctgtcttgaaatcattctttggtctttttgtcatcatcctt

SEQ ID NO: 149935 - DNA, 404 bp, Glycine max
  unsure (1)..(404): unsure at all n locations
agcctttaacaaagatggttttatganaattgtcttataaactaccactctatgacggttttgtaaaaaccgtcctagaatggttctgattccaagatggtttttgtcaaatatctgatgaatccaacgaccgccgctaggctcaaaatctggagattccgccttctactgtgaaagtttctagaaccgatgacgacgacggcaatggagattgcgacgaagagtgaaaaatccagagattctgccctttttttggtctggttatctctcctcagagggatggatcangggattttactctgcaccgttccgttccattgtgatntgttgaaggttttaatggagcagcacaagcctttaatcaatcatgcatgtgcaatttgttaatattttatatatgcttt

SEQ ID NO: 149936 - DNA, 375 bp, Glycine max
  unsure (1)..(375): unsure at all n locations
atgatgctattctggtacttgcatgaaaaggacctgtttgagaagtatttcaaacggcttctggcaaagcaactnttgtcccgaaaaacagtctctgataatgcagaaagaagtctcatagttaagctcaagacccaatgcagttatcaattcacctctaaattagagggcatgtttacagacatgaaaacctctctagaaacattgctgaacttttatatgccaaccaccccgagttaagcaacggtcctacgcttgccgtgcaggttttgacaacacggttttggcctactcaatctactgttacatgtaacctgccagaagaaatctcttcactttgtgagaagtctatcatatataccttgcacacatact

SEQ ID NO: 149937 - DNA, 372 bp, Glycine max
  unsure (1)..(372): unsure at all n locations
agctntagtgccctgtaatttgaatcaatatttgacattcccataatgtattccctgacatttccttttccttgatacgtcatggaaatcaagttctgaaggagagtacttgtttccgccttatcggttctgaaggagtacttgttttcgccttatcggtttttgcaaagcgcttttcaatttcagcaacgaaatctatgacactagttatatcatctgaaatagtgcccctaaagacctcaggaatgccacacttaatgatcataagactcatgcctattgagtgatcccacttctcatgaagtttcctctattcagaggtactggaatccgtatgagaaaggggtntctcaatccttaatgtagggtcta

SEQ ID NO: 149938 - DNA, 410 bp, Glycine max
gcctcttcacgtctggaacatgaatgtagcatattatatcctaacacccttacgtgctttgctgatggcttctttccattccaagcttcaattggaggcttgtcttttacatacttaattggacatctggtgagtatgtaaacagcagtgtagactgcttcagcccagaatgtgttaggtagtcccttttccttgagcatcgatctagccatttccataactgtgcaattctttctctcagaaactccattttgttgaggagaatatgagactataagttgtcgctcaatgccttcatcctcacaaaatctttcaaactcgcgagaggtgtactctttgccgcgatcacttcttagtacttttatccattttccacttttgattttccaacgccttgaacttttgatact

SEQ ID NO: 149939 - DNA, 437 bp, Glycine max
  unsure (1)..(437): unsure at all n locations
agcttgtaaaccaatgctagccaaaaaatcttctatcgacattngtaaaaaataaaagcatcggactatgttggtagaaaacaaactcggccgatatttgccaaaaaatgtacttttggccgaggttgacgaaggttatttttagaggaatgctttgaaatcttaaaatttaataaagtattcaatccatattcaaataattggattggatttaaaatccaaaaatctgaatttgaatataaaaccaatccattaaaatggactaaaagtggtttcgatatgatcaatggattatgtattggtttatataactggttcttttttggaaaaatataattatataaacccaaaatggacacaataaacggggcatccccgcactagaaaaataaaagtctcctaatcaagaagactattcaagatgctaaacaatgcac

SEQ ID NO: 149940 - DNA, 234 bp, Glycine max
ttttgccatccttaatcttggtcttccctttattggaaaaaaagcgtttttgggttgaaaacttaatcctctggttgaactttccttgtgggacccggatgaaatatatttctatctatttaataatgtctgggtggcctctgggcctatctgttttcacttcactatgtgtttaccctgatcacctaatgcctgctttgttagggtcatggaacagtgaaactgggttgactc

SEQ ID NO: 149941 - DNA, 420 bp, Glycine max
  unsure (1)..(420): unsure at all n locations
gcttaccagtattccattgaaaacttttgntcaacctttcanagttagtgataaagctaaacaaaaaattaaggaacttataaaaacataatccttgattgaaggagtaggagacaaccatagtgaattactaaataaaattggtagtttacttaaggtcattccagacactccccaaactttggaaaatacatccaaaatggtgacgagaagtacctccaaattaattaatgttattaatgaagatagtgaccaaaactcataaaatgcnactgagaaagaatcaatataaaaaaagagtgtacatccaattaatccaaacattgaaaacaacctttaaattgattattaccgtcactgccctgatctttattaaagagagagtgaaaatattgaaaatttaatgaaaccacatctata

SEQ ID NO: 149942 - DNA, 428 bp, Glycine max
  unsure (1)..(428): unsure at all n locations
ctgggaagaaatatatgaagtacatatttatttgtgtttcgataatacaaatcaagaattaagaaatgttattattaataaactgtgtatctgattttgaatatgttnttaactcactttttaatgaaaatatattaattattaactccttaactagtaattaatctatctaangacattattagttagcaggattctaaatttaataacactttattacttaaacttaagattgaatacatgggctacttgagtccttctctgtattacctagcttagtagatatgttaattatatcgcaaagtaagaataaattatgcacgggtctatattgtgccatagatttatcatgaaatgggaaagctcatttacgagcttccaatgaagattcgctttatggaaacatttattcttatagtattttataa

SEQ ID NO: 149943 - DNA, 436 bp, Glycine max
  unsure (1)..(436): unsure at all n locations
agcttgctaacccatggaagctcctaatatctcccacactntntggggtgggccattcttggatggccttgattntctaaaggtccacttggaccccatttctaccaactacaaaccctaagaaaactatattatctacataaaaagtacacttctctatatttgcataaagggtatttttcctaaggactaaaagaacttgcctgagatgtcttaagtgatcatctaggctcctactatacactaaaatatcatcaaaataaacaactacaaatgtacctatgaaatcccttaagacatgatgcataaacctcataaaggtgcttggtgcattattgagcccaaaaggcatcactagccattcataccaaccaaacttggtcttgaaagcgggtntccactcattcaccttttcattctgaattggcataaccac

SEQ ID NO: 149944 - DNA, 419 bp, Glycine max
tccatcaagtggtatcagagcacaagagcttcaagtatgttctccttaaacctccattaattttttttctttaccttgtcttccattgttgtttcttcatttttctccatgtatctcctcacatgtattgttctaaatgttgttaacatgattctttagagtttccaccgattaaacttgctatagaagttagatttgattttctatggttcaaatttcttgttcttagttcttgaaccatgaattgtgttgagtttaggttcctttgagttttgtcttgttattttttgtggctgacacctaaaccataaaattcttacaaaaatattaaagtggaagaaaacctcaaaaatctagagtgacttgttcacctattgtagtttccatagaagcatgtctagtcatgaaacttgtcacat

SEQ ID NO: 149945 - DNA, 400 bp, Glycine max
ttaaccaccgcagctgcagctcagtgctattgattcaatttacatataagatataatctgacggtgactgcacaaaacatacaacaacactcttgcacctgtgcacattctgatcatggctaagtgattactatgttacctaggcatcaatttccctcaagcttttatttccgtagacaaaatgaaaccggccacctatggtccctatgagacaatacgcatttcatacctaattgagggagtggaatatctttcattcaaaacccaacctcacaggagtatatacaagagctcaccccggaacattatcaactctcctctagtgtaaaccctataaaacaatgagaacggctctcaaaataaggggaagaagcacgcacattatggatcttccaactca

SEQ ID NO: 149946 - DNA, 307 bp, Glycine max
aagcatattacaagccctcaccgaaacaccatgatatcaccctacccttaacgaattatggagctttggaattgttttgggaatatcctgggaataagtgcggtgggtatgcttcattggaagatataatttctgcccatgcttaacgttttatcttggccatgctagatgtatacatatattgcctagtccctgctttaatcttcaaattcgtactgttagaaaaattggataaaatgatcaaaaaagactcttcattgctgccactcaactgttcaaaaaagagacaacattaaaacctcccttg

SEQ ID NO: 149947 - DNA, 299 bp, Glycine max
  unsure (1)..(299): unsure at all n locations
agcttcaagaatcaagtgtcagagaatctttactctatattaatcaagnntcatgagtcaatcaagattcaagaacaatcaagatcaagattcaggactcttgatgcaagaatcgagagaagactccatcaagataagtactaatcttgtctttcaaaacattgagtggcacaagaatgtttcacaaaatcttttaccacagagttttactctctggtaatcgattaccagaagggggtaatcgattaccacgtgccaacattggtttcaaaactgatttacaaggtctgatcgattac

SEQ ID NO: 149948 - DNA, 285 bp, Glycine max
ggccccggagattgtactgggttagaaacctttagacctcatgggggtctattttccaaaacaacttgagcaatccgacccaccccggcatacttgtcagagagaacctgtgatgacttaaacaggaactcctgcttcaacataataaggacatcaccacaatcaggagtctgggtggtggccactggaatatgaggacattggttgagccctgaattcatcccaggtggtatcattcaggttaaaagagacagagctaatgtcctgtatcataccatggttatc

SEQ ID NO: 149949 - DNA, 383 bp, Glycine max
agcttcggtattcaatttcgagcgtctcgttatattaggagacttaatcagacatccgagtaaaaagttattgtcgtttgaatttgctgagagcttcagcattcaatttcagtgttccatatattctgggactcaatcggacatccgagtaaaaagatattgtcggttgaatttgctcagagcttcagtattcaatttcaagcgtgtcgatatattacgcgactcaatcaaacatccgagttaaaagttattgtcgcttgaatttgctcagagcatcaacatttcaattccagcgtgtcgatatattaatgggctcactcatacttcccagctaaaagttattgcgcttgaatttgctcaaactctatcatcaatttcagcgt

SEQ ID NO: 149950 - DNA, 370 bp, Glycine max
agtaatgacccactaacctattatttatataacttaatgccattaacctagggaattaaaaaaaacttaatggctgagtgtaactgaaattgtggcaaccaaaagtcacccccaacagccaacaagtcagccaccatttggtctcccaaaaggctgatgcctaggttgccaattgggcccttattacaacttgaactaaacctaactaaagcccttttagttgattaacccaaaacatatttttggtcagccaactttacaaggattgggccattatttagacaaactaaacactctaaaattgagacaaggtggtgtcatttagtcctcctccatttgggccatgatacaactcacaaccttggacttt

SEQ ID NO: 149951 - DNA, 377 bp, Glycine max
  unsure (1)..(377): unsure at all n locations
gcttagcctaataaagaggaagttttttatttttttgaaatatacgagagatacggtataatatgggaaaactgtccattcctgtcattaaagaaattctggacatgattatagtgtttgagttgatatcctatctaaaccttataaattatgaattaaaaatactgactatctaaaagcgatagtagagaaaggcttaccttatctctcattgagtgatcaagtaatatattcgcggatttcaaatcactatgtccaccggngggactgcctgtcccgtgcatattctatgttacccagtgacacttctcttatgattagagaaaatacacattaatgtcccccgtctgaatgcattctttccgtgtgaaaatcac

SEQ ID NO: 149952 - DNA, 148 bp, Glycine max
  unsure (1)..(148): unsure at all n locations
ctacacaattattataattttcgcctttcctttgaactatccaactaattatcaaccattctatatttcagactttagaatccacttntcgtgtgaaaactcaagttgactatttatgccttctaatttcttaattgatcgttcaaat

SEQ ID NO: 149953 - DNA, 350 bp, Glycine max
agctactggaggaagcctcttaatgaatcttctatataaagctacacgaagctgcctcggtaaatatgcttcccagcctttgttaaccgttggatcttcttataattggcctacaacttcacaagagatttttccatgatctgaccgttgggatctttgataaaatgtcttgagtgtgctagaggccttttaataaagcttttggaggaagccccttaatgaatcttctagagaaaactacatgcagctgtctctgtaaaaacgcttcccatccttcgatactgattgatcctttcgaaatttggtttgcaacttcaaaaacacttttccttatctgaccgttggatctt

SEQ ID NO: 149954 - DNA, 384 bp, Glycine max
  unsure (1)..(384): unsure at all n locations
agctngaatgagatccaacgattattgattttggtgatttggctncacaaaaataggtctttgggtcaaattgtaaatctcacattatcaacacacgtaaatcaaactccacataacctaacatccacaccaagaaatcaaacattgataattcacacaacacctcaactcatccaaattaatcaaataatgtaagaattacatcaaacacctatgtttagttatcaaaatttcagggcattacatctactactagtaaaattgagcaatttagacctatctccatggaaaacttctagttaaggttatcttcaaaatcttggttgacacgctcgcnactgttgtccttaaaatcatctccactcaacagaatgtatccattta

SEQ ID NO: 149955 - DNA, 383 bp, Glycine max
agccttagaatcgctttatttatttgtccattcaactaaaaatgagaaatccctatgcgaaaacgtccgattgatttttttcgcttcattttactaaaagatattatctattattatattattattttacctctccttttatttcccaccttgttactgcacgatcgaatggtctgaattcattttcacccaaattaacggatgatacaattccaatgatcggcgtaaatttattttattttttgattacgcgagaaatgacttaaattaatgactgaagcacgctaaaaacgggtattgatagcgaatgaacaccataattataatacatgaaacaaaatgtgtgccacccctgtgacatacaatgaattgaaaactcggtt

SEQ ID NO: 149956 - DNA, 389 bp, Glycine max
tagaaacccagcctggactgctaaaacaagactgtggagtgtactgttgtttcttcttcccgagaccacaccatagccgtggacagtactttcaaacaagacgggatggttgcagcacttttttaattcctccacaatatttgtaagagaaacctgtaatttagcacgaaaaagattagtggtgatctttggagagaaaagaatatacaaatatacattatgaattaaaacttttcccaattttgtcaggccagatgattataaacagatgcgacattttatattaatatcttctccctctgtttttaattcattgtcggtagtttttattcgttatattgtcccgctctaattgaatattaccaacaaaaatatataagaaactggat

SEQ ID NO: 149957 - DNA, 259 bp, Glycine max
tttccgctccggagtacgacagtcgccgctttatgagcgctgtacaccatcagcgcttcgaggccattaagggatggtcgcttcattcgggagcgacgcgtccagctcagggacgactagtatactgatttccaggaggaaatatggcgccggcggtggacatcactggttactcccatggccaagttcgatcctgaaataatcctttgagtttatgccaatgctcggccaacagaagagggcgtgcgtgacatgaaat

SEQ ID NO: 149958 - DNA, 424 bp, Glycine max
gtcacctgcggcatgcagctctaacttatcagatgagttttgattcacttgttagacaagtggcctcagagatcttaagaaggggggttgaattaagattctacaaaccattccccaattaaaaaattctacttttgattttaatgcgagttccacgttcccttaaagatgaatgtctaaatgatgattcaaattaaacaatctgaatgtacatgttaagaaacaataaataaaggagtttaatggaagagaaagtgcaaacacagcttttatactggttcgacatagttcgttgtctacgttcagtcccctagaaacccacttgggagttccactatctcgcagatccttacactttctgaaacacacaatgacaactctttctttgtgtccaaatactatataacaagagactttcattctc

SEQ ID NO: 149959 - DNA, 314 bp, Glycine max
  unsure (1)..(314): unsure at all n locations
cgtcaaatatctttaatctttgatgccatatttataagtagaaaaatgctcataattgtagaaggtatctttggaattgattgcaatgactgttgtgcaaattgatccttgttctctgaaataaacggatactatgcanttatgtttgataggatcaggactttccatgtttgcaattcataactcaatatgatcgttaaacatattaaaggaaacacaacatcagtttgcaaatatgttcctttaaacataatcatataaaatggaataatttgatagtgaaataagttgcttattccactcattgtacatga

SEQ ID NO: 149960 - DNA, 404 bp, Glycine max
  unsure (1)..(404): unsure at all n locations
agcttcttatgcaactatcttaaaggcacatatgattgctctaattaagagagaaaggaaagacatgatgaagcctgcataggcagataaatgagaagggagttcaaagagactgaagaagtcttaaaataatctgccttgtgcgcctgacgttctgcgcaaactntgattcctgctgactctgtttatgtttcccccagttttttgttttcattactaaagtgatcaatgaaagtgaaggggaaatgaattgaagggaaaagggacaaataacaaaaaggataatcaataactttcgcatttaatctttaaaaatatccttgaagtgggagttgggaaaatgtttcacttcccattggtttaaaaggaatcttcagatatattctttcccaattattattgat

SEQ ID NO: 149961 - DNA, 427 bp, Glycine max
tttgaaagggattgtactgaatcgtatgagtaacatctttgtttattatcataggcattgaaaaactattgtcttactattactgcacacgagggtaaaatcattataatcagatgaatgtgtttggaaagctaagctgaataataaagctgcacgggagctaaggaatacaataactgtgcaggttggtgttgtagtattgcatactgaaatacgttaccggcgaaaatcgagaacttttactttattcatacttactgctactgtcaatgtaaatatgctcctgcttcattatatgtgtgtaccaatgactaatacatattttcttatgctgaaacatgatctccttctttacttttgttcatgtcggatgagtgaccatgagccctcttgaaaagcatacactggcagtgtgtataaagcctat

SEQ ID NO: 149962 - DNA, 427 bp, Glycine max
agcttcaagatgttgctgtggtgttggagtcctattattgtgttggatgccaaagaatgtgtgaaatgtctcttggagcctttgtaatggcaagccgaacacacacagagcgtgtttggattgccagtatcaatttccattttcaagaagcattctctttggttctacgttgaagttgtctcatacttcgtgctgcaacaaaatcaccagagatcaaaacacgcacatagtcatttcttgaacacatcaaacctccattgtgttttcattaatgtgtcaacaataaagggcattacccaacttcaatagctagaaaaaaagcactaaatcaaagcatcttagagtagttttagataatcttataatatcaacatctgaggtaaaaatgaagaatgcctcacctctgcatcaataaagataaaaacaa

SEQ ID NO: 149963 - DNA, 390 bp, Glycine max
  unsure (1)..(390): unsure at all n locations
ggatgaaggatactgtntcctccttccggtgaatgttaactccgtagaaaaaggtgataacaaatgaaccgtgtgtttactatctgatattcgatatgatccaccaaaacttttataatagatgaaaaatccaatgactaaaataaaattgaaaagaataaaaaaaacttttcaaaacttagagatgcaagtgttcaatatgtcattttatgtaagagcacaataagttgaagagtttatacccaagatgcaatcataaattgaagcttatttagatgaattaaacaactttcggactaaagcactaattaaggttcattntttaattntcccatgaattcctgctattataatctaataatttagacgactcttgatatattttggatt

SEQ ID NO: 149964 - DNA, 418 bp, Glycine max
gtcacctgcggcatgcaagcttggatttcctttagtagggaatctatcctttctaagatagagccaaacccagtccccctcattaagaactagctcctttcttcctctattgcctttagttgaatacacctttgttttgttctctatttggttcttaaccctctcatgcaacttctttacaaactatgacctagattccccttctttatgtataaaagaagtgtcaagtgggaggggaatgaggtctaagggtgttaggggattgaacccatatacaacctcaaaaggggattgcttgatggttctacgaacccccctgttgtaggcaaattctacatgaggaagatactcatcccaagacttatggttgcctttcataagagcccttataagggtggataaatacctattcactacc

SEQ ID NO: 149965 - DNA, 336 bp, Glycine max
  unsure (1)..(336): unsure at all n locations
tctgtgntctgccacaaatggttctttttcgattggccaaatacgttatggacctcgactttgtttatctagtcttacggattcactggtgtggagaaaaaacagttaacaaataactttaaaatagatntttttaattttctacctctcatttttggatttaaatctccttacacattttcctacagtacttttccttccttatttcttaaattatattaaatatgatgttacaatgttatatttacttttataataattaatacatgcctatatccttatattaaattaaatgattataacttatatgattatgattccaattacaaattttca

SEQ ID NO: 149966 - DNA, 223 bp, Glycine max
gatatatttacacagttctgtgaatactatctctaagtctgctacatgctgggccacactatgagacttaatgaccatgcgagccacatgaacctctacattttgacctatctgatgattgaagacctggtccatgagcctctggaatacggcttcatcattttttagaccaaaacgcatgaccctgctacataagttggccgttttactgactaaagtggtt

SEQ ID NO: 149967 - DNA, 365 bp, Glycine max
  unsure (1)..(365): unsure at all n locations
gcttctanccaaatggacttactttgtatttattcctttgatagcccttttgagccttgtttccctctccttgttttgaagctcactacaagccttaagtgaaagaccatgatattaccatatccttaagaaatnttggagctctggaattgttttgggaataagtgtggggggtgtttgattcattggacaacttgtgttgttggctatgcttcatgatgtattgtgggccatacttgatgtacattgtatattggttcaatggtggacatgctgaatgaaatgttgcttctcacacgctcaaaaaaaaaaaaataaattcaaaaaaaaaaattccgaaagaaaaaaaaaaaaccgcatagttg

SEQ ID NO: 149968 - DNA, 352 bp, Glycine max
cgcatcaacaagaatcatgccaaagctattgtgcaagcaatcaatgggggcaaacacaccaaatgattataatgatggatggctcaaattctcacaaaggttaaatcatcactttcaaattgagctttccaaactatcatgacatgtagagaacaatcaatgatttcaagtcacaaaatgtcaagaactcttattttcaaaacaattacccatttcttgaacatatcctataattcaaagaaaaacatgcaaagtcgtacgtgcacacaaaattgacccacaatattaaactgaatatccgacgaaactaacaacattaacaaactaacacaactaacaaatctcaaccaca

SEQ ID NO: 149969 - DNA, 369 bp, Glycine max
  unsure (1)..(369): unsure at all n locations
agcttctagccaaatggacttaccttgaattatttcctntgatagcccctttgagcctattttcccctttctttgttttgaagctcattacaagccttaagtgaaaaaccatgatatcaccttacccttaaggaattttggagctttggaattgttttatgaataaattgggaataagtgtggaagggtatgtttcattggaagatatgattttcggccatgcttgatgtatatatatattgcctagttctttcttaatctacaattttatactgttcaatcataaaataaaaaatacatctgaataaaagaaaatcagttgctgcatattctgcaatttcgtacccttcaaaaaaaagaaaaaaaaag

SEQ ID NO: 149970 - DNA, 423 bp, Glycine max
  unsure (1)..(423): unsure at all n locations
agcttgngtattggggcanactacttatattttgaattttccanngccctgcccgagaataacaaattgcttgaccacaacagcgctgggggcggcaacggacaatggtctttcaaataaacctgttgtacatgaacaaacattatatcatgcgctgaccgtgccaaacgaaccagcgaagtcattgcataatagttacactaactatatncaatgtacctgaacaaaatgatttccaaacacgtgaccgacacatatgatgcggtggccagaagagtcacgtggtggtcgacttttaaagggaaaaatgtcatgctttgttgtgggacaaccatacaatgattgcgttataccgagaagcaacacatattccatgtctggtatatccttcacttgccacactcacctgaatgaatcaacata

SEQ ID NO: 149971 - DNA, 433 bp, Glycine max
  unsure (1)..(433): unsure at all n locations
ntgtgtngcggcatagttagattcttgtgaaagagttactttttttttttcttccttgnagaacgtgatggcggcgcatctaatccgtgaacgagttaagatggagtgcctagagggagcttgggagacccttgaaggcaacacgaggtgccgatttctgggcaccattcgattcacggctacttctttggtgcatccatatgaacctgcacggacgcttcatcgcacggtggagtggacagcctttttggattagttttgtatacttttgagggtgggtgtatctaagactgactgttacgtttactcttttgtttttgtatgggtagacctgatgtatatgaatttgatgattgtatacatgtggctgaagccaccactatgaacaccttcctttgatgacctatgtttttgttaactctcatattttgga

SEQ ID NO: 149972 - DNA, 198 bp, Glycine max
  unsure (1)..(198): unsure at all n locations
agcttcctcggtgccatttcttgttgngtagatacaaaagcgcacaacggaatcaaanaatgcgaaaaaggatgaccctacggctgcaaactcgtcaatcccgtgggtatggcttttgaaaggggggaaaagaagtttttgaatgcacaaacgtcccctctttcgtcattcttataatatggtgcacgggtggctctt

SEQ ID NO: 149973 - DNA, 224 bp, Glycine max
acttgatccttgaatggctgtcaaacgcctatatatgtgtgacttgcgacacgaatttgctaagaattcttgagaacaaaaacgtattatcctcttaataagcgaaacgatgtatcctctgacagactccttggccggatcacttgggagtcactaacgaattatttgagagctcaaattgtgcaatcaatctctttcataagagatttcttcttcttcattct

SEQ ID NO: 149974 - DNA, 331 bp, Glycine max
  unsure (1)..(331): unsure at all n locations
agcttgacatctgatgtgtggacatcttgtttttctgagggttatatatcattaactgcatattatgttgatgcacattggaagttgaatagtaaaatgcttaatttttctcattntcctcctncacactcggtgcatgagatggctaaagttatatatgtgtttttggaagaatgggggattgagcacaaaatattttcattaactctagatgatgcttcttccaatgataaaatgcaagactattttaaggaaagacttcttttgatactaatggtttagtagtggtggtgaatttattcactctcgcacaagtgcttaataatttgga

SEQ ID NO: 149975 - DNA, 436 bp, Glycine max
  unsure (1)..(436): unsure at all n locations
agcttgctaacggntgattcgtgttcatagacttgcacattttcttataacacattagacacaactgtttacacttgtgcatcaaatcaaaatggttaataatcttgattcgctttaagacataaatatcttttaacttaacatcatgtattaaaactttacattgcacaaaaatactaaataactcgattttttaatttatatatatatatatatatatatatatatattggattttatatgaataataataataataataacttaatattaaacaatgcgttcatgagttggcttaatgagtcaacgagtctataaaacaaacatcacgacctaacctaaaatgtcattgatttgaatggattagtttctattcgaccgtaatacctcaactcaactaattattgagtgagttggccatcgggattggaaaaac

SEQ ID NO: 149976 - DNA, 304 bp, Glycine max
  unsure (1)..(304): unsure at all n locations
ctgcactttgtgctggagccgttgtttgtgtttcccttctggtctcgccagtatgtgatatgcgttatgtgtttatgtcgtgatctttgtattgttcgtatttgcttcgtgccgaagaaaaaagaagaagtgtagatgagagtcgtcatcacggaaaggtgcgggcggacganatcagccgcctatctttgctgtcctcttatctccgatgagaggttagttaagaggggcgactgtcatgccctaatttcctccggggattatttcttgatgacatgcaataaaagaagtcccgaaacgtctc

SEQ ID NO: 149977 - DNA, 343 bp, Glycine max
  unsure (1)..(343): unsure at all n locations
tgatgatcacaaagatgatgaacaaaaagctcaagtgaatcaatgaacatctcaagagaatcaagatcaagaatcagattcaagaatcaagaattcaagactcatgaagaaagcctactaacaagtatcaagattcaagattcaagatctcaagaatcaaagatcaagattcaagaatcaagaatcaagactcaagatctcaagagtcaagatcaagattaaagactcaagattcgagaatgaagaaaagactcagtcaagataagtattaaaacgttttttcaaaacatcgaatagcacatgagtttgtgaataanatcttaccaaagagcttttactctcc

SEQ ID NO: 149978 - DNA, 421 bp, Glycine max
  unsure (1)..(421): unsure at all n locations
agctntcatgggttggcaagtttctacattttatttgttatggatttagtactgtggcagtagtttttactgagaattccaagaaaaatgtaggatntaaatggggggaaaaacaaaaacatccattcactccactcaaagaaaaagtgatgcatgcaccaattcttgcattacctaattttggcaaatcctttgaaattaagtgtgatgcgtctgggttgggataaaaggctgttttaatgcaagagggacatcccattgcttactttagtgaaaaactaaatggggttgtccttaattattccacatatgacaaggagttgtatgcattggtaaggcattgcaaacttggcacattaccttctaccaaacaatttgcatacatagtgatcatgaatccttgagcatcttaaggacaaac

SEQ ID NO: 149979 - DNA, 381 bp, Glycine max
  unsure (1)..(381): unsure at all n locations
gatgtcattcaaacacactatgtagacctaaatgaagtctattatgcattgntnaattaatcgattcattatgcgatantaattgttgtaacccgctactaaccaattaatattatcaactactcgtttggttaagcaaggaaattgttggtccaacaaaaatcatttacgtgtgcagcatacatcattgtcataattgacaacacataatgacattcatgcgtattatagtttgagcgtgacacattggctgacttcagtacacattttgaaactagcagtcgctcgacaacacattggttgacttgactacacattagcgacaacacattggctgacttgacaacacatatacgcgtgtctatnnttttgtaaacaaag

SEQ ID NO: 149980 - DNA, 418 bp, Glycine max
agcttcctttgattgaaatctcctgttatcattctggtcatgtggcctaaaatcattacttttacgtttcttagaggccatctgcatataaaggaaccaaacaactgatcaagacacaagttattcaaacttcaaaaactataaaataaaattgaaaacaacactggccgcttagcgagacataattcgcttagcgggccttcacaaaaatgaaactgggcttagcaacacaagagtgccgcttagcaaaaattgctacggtctagtgtttttcaaaattggcttagctagcaaggagcccgctaagcctaatgttagccgcatggatttgagcttagccaagaataagttgcgcttagcggcactaaactgagcagaaatttcactaagttatatgatcttagtgagtgaagctcgc

SEQ ID NO: 149981 - DNA, 441 bp, Glycine max
  unsure (1)..(441): unsure at all n locations
agcttggagaaggtggctatggacccgtatacattgtgataaagaaaactgatatccttaacttgtattttccttanaaactntataaaaatagtagaagattatttttcagggcaaactgttagatgggaaagagttagctgtgaaaaggctttcaaagaagtctggacaagggttggaagagttcaaaaatgaagtggcattgatttccaaactacagcaccgtaatcttgtaaagcttcttggttgctgcattgaaggagaagaaaaaatattgatttatgaatacatgcccaaccacagcttggactactttgtctctggttggagcccttatgatttattctaaacatctgcgacacattataatcttcttatttcttatntgtagggatatggagactgcaactgctactatatagatgcatgtatttatttgac

SEQ ID NO: 149982 - DNA, 347 bp, Glycine max
  unsure (1)..(347): unsure at all n locations
ctattacattgtcaagtcaccccttagtaattaaagtattgggttcatctttgtttgataaagatgtcttacattggagaagtgcattggcttcattaagagaaaataaaagtaaatattatgaatgcgtgaaggatagcttttgatcaattagaggacacataacgaaatctttttagatatttcttgcttcttcaatggtgaaaatgtggattacgtgaaggataatgtagatttttgtggatttaatctcaaatatggcctacaagttctcgttcataaaacactcaaccatgattgggataattaaaatgcatgactngttgaatgatttgggaaagtgcatt

SEQ ID NO: 149983 - DNA, 404 bp, Glycine max
  unsure (1)..(404): unsure at all n locations
tgacgcatgcaagcttgacccttacgagtcagattagttttgngtttatccactcggaaaaaccttctatgaatctccggtaatatgctgctaaacctacaaaactcttaatctcaaaaacagacttatgactctcccacttaagaacaacttctatcttatagggatccacagctttacccccttgagatatcacatgccctaggaaactaactttctctaaccagaactcacacttggacaacgtaccatagagatatccgtccttaagggtatgcaacacaatcctcaaatgttcttcatgctcctctctagtcttggagtataccaaaatatcatctataaatactaccacaaaactatcaagggtagggtgaagaactttattcatgttgtccgtaaac

SEQ ID NO: 149984 - DNA, 373 bp, Glycine max
  unsure (1)..(373): unsure at all n locations
agacatgactcttcataaatacaactgggtaatcgtttttcttattcttgcaancgactactagtgagaaaagttcagaaaaactgtttgaaaagacacatctcttcaaactattttgaaaaggcacaatgggcctatatatatgtgtctgacttcgaaaagtagaagagagagatnttctaaaagaacttaattgtcaaaagctctctaaataacaattggccaaactcttgcaaatctatttgagaatcttctaggaacttcaatttgtatcatctactctaaaggagagaaatctttttgacatctcatatactcacgtgtatcaagagatgttgtctctggcttggagaatctgacacaagggggggat

SEQ ID NO: 149985 - DNA, 384 bp, Glycine max
  unsure (1)..(384): unsure at all n locations
agctntaagcggaccaaaatggtttgttcttcactcacgcacagactaatcaaactcaaaatgagagactaacgaagctaatgccacttggctcgagagtgatagaacacacaccttctaagtntcactaggtatcagacatctagtaggttcatagaacaactcggacaaatgccaatgctccgctacatccatttgtcgatgggataataaaggcacaactcccagtcgaaaggaagaaactcatcaatattgagtgctatgatggactcttacactcgaatgagcacttgggtgcatctgttacactgatgaacttgtacacgaatgactacataatcatgtttcgagtacttcctaacaacgttgaaaagagttgcacct

SEQ ID NO: 149986 - DNA, 326 bp, Glycine max
cgatccattctatgtacacgcagtgggcacattgtgtatcgagcatactcattctcgtatcgaatgctattaataccccctgttgacgcgctatagacattttacttaagtcattgctcgcttaactcaagaatggaatatgattgcaccgaacgcttgaattgtattatccattaagttaggatgaagaaaatgtcgaccgttctgtcgtgccgtaaccacgttggatatcaaaaaaaggaaagaaagaatattgtattcagaaagacatcttataatgaataaaagcggataatcaggcggacgttctctctctgggatgtctc

SEQ ID NO: 149987 - DNA, 412 bp, Glycine max
  unsure (1)..(412): unsure at all n locations
agcttgtgaacttttctgtttctatactttctatagtcaaaagtaattgttatanttttttccgtcaaatcatattagaattgagaatggattancctaatagagagaagaaggttgctcacctcattataaaatatattttaaccatatacctaatagtccatgaaattgtggtaacaagaatcgtgataatgagttcacaacctatgaagcaatcatcttactatatgaagaaccttaacattggtcttttaggtcaaaatttaaaataagttgtgtaatgagttacaactaactcagaagccagtccatacacagcaaatganagagtgaaatcggtggttaagtatacaccgattaccaaggtagttaaataaaccatttgttcaaagggaaatatgccaaatcaaag

SEQ ID NO: 149988 - DNA, 283 bp, Glycine max
gataaccatctggaacttgactttgattatcaatatgctggtaaagcttgagaacaatttatttttgatatttaaactctgtcccagttgttgcacactatatactatgcaggcatgcagcattacatttgatgttctgctaagcagtgtcattacaattcttggtatcttccatccatatattgaagttatagactaagcaagtacttttaccggaggaaattatgtcactgcatgctatgtattgcctgtatcctattgaatatgcttgcatgctcaacca

SEQ ID NO: 149989 - DNA, 421 bp, Glycine max
  unsure (1)..(421): unsure at all n locations
agcttgaagttggtgctaagcgctccttcttagannaaaagccctntataagcttgaattgtacagaaaaaaagaaggggggggggtctgaataaactacttgagcctagtgctgaacaaagaacagatggaaagctgatcaaggaagaaaaaggccctaacttttacgaagattttanctttangagtgattcctangttcctagaggtggaagagacatccccaatgctttgtaatctggtattctctctgaaacccttctcctatttgtgaaaggtactcccttgtaatggagggataaaatcctttattgggaaatttcgctgagtacttgatgtaaatattattactatctatttgaagttgatcctatgtgtacaatgctctatatgtgcttatattataaatgcctgtggcttg

SEQ ID NO: 149990 - DNA, 393 bp, Glycine max
ctaagttctaagagagcgttcatccttagatgaacttttgttatcttttattccagctgtaatacttgccgttctatatttatagcactttgctttactttgcttcaataacaacacacactcaacttttattcttgaattttttttatttttttattttagcaacttttacttgctgctttgtgatattattgtgtgtgttggtatttgtcttaccatacttgttgacacccaataatctcccccaaatttgggacaagatttccttgaactatgatgctctcctacaacctaagaaaaggtagatggagattatgactttacaggctcaagtttcagcttaatcaatcaaaaacaaagctcacatgggtgcaagggattcatcattcatga

SEQ ID NO: 149991 - DNA, 406 bp, Glycine max
agcttgtattagtgcataattatgacctttatgattattatacagaaataatggtagcaccttttcccttgtcatccaaaaagggcttactttttgtgtatcaattattaaaaaacctaaacacaaaagaagtagtttttttaagagagatttctttttatatcacagacaattttatatgaaaaacacatttttttattcaaataattgatgtatcttctttgacactacttatatagctcttacaattttcgtgtcagttatcatccacacactcaatgataaaagaaaagtgttttgttattataatactaaattatttgagcactaacaaatatcattttcctaaaaaaattcttatatttaaattataattattacaactattctatgacaaatcttttaa

SEQ ID NO: 149992 - DNA, 368 bp, Glycine max
  unsure (1)..(368): unsure at all n locations
atatatggtatttcagntagcattattacctgttttattttttatttgtttttgctgaactttaatttatattatttaaaaattatataagtttaattagaatttaatatatagatttattactcaaaatattgtaaataaacattggtttcaaattttaaaaaacttctccctctgtttatttttttgataataaaaacttccccctcttcttatatatatatatacaagattttcatttcctacaagcatactccatcgatgaggaaaaaaaaaataaaatcaagaatgaaatgtgcttcatacctagtggatttcttctttatgctgtttcatgctcaaatcaatgctcaatcttattctcaatc

SEQ ID NO: 149993 - DNA, 295 bp, Glycine max
  unsure (1)..(295): unsure at all n locations
aagcttagaaagccttctgattctnttgtgtgtcacacctggaggggcgagatgaaatgcaaaggttagacatgttgtagttgtgtatgatggaataaacctatacactcgtgcttgtagtgaaataatgactgtgaggtcttgggtgatgattctttcttgatattagccattctattagctgatgtcaggtgtgactctgtacatatgtttctatctttgacaagctgcatgttttgtgaagtgacattgattgtagcattccatgatattcatgtcatatgattagattttt

SEQ ID NO: 149994 - DNA, 343 bp, Glycine max
  unsure (1)..(343): unsure at all n locations
ccgcttaaggagtttgcttagaagaccctgttgtttgtttctttatgacgaccaatgcgtaatgatgggatnttgccaccctcttgtattttaattattttaaaacaattctctctaagcataatgactcttttgacaaaatagtttcaatctatatatccatgtcctacatacatatctctgtctcctcttttgactgaatgttacttttctggcggaggcatacaacatgattatggtcgcatgctcattgccaattaatctttgcgtgaaccttacatagattctgctctattaattttcatgctctgttcactctctgcgattgatccgcaagggcttt

SEQ ID NO: 149995 - DNA, 425 bp, Glycine max
  unsure (1)..(425): unsure at all n locations
agcttgtagctgaagttctttataagtgcttaaattggntaggcaatagcaaaagacacattcccctgccttcatttactggaagttcaaaggtacttcatctctctcttattntgattaaacattgtaatctttatttttatgtgtttacaacgtacattacattttcatgatagtatttttatgttacgacctctactagttagctaacaagtgtaatttattataattttttgtaattcattttttttgttggttccattggtttttattctaaatacctattcttattttataacatatatggtagtagttgtaacatacaagttggtattgaatcttagattatgcttcttcccccaccgattattctttttataagaaaaatattatagttcttcttcctatttatatataaatttggg

SEQ ID NO: 149996 - DNA, 423 bp, Glycine max
ttaagaataatggcctcagcaaacttcttattcccttatatgtaattcaataaataggcctccaatttttaatggaaagggttaccactactggaaaacccaaatgcaaattttcattgaggcaatagacttaaacatttgggaagccatataagttggaccttatgtacccaccatggtggctggaaatgcaacaatagagaaacctagagaagagtggactgaagatgaaagaagattagtgcagtacaatttaaaggctaaaaacatcattacttctaccctatgaatggatgaatattttatggtttcaaattgtaagagtgctcacgatatgtgggacactctacaagttacacatgaaggaacaactgatgtcaaacgatccgataatacctaactcatgattgaattattttgatg

SEQ ID NO: 149997 - DNA, 445 bp, Glycine max
  unsure (1)..(445): unsure at all n locations
agcttagctacttacacccctccaatagctaagctcaccccatgccaaaatacatgaaaatacaaaaaagtccctactacaaagactaatcaaaatgccctgaaatacaaggctaaaaccctatattactaaggtacctttaacttatagggtaccctacaaacctaaaatgaccaaaatacaaggcagaaaagaagaaaaacctattctaatatttacaaagaaaaatggaccataccttggcccatgggctcaaaagtctaccctgagattcatgagaaccctagggccttctttagcagctctagctcaatcctcttggagcatcttgctcatggctctggtgactggtcctntccttgggaggatagcatcatccnnctccccttgaagaggatttaccatcaatttgtggttccacctcttaatataactccatctgcaa

SEQ ID NO: 149998 - DNA, 383 bp, Glycine max
  unsure (1)..(383): unsure at all n locations
tgaagaagagcttgaagaagttttgacttttacatgtccttttctcttgagcggcattcgtattgattgttcaattatgtgttgcatcatactctcaatcatttcatatctgcatgatgcattatcatgtaggagtaagaaggaaagtttctaaagttagaaaatttcttcagtggttcaaactctctattttaatcgattacaggcttatcataatcgattacacaagtgtttgaagcttctagagaagtgtattgtatcggtttaatgattacaggcttatagtaatcgattacacagttctttttctgataatgattgatttttccaggagtctctcctttaatcgattaccangtgatataatcgattacttatctctt

SEQ ID NO: 149999 - DNA, 370 bp, Glycine max
aagtcacctgcggcatgcagcttttagtctacctgagaaaagaattgtttctacttcatgcactcctctaatgacgatagcatcatttctagtactgaattgctgggagttggaagccatcttattaattaaatttctggcttcagtaggagtcatgtctccaagggctccaccactggcaacatctatcatacttctctccatgttactgagtccttcataaaaatattggagaagaagctgctctgaaatctggtggtgagggcaactggcacataaatatttaaatctctcctagtattcatataggctctctccactgagttgtctaatgcctgaaatatactttctgatggtcgtggcactggaa

SEQ ID NO: 150000 - DNA, 333 bp, Glycine max
acactggtaatcgatgaccaaaacattgcaatggattacagcctttcgaaaatatttggaacggtgtaaattcagtttgaaaactttttcaaactcattttactactattgatcgattacaacaatatggtaatcgattaccagagagtaaaaactctttggttaaggttttgtcaaaaactcatgtgctattcaatgttttgaaaaaaaaatttaatacttatcttgagtcttctcttcattgttgaatcttgaatcttgaatcttgatcttgatcttgattcttgaaatctcgatcttgattcttgagatcttgaatcttgatctggattc

SEQ ID NO: 150001 - DNA, 405 bp, Glycine max
agcttctgaaatttggctgaacgaagagagagaatttgtgctcttattaaaaaatgattgtctctttccttttttctaaagcaatgccacatgtctcattttgagtggagcaaaaaaggcccaccttctccccttgaagtgacttcatacttaaccacaaggagagaagaatttgacctctttaatgctaaaaatcttgccttggtttggtgccacttctcaagttgcattcctcgcgtttctctgcacccgtcagcgcccgtttttcaagtaagcaatatatatattaaaacgctcaaaagagaccctgagcgtggttaaaggttggctttgttaattttaagctgcccgcaaatatcactgtttagactacataatgaagattatctttactggccatcatgg

SEQ ID NO: 150002 - DNA, 260 bp, Glycine max
aatcttccgaaagcaagagactgaactattctctcctcatgtctcttcttcaccaaatatttctagcactccttctttacccatgatccatcatgctccttaatataaccaaaggatgctatgactgaagcgcctataaggaatgatctcttgattggaacataatgttcagaatcaacagggatgctgaaatgtttaacgaagatggaacaatgtgacgataaggcaatggggcattcaatcgcaatgccttatgcatg

SEQ ID NO: 150003 - DNA, 326 bp, Glycine max
  unsure (1)..(326): unsure at all n locations
agcnngnagaanggctagacatgacacatgttatgttttggtatggcacaaggacaaaagggatgccccacaatattttcatgacacatatgcaacactgatgatttggatactataagcaaaactggacatgcatgcgctaatgcagacgcacanatgtcaaaattttatggtcaagtgatgctaaggcacagcgaacatatcctacatttcaaatcaacccactgcttccaaaatgagttctctaatcaatttgcgcatacctacacgtccattacaggcagccggggaaaatgttacagcaatccacacttcaggagcagaca

SEQ ID NO: 150004 - DNA, 328 bp, Glycine max
atgatgcatgtgtatggcgtgattcctatgacgtcacccccaagagtcatctatctgaattatgagacaactcatctgatgagatgatgaatgctcaatgcttaacaggattgatagaaccgtattctcttgccaatatggacaacctcaccggacatacctccactaatgagaccactattcttactgaatccaatcttgaagccttagtcacataattgactaatgctgacgaacgttatgctgtagtccatccacatagaacattctttatctgcgttcttgactaactcccagtatattcttctgcccttatctttactctatt

SEQ ID NO: 150005 - DNA, 429 bp, Glycine max
  unsure (1)..(429): unsure at all n locations
acctgcggcatgcaagcttgtgaagagtgaagaagagagctctgttgatggaactatgtttatgtagnatgttggtagcctgagtttatctgtcacagtaggccagaagtggctttcagtgttggcttggtcagcagatttatgagtgatccaagacaaccacacttgattgtagctaaaagaatcatgaggtatctgagagggacactcgaatatggcattttgtttcctcatcatactaagggagatgatagcctacaccttgtagcctactatgattctgacaggtgtggtgatctactagacaaaaggagcatcgtgggataagttcacctgttgttagggtctcccatatcctagagttccaagaagcaaaaagtagtatcactgtccacttgtgaagccaaatacattgcagcctgtgcacct

SEQ ID NO: 150006 - DNA, 463 bp, Glycine max
  unsure (1)..(463): unsure at all n locations
ataaaatctcagcttgganaattattcttaagataaatactctcttgggcaatcatttgtgcttttcaaaatcttttctaatagtctatcttaaaacctatcttaattcttttcttaagaccttttcctttgcttgaaatcttgctttcttcattcttgaatgatctttataattccttggcatcatcaaaataattcttgaagctttgcttctacacatatctatgttcctatttcattttttccgttgttaagatagaatttttatatagatccacataccaacatatgtgtctctctctcttttttatctctcaataatatttaaaaaacatatgattcctcaattctatggtttcttctttatatgttctctctctgtacagntttctgttttcaatttccaaatacattaccttgtattgaatttgtgtgtaatatacgtcannaattaaagctactt

SEQ ID NO: 150007 - DNA, 393 bp, Glycine max
  unsure (1)..(393): unsure at all n locations
aatcacctgtgggatgaggccgtgcaagaggcgaagcttgatcgggggctctttgtggtggggctgatgtccgatgctggacaggcgtccagttggagaagtttccggctcgggccgaaatactcggatggtgctgggcatattgatgagtattgtgatgggttgcgtgagggtttggccaaacaggagccaatgtcatggcgtgagcgttccattatttttctttaccccagtcggcctggaccttctgttgcttgtgctgacaagggcgacatatatnaactttaccctttttatgcctaccttgattctcttggctgcgaatctatatctaaaagctaagggcatgttcctattactttctagtaaacattggatggatacctatatggg

SEQ ID NO: 150008 - DNA, 232 bp, Glycine max
tctatgccaccacaggctatatgggagaatgtttgtggtgtattttacagtgtccctactttggaggaggatactgctaaatactatcttatttcttattttaatttggatgtgcatcatttgatcactattatctacttttgagatatgcgtggctttcttactatatggacatgaaaatgaaatgaagtgtgtgtcttgcaacaccgatgggactgtgcttgcaacttgt

SEQ ID NO: 150009 - DNA, 405 bp, Glycine max
  unsure (1)..(405): unsure at all n locations
agcttcactgctcctatgtattcttcccatctctcctcattctcttttctcattctctccatcatttcttcatcttcataacttattattctcaattgatcaccaagtttaatcatctccaccatgagccttgcagtttttggagatggtgtagtagcatctccacttgtagaagccatacctacaagtaaagttagtgcacaagtaataaatagaataggacctcaccactcaacttagtgtttcactcaagttcactcatctatcactcgttcaaggcttttttttcttttataatatgcagttttaccttntaccactcttgctcctcttcagttcttaagcagaaccttctaccttcaaataagaagtattgaatgtgaaatatgtcacaaatccaaactc

SEQ ID NO: 150010 - DNA, 404 bp, Glycine max
  unsure (1)..(404): unsure at all n locations
taaaaactaatcggtcaaagaatgaagattgatgttaacgatcacaatatcgatcacggaaacattatggaagcgttacgaaaacacctcgaccttgatttttcttcttctttctccttcttctcactaatttctctcaaatcctattgattttagatgttggacccctaagctctgccccgtaaagtggcggagatcatgcctttgctaacatggcagagttgcacctagtgcttgacgtcgtcatccctttgaagttaaaggtgtcggagttcgacaagtacaaagggaccacttatcccaagaaccacttgaagatgtattgtcggaagatgggggcctacgcgaaagatngaaaaatgctgatgtatttctttcccacacctactggggcagcatcacat

SEQ ID NO: 150011 - DNA, 413 bp, Glycine max
  unsure (1)..(413): unsure at all n locations
ttaagcaccgcngctgcagctatgataatttntcttgcaaaatttttaaactatngagttatttatgttgggtatntctactttttataaattttagttgtagtccttaaaaaactttntataatatatntggtctttataattntcttctattaatatttatagttattgttgtcaagtaataactttaactagttaccttatcatgtgtaatttttttattaaattgtgttttcaatatctcatatattcatattagactattaattgatgatgtcaaataagtttatgagcaattaaaaatataattaccaaaaaaattacatgtgtttgtcccgtcaaatttctttataatgtgataagtatttggactgacattcatattactaaataatanagacttaaatcttaac

SEQ ID NO: 150012 - DNA, 361 bp, Glycine max
  unsure (1)..(361): unsure at all n locations
ctcagcttctntattgttcgtcgccaattatggcacttacacgagattgattatttatctgacaactatgcagacaattatgaaacaaatctaactttccccaaccccagactaaaaagtgcatacattgctcttgaggcattaaaaaaagcaatctactcagacccatcaaatttcacagcaaattgggagggcccaaatgtttgctcttataacggagttttttgtgaaaaggccttagatgatccaaagatcgatgttgtagctgggattgaccttaaccatgcagacatcgcaggttacattccccccgagatcggttngttaaccgaccttgcgcttttccatataaactcaaaca

SEQ ID NO: 150013 - DNA, 455 bp, Glycine max
  unsure (1)..(455): unsure at all n locations
agcttccacattaagccagttcatctcatatctcttatgccgataatagaattaanaaaattggagaatttgtttggaaaccttgttgtccttaaagtatgatttgtagaagatccataaattaatcaagtcttataaactatagatgaagaggtatgaatttataattaaacatattcaaagatttaactatgatatgatactttacaaagaaaaaacattcttttacaaagatttaactatgttattggttactatagatgctatatatcttctcatctttgttatgtggtttgggatacataaatactcttgattatttgtgtgattatgtgaattcctttgaaaatggacctttgtccccttcatcctgtggaagcaaagcttcatgatgaatcaacaatgattcataggtggtttgatgataacaatgataacaacaataagatgatgac

SEQ ID NO: 150014 - DNA, 432 bp, Glycine max
  unsure (1)..(432): unsure at all n locations
ctaattatatgggccattaaatctatttttgctgacaatagccgagaagtccgtggatcttctcaggggcggagtaagtgtccgccactgcttttgccttggctagcaatcggggaagttcttgactaccgttcaagtaaaagcaaattgatccatccacatggttgcctcttggtgtaacgagtcgatcacccttcctctagcctctnttttcgcgtacacttgggcatactcgttcgccaccctatgctcgtgggccgtggctagacttggttcctcttggtacttgctgatgatggctaacatgttggtctatgtctcgcataaacgctgagacaaacttctcttggacctcgagcaagcctttaacttatccttccagatcactgctacccgcgatggtccctttcctccttcggagcttaagctcgc

SEQ ID NO: 150015 - DNA, 372 bp, Glycine max
  unsure (1)..(372): unsure at all n locations
acctgangcatgcaagcttataagtgcaggttcgggagactaatgtcaagcgttctttatatgcgaagatgatattccgagtactttggatttggtacgaccatgctctcctgatttccagctgggaaattggcgagtggaggaacgccccggcatttacgcagcaagcataatgtaaacctttacggttttaaaagctctatagttgggcctaggctttagagttttcattttgttaaggctttgtgtcttttgtttttgaatttataatacaaggatctttcttcatctgttcctggtctctacccattctcattcatttgcatgtgtacttctttttctaaaacggcagattctatgacgagacccccg

SEQ ID NO: 150016 - DNA, 400 bp, Glycine max
  unsure (1)..(400): unsure at all n locations
tataaaactcagcttacacatttggaactntcaccatctctcccttgataatgggatagtacctcaccacctcctcaaacttggctgcatattcagccacaatcatgtttccctgcttgagctccaagaactccatctctttcttgttcctaacatcctcaggaaagttctccaaaaataccctcttgaagacatcccaggtcacatcttaaccttcagcctctaggcattggcgagtattctcccaccaatactcagcttcttccactagagtatatgtaccaaaagcaaccttttgcccctccggacatgccatcactcgaaaaattttctcaatttcccttatcccagtttgagcaccatcagggttgtatcctccattgaaagcaagagggatttt

SEQ ID NO: 150017 - DNA, 424 bp, Glycine max
agcctttctctcttcttatctcatccaatctgaaaatttagaagctctccctcttcctcacgttgctttttccttctcctccattctccattgaaaccccaacaaagctccaacctttggtgctcatttctgctccaaatcgcgaaagaaaggcattttctgggtcgtgaagtgcgtggctacgagtgggacttcgaaaattcaggtttgggtggacttctttctctcttaaatttcgtgggtatggggttctgggagatatgatgggtggttatgttacttctctgctgtgtgatgattatttgagacagcaattgctgaccactcgttgaaattcgcattttgcattagcaaacattcccattcttttaatgttagtgcgatcatgttcttatttttaaaccaaaattgctctggtatactc

SEQ ID NO: 150018 - DNA, 269 bp, Glycine max
aaaatagagattatctcttttatcttagtgagagtgattctcctaaattcttgagtgattcaagaacaccctggctgtatcaaaggactttcacaacctttgtgtgttgccctcgctggaaagagagattctttccttcctatcatctccacccttgttctttcaaaccacaatttcagaaaatccacctctgttcaaaattatctcgtgaccataactcccattttacacactcacattaagtgattcttgagcctaaattgaatttc

SEQ ID NO: 150019 - DNA, 424 bp, Glycine max
  unsure (1)..(424): unsure at all n locations
agctnttatgtgaaaggatgttantcttcttatttgtaattgaatttcaacgttcaaaggcactggtaatcggttaccaaaacattgtaatcgattacaaccttttgaaatcaattaaaacgttgtaaattcatttaaaatttttcaaatccattttgctactagtaatcgattacaataatctggtaatcgattaccagagagtaaaaactctttggtaaacatgttttgagaanaatccatgtgctactcagtttttgaaaaaaccgtttcatacttatcttgattatggcttctcttgattcttgaatctcgagtcttgactcttgaacttgattcttggaagcttgaaccttgaatcttgattcttgaagtccaaatttgtttctgacgctcttaagtgttcttgagtcaatcttgaata

SEQ ID NO: 150020 - DNA, 403 bp, Glycine max
  unsure (1)..(403): unsure at all n locations
acatttcagggtgaaacatactgattttttatctatgatncccacaggatgcttagatgttataggaatatataaattgatatgctcgaaaaaataggagaagtatcactgaattgctagcctgttattacattaataccttcatataatgaaatctaactatcttgagggttttgaagagcctgctagtgctactttattgttatctttcttaattttttaaccacttagctatattggttaaaaataactgtatattaaaaattaaattattaatgaaaaattccaatatattttatatacttagatgatttattctcttataatttacttacaatatgttatagagttaatatacatgcttattataacatacttactatatatttatatactaaaactt

SEQ ID NO: 150021 - DNA, 400 bp, Glycine max
cttggactcaatttccactaccccaaattggctttctaacccctcaaaatctcacactttttcacctaaaacactaccattctacatttaactctaggtaactcttcccatcctctctaccaattttctatctacattttaagcctacatatatctcaaagcatcattattaaaccctatatcaacatgggtagttttgcttacatcaaacatgtcaagtttagcataatttcaacaatttccttcacaaacaactaccctaaagcaataacctagtagaactacccattatagctcccaaaaacccaacacccacagatttcaagtgagaagaagttcacccttacctgaaattaaggccccacgaaggagaggtaggctcctagactccgaaaatagc

SEQ ID NO: 150022 - DNA, 383 bp, Glycine max
  unsure (1)..(383): unsure at all n locations
gatgaaagggaagcctggggcaaacggaaagaatgaaaacgatggaggaacccatgttgtgactattggtcctacatggccaaatttcccaccagctcaacaatgtcattactcagcaaataatgacccttctcattatcaccaccctatcagccaagaacacccaatcatccacaaagaccacccctaaatcagccacaaatcccgcctgtcgcacaaccgataccaaacaccacctttaacaccaaccaaggaaggatatttccagatnaaaagcctgtagaaatcaccccaatttcggtgtcatatgctatactactcccatatctactcgataatgcaatggcagtcataacactacaaagattcctcaacctcatttt

SEQ ID NO: 150023 - DNA, 402 bp, Glycine max
tttatctctattacgcaacgtggcggacaatagtgggcagcttacttgaatgatcatcattgtcaatgcgggaaggttttatgccgctttactattataagacagttaaatgaatgacatgtattatgttcaaagcttgcttatgaactgatgataaattaataacaagcttgtacgcacatctttcgcgtgtatgatatccactccacaaggtttgaagttgaagagagctttcaccctataacacaacgttgcggacataagtgggcagttaacttgaatgatcatcattgttcatgctgaaggtattattccgcctcactatccatgttcacacattattgtatcttatggttttgtgagcatgaactactaccattatatatatgttgtttattcaaa

SEQ ID NO: 150024 - DNA, 370 bp, Glycine max
cactattaattgatgatattaattaattcttaatgccagaatgttttcactctgttagaggaaggacttttttataatctgaccgaatgatatagttgtccttcttatccagacaaaataatctatctgagggcctaatgagagatattttgtttcatcacagaattatctatttcttgaatctgtaaaagtcttgtttctccacgactccaccaattgaaaggacaatttctatgagctcacactagatttgaattgatatgagtatctcattctatatacctaaaagctatctattcttacatcacattatccacgaggattgcgataattgtctttgtatcacatcacttcttacctacagttgtgg

SEQ ID NO: 150025 - DNA, 398 bp, Glycine max
  unsure (1)..(398): unsure at all n locations
cacaccccatcctttacaaaaatacaagcagcaatgattatctatgaatctagattgtttcaatcagtatagaggaataacttcctcgcatgataaactttcttcgactcggatgattctctcatcctccatcaatcatcataatttgttcagacagtcatgagtgcaagccttgtgaccttttagtctttcttcactgcaacatgcatattcattacaaagatagtgatgagtagtagtatacctcttggttccatcgcccctttcttgcttcctcttcagcatcttcagttcctccatctggattaacaacctncagcccctcgtagcccaccanactgggtaacaagaccagaaatagtcgacaaaaagtaaaccttatcagctcatgaaactga

SEQ ID NO: 150026 - DNA, 473 bp, Glycine max
  unsure (1)..(473): unsure at all n locations
ctgcagctttattaaaaaatcgatacctctttatcgttatttatnaataaaactatctcatatctgttattttaagaagcattctaatataagacaaagataattcataattagtcgcatgatcacatgatctgatcctattatgtaacaatagaatattattcttattttatggacaactttcacatttataaaataatactccctttgtagtattaattatattcttggtgctagcaaaaaatataataatattccactaaaatatttatttggttagattaaattctctaatttaattatcaaataaattattctgttttgcaaagattataacactcatttgtatgtgacctcatatgttcaatactaaacggataatagtaaattaatcataattaatttactaatcaaggtaagcatctaacaacactccttaacgtcccgatggtatgaagtaacattctttactt

SEQ ID NO: 150027 - DNA, 415 bp, Glycine max
ccctaaatgaagaggtggtgaccgctccgtgctagttttgcctaaccggagggaaccctttgaggtgttttgtgatgcatcaaaaatgggtttaagaggagtggtgatgcaaaatggccaagtagtggcatatggttctagacaactcaagactcatgaaaggaattatcccacccatgatctggagttggttgctgtattttttgcccttaagacgtggaggcattacctgtttagctccaagtttgaagtgttcagcgatcataagagcctcaagtacttgtttatccagaaagaattgaacatgcatcaaacgagatggttaaagttcttaatgatatgattttgagctagctatcgctcacaaaccaatgtagggtgatggctgagaagaaatcctactatattgtctgat

SEQ ID NO: 150028 - DNA, 283 bp, Glycine max
ggtgttctaagaaacataataagttttaagcaacatatagatcatactaatcatgaaatgggttatactttgacaaatcacatggcctcaattttaaatcctctatcgagaactaccaatgacaggtatcaacatatgaatgagaccctaactcgaataggagatgctttggccattcctaaaaaccagcctggggatagacatataatttaggaaataccagttcaagaaagaccaattcatgatcatcataataatcctgaaaatgaagctaatgtcccaa

SEQ ID NO: 150029 - DNA, 402 bp, Glycine max
  unsure (1)..(402): unsure at all n locations
gggccggggaattgcaagagaatacggagagaagttgaactttgaagtgtgtctcacaagtttctcattcattcaaagtatgacaagtgttacacatgtttctatttatagcctaaccatgggaagcttccttaagaagcaaggaaggtagcttccttgggaagcctaaggaaaaaagcttccttgagaagctagaggggggcttctcacacccctccaatagctatacttacccctatgccaaaatacatgaaaatacaatgggatgcctccttgataatcaaggaaagtaagcttcttgtaaagctagaggggggctacttacacccctccaatagcttagctcacctcatgccataatacatgaaaagtccanatatattcctattacacagactactc

SEQ ID NO: 150030 - DNA, 398 bp, Glycine max
ttggggtcacccagatgcacgaaagttatgccatgcatgtcatctgatgttttttatagacagtacctacaaaacaaacaggtacagactcccactacttgactttgttggagtgacactaatggtgatgacattctctgctgggtttgcatatctggaggctgagcgtgttaataatattgtatgggctttggaacgatttcgaggcctatttttaagaaacgatcgcctccctgttgttattgtcactgacagagacctaacactgatgaatgcagtgaaaactgtgttccccaagtgtacaaatttgttgtgcaaggtcatattgataagaatgtgaaagcgacgtgcaatctttaatcatgaaaaaatgcgtggactatgtatggataactggg

SEQ ID NO: 150031 - DNA, 264 bp, Glycine max
ctgatttggcattaaaaattattgctctctatggtaaactaataaccaaacctctggatgaccttaagatcctgagggaggggatacattcatggattcgggggggttcctatacccccaaggtttagattctatttgggttatattagacaggttgaccaaatctgctcactttattccaataaacatcagatattctttataaaggtgactagcttgtacgtcagtgagatatttagactacaccgtgttccttctagcatt

SEQ ID NO: 150032 - DNA, 397 bp, Glycine max
  unsure (1)..(397): unsure at all n locations
agcttcttgagagaactgtcctgtangtcttagcttanctacacacaccctctcataactaagctcacctccttgagaagcttgcttaagaagattcctaaagaagctagagcttagctacacacatctctctaatagctaagctcatctccttgagatgagaagctagagcttagcttcacaccccctataatagctaagctcacccctatgccaaaaaacatgaaaatacaaaaaaagtccttactacaaagactacccaataaaccttgaaatacaaggctaaaaccctatactactagaatggccaaaatacaaggtccaaatgaaagaaaaacctattctaatatttacaaagataagcaggctcatacttaacccatgggctcgaaatcta

SEQ ID NO: 150033 - DNA, 473 bp, Glycine max
cttaccaccaagagagtgccttggataagaagcttatattgtatatctccaatggaggaagagaatgagagagagagagagagagagagaaagaggggggcatgggaattaaaggagattacggagaaaaggtaaactctgatgtgtgtctcacaagtttcacattcatcaatgttatgacaagtgttacaaatgtttctatttataactaagcacatgggaagcttccttgagaagcaaggaaggtagattccttgcgaagctagaggaagaaagattccttgagaagctagagtggggctactcacacccctccaatagctaagttcaccctcataccaaaatacatgaaaatgcaatggtaagctttcttgagaagcaaggaaggtagcttcgttgggaagtaatgaagatagcttccttgagaagctagaggggtgctactcacatctctccaatagctaagttcaccc

SEQ ID NO: 150034 - DNA, 328 bp, Glycine max
  unsure (1)..(328): unsure at all n locations
atgcactcctctaatgataataacatcatntatggcactgaattactgagaagtggaagacatcttctcaattaaatttctggctccagcaagggtcatgtctccaagggctccaccactggaagcatctatcatacttttctgcatgttgctgagtccttcataaaaatattggagaatgagtcgatcataaatctggtggtgagggcagtttgcacacaatttcatgaatctttcccagtactcatacaagctttcttcactaagttgcctgaagcctgaaatgtcttttctcatggcactggtcctatatgcacgggaaaatttc

SEQ ID NO: 150035 - DNA, 306 bp, Glycine max
tcgattaccaaaacattgaaccgattacgctatttgaaataattggaacattggtaattcagtttgaaaacttttctcaactcattttgctactggtaatagattaccacaatatggtaatcgattaccagagagtaaaaactttttggaaaaggttttgtcaaaaatcatgtgctattctaagctttgaaaaaacttattaatacttaccttgattgagtcttctctatattcttgaatcttgatcatgattcttgagatcttgaaccttggatcttgattcttgtctctagactctcttcttga

SEQ ID NO: 150036 - DNA, 415 bp, Glycine max
  unsure (1)..(415): unsure at all n locations
gagttntattcagaaaattagagtttatctcttttatcttagtgatagtgattctcctaaattcttgagtgattcaagaacaccctggctgtatcaaaagactttcacaacctttgtgtgttgccctcgctggaaagagtgattctttccttcctttcatcatcacccttgttctttcaaaccacaattccagaaaatccacctctgcccagaattatcttgtggccataactcccattttacgcactcaaattaagtgattcttgagcctaaattgaatttcaaaacgagaccttttcacctcgtttggaatcacctcatttggagccctgtagcttcagttattgccatttctatatttctgtccagccaccacttaacctacatttttaccatcccattcatctcatttatg

SEQ ID NO: 150037 - DNA, 435 bp, Glycine max
  unsure (1)..(435): unsure at all n locations
tcttgaattcttcttgattcttatcttgaactcttgaattgttcttaattcacttgagttggtctttgattgatctttgagctttttgtcatcacctttgtcatcatcttttgttatcatcattgttatcatcaaaacacctttgaatcacctttgattctccatgaagctttgcttctacactngggcccattttgattcctttaatccggattccgccaagattcttaatgacgggacttccacctcaaacggtagcacaacctccattccatatacaaatgagaacagtgttgccccggttgacgtgcgcactgaggttcaataaccgtgtaacgcgaatgggagcatctcgtgccaatctttgtatgacacggtcatcttctggataatcttcttgatattcttattggctgcctccacggcttcattcat

SEQ ID NO: 150038 - DNA, 488 bp, Glycine max
  unsure (1)..(488): unsure at all n locations
ctaagcttcaatgcttcattacttgctaaatntcatgctctggcaatggatattanttgttaacttctattaaaaatgctaccctcatttctcaccaacccacacagacaagaaaaataactatagcctgcgtttgctcctgaatagctttctttaaggcagtaagatatacatagctttagaataatctacttaagctccaccaataaaaacaagacactgatcataaaacacttacctagttctttccagaatctagcataaattgcttaagcaaccaggtggactttccaaaaagcagtagtactcaagatataccaacaagatactttgtctccaagattcaaaaactaaggagaacgtataagcagagatgaaatttgagaagaaaattcaagaaccaatggagtggaaggctgatataatatcaaattctatacaactatatctggtgcagacactactatagtactattgctatctcttat

SEQ ID NO: 150039 - DNA, 465 bp, Glycine max
  unsure (1)..(465): unsure at all n locations
tctcggccttagcacgcgctcactgtctatttttagtctttcttttttgacatatactgccttattaactgtcttgggcttggcggccacgatcaacaaagtactttcgacacctattgtatgttgatttgaccaacgctgttatgggaatgttgcgacaatccttcaaaaccttattgatacattctgagaggttggttgtcatgtgaccatatcgacgtccttctctatcataagtcatcgtccatttttcctttgaaatgcgatcaatccatgttgctatggctggactcagttgacgaaatttttctaaattttgatcaaaaaaatgtgcttacaaggagtgtaggctgcataaaattagttatgaacaacaattttaagtatatatgaaacttaaattaacgtgaccatcaaatatgaaatcttacccaatttcttcaacatttctttntgtttggcatt

SEQ ID NO: 150040 - DNA, 400 bp, Glycine max
  unsure (1)..(400): unsure at all n locations
ccaatttggataaaagtgttaaactacttattaattaaaattttatgaatcattggttggaatattgaagaaaaaagaccacctgacaaccagcttgcctgaaggaactaaaatcatggcatccaacaagaactctgcatgcttcctgcatggatatcatcaataacttgaatagctgcaagattgagaatctagtaagtataaggagctgttaactaacttgcatagctggaagactaagctcctcaggtacatgccatgctcgatctttctcgaaggttgacaaaggctctggcccagaaagcaaccgatagaagtatctgaatagtagttccaaataactatcaattactgcaaatggtcataaacaaaacanaagaagttccatgacaatgcatgg

SEQ ID NO: 150041 - DNA, 418 bp, Glycine max
  unsure (1)..(418): unsure at all n locations
cactntctacaagtccttgtagcacccaaacaactcatctctatccaatctggtgcgtagcaacttggaaaggacaatgccaaccttggaagatagttggtggtttgacttcacagcttcagtgaaggcaacggtgacattagctaccttaagggacttcactctccagactgtgcgagcagcaaccctccatttggcaacctcagcctccaaggatgccaccttgtttggtgcctcttggtgcctttgtccattctcttttangatcatcaaacttcgttggaggaaaaccttggcagaatccatggcatgctggaccccagctgaccggataagtttttttatcaaaggctaacacaaagccagttgaggtcttcttgttaggcttgtaacccataccccatagtgaatcaacatc

SEQ ID NO: 150042 - DNA, 483 bp, Glycine max
  unsure (1)..(483): unsure at all n locations
ttgcagatntggtcttcgccagtgaaaggatcaatgtgtgttcgattagaggcaaatttgatcatcctactacgacgactgagaaaactggggcaaataaagagggtgaggatgagggagaaacccatgctgtgactgccattcctgtacggccaagnngcccaccaacccaacaatatctttactcagccaataacaaacttcctccttacccaccacccagttatccacaaaggccatccctaaatcaaccacaaagcctgtctatcgcacttgcaatgacgaacatcacctttagcacaaaccaagaacaccaactaagaaatgaattttgcaacgagaaaacctgtagaattcaccccagttccagtgtcctatgctgacttgctcccatatctacttgataattcaatggtagccataacccaaccaaggttcatcaaccttcatttctccgagaatacgactcgaatgcaacgtgtg

SEQ ID NO: 150043 - DNA, 379 bp, Glycine max
  unsure (1)..(379): unsure at all n locations
tatggttaattggttatagcacaatatgattgtttatgtagcttacaatttttaatggacattaaaattttggttccttttttgcacttaatngaaatggagttgttcctgttcttggtgagaaagtttggtaatatttatagttagcattctagtttatatcaaggaacttgaaacttgatctaattaactttcctctagaaataatctatttatctttctagtttngtttccatgtaacacttagatttataagcttataaaaatgtcacacctgatttcatagctaataagctctaacattccttttntattcaagaaaatattaatgactttgaatggaccttatattagtttgattgacgtatgactttttcaa

SEQ ID NO: 150044 - DNA, 326 bp, Glycine max
  unsure (1)..(326): unsure at all n locations
cattccttttctattntcttaacaaaccatagctcatattttaccaccccaacctttatggtttgctacacttaatagcacacaaaaatttattcggcacatagttgcttctagcttttatttatcaatataaataaacacacataattttattttattttgacaattgaaactcccccaaatttggggaaattgttcctgatccatgagtactctcctataaactaagatagagtgcttacacagtatcattcaactcaagtgtcaacatcaaattcattcacattaggctcaataatgttgcagggattcattcattcactaat

SEQ ID NO: 150045 - DNA, 421 bp, Glycine max
  unsure (1)..(421): unsure at all n locations
gagaggggtttagggggttcacaangtttgggatagaggaaaaaatgttggaagaggaagagaagaagaaaaatgaagtcgaggcgccgtcaaatcgcgaccgtgggtcattccctacatcgcttctctggctagccttgtaccttgtgcaacatccggatagttcttcttcatttttcttttcttttcttaagatttgaatataatccatatacccttatgggtcctctctgttattttgtatgtactcatcttctcccctttacgggtcgcaatttcactttacttgtaaggtttagttctagccgatcattagtgntgtgaagtctcttcctccttttgtggcactagaagctaataaacaaaaaaaaacaaataagggaaatcattacaaccaaacttatttttntatcaatatcac

SEQ ID NO: 150046 - DNA, 427 bp, Glycine max
  unsure (1)..(427): unsure at all n locations
tccttaccctcggaagcaaaaaaggagagaatgaaaatttccaatccaaggaaaaaaagagaggaaaggaaattcccaatcaaagaatgggagaaagaatgggagaaagtaaagaaagaaaagaagaaagctcctggtcaaaggaaccagaagaaatgtgcaaagaggtctttagaccggacagtatctgaacaatacagaattgtcaccaaatgaacaaaaagaaggaaaggaaaccatgacctanaatggtcttctccctttaattgccaaccagaatcagtgcgctagcgacttgttcgcctcgcgcaaaaccaaaacagaaaaggaaaaagccaacaaaaaaaatcaaaagccaaaaacacacaaaagccgaataacccatcaagaaaacccattcccaagggaagtcctattgatccatgat

SEQ ID NO: 150047 - DNA, 386 bp, Glycine max
  unsure (1)..(386): unsure at all n locations
tacatgatgcctacgatgaagttgagttgtagttggatttgtgaatcanaataagtcttaagctctcttgaattgttttattcaagataatttagcatatgcaaacacaaattgtaactatccaagccttaagcaacataaacactgctcttgatttctaggttgaaatcgctggtgttggcagcttgaacatacaaacgtgtataaattactgggaattggtcactacgaattttgagctgaaagttctcctgaattttcgagacatctggagaaaaattgtataaaaaagaccaaagtgatttagattaaaggaaaaatacgaaaaatcacaccagttggcagagaaatcagtgtctataaaaaaaagtgaatgggaagtgtgc

SEQ ID NO: 150048 - DNA, 452 bp, Glycine max
tactcagcttctcaagaagagatggctagagaatcaagatggtctactttatctatgcaaggaaggacgaagctacaaggagttgaattggagcaccttcgagatttgttgagcggctcgcttagcaacaccagcttgctaaatgcatttcaatccaaatgaaataattcgcttagcgacaccagcttgctaaatgcaattccagtcaaaggagaaattgcccttagcgcgaatgtctcgcttaatggcaaccttatgcgagtttaagttgggccagctcacgtaggcgagtgaaatttctcctaggcaagtcttgcaggttagaaatacatccaacaaagagaaaaacatgatttttgtacccctcttctccccaaacactcacctaacctctaaacccccctccttctccacctacggccatcggtgaccaccatgagccaccaccactt

SEQ ID NO: 150049 - DNA, 362 bp, Glycine max
  unsure (1)..(362): unsure at all n locations
gtggttagcgagcgtccgctaagcgcaacactcatgggctaagcgcgaggaagactctggaagaagatgagctgtacaggtttgctaagcgcaccgcttcatctcactaagcgcaccgcttcagttcatctgctaagcgagaaagacacgcactaagccaaaattcactaatgtgcactaagcggtccataagtgtgctaagcgcacgagcacgaacaaggccacttatttaatcctgaaatcatattttaaagagggagnttggattgggatttagagctttacatgtctagggtttctagagagagaaaggtccaagttccatacagttttgagagaatttgctgtgtgaagatctgcaa

SEQ ID NO: 150050 - DNA, 424 bp, Glycine max
  unsure (1)..(424): unsure at all n locations
actcagcttcttggaaacttctttagaaatcctgaaagcttatcttactaccacacccctctaataactaagttcacctccttgagaagctatgatgtagctccatgtggagcttgtaggccttggatcttcttcatcaatggagtcctttgcttcttgaagatcaatgacagcggaatggagaaggaagaaagatgattggagacgccacttcaccaccataagaagccatggataagagcttgaaggtaggaaaagataagtggagggagagggagagaaggagcatgaaattttgtgcctcaaatgtggtctgaactttgaagtgtaattctcaaatgatcaaagttgaaaaaatgcacacacatggcatttatttatagcctaagtgtcacaccaaatngaagggaaattcgaatttcta

SEQ ID NO: 150051 - DNA, 349 bp, Glycine max
  unsure (1)..(349): unsure at all n locations
gaacgggagagcacgaaattgtaggaataaaagagggagagaagtggaactttgaagtgtatctcataagactttcattcatcaaagttacaacaagtgttacacatgcttctatatatagactaggtagcttccttgagaagctctcttaataaaacttccttgagaagcttctttgagaaaacttctttgagaagcttgagcttagctacacacacccatctaaaaactaagctcaccttcttgagaagctagagctntgctacatacacccctctaataactaagctcacctccttaagaagagaagctagagcttagctacacacccctttaatagctaagctca

SEQ ID NO: 150052 - DNA, 468 bp, Glycine max
  unsure (1)..(468): unsure at all n locations
ctttcaagttctatagaagataaatgacaatgctttcattctggacttgccaagtgaatatggtaacataagtgctacctttaatgtgggtgacctatctttatttgataaggaaacatattagatttgacgatgaatcctttcaaaaagggagggaatgatagaggtgtaactagtttgtctattgatcctttacatgaaattagaggttctatgacaaggtccaagactaagaggatgaagcaaacattgcaagacctgattctaaagatcaaagagaaagaagaccatgtgaattaagggttacacctaattgggtcactctctacaaattgatgaagatgctttgagcccaacttgaagacttactttgggaagcccaatttattacaataccagaagtatccatgagctgagtcgataaattntggtagatatcaatattaagctgattatataataactaag

SEQ ID NO: 150053 - DNA, 387 bp, Glycine max
  unsure (1)..(387): unsure at all n locations
gaatagaatagtgtacattaacaattggagtcaacaatagtgattcccataatttatctcaggatagttnttagaagatgaacatcatactagttacccttttttttttaatcttctgtctgcattttgccacttttttgtggtttactactgcactaaggcattttatacacaaatttggaggttactgcattttatttattttcttctttcagtgaggttatatgaatctttcctcggtcaataatagcggttgtacagataaagttactattactaattaaggtacatttttattagaggtatctctttgcgggctcatgcaatattttgcttctcttgtataagtcatcttttcacaaatttataattntttttggtgagtta

SEQ ID NO: 150054 - DNA, 431 bp, Glycine max
  unsure (1)..(431): unsure at all n locations
taagcatcacattcattntacacaaatttaatcttgcagttttaagccctgaattatcaagaacatcatacatccatcctaaacatcattggaaggggaataaaaaaccattagccatgcccatttgttacaggaaaaaatatttccacaaggcctaacaaccagtttaattgaacagttagactaagtaaacaataacagccaaaaaagacaaggtgacctaagggtttttttcttggagcattttggcaacttataagagtgaatctagtttgcttccaatagatattgagtgtgtcctcaatcatcggaccatttttttaatgataagctttaatggtcttgatacaattaaagaagaaaagaacaatccaatcatggagagagagagagagtagagagagaaacagtgggtgggagagaagtatgac

SEQ ID NO: 150055 - DNA, 412 bp, Glycine max
aaggcatgctaaaggggttttaaggggttccaaggttcaggagttgagagaattgagagaagaaagaaagaagaagaagaaagaagaagaaacgaagctgaggcgctaccaaatcgtgaccgtgatcattccttacatcattttcttgttcagtgttccttgtgcaacaatcaattagttttgtttttctttgaggattgaatgtaatctatgtacccttaggggtcccctctgttattatgtgcatattcatcttctctatttagcatcggggatctcatttttattcataagtttaatcctaatcgatcactagtatcgtaagattgtctttaaaaagattgaaagttaacaaaccaaacccaaataaagaaaccaactcataaccaaacttcttttttatcaaatatca

SEQ ID NO: 150056 - DNA, 390 bp, Glycine max
  unsure (1)..(390): unsure at all n locations
atcatctcgattacaatgcacccaagagaccatatatctaacgctggttcaatctgaccaacgatcgattctggcgacatgtaaaaaggtgtccctctaaacttgaccttcccatactcagcatttgcatcttctctagtcttggacaacccaaaatcagcaatcttcagttgataccttgcatgatcatcagatgaaggaaagagaaggatgttgtccggtttgagatcacaatggacgactccttttcgatgaatgcaaganagccctttgagaagcatacgagtgtagactcttacttcactatccgatattggccccttcttgtttactaaaccaagaagagaaccataaggagcacactccatgaaaagaatgtatgtcacataa

SEQ ID NO: 150057 - DNA, 194 bp, Glycine max
  unsure (1)..(194): unsure at all n locations
gcattcaagtccgagcctcttcgattactacgggactcaatcagacatccgagtaaaaagttattgtcgtttgaatttgctcagagcttcaataatcaattccgagccgctcgatatattacgggactcattcagacaaccgagtgaaaagttattgtcgttngaaattgctcagagcttcggtatttaatttc

SEQ ID NO: 150058 - DNA, 327 bp, Glycine max
  unsure (1)..(327): unsure at all n locations
gctgacaatcaacacatactttactcgtgttttttttcctttattcggacctcgactgaatccgaactctgaatattcaacgacatacttttactctgagctgatcagcccgaatatatgaacgctcgatttgaacgtgagcttgagcacttcaactacataacttntactcgtgctggttcatccagtatatatcaaacgctcgatattgaatgtgaactttgacacttaaacaacaataactttctcgatgttgatgatccgtaatatcaacgctcaatgatatcgacttgacaatcacacatactgtctcgatgcgatgagccg

SEQ ID NO: 150059 - DNA, 409 bp, Glycine max
  unsure (1)..(409): unsure at all n locations
aagggatgccccacattatttccatgacacaaatgcaaaaatgacgatttggaaattttatgcaaaactggttatgcatgcacctatgcggacactcaagtgtcaaatttttatggtcatgtgatgctagggctcaggattcatttcctctattttagtcaacccaacgtttccaaaatatgttcttttatcaatttgtgcattaatccgagtccattttgggcgtctgggaaaatcttcacagcattcaaccttcaggtgtatacacattntttcaaaaactagttatgatcagtgaatttttccaaagaaaagttggaagtcatctcttttcaaaagcatgttggtttttcagcttgacaacttantttttctttnttctcccttcttttttttttatcattatcat

SEQ ID NO: 150060 - DNA, 450 bp, Glycine max
cttggggagccttagagtacaatcacgtatcgactcccctagttgcctcaagtgctaagcataatatcggttgacgataatggcatttaagggtgaaggaaactcttcaccattcatgctggcaagcaccgatactcctaccgagaatgctttcttcacgacgaaaggtccttcgtagtttggagcccacttccccctattgtctttttgagcttggaatactttcttcaagacaagatccccttagttgaacttgcacaggcataccttcttgttgaaagcattcttcactagtctttgatacaaacactcgtggctcatggctgccaatctcttaccttctgtaagattgagctaatcaaagcgtgcttgggcccacttcgactctttcaaatcggactatgccagaatccttaaagaggggacctctacctcaaatggaagtatgac

SEQ ID NO: 150061 - DNA, 406 bp, Glycine max
gatggaactcacatttaaaatgataacttttaatttctattaaaacctttcagcttccttccattaatttctattcaatcaatttttttaattatggcttgatcgttataaatttaatttgtgagtgcacattataaatctaatttataaaaaaacatttcaaatttgtagaaattgtgtaggtgaatatttttaaaaagttggagtataaataccgtgaaaaaatcttgcatgaattaacaaatttagcaagggtcttaagattttatgttatttatcatgtcattaattattatatttctgcctatattctttctcacattatgaacgacatgaaataatcatgtttccattataaaaattaaaaaagtgggtgaattttaagaatattttttttatttttaaa

SEQ ID NO: 150062 - DNA, 386 bp, Glycine max
tcttagtctcggctgatgaagatgcattcgtgactacttctttctcttctcttatgacaatagcataatttctagcactaaattgctgggagttaaaagccatcttctcaattaaatttctggcttcaacaggggtcatgtctccaagagctccaccactggcagcatctatcatactcctcttcatgttactgagtccttcataaaaatattagagaagaagctgctcagaaatatggtggtgaggacaactggcacatagatttttaaatctctcccagtattcatataggctctctccactgagttgcctaatgcctgaaatatcctttctgatggccgtcgtcctagaagcagggaaagttttttctaacaatactctcttg

SEQ ID NO: 150063 - DNA, 432 bp, Glycine max
  unsure (1)..(432): unsure at all n locations
aactaatgtttcattatttttttggccttggatttagggctccataatgtaggtaaggtattctagaaatgtaagatttttaatcccttgtattttagggcacctagattagtttttgtattaggggtagttttgtaatttcacatgtattaagtgaatatttgatatatcttggtaaataaatttaattgaattgggagaagcccaatccaattaaattntagagggggaggtgagcattttcttgctacaccccattgccagatcatatagtcacactttgtgcatgttcttcatgctttacatgcctcatgccacctaagcatacttagtggataatcttggacttgatcttgaattagtgggatgaaccatagctaaaattcactaatcataattagtggaaattttggctccaaaatttggctccac

SEQ ID NO: 150064 - DNA, 337 bp, Glycine max
  unsure (1)..(337): unsure at all n locations
agccttctggaggatcttctggagggcccaagtgggcctggttgctatttgcacccccatttttactaaatacacccctttctatttttttggtgattctttttccgtaatgttacgaaactttacgaatctcgtaatgatacttattttttcttccgcaaggttacgaacccttacgaattatgtatttactcttttttagctttcgaagaagttacggaaacttacggattgtgcaaaaacatctcttttcgacttccgccacattacggaatttcacggatcgcgcaagcctgcttcctttagatttctgagacgtctcgngacttcatttatt

SEQ ID NO: 150065 - DNA, 428 bp, Glycine max
  unsure (1)..(428): unsure at all n locations
gatcttatcaagagtgacctatgttaacaacaaagtcaaacactactcgaacatctaatccgtacccaactatcctaaactcatactaacttgagtattaaagtctttgaaagcgacttcttgattgttgttctagctaggaatcgaggcaatggaacatactattgtattatcaacttatacacacatacttatacgaaaataatttagtcaataagaacctaattaaattactcaatatattttctttcaaaatttagtgttctcaccatgcgcatattatagatattttagtggaaaatctattgttaaaatcattttttatattctaattgcactngaaggttcaaaactaattntaacaatacaaatttgaccaaatttaagacataatgacactaaaatattattaattagtacaactcatt

SEQ ID NO: 150066 - DNA, 344 bp, Glycine max
ccttgcgtaccatgagttctcgtggggatggaaatgtagttatgtgaggcttctcaaaggtggtccttgggtttgtcgagccttggaccaagaacgggccttgggttttgtagacctatgaagatcaacaagcatagagcttgggtttgacgagtcttgcttgtattgtaagtgttattctcttgcatacatggcacttaccatgggtggtgtcataccctaatttcatccaggaactatcattcactgatgttttgattctcgctaaccgaaaggtgttgttcgacaccagtttctgcacaaggtgtgggatcatttgacttttggtaacgatgcaaaatacc

SEQ ID NO: 150067 - DNA, 429 bp, Glycine max
  unsure (1)..(429): unsure at all n locations
atctttcaacatcgatattttattcatgatgcttcttttggtttcaaatgttgctcatgataattattataactttttgtaatttttgtctaanaagttatttttttttgtgtatcctataattgtattgtttgaaacatttagtcatacatggatgagacatgcattttcttttgtcaaagaaatataatttttgttttgttntagatgcttcttcttattcttctcctttttcattgatcacactattatccaatttaacttgaatgaaaaatgataaaatttgagaatgaaaaatgataaaatttgagacttgaacgtgaagtcagataatgtgacatgctctntttcattatattggntgtcattaatatctattgaagatccttgattcctagccagttattgaaacatataaaattgatatga

SEQ ID NO: 150068 - DNA, 426 bp, Glycine max
  unsure (1)..(426): unsure at all n locations
aataattnataatcataaactttcatgtatggtccacctttactcctcttatactctcatacaaatactcctttcacttgatagcctcctataagagactaagggcctgttaaacttctctataaacaccggttagataagaaaataagaaaacaaaaatgaaataagtggataaacatatcctatatctagtgagaacatggcatgtgagaggagttatcaggttctccttggtagatgtattacgtgaataagaagtgtatatatagagaggaagtgtcatgtatatggtgaaagatgagagcatggcaggagccggtactaatagagacaatgtcaataacaaatcaggttcttgagttaaacattatgcanagcaattacaataccaactgcaaaaaaccttcagatttcaatctcttaact

SEQ ID NO: 150069 - DNA, 415 bp, Glycine max
attgcacagcgcttcctggtatgaaggggggaaaatcagagttaagtgaaacagagcaaaattactgtttcatgtttccatgatgtgaaggtaattattgaactttaaaatggaacagaggagaaaacacaatgcttaccccagactcggaatcatcgggattgagaacaacagctcgttggtaacacttaatagctctctgagtatcaagggaaacgccgccataataatggcccagatatttgaagcagtctccattcttagggtttaatttggccgatagaataaaatgttgagcagctttttccttcgcttctcctcctttttcccacaagaacacgccctaaatgaaatcatagtgtcgtttattaagaatgaataactcgaaagtgcagcagcgggaataaattaagaa

SEQ ID NO: 150070 - DNA, 238 bp, Glycine max
  unsure (1)..(238): unsure at all n locations
gtggaccatcgggtgagtattgtagctagatacagagttatctcaaccactattatgtcggttttatatatattaaaaaaaaatagagttttagaccatttaatgttcaaaccgaatcttattcctagtgatggtataagtaaatgtggatctgaatctgaaaatngtgtttgatgtgattgagtgggttaattacctaaatatgatatgatatgatgatgcatgcctcaagcaaaag

SEQ ID NO: 150071 - DNA, 278 bp, Glycine max
agaattacaaaaaacatgacaattatgatatgcttgtgagagtttttgctcgaatttgggctgccccatgtttgatactttacatagaggtagtgtggaaaacacctcgcaatagtgtgtatacatacgtaaatatcaggagcatgaaattcctagcaaagtgtgaatgactgtctccctacatgaatgtatgatagtgtggaatgccctttcgaatgcaaatatgtgcacgatgtaattagcctttccaatatgcatataaatagatttgagtgaaa

SEQ ID NO: 150072 - DNA, 438 bp, Glycine max
  unsure (1)..(438): unsure at all n locations
acttacccgttgcagatctattaacgatgaataacgaatgaagaacgtcgaagaacggtcgaaacctttgcgaaattcttcatggaaaacgttacggaaacgtttcggaagcgcctcggcttaaattttcttcacggaaacaatttttccaagcaaattctaaagagagagaagtgcctaaggggctgaacccttttcttcttcacttcctcccctatttatagcaaaataggggaggtgcttgccgcccagctcgcccaggaaagctcagctcgcccaggcgagccaggttgcttcctccaaaagcaacagccttctggaggaatcttctggagggcccaagtgggcctgggtgctatttgcacccccatttttactaagtacaccccatcttgtgtttttttgtgattcttttttttggnaagttaccgaaactta

SEQ ID NO: 150073 - DNA, 381 bp, Glycine max
  unsure (1)..(381): unsure at all n locations
agagcaagaaatgaagagccaatgggtgatacatggacagagatgaaaaagatcatgaggaagcggtatgtgccggctagttactcaagggacttgaaattcaagctccaaaaactaacccaaggcaacaagggggttgaggagtatttcaaggaaatggatgtgctcatgattcaagcaaatattgaagaagatgaggaggtaactatggctcgatttcttaatggtttgactaatgatatccgtgatattgttgagctgcangaagttgttgaaatggatgaattgcttcacaaagcaatccaagtggagcaacaattaataaggaagggagtggctaagaggagttntaccaactttggttcttctagttggaaagac

SEQ ID NO: 150074 - DNA, 406 bp, Glycine max
  unsure (1)..(406): unsure at all n locations
catccacttcccaagaataccaccaactatagaaactgctaacaaaatcaacaagatgttggcagtgcttgagaagaacatcttgtgggtgaagactgactgtgggctcaagactcgtaagtacactaaggtgaagtcagccctcacaaacatggttgttgcagcaaaactcatccgcaacgaacttgccaagtgaatggtataagagagtagaatcttccaagtcatttggttctactttataatacaccaaagaaaaattctctctatattgggttgtttcaataactgtgtggaatatttagggtgtttagcatgctctttgagcaattgattcttccttaacccctcccctcttattntaccaaactcctatntttcctaatgaatgttgtcgtatctttgc

SEQ ID NO: 150075 - DNA, 480 bp, Glycine max
  unsure (1)..(480): unsure at all n locations
tttgctgaaagaacagactagagccaacactatccacacaggaaatgttctacattctcatactcttcacgaaagtgagaaggaaaatntgattggttttgagaatgaacttgaacaagttagaaaacatgatgtacgaggtgatgtagtgatagagtttgtagacaaaaattgtcaatctgaaaagtagtatcctttcattttttaagggagggtgaaattagaattaaacactcaaacttttctacaggttcatggttcaagggacaaggattgcaatcattattttccataattgtgggttggttaaaatatctcagtggtacttgtaaatacttggtttttcttttagtttatgataaaaaacatattctatccctacaaattntaaatcataagcatttggtcaatatttttagtgttagttacaaagatgtgactaataatatntctcgtaataatgtgatgtcatcaatcttg

SEQ ID NO: 150076 - DNA, 431 bp, Glycine max
ccctcagggctctcgcaaatgctttccatcaagccttgatcaaatatcacatagtatcatttctcaggttcaacaactcttcgaattaccttctgatcctgaatttgcagatactacgtgccaagagttccctttcactttagtcattcttgtggatgtgatggaagatgaagatagtgtgcaataatagaagaatccatgcagcaatgtgtcataatgattccagcctccaacgaagctgttgaaagagccgccttatttgcagacaccccttagcctgccggcctctttgggtgtcgcctaaagtgcaaacttgagggtggtggttcagtggtatattcccacaaactagaaatatgaccaaattaaaatattcaagtgggggcaaccctcgtcttacaagtcagttttatagggttgagttaagctca

SEQ ID NO: 150077 - DNA, 473 bp, Glycine max
  unsure (1)..(473): unsure at all n locations
ntaagaactctacggatgatctagactcttctctccacaatctgtttctaactctatcnttacccttactaaggcctctgtttgagtctatcacttctatggtcgggtctatgccctttagccatgatacctctccggggctctctatctctggtatccctgcactatctcactgtctttatctcattgtttccttatactctaattcctaacaataatacatcacgccatatctagggtattcgacatttcataggcttcattcttttctcgctgatacttgagattatgactttttgaagaagagataaaaaaaaagcattgactctccaatagtctaatcctaagtaactcaagaatatcacgcaagttaaataaataaataatataacctccaccatcaaaataacattttttatatttgaataacaaaacttaaaaaggcattcactagaanacagaacagccactat

SEQ ID NO: 150078 - DNA, 364 bp, Glycine max
  unsure (1)..(364): unsure at all n locations
tatgtaaaacatcaagttttacttttgaagtcaaaaagtaatttccaaacatgcaattcttcatctgtctagtgttggatttacatttgtactgagttttattgcagttgaaaaatccactaccatttaatntatccttttgcataacaggctgggtttgtgaattccttggcttttgcaaaatcaggagaattcttagttgctggagttggacatgtgaaaattttctcaaactgtgtcctgcttgtatgcttctttttcttttgtatactatttactgaaatttcgatggaaacactaccatggacagaaaagctatatgtgatgttgggggttaagatgattatttaatgcctttctctgc

SEQ ID NO: 150079 - DNA, 347 bp, Glycine max
  unsure (1)..(347): unsure at all n locations
ttagatgacactaccctcaagaatatttttctgcgagatgaatgccccatgaggctaccatatctcatcaagggctgaaagcaggaacgaaaacaggccctctnttatgtatgacaatgccttgaacatggtaggggatacctgattatattattccctagttcaacaaccaatacacagaaaaataaaatagaaattattgtatattccgagactaggacatgcctataatctngactcctgatcaattattatgtcataggtaattgaggtntcttttaatttcaaaaaaataattataaaactcgattatgtgtactctaaaattaattggaatagatgactta

SEQ ID NO: 150080 - DNA, 467 bp, Glycine max
  unsure (1)..(467): unsure at all n locations
gattatactcacaannnttgtcttttggttgacaaacataaaaagtaaattgaacgtgttatataacctaagctntcttttaatagttccaatgaactacaggtttatccactcattctgtttgcttctagtgttgctcaatttctggacaaaatttgtttccaataccacgtccaagctaaatgttgaaactcttgaattgtttcccattagttttccttgccaaaagcactaaagttcatgacatttatcatttttttatgaataaattacatgccacaaatcacaatgtacaagaaagagaaacaaaggtttcttatgtggtgcatgttcctaagactgctacatcatgtttaacaaagagaaactccatcccttatcatggtagcttagctgaatgattgaaccaaagggaaactccaattgagaaaattttaacagccttttatattattgaagttgcttat

SEQ ID NO: 150081 - DNA, 421 bp, Glycine max
  unsure (1)..(421): unsure at all n locations
tagctagctagcttaatatagatccggcgaattcttctattatattctagtagnattaattaagtgtacttgtgtatgaggaacgtggggattgattgtggtttctttgtaatgaggtgatgtaatgcaagtgctaattgtttttgcatttccatattcgttgatgaagctaaagattagcaccatcttttgttttaatataaaaaaaattccatccaactacttntgaccctgaccaaggctttccataattatcaatcatgctntaattttttcctctcacccttaaaacatgcattgcatttggattgatgatgattaacatatcgcgaaaaagatatcccctttttctcgaagcatgcatatcacccacttttttaacttataatacacagtgataattcttagcctatntcataat

SEQ ID NO: 150082 - DNA, 318 bp, Glycine max
actcatagtctgtgtccttctgccacaaatatagacaaattaccttcatatgccttatactctttgctaatggtttcacgacccaaggttatccacgcttctattctcttctttccacctcttttctttttgttgtttatctaatgtttactttgcttactttcatatatgttcatatattgcatgcaggaagaacaatttccaagatttgtaaagatgccccggtacaaaataaaaaatcatacaatgaattcttctatgtgtcaacatgagaatcatacaatgaattacttatcgtgagctaatatagtactacta

SEQ ID NO: 150083 - DNA, 432 bp, Glycine max
  unsure (1)..(432): unsure at all n locations
atcctctgagtcacctgcggcatgtcagcttgtcagcataagcattgccttcactgtatatatgtatatntctaaaactaaactctttagttggatctatacaattcacctagcggttgtaaagagtccagggggctgaaaaaggatgattatataatgcacaatattgagaatattgttgtatgattatgctaatcctaattgtattgagaatattgctacatgattgcgttgatcttaattgattctatttgcattaattctgattgtatgtattaattcttattgtattttaattttattttggatcttgatctcttgattattgggatcacttatttttaggatagatagttgtatcacatatgtctggaaaagctataagagacatcttatttaggtgggtggatgaccttgtatatatatctattg

SEQ ID NO: 150084 - DNA, 483 bp, Glycine max
  unsure (1)..(483): unsure at all n locations
tactaagcttacgnatttatatttcctaatagtaggtggaatcatgattctttctatgaaaggtactacaggtctgtttgtgtgtcaatgctaattntgtgctatatagtcctctgagactaagtgaaatcactgcttttgaatatatcctagggtttgcatattttgcattatagattattaataataaagtaatttattaaaacaaattctgattatgttggcttttggctttcacggatcagtcagggaatcaaaatggtctctcttaataattggtatggttacctttttgtatagacttggcactgctggtgtttctgtaaatgtttatgtagccggtttggttgatgtgctaaagtgaccttactgggtcccactgattatctatgtntccacattttcattctaaattacctatagtttctacaagaaatatgaaagtaaactggctttatggattaactgtattgattgtcattt

SEQ ID NO: 150085 - DNA, 419 bp, Glycine max
  unsure (1)..(419): unsure at all n locations
actcagctttcgcnagcttacggaaaatcngggacctttctctgttataagtctctatagaggccattgcctccctcgcccagtattatgatcagccattgaggtgcttcacctttggggacttccagctatcacccatggtggaagaatttgaagagatcctaggattccctctagggggaagaagaccatacctcttctcagggttctatccctcattagctagaatttctaagatagtccaaatctcggcgcaggaattagaccacagaaagcaagtcgaaaatggggtggttggaataccgagaaaatgtttggaggcaaaagcgagaatcttggcaggtaaaggcgaatgggccccattcatagatattctcgcactggtgatcttcggaggagtcctctttccgaatgtggat

SEQ ID NO: 150086 - DNA, 466 bp, Glycine max
  unsure (1)..(466): unsure at all n locations
ttaagcaccgcngctgcagctttctataaaatattcttgattcatttgttatgtgtacgtacaatgaatcttgattcaaaaatattcttcacaaactgcaaaactacaaacaaaatttatacacagaacacattagcacatcacgtacattgncttttgttttttcttttatctangaagggagggacagaggaggcaagtgattagaaggatacaaccaacaacactacctgtgcagagctgcttgccttatctttaatgctccggagctgttccagtgcgtggatattattcgaatgagaagatatgaaattcatatacattgaattccttgatgttgcatggaagtggtcacagaactgctcanacaacagataaagctcgtctggtgaaattctgatagatgtaaaaatgagtcanaanacacagaaaacccaagaaaataaaacatgatngaaaacattta

SEQ ID NO: 150087 - DNA, 457 bp, Glycine max
  unsure (1)..(457): unsure at all n locations
ntaaaaactgaaaagaaaattgtgtgatgaatcaaaagtctatacttgtagacagngaggacatcaattgactaatttctttgtgaagtgttaagcttgtatttataaaatactagaatttctgtgtacattgaaagacaaactaagttttgtgcaactaacaccaaataaaaaaagattaccgttatttacactattttttcttcttcttgaagttatactgctatatggagaccatggtccattgatgatctagagagtgtcttgtatgtgtgttatacatgtggatgaggatgttcctttactgtggttcacaaagtgacttctagtgccacttaaccaaagtgtgtgagtgtctctcctcaaataataccgaaacattgtgtatgatagcacacattatataataaaaagttttaaaaaagggttgtcaccatgatttggatcacatcaagat

SEQ ID NO: 150088 - DNA, 410 bp, Glycine max
  unsure (1)..(410): unsure at all n locations
cttatgcgaatcaatgaagaaataattntaaagtaaagtgagaatctaacaaccactacaccattcgtgtaaagtagtaccaaatattcttgcgatctcctactagcaactaattcatttaaactgtaattatttcagtagctaaattgagaatttggcaattgtaggaaaaaatagtcgttatctcatcttcaatccaaaaaatcaaaaatcacataaacaaacaaatcttaaaaattacatattttttacggtcttgtttagttttcgaatcttgttataaaaaataaaccacaccgaacaaatcacatattatattacattgantttattgtgataattaataataaacatgaaatatattacttttcttttatattataattaagatgcatatcttactttcacat

SEQ ID NO: 150089 - DNA, 358 bp, Glycine max
  unsure (1)..(358): unsure at all n locations
acaaacgatagagctattttttttttttgggttaacaaccatatagttatctgagtacagatgtatctgaatccaatgtaattagttgtaggctgtatccattggagaaactcttagatgattattcacccaacacgtcacttttgagcactttcaatcataaaatantcaagttatatttggataaactcttcttaataatacgtatagtaagaaaaaaaaagtaactaaaatgaatgttttcacattagttaattatgtactttaactagcttttatataaatcttatcattacttctttaaaccaagttttacttattgtttaatgaactaggttaaattcatacagcacttatt

SEQ ID NO: 150090 - DNA, 360 bp, Glycine max
  unsure (1)..(360): unsure at all n locations
ctgcactgcctaaagtcagaagatattgtgtcaaggacttttttccctcctgagtatgacagtcaccgntttatgagcgcggtacaccaacagcgcttcgaggccatcaagggatggtcgtttctccgggagtgacgcgtccagctcanggacgacgagtatactgatttccaggaggaaatatgccaccggcggtggacatcactggttactcccatggccaagttcaatccagaaatagtccttgagttttatgccaatgcttggccaacagaggagggcgtgcgtgacatgaggtcctgtgtaaggggtcagtggatcccgttcgatgcatatgctatcggtcagctcctgtgatat

SEQ ID NO: 150091 - DNA, 483 bp, Glycine max
  unsure (1)..(483): unsure at all n locations
acccagcttcttagaaggttcgntcctaatttctctacaattgcatcacctctcaatgagttgtttatataagaatgcggcatttacctggggtgaaaaacaagagcaagcctttgctttgctcatagaagagcttactaatgcacctgttctagctcttcctgacttttctaaaacttttgagctacaatgtgatgcctctggagtgggagttggagctgtattgctataaggtgtgcaccctattgcttattctagtgaaaaacttcatagtggcaccctcaactaccccatctatgataaagagctntatgccttaataagagccctccaaacttgggaacattaccttgcttccaaggaatttcttattcatagtgatcatcaatcacttaagtacattagaaggaaaaacaagttatacaagacgcatgccaaatgggtagagtacctagagcaatctcccatatgtatcaaatacaa

SEQ ID NO: 150092 - DNA, 295 bp, Glycine max
  unsure (1)..(295): unsure at all n locations
tatgtgaggaatgcatataatctgaagccatcatggtaatcttcttcaataaccccttattcctacttacactctttagcttacacaaataaattcttaattaacactacatncacttgctccctaatgacaaaaaaatacaatgaaaaaggctaatacatgtcaatgataaatgtgatcatacaccaagatgcctccaataattctttggtgacaccccatatcatcaaacaatgatgaatcttctatgttcacatagcagtacactcaaaaaccatgtgtttgaacgacccat

SEQ ID NO: 150093 - DNA, 187 bp, Glycine max
  unsure (1)..(187): unsure at all n locations
gcttgagtagatttctatatatagacggggattatttttattatatnngagtaattattggggatgtaatttggacagggattagttggaaaaaggatgggtatatttgtgtgatttactcatgttggaattgtgattatatataacccgactagtgttattttggaaaaatgttatgtccaagtgc

SEQ ID NO: 150094 - DNA, 209 bp, Glycine max
ataagcctggagaaggagctcaccaccaagatgagccttggataagaagcttggagaggatgcttcaatggaggaaaagaaagagggagagaaagagggagggggagcaccaaattgaaggaagataaaaggagagaagttgaactttgagttgtgtctcacaagactctcattcatcaaagttacaaaaagtgttacacatgctttta

SEQ ID NO: 150095 - DNA, 307 bp, Glycine max
actcagctgtggatgagagaagggactggagagtaaccattgtatttttcattgttgaagagctcgtaggaacattcatgttactaacgtttttaaaacgatgatatgtcaatctacggttttcttttacaccaattatttgggttataatattagagttaaaaacatgtggaaatttttagtggtagagtatggttgtagaagctttcattcccttgaaattaacatgaaagattatggtgtaaaggtgagattttattaattaacccatctttttcttatcaagaaaaataacaagatctagcta

SEQ ID NO: 150096 - DNA, 313 bp, Glycine max
aatgcttactgggaggcaacccatctctctaactcttaatatttacattacattcatttaagaaaagttttagctctaagtttggagttcaaaaaaaattatcacctcgtaacatagcgctaacttacaattttgagtgttgttcatcatgtgccaccttattaatgaccaactcatttggaggaccatgttcttcttgtccaaagaggtggcgaggctgcaatgggataagaggaagaagtgagggctcttaaagccctaaatgaagccttatcttcccttctcttttactttttggtaatttcactttatt

SEQ ID NO: 150097 - DNA, 403 bp, Glycine max
cataacgcaaaaaatgtcatgctaatccctccggtttagaatgaactcatgcgcacgtttaaagtaacacatttatgcacatgcgtatgtgtagaatatcctactattcatatcaacatagaggccatccaacacattctaattgtcatacatatatatgcatttgagaagaacacacattctcacgcttaaggcattgcgtcaaaatttacacttaactatgtcctaaacatttgctatcacaaactacctacacacactcgaaatatatataccttacagactttcattggttcactcacacttatgcatattggcgagatatatacattatgcacatacttgcattcaaaaggaatctcgtgctatatacattctttatgaagtgacctcatatatctta

SEQ ID NO: 150098 - DNA, 354 bp, Glycine max
gatacacgaaataatgtacgacgaggaacaaaagataacaaatgaagttttcgtcgccgcaaatcccgaccgtgggtcattccctacatcgcttctcttgctagccttgtaccttgtgcaacatccggtaagatcttcttcatatttcttttctcttcttacgaattgaatataatccatatacccttatgggtcctctctgatattctgtatgtactcatcttcttccctttacggttcgcaatttcaacttacttgtaaggtttagttctatccgaacattagtggagtgaagtctcttcctcctttgtggcactatagcttacttacaatataaaacatcttaggaaatca

SEQ ID NO: 150099 - DNA, 368 bp, Glycine max
  unsure (1)..(368): unsure at all n locations
aagcaaaaaaggagagaatgaaaatttccaatcctatgaaaaaaagagaggaaaggaaattcccaatcaaagaatgggagaaagaaatgggagaaaagtaaagaaagataagaagaaagctcctggtctaaggaaccagaagaaatgtgcatagaggtctntataccggacagtatctgaacaatacagaattgtcaccacatgaacaataagaaggaaaggaaaccatgacctaaaatggtcttcttcctttaattgccaaccataatcagtgcgctagcgacttgttcgcctcgcgcaaaaccaaaacagaaaaggaaaaagccaactaaataaatcataagctcaaaacacacgaaagccgataa

SEQ ID NO: 150100 - DNA, 428 bp, Glycine max
  unsure (1)..(428): unsure at all n locations
ttggacttctaggattcaatttgggcaaaattggatgaaggcatgagtggttttcgaaaatctgcacttatgcagaatttcgctgtcaaataggtgcggcagaattttggctttgtgcagaaaaatgcttgtgtggttggctgtggaaagagtactacagaatgagttctggatgtttgctagtagatcccaacggtcaaaatgtagacttatgtactagagacttccagtaacattttcaagtcgatccaacggttaatgaatntggaacgaaggaaatgttactggggtctttaagtgagaaaaggctgtgattttggtttgagttttgggcagagttntctgtctttgccctattttgcttgtttgttagttggtgatgatttggatgttgaactacttggatgttgtggaagcttgtgaggatt

SEQ ID NO: 150101 - DNA, 293 bp, Glycine max
  unsure (1)..(293): unsure at all n locations
taaacgtgatgcctaaaagcactttggagaaattaccattcaatgcttcccacttaaagctgagttcaatggtggttcgtgccttccacggcacccgccgagaggttaggggagagatcgatctcccagtacagataggccctcacacctgtcaagttaccttccaaataatggatattaaccccccctacagctgtctgttggggcgcccgtggatccactcagtaggagtngttccctctacacttccaccaaagtngaaattcatagttgaagggcatctggtcatcgta

SEQ ID NO: 150102 - DNA, 357 bp, Glycine max
agctgcctccatgaatggtatctctaactctactgggtttactgtacggttacctgttttccgtccagagaaaagacacatacttgtagaacaaatgcatgcttctgagtttaacaggactgatatggggagctcatcttttctgggcactttacaacaaccatcagtagcaaatgtgccactgacacactcaatcagcttgcaacccataccacaacccaacctatctcatgtgcaattgcttcagatccccaactccttattccccgtgaacccaccagcaaaaatttgttcatctactggataatggtgggggaatcctatggatatggataaaatctttccctcaccttccct

SEQ ID NO: 150103 - DNA, 453 bp, Glycine max
  unsure (1)..(453): unsure at all n locations
actaagctgctgannttgttggcactattggacattcttatttctatgactatgcctataanaactaacaggaaatgactaagacatggtaaatatacagcataattagctaacacaaacaagccaataccaagtcatgttatttgcagtntcatcttacaaatcttctgtcagagaagtatgcacctctgtatatggttcaacacttggattatcataaaatttgcttgtcgattgagttagcaatgtatgatttgatttaaattttcatcaactactgataaacgatgtatattctgttgtgcttcacaactgtctacacatagatgtgggtttcgcggtataatctacgagctttgtatgcacaattcagacttgttgtgtacccattgacaaaatgatagtatttgaagcttcattaccgcaccatctatgtaggatgtaagtaatagg

SEQ ID NO: 150104 - DNA, 247 bp, Glycine max
aaaatatttattaagaaaaaagagaaaagaagaagaagagaaaggaagaaagagaggaaaaagaggagaaaaagaaagaggagagaaagggagaaaaaagaaaaaaagaaaggggaagaaaagaagaaaaaaggagaaaaaaagagaatgaaggggaaaaagagagaagagggaagaaaaagggggaagaaaaagggaaaaaggagaaagaagaaagaaaaagaaaaaaaagaagggaaaagaaaaa

SEQ ID NO: 150105 - DNA, 393 bp, Glycine max
  unsure (1)..(393): unsure at all n locations
ccggagnagcacctgagaggactgcagaattgttatttaccaacttctgcttgattgctctggcaacatccttggagggatgaggagtgatttcaacattgtaatgatatatcttctgtgatggatcaaattgcaccaaaaagtggttggcaagaagagagatcacagagccttctctgccaccagagtctggcctacttgcaacaagtactgcatgtggcttccttgctggaatgagtttcttcccatcatctcctttcaaggatgcctttgattgctgctgaagttcttttggagctgaatcagtataagaaacaagatggntcatcaatntcccaatttactttgatgcctatcgattgcttcgaaggacgggaagaaggtatggaaaaa

SEQ ID NO: 150106 - DNA, 403 bp, Glycine max
  unsure (1)..(403): unsure at all n locations
caaattgctcatgatgctcttttgantgtttagtatgatgcttgtgataattactatttactagctatagtgcttagttaacaatgaacataatntacggtgtacatattcagctcaatgcattgagcttttctcaagtgcagaacaacccgattgcatcaatgaattgaatattaccagtttaggcatcatggagattcctatttgcttaggtggctccatttcatccactggctccactttatatatgctcatgttttcctgatttgatttgccccctctgccaccttgccactcttatttcttattattcaattctcctcctttagcatttttaagttaaattattttttctttcttgacttgatgttttaattntttattgtgacatangttcctcgct

SEQ ID NO: 150107 - DNA, 416 bp, Glycine max
  unsure (1)..(416): unsure at all n locations
gattattgggtgctcattctccttcgtccgtattgccaaacattacttacgcctacatacacaaaactaaggaaacacttttatggccctnttcaaataaaggcacacattggtccaatggcttacagccttcagttgcctacttctttcaagatccacttggtcttccatgtctcgttgctgaagttgtatcacggtccctccctagttgatcaacaacctttatcccttgcagcttgtgataaccatctgatagttgaacccatgactattctggactagaaataggacaaaacaaccactccccctaccaagttggcactggttcaatggtttggactcccacctgatgacaccacgtgggaacattggaacgagctccgggactcctacaccttgaggacaatgttgttctc

SEQ ID NO: 150108 - DNA, 398 bp, Glycine max
aggcggggatggagtcaaatcttggatggctgctgagactattgttttgcagccctgagtttcatgtcaccagcttccagaggtatgctgcttactgcgatgacaatattatatcttctcctgcgaattgctgctggatatgtcagtgtacgtctatggaggaccattaagggaacctcagaagggtggagatccatttcctggttatctgcttgtttctttcctgcaactgcttttattattctgacaagactgaatttcttctctggggccccataagcactggtgctattcccatttcccttgattttgagtagctcttcctctggatctgcatctcagttccacttaccctctttggaggatttatggcgaccaaaactcagcaaattgaatat

SEQ ID NO: 150109 - DNA, 368 bp, Glycine max
aatctaccattttaacaccatagttaggattaaggaacctagctatgaggatatctgcctgtccttgtgcatgctgatttttcttcaaagaaaattacgttttaactaatgggatgcgatatatatattgtgatgaatgatattgttttggctgtttgaaggctgtgcgtgaggaaatgatattgttgtgttcgtttgaattgttgttgatgttgctattgaggaatttaattgatatgtgatgataatgatgattatgatgatattgatttgagatgacattgctaataaagaccatgtcaacatgaattgttattattgatgaatatgtgaatatgaaatgatgttgttgttgttgttgatcacgt

SEQ ID NO: 150110 - DNA, 418 bp, Glycine max
  unsure (1)..(418): unsure at all n locations
cgtactcccacgtagcccatatccttgtttttctcaacaccgggtgcccatcaatcctctcaagcttgcacaacatccaagcaaaacaacattcaaacagcacaagctatcacagccaagcaaaacagagcaaaggcagaaaactctgctcaacacatcaaccaaaatcacagcttttctcacttaaagaccccagtaacaattccttcgatccaattcgttaaccggtggatcgactccaaaattttactggaagtctatagtgtataagcctacattgtgaccgctgggatctactagcaaacatccagaactcattctgcactagactattcacagccaaccacacacaagcatttttctgcacttgtgcaagatnctgctgcacaatntcacagcaaaaatctgcacaaaatgc

SEQ ID NO: 150111 - DNA, 423 bp, Glycine max
  unsure (1)..(423): unsure at all n locations
gttccaaaagtcctattaacaacttccgtttgcccatcggtttgtgggtgacaagtggttgaaaataacaatntaatgcccaacttgctccacaaagtcctccaaaaatgcaaatcatcaagcctaagtataggatgcctatatttaatggtgatgttattaagggctctacaatcagaacacatgcgccatgtcccatcctttttagggaccaaaatcactgggacagcacaaggactcatactatctcttacccaacctttgctaatgagttcatccacttgtctttgaatctctntggtttcttgagaattacttctataggctggcctattgggcaaagaagctcccggaatgagatcaatttgatgctcaattcccctcaaaggtggtagtccacttggcacatttggatcctgcaaa

SEQ ID NO: 150112 - DNA, 368 bp, Glycine max
  unsure (1)..(368): unsure at all n locations
tatagcgagacgctcgaaatngaatgttgaagctctgagccaattcaggcgacaatatctttttactcggatgtctgattgagtcctttaatattaacgagacgctcgaaattgaatgttgaacctctgagcaaattcaaacgacaataacttttctctcggatgtttgattgagtcctgtcatatatcgagacgctctaaattgaatgttgaagctctgagccaattcaaacgacaataactttttactcggatgtctgattgagtcccgtgatataacgagacgctcgaaattgaatgttgaagcttttagctaattcaaacgaccataactctgtactcggatgtctgaatgagtnccgtatata

SEQ ID NO: 150113 - DNA, 434 bp, Glycine max
  unsure (1)..(434): unsure at all n locations
actaagctttacccgtgccctggcaaagatgagcgggatatcttttttcttgaccacccttacgtggatgacgttgctatttaataacattctgcccggcgaccacaatgccaatctccccctgcagatgtatcggntggtctgtgccgtcatgacataagtaagtattcacatgggtcaattgatttatgatgtcatctattgtttgtagagatcgcgcccacaagacgcccggtgggcccgaagaagtccaataggaccctgtggtttccagctctggttacgggcctctgtcagtcctacagggtgcccgttcccccagcgaggtcatgccatcgtgacataagtaagtatacatatggttcaactgatttctgataccatctattggttgcaggaatcgcacccacaaagacacccagtggacccggaga

SEQ ID NO: 150114 - DNA, 314 bp, Glycine max
  unsure (1)..(314): unsure at all n locations
acacacacacacactaaagaggagnggagagggacaaacggagagangagaagcaagacccagaaaccaacaggccgcacagaacgcggacaaaataaacggcacgaacacatcagtgaagtagaaaagattagaacaagcgcactgaaaaagaccacacaaacgagggtggagccgcactaaagctaacgagggggaggaagcagaaaaaccgaagcggcagcaaaaccgcacaggaacaggcacgaaggagaccacatcggacgcgagccaccccgaaaatctaacaacgcaagaaacgcccacaaggaggg

SEQ ID NO: 150115 - DNA, 424 bp, Glycine max
  unsure (1)..(424): unsure at all n locations
aattgtaacaacaaaatcttgaaaatagaaaacaaagttaaaataatntgacgttcatttaattttgtaattggtggattnttttgcaaactaaagaggatttcaattgtttttccccctctttttcattctctttatattattnngaaagtaaattcaaggttacttgtgtcattgtgtggtaagataatatctgaaattcttctaatttataaaataacctaatctcgatttttaggcatgtttaattatactaatttaaaagctgtcattgtgtcattgacagcttttaaattagtattttaaatcatctaatnttaaaataaactatttaaagtcaattttactcatttaattaactaatttaatcatgcacttgttgttntttaaatataagctttgaaacattttccacagttaacat

SEQ ID NO: 150116 - DNA, 448 bp, Glycine max
  unsure (1)..(448): unsure at all n locations
ctcagcttatagataaaatcgcagcttaaaaaataccacttgcttgtttaacaaaaaccgaaataaaaaaagcatacaaatgccaataccgggtaaaaaaaagaaaacagagaagaatcggatgagggaaaacgaagcaagcaaacgaacctgtattcatggagtttggagataaaaataaaaaatggcgggggaagcacgtcggagaaagctcaggaacacaaaaaaattgaagctttgacagataaagcaagaaaaccaaccggtcttcatggaagttggcaacgaaccaccttggagaaggttcgggaacacaacgcggagagagaacaggggaaaggaatgcgaaaaagggaaaaaaataaaagcgtaaaataaanaaacgtatataaagaggagaaagataagtatattttattcacggtggcactgtagcacgatgtgatgt

SEQ ID NO: 150117 - DNA, 409 bp, Glycine max
  unsure (1)..(409): unsure at all n locations
tctaatngtacatatttgagttcacaagaaaagcactttgcacaaagtccttctatcaagaatttttgtagtcctttggaattctagcgaaaatccaggaaactgactcacttttttntttctttattttaatattacatgttaaagaagagattaaaaaatattatgaactcacaaacaaattagggagagtagttgtgtatctgggttcttcaaggatgggacctanccattcacattatgtgcaagcacaagagtgggctaaaaaggtaagtaaatatttttacaatagtttcctacctcttttttcagcttacttgttggtgtgtattgcataagatctcattcatttgttacctaatcatattgtttctggcataaacaatagtgacagtggcaaagggtcgta

SEQ ID NO: 150118 - DNA, 383 bp, Glycine max
  unsure (1)..(383): unsure at all n locations
acacatgaaactcagcttcttctggctcaaatcgcatccaaaatatatttgntttttctggaaaataaattcgaatattagaacacaattcataccggtcaggcgaaaagagaatttgcagctgttcatcangaggcttcatcaatgagacgcatgtgcgccccggctgagtgcaagcagaagaagaggctgagaaattcttggccatgatccatgcgcaaactcgaatccggatcctctatagcatcaaaagtagaacacccaaaactcaaggaccatacaatggttgagtctcctagattacactcccctcagcaacctacacaggctttgtaagtctccacactccacgacctgaataagccataacataacattcccac

SEQ ID NO: 150119 - DNA, 445 bp, Glycine max
  unsure (1)..(445): unsure at all n locations
gcacctgcggcatgcaagcttgtagccattagaagagaatgagcatgttttggattatgactgaaaagggtagtcagcttgtcagattgattgtgaaggaatgcattaaccgcatcccggtgagagtgtgatccttaaattttgagagaaacgactatcatttagtactgatttttgtgtgaatctatgaagtatggattgaatgcatgaaattgaggatgatgaaggccatgttttattgttatagccgcttagccaaaaagctgaccatgtgttggaatgaattatcccttgtacctagtttgagctgaatgaattattgattgattgaaccctgatcctatacagtgttatctcctgctaccttgacttcggttgtaggagagcatcatccacaggaagcgtggttcanagaaaattttccctacatttangggagtattta

SEQ ID NO: 150120 - DNA, 470 bp, Glycine max
  unsure (1)..(470): unsure at all n locations
accatagaaactcagctntgtcctcagatccctcttggtggactagacttacaccaatctttattattgtgacaacatacataaaaccaaaacttattccgcagatccctgttggtagactaagtttcaattctgcttcattcaagttcaaaggcaacaatacatttcccagtgctaaagtcacctaactatgcacacaaatgggtgatcaaaccaagagcacacataatttaagaactgaaagaagcaatgaacacaagaaacacaatcaattagatattaaaataattacatcagttgatcattagaaatccccaataagggtgtttagccagccattacagaaaacccctaataataataatgagattacaaaacttaggtatctctgcaaaagatgctcctcttgctaccttcagagctctattcctgaanaaggcactgtggtgtgctatggaaatttgtgccct

SEQ ID NO: 150121 - DNA, 381 bp, Glycine max
  unsure (1)..(381): unsure at all n locations
gagaatgattncacgattcagttacccgttcaagatcacgataaatctccagtttcatgagaagaaatcaagaagattcccgaatcaagagaagtctgatttcccgattcacgagaagattacttctagattcccgagaagaaatcacgaagacttcccaagggaagtattgaaaagatttttcacaaaacaaacatagcacagtgttgtttctaaaacaggctttctcaatattttctaagttaccagaggttttgctctctagtatcgattaccgcggccaaggttgtgtaaaaagcctttactgacctgccacatccaattgttttataagggggaatcgttacaatatatggtatcgattccactgctctgatattg

SEQ ID NO: 150122 - DNA, 474 bp, Glycine max
  unsure (1)..(474): unsure at all n locations
tatgcgcatacttcttcacgaacgttcacttgctttattatttcttataactaagaaaaatgcacccatatacaatcaaggcaccttcgttacctagattatttacatgtacttccaaggtgtatttggtacctacatcacacacatatcctttgctaaattcacatacatgcatactctaaacactttggctatcaaaaattgcatacgtgcacatcttggtatttctaatacctatacatacacaaacttcatgatgaatcttgactatcgacacaataaggtgctacatttcatgctctcctttntttcaagtgttnntttactacctaaagccgcatgcagattcaagtattatttcttttgctcactaaaattgtattcaaattaaaaggtatttttgtaatggtatttctgcaacatatntatagatntttgtgagacattttgataccaaaaaatctatggacatac

SEQ ID NO: 150123 - DNA, 305 bp, Glycine max
acagacagtctccacattgagtgctctatagtccacgcaaaatcgccaagagtcatcatgttttctgatgagcagcacttgtgacgagaaatgacttgtactcggactaataagccccttttgcaacattgatctccacctgaagctcaatttcctacttctggtaatgggggtacagataaagacgcacgctcattgatgcgacttgtataattaagtggatgtggtggtcagacaccctctccaatggcaacgaagatggcggttggaataagaaaccaaagtaatccactaaagcttggata

SEQ ID NO: 150124 - DNA, 453 bp, Glycine max
  unsure (1)..(453): unsure at all n locations
acacaaaaactcagctcggaagatctgcaaagaaaaccctgcttgtttgactttgttttctncnaangcaaacacaaaatgtgatttgcaagtctataacatgtgtgaggcattcaacaatgttataatggggtacagacattagccaattattacactattggagggaaatcgattttacataagttctaaaattgtgaagttgaggactatcctcatgaggtatgaaggttcaatctgtcctaaaattcagaaaatcatggaaaaaaaataaaaaagcatgtgaagcatggcgagcacattagtctggtgatgctgatttggctttgtttgaggagtcaaagggcatggaaaaatttgtcgtcaatcttaaacaacaggcatgttcttgtagaaagtgagagttaactggaattccatgcactcattccatagcatgcatgtggatcaatg

SEQ ID NO: 150125 - DNA, 424 bp, Glycine max
  unsure (1)..(424): unsure at all n locations
atacaagtgagctngtaacaaatcttctacacttggagtgatcacatgcagtcctcttgaacccttaccacccactctatcatcatgccgacactcaggaagcccaacaggtttagccttctgtaagtattatgaacaaaattcaatggcttcttctgcaatgtacctctcaacaatagatgcttctggacgatatagattctttgtatacccttttaagatcttcatgtatcgctcaactgggtacatccaccgtagataaacaggaccacaacatttgatttctctgaccagatgcataatcaagtgaatcatgatgtcaaagaaagcggngggggaaatacatctccaactggcacagtataattgcggcctcattttccaactcatcaaacttgactagatcaaggactttgctacatat

SEQ ID NO: 150126 - DNA, 465 bp, Glycine max
  unsure (1)..(465): unsure at all n locations
tgtctcttcttcatagatggggcatgcatgatgacccttgacaccgttaccgcttagattntcatacgccgaaaaatcattaatggtacagaaaagtattgcacgcatttcaaaagtctccttgcgaaatccattaaacactaaaaccccctcgtcccacaactttcttaggtcttcaatcaacggacttagataaacatcaatgtcatttcctggctgtcttgggcctgatatcatcatagacatcatcatgtattttcgcttcatgcacaaccaaggagacaaattataaattactagtagaactggccatcaactgtgttgagtgcttaaattgccatatggattcattccatcattggctagtccaagcctaagatttctcgcctctttgccaaaatccagatacaaaccatcaatcttcttccactgggagcaatcagccggatgacgaaccattccctt

SEQ ID NO: 150127 - DNA, 410 bp, Glycine max
  unsure (1)..(410): unsure at all n locations
cttactatcgtccaaccaccaccacctgccattgaaccatccctctcgtcctctattcctagcttcgttgaacaaacatctccaccattacctcaagttcaagtgtgactatgatgtcctatcatattctctttgtttttccttattaatgaaaatgtggtctttggagaattctagtatgaattgtttattttgttgttgttgtgtgtgtgtgtgtgtgtgtttttttgcctaatcagtcttcattctcatctcatcatcatgcattaaagttgtaaaactcagggggagtntatacatgctttacatatatacctgcactcttacataactcataatcaggccttactatttcctttttatcttgattatgttntatgatagtcaaaatttatactatntgtcatcat

SEQ ID NO: 150128 - DNA, 377 bp, Glycine max
  unsure (1)..(377): unsure at all n locations
atttctcaataattaacatattgnaagattagaaattaagaattaattattatttataaccacaaatttatattaacttgttcaataaattatttaggtttaaatatattttttattcctaataaatactcaattttagtgttttctccctaataaatttttgctttgcgttgagtccctaataaaataacacttttattttttatccttgatattttgttttagtccctaataaattagaaaattttgtgtttgcttcctaataaattaacaaattttatttgagtttctattaaaaaatgggaaatatttatcatggagcaaacacaaaatttgctaatttattangggttaaaaataagtgtcgaggataaaaa

SEQ ID NO: 150129 - DNA, 413 bp, Glycine max
  unsure (1)..(413): unsure at all n locations
ctagacagtgaattgtattggaaatgaanaattagagaaatgagaggaggaatgttttcaaatttaagtcttaaagcaaatagatatcctggtaatgatttaatccaagaagctnttaatttgaatgtggataaataattacagaaccacgtgacagtgaattatctagttgacgattgcattataaaaatcctattgtttgtctactatctaattctgtgttaatattcaatcatcctgctggatttacatggttacggttttaaattgtgatctgcaatcaccattgtggccgcagtttttcaaagttttctgcattcacattgcaaccccaattgtggctacataattgttgtcaatattaaggttttggaagtctctataaccatggtcacaactgcaattaccctaaa

SEQ ID NO: 150130 - DNA, 405 bp, Glycine max
  unsure (1)..(405): unsure at all n locations
taacgcaatgcaccagcacccatactactggttgagcagcccaactatttaactattctccacagaaaaatctttaagccacacccaaaatcaggctggaagataccgcagcccaactatttaacgattctccacagaataatctttcagcttatcattgcagaataattgttccaaaatttcatacgcagttcattccgcatgcagaatgctatcatttcttgttggatgaccggaaacctccaaaccccatcatggcagcaacatcaggatcaatttcaggttcttcaactgccttctccttcttgaatccaaaattaacacatgctattagctaagttgtgaaaaacaaaagcaatctttgtttattaaaataaccattaaaatcatttntagaaagatgga

SEQ ID NO: 150131 - DNA, 362 bp, Glycine max
  unsure (1)..(362): unsure at all n locations
gcaatcaatggggccaaacacaccaaaagattatgatgatggatggctcatattctcacaaaggtaaacttatcactttcaaattaagctttcaaaactatcatgacatgtagagtaaaaacaaggatttcaaatcacaaaatgtcaagagacttttattttcagaacaattacccattacttgaacatatcctataactcanagaaaaacatgcaaatttaacacaacaaaactaaaaaaattaaactagaacccaacaaaactaacaaaattaaactaatttaacacaactatcaaaaccaaaaccaaagacatttccccccaatacttaaacaacacattgtcctcaatgtagcacaat

SEQ ID NO: 150132 - DNA, 483 bp, Glycine max
  unsure (1)..(483): unsure at all n locations
ctcagctgggaataaagattgattatgacatgttaaagtgttggtttttttaaagaaggaaaaaaattaataaaattgaaaggtcaatacatcatgtgcaaagaaagtagtgccacataattttcacgtgctcactctataaagtgcagaaaattgagtattaatgacaaataagatatatgtaaatntaaaaatcaaaaggatttgaaaagaggaaaaataaaaattctactcaggtttatacaaacaagagaaactctatcaattcacattaattaaaaaaagtctcaatttctagggttcacactcaacacaggaacaaatcaatttcataacaatttcacattgggacatcaattgatctgtccaacacaatcaatccacgattaaaaatataagaacaaaaaatgttttgggtaaatgctccggggttaaaatntcctttatatagtgagagttctaatgacctaaatcttattctta

SEQ ID NO: 150133 - DNA, 385 bp, Glycine max
  unsure (1)..(385): unsure at all n locations
tgatgtgggacgtctgtcatcaatattcgatgcccaatcagcatcacagaaagcatagagtgccataggttntgaaacagaagcaggttgaaggaataaaccatgaaatatagtacccttgagatatcttaatatccttttgaccacagcccaatgagaatccaatggattagccatatactgacaaaccttattaatagcataactaatcttaggtctagtaaggatagcatactgtagggcacccactactgacatatagagaagtggatcatgaaatagatcaactccatgtttggacaatntgcagtttgtaaccatatgagtagagacagaatgtgtctcagccattttgagtttatgaagtagatctcttacatagttg

SEQ ID NO: 150134 - DNA, 203 bp, Glycine max
ttttttacacacacggcgacccggagagacgcgcgggggacaagagaccctggggaccacaaggggggggccaacggcccaaacccaacctgaacaaacctgaaccaaaccgggcactaaacggcagagagaacccgtgaccatcccaaacaggcgagctcctggcacgcacacccaaaatgaacaacgcccacaaagcaaag

SEQ ID NO: 150135 - DNA, 413 bp, Glycine max
ccacagagtggtacctggagatatgtcgcgggggtcatgagaccttgcggacgtcaggtggggtgctattgcccaaaaccaagcttgaccaatcccgacccaacccgggcatagtcggtcagtgagaacctgtgatgtacctaagcaggcgagctcctggcagtcaacagataaaatgaacaaagaccacaaagcaaggaggcttgtggtagctggccagctgtgaaacttgactgatatgtgagatatggtctctggtaatcgattaccaagggtgggtaatcgattacaaggcttaaaaatgaagataggaggctaagatggtctctggtaatcgattaccaaggggtgtaatcgattaccatgcttgaaaacgaagtcaggaaacttagggagcctctggtaatctaata

SEQ ID NO: 150136 - DNA, 363 bp, Glycine max
  unsure (1)..(363): unsure at all n locations
accactgntcttccttcccgcgatgcttcttttcatgtccgcctgagtgggcttatagcctaaaccatacttcccacgatttccttgggtatttatcaggctaattatgccgccattgtctttgcctaaacccatcccgggttcataaccgttccccaacataactcgggccatcattaccgctgcgtcggacagacaaggctgcccaaagagggagtccacagaggaaatgctgaccacctcaaaagactggaaagcagtttctaacgattcttctgcggcttccacataaggcatggaggatgggcagcttaccaagatgtcttcctcgcctgacacgatgaccaagtgccccttcactat

SEQ ID NO: 150137 - DNA, 434 bp, Glycine max
  unsure (1)..(434): unsure at all n locations
ggccctcaacaccggagcctgcattttaggtatataatttgttgtatggagagaggtaggtgagatgaataattataaggccaatatatagtattttttggagggtataggggaatttagaacatatatgaatcttatgcatagcacatatggtacaatgatactgggtcgtacattgggggggtattattttttgttgaaataatttgcctctgggtatagtttctttcactataaccagtgatatatttgcaacagggacttttggggagtagcatggttagtatattgtgtacttgggtacttctggtgccattatgtaaccgttattctggtaaaaatatattgctctgtttttgtcgataaaaaaaatcaccattgaaggcccnctctttgtcattaatgacacttgatatatcctnntaggtttttgg

SEQ ID NO: 150138 - DNA, 410 bp, Glycine max
  unsure (1)..(410): unsure at all n locations
atattatgggtctatccctttattatatttcacaaatttctctctcttttctctttctctctttggttggaagatttattgtacaaatataatttctcttttatttgatatacactttctctggtttttattctacccttaattggtcatttttttctttttctttatatttggtaaattgttgctttcctttcatgtgattatttccttcacatttccagctaagtactccacgctatttatcttgcccatttgtttccttctttttctattaatattccaatacattttggatagggaatattggttatatatangtgatacttgtactggtgcattgagaaatctaagtaacgtaagaaacttttgagtatagattcttatttaataataataataataataataat

SEQ ID NO: 150139 - DNA, 453 bp, Glycine max
  unsure (1)..(453): unsure at all n locations
gtctcgcgattgtctcgttctcatgcaacaatngttagctggggctatacgagacatcttgccaaacaaagtcaggttagccataactcgcctgtgctttttcttccatgctatatgtagcaaagtcattgatcctgtcaagtttgatgagctggaaaatgaggccgcaattatactgtgaaagttggagatgtattttccccctgctttctttgacatcatgattcacttgattgtgcatctggtcagagaaatcaaatgttgtggtcctgtttatctacggtggatgtacctggttgagcaatacatgaagatcttaaaagggtatacaaagaatctatatcttccagaagcatctattgttgagaggtacattgcagaagaaaccattgaattntgttcagaatacattgagaagctaaacctgttggccttcctgagtctcggcatgat

SEQ ID NO: 150140 - DNA, 364 bp, Glycine max
  unsure (1)..(364): unsure at all n locations
gaaacagncccactctgccaattttacaaaatcatattcatacatcattggggcatttcaccgagcacttggtgagcgcatgtttggacataaattgcaagaggatggggacaatgtggcatgccccattgcttcagaatacagcatangcctaagaccttctcattcaaatcctcaattcaagaaaacaagcataaaaaacaaaccaaaactaccccacaaatacaagcacattcccacaatttggagcaccaaaagatgaagaaaatataccaatgggaagctaaaaacatcaaggattgaatacttactctgtggagtgaacaataacaccaaaaatgaaagcaaaaggccaccaaaagtg

SEQ ID NO: 150141 - DNA, 455 bp, Glycine max
  unsure (1)..(455): unsure at all n locations
agcttntggggctgttattctatataacagtttcaagggtctagtttagccctctcttctctttctccttatttcgnttttggcaattccagttctgacttttagttttatcaataaaatttccttcttcaatctataatttcgttctctattgattaatggaaggctaagtctctagcgttgttttctcttgaggatcaagcacagttctcattgaggttctattattactgttaaattctgttcagttttttctcttcactaattactctgaatttgttgctattaattcatgcatgcttagtgcttgataattgtctttgtgcttaatttacgttcatgcttaatgatcgtntatgagtaattggtgtatgtgttgcttaatcacataatgaatgccttatgttaaccttgcttagtaattaatttacgggtggataaanggtaaactgata

SEQ ID NO: 150142 - DNA, 264 bp, Glycine max
aaaaaatatggttattccctatctgtgctgggtgcagggttaactatccaagttgaaaagccgagaccaattatgtttgggtacccatttaattttgatatatcctcttcatatgatagtttgccaaatacctcatgactttggtatataccttttattgggcttggagacatcactctaaatattgtggtgagaacgaatttaatgtaaggatcaatgtgcccgcccatcatcaggtgaactgaagtattaaacatagatata

SEQ ID NO: 150143 - DNA, 361 bp, Glycine max
  unsure (1)..(361): unsure at all n locations
gataaagagtgcattgccggagaatatgcagagttgcagtttgagaaggaaaaatcagaaatgaattcggtataagtaattcttcattaatagtgagaatgttgatcttgaaaattgtctaaaagatctggtttctttcaggagttcatatgtgagtgaaagcacatataatctaagccagacttgagtttcttattagaaaatttagtcaacccactagtcataaatacattaaaagggttaatgaacactatattntaggcctaacaaacatgtgatncattagtaaatataaatattaatttttttgttagcattattatatttattaaaaaaaatattcctatattgaattttggta

SEQ ID NO: 150144 - DNA, 417 bp, Glycine max
  unsure (1)..(417): unsure at all n locations
cacaacaaaatgctgtatcagaaaggcgtaatagaactttaatggatatgggtaggagtatgttaatcaattcaaccttgcccgtatctttgtgaatgtatgctttgaaaactgccatgtatttgttaaatatggttcctagtaaggcagttccaaagacatcttttgaattgtggacaaataagacacctgcatgtttggggttgccaggcagaaataagaatttacaatccacaagaaagaaaattggatgcaagaacaatcagtggatatttcattggttatccagaaaaatcaaaggggtatatgntttattgtcctaatcatagtatgagaattgttgaaactagaaatgcaggttcaatgaaaatggttgaaatagtgagagtatagctccatgagacgtggatataaaga

SEQ ID NO: 150145 - DNA, 464 bp, Glycine max
  unsure (1)..(464): unsure at all n locations
agcttgtaggattatggtgtacccatcacttgtggtactangnggnggtcgggcgatggtgcacaaaaagttttccacatccacaaagcgcgcataaacccaccatcccctgttgcccacctccaactgagctcacgtactcccacgtagcccatatcctcatttctctcaacaccgggtccccatcaatcctcccaagcttccccaacatcaaagtaatacaacatccaatcatcatggactaacaaaatcaagcaaaacagggcaaaggcagaaaactctgcccaaaacacaactcaaaatcacagcttttctcacttaaagaccccagtaaaaattccttcgttccagtttgttaaccgttggatcgactcgaaaantttactggaagtctctagtacataaacctacattttgaaccgtgggatctactanaaaatatccagaactccttctgcaatatt

SEQ ID NO: 150146 - DNA, 468 bp, Glycine max
  unsure (1)..(468): unsure at all n locations
tttctccaagctccaagtgttacacatgggtcttgatcatttattaatgttacacctacgtcttattgggccttagtcaataaccactatgctcttgctatttacacccctattttctaagtacacctacataccctcctttctacctctcaactacccattataccatttttcttaaagaagtaaatcccttttattttccataaatgtatttctggaattacatatacctattccggaaatgtatctccgaaactatgattcatgtaataccccaaattctagttcaaaacattgcttggaaaactctcattaatttttttattcttgacatatatgtcaataaatcaatatctttttcaaaactcgagtaatatattnttggaaaacatatgctgataaacgtcattgaaaaacttgtgtaaaagcacattaatatcatttnctgaaaagtagaacaataaaaaa

SEQ ID NO: 150147 - DNA, 473 bp, Glycine max
  unsure (1)..(473): unsure at all n locations
gcttctgggggacatcttgacttgctntctcatctgacattcaccacagattctgccttcttctattttcagattgggaatgcctctaacaacacctttgtcaatgatattcttcatgcctcttaagtgcagatgtccaaatctttgatgccatattttgacttcatcttctttggaggatggacatgtggaggagtaactggtttcttgaggtgtccataggtagcagttgtcctttgatctgctgcccttcattagaacttcattcttctcatttgtcaccaagcattctgactttgtgaagtatacattgaatccttcatcacacaactgactgatgctgatcaagtttgcagtcagtcccttcaccagcagtactttgttcagactatgaagtccatcatgggctagctttcccattccagtgatctttcctttagagccactctccaatgtcacatagctagtggagc

SEQ ID NO: 150148 - DNA, 310 bp, Glycine max
  unsure (1)..(310): unsure at all n locations
cgcaacactcttgggctaagcgcgaggaagaatccccaagaagatgagctgtacaagttcactaagcgcaccacttcaattcatccgctatgcgaaaaaggcgcgctaagccaaaaatcactaacgtgcactaagcagtccataagtgcgctaagcacacgagcacaaacaaggccacctatttaagcctgaaatcagaatttgtgaagggagtttggactgggattcagaagcttgcatgtctagggtttctagagagagaaaggtccaagttctagagaagtttgagagattntgctgtgccaagatc

SEQ ID NO: 150149 - DNA, 435 bp, Glycine max
  unsure (1)..(435): unsure at all n locations
tgacttagcatcaaacattcctaagttttcttttccattgtttaatacaaaacatttacaaccaaaagcataaagatgtgagatgtctgcttttctaccattgaacagttcatatggggttttctttaaaatgggtcttgttaaagccatattcatgatatatagttcctatgcaaaggactaaaaagagtttggtattattagctatattggcaaatgtaccaatcgcacaagcatcctaagaatatcatctccccaaggacctggataatattgaaccaataaatacaccagttgtttacaaagaacaaagaatcatttataaagcatcaacatatgatttatgacccaagttttcaactaaaccactcaaagaagtgactcaataaaaactctatnttggcttttttatcataaacttgaaatgtttcgagt

SEQ ID NO: 150150 - DNA, 370 bp, Glycine max
  unsure (1)..(370): unsure at all n locations
acagcacatacttcttttgagaaataaaggtcccacagcagaatgcattacttcaatgcccaagaaataatgcaacatgccaagatcagtcatatcgaattcaatcatcatggatttcttgaatttctcaaacatggcagcatcactcccagtaaaaaaaagatcatccacatatacacatacaatgagtatttttccaccattactaatctttataaaaaatgtatgctcatatggacattttctaaatccttctttcaagaaataagcctcaagtcgactataccacagctcttggagtttgtttaatccatatatagcccttttcaatctatatactntatgctcatttccaaaattaatatatcca

SEQ ID NO: 150151 - DNA, 412 bp, Glycine max
  unsure (1)..(412): unsure at all n locations
atgatgatgaaagacctccctgtggataagggtcttatttttttatttattgtataaaaaaataaattcttataggttgttctatgtcaataagtctttattatcaatttttcattaacttattatcttgtcattgtcactacccatcgtgattttctatatatttntatacatgtggtctgtgatgggaagaattaagaaacagaattagttntgcagaagttgcctcatttcaatttctaagaagtttattggatcattaccattttatatatcatatgcattataaatcggttacttaactgggtttccatttgtggtaggacatacaagtttcagtttgcacttatgtttagaaatatgccattaccagatcgtaatacttatcttggaattcctctcattcttaatt

SEQ ID NO: 150152 - DNA, 412 bp, Glycine max
  unsure (1)..(412): unsure at all n locations
catcctaccttcatgttcatggataaagatgctaattcaaaaatccaactccctcctggatttagattccacccttctgatgaagagctaattgctcactaactgagaaataaagtgacatcattacccctttctgcttcattcatagcagaaatagatctttacaactataatccatgggagctcccaagtctgttttagcaattgcactgttttagtttgtgattcattcttttcttgaagtatttactcaatgggataaagcttctcgtgttattgtggatttattgtcctgaagtaataattactaaaggaatgatagcttttcattttgaacaagcaaagctctgtttagggaggatgagtggtatttctntactcctatagacaagaagtatttcaatggagtgag

SEQ ID NO: 150153 - DNA, 402 bp, Glycine max
  unsure (1)..(402): unsure at all n locations
aaatgtgccgatggcatagataagatcaatgggctcgttttgttcattatcgtcataaaccatcaacattggtacaattagattggtttaattattgaattgtttttatagctaattatatgattactattacaagttgtaaacttgaaattgctttgcatgtaggaactttgtaggagaaataaagaaattcgaagcaagcaagttattccacacactggtggatccaaagctaatcctagaagaagaaatgagttggtaatgacactaaatgttaacttttactaattaaagaagttcaatggttacttactctttatntatcttagnntgtagaaactgggaagctaccaagtcgtggacaattatatattgaaactcataaaaggagagatggatcat

SEQ ID NO: 150154 - DNA, 460 bp, Glycine max
  unsure (1)..(460): unsure at all n locations
tatcttacctatttatctcccagttgtctttgcaaagattcaatagttaaaaaacatgaagntctaattcaagatgttttctttgttgcatgggcataatgcaatcactctatgtctagcaatgattttattaagatgtccctacctttgagttctactaaaaattatcctctctcgagcgactaatctctaaaactgatgcatataaaaccttcaatgtatttctactaaggattaccctctttcaagcgccaaacctctaaagatgatgcaaggatgaagcatataatacatttgttggcattttaggcctgccaagccctaactaaagggggttagcctttcattgtcatgagagacttttacactttatggggttgatatggatggaagaagatggatggatagaggaagacaagaggataatggacatatatagaaagtgcgtttcccatgttgg

SEQ ID NO: 150155 - DNA, 424 bp, Glycine max
  unsure (1)..(424): unsure at all n locations
cgtcatatgtggactaggtgcaagtcgactctccacatccacaaatcccacgtaaatccaccatccccagttgcccaccttcaactgagctcacgtactcccacgtagcccatattctcattcctctcaacaccgggtccccatcaatccctccaagcttccacaacattcaagaaattcaacatccaacatcatgaactatcaaaaaccaagaaaacagggcagaggcagaaaactctgcccaaaacacaaaccaataccacaactttccttactcaaataccccaataacattctcttcgttccaatctattcaccgttggatcgnactcaaaaatntactggagggccctaatacataaatctacattttgaccattgggatctgctagaaaacgtccagaactcaatatgtaccaccctt

SEQ ID NO: 150156 - DNA, 456 bp, Glycine max
  unsure (1)..(456): unsure at all n locations
ggacctataaaactcagcttgtacataatgaagacaatttttgttgtaatntacaaatacaataatctcattttctttcgatcatcaataatattaattgtataaaataaaattaaataatgtttgtcaataacatagatanttgtagtaattataataacaatcatatcaaaccaaaaaacatgtccaacaattgttgcaaaacttttttatatatttattttcttatatatgagntaactttcgttacattaaatatatatatatatatatatatatatcatatataaagccccggatatggttgaaagtatataaaaaattatgaatgtctaacaaagatacaagggattaataagacaaaaaaaaaactgtctctgagaggaaagaatgaataagaaagcccaaatctcacggttgctgagatgttganggttttctactaaaaatcatgat

SEQ ID NO: 150157 - DNA, 411 bp, Glycine max
  unsure (1)..(411): unsure at all n locations
caaataaaaaatttaaaaacttataatcgttgtaattaaatacatacatgcacaaatggcacaacataaagtttcctttgtcaaactgagttataatttttgtcaaggtgttacatgtttcattctactangtcatggtttatgaggtccattactactaagtgtttaaaacctgcaattgtaggagacttaacaaaaggaatgtcataattttttaaccaaggttgggaccacacgttaatggagcttccatttccaatccttcatctcatgccatggcttaccattacttgtgaagtgtggatactatgcaaaacaaaacttggattatgttcaagaggagcatctganaaaattccaaccttgcttaaaaaactttagaaacaataatatcatggttagttaataatc

SEQ ID NO: 150158 - DNA, 453 bp, Glycine max
gatcatgtgcgtaacaagtactttctgtgaccagattccatcaatggattccctcatcactagacttctccgcatgcctcgtgtatttaaggatgaaaatcctgctgatggtgtggagacgtcagtcatggttgcatctcgtggtaaaagaggcggccgcaacaatagaggaggtcgcagtggaagaggtgaatgtcctcattacacctactgcaagaggatgggtcacacccaagagaattgatattcgttgcatggctttcctgacaaggttgcacaggtttctagatcagagaaagcagagtctagattctctgatgagaagtatcaggggtatttgaagcttaaaaccaagaaatccagcaaccaagctcaatcctcatttgtaccattgttttcaacagcatgtatctctcaatccattgaaggttctagtccttggatactcgactc

SEQ ID NO: 150159 - DNA, 468 bp, Glycine max
tgcagcttctaaggaagctacctagtctataatagaatcatgtgtaacacttgttgcaactttgatgaatgaaagtcttatgagacacacttcaaagttccacttctctccctcttttattccttcaatttcgtgctcccccctctctctttcttttcctccattgaagcatcatctccaagcttcttatccaaggctcatcttggtggtgaagctccttcttccatggcttattccttaatggatggtgcctcctctcacctcttttcctttgtcttccgctgcatctccatggtggaaaatcaccattaaaggaccccattgaagctcaaagatccagcctccatagaagccccacaagcaagcttccatcacgctaaggcgttggaccattaacgaactcttgggggggtcgacaaaagtggggcttttgctcctacatatccttaattgcaatgagaaaataaa

SEQ ID NO: 150160 - DNA, 476 bp, Glycine max
  unsure (1)..(476): unsure at all n locations
aactaagctttgactcntggcaattctntaaactagtcaccttntatatttgttactcttttgaaaactagtcacttaaaaagttgtgacttttgaaaaaatcttcagaaacaagtcacttgaagaattgtgacttttgtaaatttttttttcgaaatcagtcactggtaatcgattaccatgaaggtgtaatcgattacacatcaacagatgtgactcctcagtttaagttttgaaaatcaaaatgtttagaagctctggtaatcgattacatattttgtgtaatcgattacacaagttcaaaatgaattgaaaatgtttaaacacaagttgtcactcttgaaatttgaaatctaacatttaaaaacactggtaattgattacatactcatggtaatcgattacaacttttgtaaatagttttgaaaacaatgctggctacctggtaatcgatactaccttctggntatcgatta

SEQ ID NO: 150161 - DNA, 472 bp, Glycine max
  unsure (1)..(472): unsure at all n locations
agcttcagggactaaattaagataatgtccttgactaaatacaagattngtaaatatagaaaataaataaatatttgatcctaataactaaatgtatcanattttataaaaattatatataaatatgtttacaatatcatcttaatcttaataataattaattntaataaatagatatatagatagataaacgaaacttacaataatacacaaagcataattagtctaggtaataataattgataaaatgttttcttacaaaaaaaacaattgataaaaagtcatagaaatatatcactattaatttcttatcatatatatatatatatatattaattaataaatctaataatatatgtgataaatgactatatactaatcatttaaataatatntgttgcactaattataatctcacccacatatatatatatatatatatatatatatatatatatatatatatatatat

SEQ ID NO: 150162 - DNA, 402 bp, Glycine max
  unsure (1)..(402): unsure at all n locations
tatgaaagcctttgacaacaaacctgactttatatttgttaactgtacgatcagggttttcattgaccctgaagacccatttgcaaccaatgggaaacctggagggaggtaaaagtgtgcatgaagcttttcccaaagatgccatgacgtattgcatccaacgagatgaggaagaacgacattagaaatcgttgattgaagccaagaaagaagaaactgatcttgcttttcccagtttagatactccttcaacacaattccagcattgcaatcggcaacagtatcaaaccgcgatggaatgatcggagcaaccagaaagtacgacaaaccatgacctttaatgaccggctgaacctgattacaccanagaatngtaactggagttgtgagtttcgttggaat

SEQ ID NO: 150163 - DNA, 362 bp, Glycine max
tcatgatattgccccattaaaacaataacattcagctctctaactgccagtaactactaagaagattatttctaagatataagaatatgaagctccagtctaataagtgaaactacgatattaataacaggtcatggcgagaaagcacaacatggataaatcctggaaaccgtcacaaatgtactataattcctaacaacaggcagtgtgtaaacgttcaaactaaattttcttaatttattaacgggtgtagaagaaaagaaatactgttcaaactattgagagggggcaacagaagatgaacaaatatctggttctatttctttcatttaaaaatgttctaataaataatattaacaact

SEQ ID NO: 150164 - DNA, 384 bp, Glycine max
cacatatggcaacagctgcgccactactgataccaacgtttaccatcaccggaaataggggtgccatcagcaaaacacccaaaccggttgctgaagagacggccatagacatcatacatgcgacaaaataggcggcaatcatcagcaggtaaggggagttaatatactgcaatggttttgacgccagcttgaccaccatatcattcgcgccgatatgggtcatgtaagcggcaaatccacacagcatcataatcatcatgccgaggtcgccgtcgcggctcattacttatattttaacgtattcaacgatatccgtggcgctgttaccagttgaagccttgctggaccggtacactttgtgccccattatggcactgataatca

SEQ ID NO: 150165 - DNA, 364 bp, Glycine max
atgccgacaatcattgagctccttattggggttgtggttattgtgggtgtagctcgctacatcattaaagggtattccgccactggtgtgttatttgtccgcggcctgttattgctgattatcaatgccattatggggcacaaagtgttaccgtccagccaggcttcaacaggctacagcgccaccgatatcgttgaatacgttaaaatattactaatgagccgcggcggcgacctcggcatgatgattatgatgctgtgtggatttgccgcttacatgacccatatcggcgcgaatgatatggtggtcaagctggcgtctataacattgcagtatattaactccccttacctgctgatgaatg

SEQ ID NO: 150166 - DNA, 301 bp, Glycine max
tttcattatcatttaattgcacttcaataactgtcgactataaccattacccttttgcaaaggattaatcctctattgagcttgtttatattattggatgaatttctaagtagttatcaagttctctttgatgcaatcctacctcacaatcggcattgaatagaagactccaagtacattgggccatagatccaagggaaggccctacggttctcatgagccttacggtagatcttgagcctatgggccacgtatgagcccgcttatctatgtaaatattatataggctttttccttcgct

SEQ ID NO: 150167 - DNA, 258 bp, Glycine max
atttctgaatgatctctgaatccaattcaatccgtgtttctccccttggcacacataaacccagtgcgggaatttaacatacactcaccattttaaccgaatgttcatcaccctcatcctttttttcaatcccttacattaaaggctaattttccatggcaaaatgtttgcaggaacgttggaagatgcaccattgttttatttcccaattcaaacaagactccttaaacatgtctctaaaatgagcctttcctttgt

SEQ ID NO: 150168 - DNA, 56 bp, Glycine max
cgagaaaaagtcttgtagttcgaattgcctcacggctttcgcatgccatctcgagc

SEQ ID NO: 150169 - DNA, 278 bp, Glycine max
  unsure (1)..(278): unsure at all n locations
aataaaatcaaaagatgtaactcttcaactggttcttgactttntcaaattggttntaagttatactaaaagttataactcttctaaatggtcctcttgaccagacatgaagtgtctataaaagcaaggctttgttttgcattttaaatctatcttttccaattcatttttaatacaagcaatttttccacattaatttctgagtctctttgaacttcttcttcttcttcttctttgcaccaaaagctctacgaagcattttggtcttccctaccaca

SEQ ID NO: 150170 - DNA, 419 bp, Glycine max
  unsure (1)..(419): unsure at all n locations
accaaaccaaatgggaattttgtaagccagcaaccaccccttttggcgggataaagttcatcaccccaaaagaaaagaatggtagaactaatatcacatgatgctttaattggcacaagaaataattttcttttctagggcaacttgagattttaataaaaacacttggcaagtngccaactaaactgtctattggtcaacctacgcattcttctantttgcaggttgcagtttgtaccatctgtggtgaggcacatganacaggccaatgtgttcctagtgaagaacacactcaagaagttcactatataggaaatcaacagagacaacgatatactcaaggaggatattcaggcttccagcanggtccttataaccaacaatgacaatggagatcacacccctagcatcaattcaac

SEQ ID NO: 150171 - DNA, 440 bp, Glycine max
  unsure (1)..(440): unsure at all n locations
agtcaccngaggcatgcaagctnttagtttcaatgcagggaaacatgttttatgtttttttatctacactggggcctttgaaagtggaaaagcatgaaaattatgacatgattgagagagtctttactagaattcggctgccccatcaaggttactcttcatctacgtagcatggaaaatacctttcaatggcatgtaaatacgcgtgtaaatatccgtagcatggaaaacacctttcaatggcgtgtatatatgtatatatggcataaaattccttgcaaagtgtgaatgagtagcagaaaaatgtctgtcaacatatgcgtatttgaggatatgtagcattaggagcctttcaaaaaatgcacccatgctaaaaagggcctacgactgcttctaaatgaatatatgatggaatgagattccttttcaatgcaagtatg

SEQ ID NO: 150172 - DNA, 412 bp, Glycine max
  unsure (1)..(412): unsure at all n locations
cacttctgtagggtttcatggctttccatcagctcttttattctgtctatactcagccggtattaggcctcatgagctntctcatattcagcaacttactggatttagcttgngtgacttcccttttggatacttgggtgttccccttttatcatctagattaaatgtatgtcattatgctcccttgctttccaagattactggtctgattcagggatggagcaagaagtctttatcttatgcaggtaagttagagttgatcagagcagttattcaaggaattgtgaatttatggatggggatttttcctttgccgcaatctgtcctggactggatcaacgcttcgtgccgtaattttctgtggcgcanagcggatattggcaaaaacacgcccctggttgcttggtcagta

SEQ ID NO: 150173 - DNA, 188 bp, Glycine max
gagtcacctgcggcatgcaagcttggaggggttgatcacccggcgattatatgatcgtttgattcggctacatgggggtacctgagcttattataaagtgggcaactggcgatggtgggttcatgttatgattgtggatgtgggagagtcgattttaccatcatcccatcgccaccttataccacata

SEQ ID NO: 150174 - DNA, 396 bp, Glycine max
  unsure (1)..(396): unsure at all n locations
aaccaaatcaaccgtaccaggacattatagttgctgtttgatacctcacccacctcaagtgtatcacacaattatggcttttctctaatgaaacactcttgccttttaccactctaaattccccttgagttcttaggcaattcaagagattatggccacaacaaagaacaattcaccaatatgtgtaaggtaaggctagagagacaaggaaaaggttgaccaagaaaaaggctaacaatgttnttaggcacaaatgaaggaaataaaattcagaatttaggaattcaagtaacaatccttcatgcaaccaatatattaccttaaagagattttttttaagttcttcagcatgaccattcangccaattttttttttttaatttgatatacaaatct

SEQ ID NO: 150175 - DNA, 329 bp, Glycine max
caagcacaggggaatcaaactagatatatgatatagtggaaacagatcaatatcaaagtgtaaagcgtgaccaatcaaactcacgaagaagacatgaccaaaccagaatgcagacaatggaaaatccaaaaccacagagtatcaaagcacagaagtctgaaatccaaatgctacaagataaataaagtgctgaacataatgatctaagtagcatagccaaaatacacggcttataagagacatataattagaacctaaattctaagaaggtggaggtggtggtggaagatcgaaactctgacgaatgtaacccacatcctctgtaagct

SEQ ID NO: 150176 - DNA, 414 bp, Glycine max
  unsure (1)..(414): unsure at all n locations
tgaaacaaanaggacaaagagagaaagacctcgaagatcagcatgttatggtcataggaagcacaaatcattcgtagagagcaaacatatcttttggaaacaagaaactgacactaagagtttattttccaaaataaccaagataagaatggatggattcgttgaaccaatgaaagaacataatttggaaacatcgggtctacttgcataaatcccaagccttagtatcgcaatgccataaactggatgcttgagtacccacctagctgtatgcatgactaattntgcacgttgtttccaaatcatcattgttacgcgtgccttgtggaaatgatatggaagtttaacccgaaatcgacaccctacacatgaatctgtctcgccccagatatcagaattgggcacgcacaatga

SEQ ID NO: 150177 - DNA, 374 bp, Glycine max
ggacatgaccggctaaacacaatctatcattcagtactttagggttgcaccacagcttcatgttatctctttgatagagaccttatcacaaaagcttggtagagaacttcatttctatcatcttctcttcttcacgataaagctgtgaatgtatttttttggtttttaattaacttaactattatactaatcacaattaagttgttaccgacataatacatgtgtatcacatcggtaattacttatgcaatacatataatttgtgagtaatcaaaatagtcaatctttcaaaatcatgaaaccaaatatgttaattaagattcaatgacaaaacttagatttaaaagatatctcaccaaaatacaattaaactt

SEQ ID NO: 150178 - DNA, 393 bp, Glycine max
  unsure (1)..(393): unsure at all n locations
agcttgagaaaaacactgatactatcccttgtgnatacgccccatggcaacttatcaccaacttagcttcctcgccaatttaaacaataaatcttaaagttaaacaatttcaaacataaattgcacaagttaaacaattatcacattaaagtgtgataggacataacaacggacaacatcctgccgtctctaaccaagaaatgatgtactaataaattataagacattcatccaaatccaaatagacacacacgcaatcataataatcatgaaaaagactaaataaccaacgtcatttacaagtaaatgatttaaaaaacagtcacagaccaagacttccgcaattgcagcagtatcgccatatttttacaaaatttcccacaacattaaaga

SEQ ID NO: 150179 - DNA, 331 bp, Glycine max
  unsure (1)..(331): unsure at all n locations
atcatgttagctcacatcttgttcctctctgcatttgtcatttagatnagnngnntccaaatgcatgttttgtcttaagtatacgtggttctgnattattttgttttcatagtttataatgtggtttagtagtgcgccttttacaaaccttgctcatgagggttgcgatgagacagaaatcatctatgtgttcaagagtgaaaggaggatgaacatcatggaatctcgaaagtcccaatgttacctgtagcctgtaggagtgttaaataggtacaattttatgtgttggcccgtggactggacgatactcgtgacgccatgtccaattgtt

SEQ ID NO: 150180 - DNA, 395 bp, Glycine max
  unsure (1)..(395): unsure at all n locations
agcttcaccggatgacgccgatttacattttctttcgacgncangcagagttcgttccggattgaattgagaactccttatgcgacatctgtcgtgaaggaacgaccgatatttttcagccgacatcgcacaattctttttagaaaagctcgctggtcgataatggtctttttacggcagaataagttttcttcgtatggcgttgcataaaaaagttacaatgtacttcagctaggtttttcgtgcgagttcaaccgacattgtgtttcggccaggaaaacattagcccacctctgcaaaaaaaatatttgctaaccgccttcatgcatacttcattcaacgatcgaatagaaaactaatagccgactactgtcgtgagataatcccgactgata

SEQ ID NO: 150181 - DNA, 461 bp, Glycine max
tactctgcttatgagagagtaaagatcaaattggaggaaattaatgtctttcttaacaagccaacaaagggagaaagaaggttgtcttcgaacccggagattgggtttgggtgcacatgagaaaagaaaggtttccggaacataggaaatcaaagcttcaaccaaggtgagatggaccatttcaagtgcttgaaagaatcaatgacaatgcttacaaagttgagctgcccggtgagtataatgttagttccaccttcaatgtctctgatttatgtctttttgatgcagatggagaatccgatttgaggacaaatccttctcaagagggagatgatgaggacatgaccaagagcaagggcaaagatccacttgaaggactcggaggacctatgacaagggctagagcaaggaaagccaaggaagctcttcaacaagtgctgtccatactatttgaatacaag

SEQ ID NO: 150182 - DNA, 402 bp, Glycine max
agcttcaaccacacacggattctttgtgttttttctttcctcaaggggagagccaactttcaaatagaataattaaatcgggaaataagtggggtcagcaggtttcgtagtgctcttaaacaggaagtctcagaactcatggagggaagtagctgacagcaaaactgctttcctactcatcaacccaaagaactgcttaattccacaagaagatataggagcacatctcaccaaagacaagttgaccctaactcttaaatcatctacagccaaaaaactgattctgtacctgggtgatcatgccttgaaaaaaaaaaataataaagactaaaaaaattgattctgcctataaaaaaaataaaataaagaaaattataatacttgggccaggccccgtggttc

SEQ ID NO: 150183 - DNA, 387 bp, Glycine max
  unsure (1)..(387): unsure at all n locations
acctgcggcatgcaagcttatcacaaacactcatatatctaaatcnttgatcgacnaattctaatgagagagtaagcacaatagagcaacataattgattaaataaagacaatttcaattacgtaaatttgtgattcatccgagaattatatcataaccctagaaaagagagatttagccaacaatcggcacaaacaaacaaaataataacctccaacaatcagaagcccccacaatttttctcacgttcttcccaacccaaaagtgctctcactctatgcctaggccaccgctatgtatatatttcatgaacaggacataaaagatcttgagaaacttatttctctattaagcacgcccatggagaaaaattacacccatccaaat

SEQ ID NO: 150184 - DNA, 300 bp, Glycine max
  unsure (1)..(300): unsure at all n locations
ctaaggaaggcttccttccccggataacaaaatccctctctcaaataactcgaccatggattaaaaggcattccaaaacccttttcatgttcttaaccatgaccacacaaaaagatgcatcatccatcggttgctagcantaaactatcatttgagaaactatctcatttctatccttcatatangtccaggtaatgctatccactagcactgncatctgtgaaccctaggccagcatacccccatgagcatgttggagaagtgatgtcttgagtttcgtggaaagcaccaaaatgttaa

SEQ ID NO: 150185 - DNA, 239 bp, Glycine max
ggagaatgtgaatgttcgccacacgactcgaagattcaaaagaaaaatcacacaaagttgcttcacaggataagcatggcttctagattaatacaagattgcttcaacaaacaaagtctagtttcaagattcactaaagaccaagccttgccttaaaacaaagagttttccacacatgcaaggctctggtaatcgattaccaggaagtgtcatcgattaccagaagacagggttgagaa

SEQ ID NO: 150186 - DNA, 435 bp, Glycine max
  unsure (1)..(435): unsure at all n locations
gaactacccgagcactcacgcattcatccagtgtttcattgttccnctctanagccctntattggaccactggacacggtgcagattgagaaactgccaccaggggcggttgataatcagccagttcccatacccttggctattctgggccacaagactctctcgactaaccacgggccaaagcagctggtcttagtgcagtggcagggacttcaccctgacgaaacgtcgtgggaagactggtcacgccttcaggagcttcatcaccttgaggacaaggtgttgtttgtagcacgcgggaatgttacaagtagcagctatgaaccgcaagcaaccagggccaatagtgataacaacaaggagttagtagcaggaaggcccaaaagaggaagcaacanctctagttatctgaaagaatacgtgctagaagcttaa

SEQ ID NO: 150187 - DNA, 417 bp, Glycine max
cacagccaagcgaaacagagaaaaggcagaaaactctgccaaaacaccaaccaaaaatcacagctttttcccactcaaagaccccagtaacaattccttcgatccaattcgttaaccgatggatcgactccaaaattttactggaagtctatagtgcataagcctacatattgaccggtgggatctactaagaaacatccagaactcattctacattactctttccacaaccagcaaatacatggattttttctgcacttgtgcagaattctgctgcacaaatttacatgcaaatctgcacaaagagcatatttcgaaaaccacacttcccctcatccaatattgcccagatcaattcctacaagtcccaattcatgtatcaatcatgtctaacgccaaatcaagcttcataacaca

SEQ ID NO: 150188 - DNA, 475 bp, Glycine max
agcaccgcagcatgcagctcgagttaacagaacgccaggagatttttacttttatcttccgagaaccgccacagcagcatgtaaccacattcaaatggttgctaaaaaaacaaaaccatgtgcaccaatttacagtcactacttgattgcaaatgcaatgctttcaccattcaacccaacaacgtgagttacttacattccattaaggcattataagcatatatcgccaaaattttcacctagatgaatggccacatttctgcacctgcactcaagactagcagaaacttaactaacgacgacgaagaacctcttatggacgccatgctcccctattcgctgaacaacatccaacaatgaagaaccagtttctctctcacaaacacgaccaacatttgttcggaaagaatgaaccacatctttttgtgaaataaatcataagactgaaaccctaatggaggcctacaacaacttt

SEQ ID NO: 150189 - DNA, 457 bp, Glycine max
  unsure (1)..(457): unsure at all n locations
ctgcaagctatcgtctaatataaagcgngcctttttttaccgttccttaacacaaatgcataaatattgatgataaaaacacccaccctctcacaataagtgatgtataatttcaaaatcatttttctgagagtgactaaatccgcttcttcgtcccggagagaaaactataagtgatttttaaaaaatatatttcacctctcttacttttatgatttctttttttaatgaaccaccctgtcacatataaagactgttttcataaataaggttccaagatgtgttgacaaagtcttccgattcctaaaaaaagtggtgttggctacctagtgatattatcattaaagatagaaatggaggtggaatagccatccatgtttgatgccaaattangaacaattcatgccatcacgcatatgaacccccttaaatacaagagagagaaaaatgagagatt

SEQ ID NO: 150190 - DNA, 344 bp, Glycine max
  unsure (1)..(344): unsure at all n locations
aatgaataccgattgtttgatgaattgtacagttctgcctttcatagccctcttttgaggatacacaggtattgtaaagattatcagaattcagattactttgatgccattctactctgtattccccctatgattgcaaatgcgccatatgtataaacactcttgtatgaaggggaaaactatcaacaatttaaatattcattgaaaattagttcaattgaatacctacttttaactatagtatcctccagctaanactacatgtttctgatatatttgtgtattaactatcagatctattaccttgcagctcaatgagtaaatattttccttctctactctta

SEQ ID NO: 150191 - DNA, 270 bp, Glycine max
gaaactatactgaggacagttctcaccttctacaaagaaaaaccaagctacccgtctatgtcttctcccacatgcacgtaagatgtgtctaaaaaaaaatgatttcttatatcaataatagaaatgattcttaaatgcagaattattttttatcgataaatattaattactaattcttaatttatttcggaaatttcgaatgccgatttctttattctttcttcatcctttatgattaaaccatgcatatatcctcaaatataacattac

SEQ ID NO: 150192 - DNA, 470 bp, Glycine max
  unsure (1)..(470): unsure at all n locations
tacttatgtggcanggcgggcttccttcacttncttgtcacctactttatctctgaccactgnccttccttcccgcgatgcttcttttcatgtccgcctgagtgggcttatagcctaaaccatacttcccacgatttccttgggtttttatcaggctagttatgccgccattgtctttgcctaaacccatcccgggttcataaccgttccccaacataactcgggccatcattaccgccgcatcggacagacaaggttgcccaaagagggagtccacggaggaaatgctgaccacctcaaaagactggaaagcggtttctaacgattcttctgcggcttccacataaggcatggaggatgggcagcttaccaagatatcttcctcgcctgacacgatgaccaagtgcccctccactacgaacttcagcttttggtggagtgtagaaggcacaactcccactgagtggatc

SEQ ID NO: 150193 - DNA, 274 bp, Glycine max
cagctaaagaggcccgagttttttttctctatttatggcgccgaagcacgggcgatcagaattgccattcctcggaaatagggcagaaccaagctcatgcttttacacaaaggttcatcaagtcaagttgaaatatggaagcaaccgactcgcacaattggggcaaaagaagaatcgagtcacatcactggttcgtatactgccaaacatatttaggattattgatgcccttcgtacttccagtttcaccttgacaaagatgtcatggaccatg

SEQ ID NO: 150194 - DNA, 360 bp, Glycine max
  unsure (1)..(360): unsure at all n locations
gttcaagtccatagccatcaaaagtctgaaagagtatgatgaaactaaggatgtcaatatgggcaccgctgaaagccttgaacgagaacccaaaagcccataggaagaacacgaccaaagcaaagttttgaggggctttatagggcaccaatagtgagctcaagctccgaagaggtgaaaggaatcatcatgggtcaaaggcatgatcttgaaggacgagctaaaagcttgcctcangtcgaaaagaaatttgtcccaacagttaagcgagactgaagggaatatgtgggccatcatcgatgagtgcanagagaagctaaatctagtggcaactcacgagcaaaggctagaggatgagta

SEQ ID NO: 150195 - DNA, 280 bp, Glycine max
ttgagaagagcaagtaatatttaattatcagcccgtgagtaccaaagtagttctaataaagaagagtttgctcctattgcacatgagcatacaaacatgatgatactcttgatggagaaagatgaaagaattgagcagactgaagactcaatcacgtgtgaaggaagcaataatttttcagcacccttagatgctgtcaggttttgatataattggattagtattgtgttgctgagatatttagttcaatgtcaatacttttatttggtttttaatatag

SEQ ID NO: 150196 - DNA, 429 bp, Glycine max
  unsure (1)..(429): unsure at all n locations
actcacctcatttagctcaggctggacctgccgtatttatttctttctggaccaccaggaatatcaagctgagccaagaaagatagctgctcctgacgtggaatgtctgtcatcaatatctgatgcccaatcagcatcacagaaagcatagagagccatacgttttgaaacaaaagaggttgaaggaataaaccatgaaatatagtacccttgagatatcttaatatctctttgaccacagcccaatgagaatccaatggattagccatatactgacaaaccttattaacagcataactaatctcaggtctagttagggtggcatactgtanggcacccactactgacctatagagagttggatcatgaaatagatcagctccatgtttggacagttcgcagtttgtaaccatacgagtagagatagag

SEQ ID NO: 150197 - DNA, 420 bp, Glycine max
gtcacctgaagcatgcaactcgctttgctaagttttattgtttatgttatgccaccaaagactccttaagctctatcactttctttcccttggccatattgacgcttgtagcgtaacattccctcgccattacatactcacttagaaactccatcaccaaacaaagagtctaaatgatggcccctaactcgttgagcgaaggatgtcctatcaatatattataagatgttaacgcattcaatatgaggcacttaatcatgatggactctgactccctatcatcttcaatagtggttaacaagtgcacgtatcctatcgagtaagtttgctctcttgtgagagctatgactcgctctgagaacgactcaatatggctatctggtatgctagttgctaaaggccgactagtatacgacattg

SEQ ID NO: 150198 - DNA, 255 bp, Glycine max
  unsure (1)..(255): unsure at all n locations
attcttagaacttgatagaacagggctagttngtcatattttcatgaggaatcggngtacggtaacctagttgttgtatgtttgtcttaatgcggtcctggccgagtttagttcaacaagaggaatctgcgaacgatgctngatcaggattaagctagactatcatgaggaatcgaggtttagtatttcaggagacaccatagaatgcatgagcattgttaagtagagaatatccttctagcatcacgcacttat

SEQ ID NO: 150199 - DNA, 319 bp, Glycine max
attaaataagtccagttataaaacttcaaattaaaggatcttttagtgctaaaaaaaaaatcctttgattgattttaggatatgatatcctcttaactaaataaacatttaaagaattcattttataaatagatttagattatatatcttgagtctgatgtggtctaagagataaatttctaaaggaattaaaccattttcactcttgtaaaagatcctttcggacaaattaatgtgaaagtggaaatccttgcttgccacaatacaattagaggaaaatatacttgttaatcacattgtgttagggctatcttcttta

SEQ ID NO: 150200 - DNA, 382 bp, Glycine max
  unsure (1)..(382): unsure at all n locations
catatgcgaaatcattgngtngcattctcactcgcctgcaacaggttatctttatattcatatagtgatttactcgataagacgacaattttgagttcatatataaaagattcaagataattgcattatactgcttgaattaatgaattgattccattttcctattaggaaagctctgtatgattctagatatgccctctgtaaatttgtgtgctctgtctgtggatgctgattcttcatgaagattgtggccttctgccgtcttggccttgctntggtttattaatagcatatcttacagatatggtgacctttctgagctcatggtattataatgaactttccatctaccagctnttatcctaatgaaattctcccaatc

SEQ ID NO: 150201 - DNA, 386 bp, Glycine max
  unsure (1)..(386): unsure at all n locations
agcttcgcttacacactatacgtttatttttatgtaagcnttatcaccttttcttgctcatttatttntcgtgtccgtgcattattatcccactgcgttctatcgactgtgtatttttcccagttaaaatctcagctataaaatcaaattattcacgccatggtggagttaagaagacagtgtgcccaaactgacagcaaccataatttcaatctataaataaagagtagtgattatgttgcttaaggcttggatagttaanatctgtatttccttatgctcaattgtcttgaataatacaactcaagagagcttaagacttattntgattcacatatccacgcccaactcagcaccacaactccaatttcttcatatgcatcata

SEQ ID NO: 150202 - DNA, 222 bp, Glycine max
gcttggcttttattaacctaaatggacatctggtgaatatggaaacaacaatggagactggttcattccataatgtgttaaagagtcccttcttcttgaacatcgaactagccattttcataactgcgcgattctttctctcggacactccattctggtgaggagaatatgcgaactgtagttgtcactcaatgccttcatcctcacaaaatctttcaaact

SEQ ID NO: 150203 - DNA, 324 bp, Glycine max
  unsure (1)..(324): unsure at all n locations
ctcagagtcacctgccgcatgcaagctctaacaacacttttcttttgtttatttattactncnaacgctcttaatctctcctcgnctaaatcaactaactcatctgacatcattttccaataatggtcgatcggaatgtccatttgttattgtactctagctgattgcaaatgatattcgaccggaagtatatcatcgtgcccataattcagtcgaaatggggtagtattagttgattccttaggagaatttctacatgcccatagaacttgatctaacgttttattccaattccttggctcttgcgcaatgtgttatttaatc

SEQ ID NO: 150204 - DNA, 406 bp, Glycine max
  unsure (1)..(406): unsure at all n locations
ataaagaatgaatcctntcttttttgataattattgccaacgttgattctttaaaaaaataattaagagagaatagcctatggatcaacagtgtaaaaaaaaattagagtaattaaataataagggaaaattattttaccgtgtaaactcttataaaaaaaattgatcttttcttgaaaagctgaaacctatatatactntgtgactcttgaaaaaaaaattataaaaaatgattaaaccgttttttaaataaaattgaaactttccttttctaacttttgcagaaactggatctttttgaanaagaatgagcatttttttaagaccaaattgagacttttaatttaaacatacaaattaaccttcggaaatccccgtggcaaatccttattcgattacaaatgta

SEQ ID NO: 150205 - DNA, 464 bp, Glycine max
  unsure (1)..(464): unsure at all n locations
agcttccatcatgttgcccctctntactcatcttttattggatataaaagggaattaaagataaggacactaatttcattcaagtgaccttgctattcaactgggcaactggcaaaaactaaggaagtgaaactgaaagaacaagaggacattgatgtcttataaaacgtaaaatgaaggacattgaaatcatgtagagcagaagacatttgaagtttttttttttgttttttaaaaaacatagaaacagaggatgttgagtcttaagaagcacaaagacaaggacattgagtcctataaaaggtagaagacattgaagtcttataaattgtaaaagaaagaagacattgaagtctactaaattgtaaaagacagaagacatttacactttcaaagactgaagacattgaagtcttctaaataaaaatgaagacattgtagtatttgacagcgtaaatgactga

SEQ ID NO: 150206 - DNA, 318 bp, Glycine max
  unsure (1)..(318): unsure at all n locations
cgaaaaatcttgaagatgaaaggaggaaaaagtgtattcatgacttccacatgaacatntcttgaaatgccaatgcttgcactgccttgngagaaaggatgactgatgaaaagctggtgagaaagatcctcagatccttgcctaagagatttgacatgaaagtcactgcaatagaggaggcccaagacattngcaacatgagagtagatgaactcattggttcccttcaaacctttgagctangactnctcgatagggctgaaaagaagagcaagaatctggctttcgtgtccaatgatgaaggagaagaagatgagt

SEQ ID NO: 150207 - DNA, 476 bp, Glycine max
  unsure (1)..(476): unsure at all n locations
gacctcagagtcacctgaggcatgcaagcttccataatcaagaacttacatcactgtctccattttctttgtgtcaaaagcctcattaaccctaattaaagaacaaaaaaaaagttcagaacaaaaaaataataaaaagaagatgaggtggaatggtgcctgtaaaactctatatggatagggtcttcagataggattgagcacaatataagcaatcttagaccataggccctgaaacaatgacaaaaatatgttaaaaggaagaaaaaagggagaaagtggaggatgaaaaagggaatgaaattaaaatgggacctcttccaacttcatcaattcccattaggcaaggcttccccattttggaagctttntggatcccattttgcttcctttcgactactcaaggaaacacgcattttcttctcaagagtcaagggctctntattccgggaaaaaagatcatagttgtggtttga

SEQ ID NO: 150208 - DNA, 340 bp, Glycine max
  unsure (1)..(340): unsure at all n locations
ttttgcaatcttccatcttgntctttctatttgtggtaaaaaagcttccttgtattgaaagttaaatcctctgttggatcttccctgtaggtacctgatataaatatatntatatctatttaatgatgttttatgtgttctctgtgctatctgcttttcattccaatatgcctttaccttgatcacgtagatgcatgctttgttagggtcattcaacagtggaaactggtctgactctaaagtccttgatagtgcagcgctaagttgtcgtgctttcacgaggaatcggngtgtgataagttagttgagtatgtgtgtcttaatgccggtcctggtgagt

SEQ ID NO: 150209 - DNA, 398 bp, Glycine max
  unsure (1)..(398): unsure at all n locations
ctgcagctgcaagcttccaagntttaagatcttcctcatttctgtcttatttcaagntcccaaagncttattaacaacttccgtttgcccatcggtttgtgggtgacaagtggttgaaaataacaatttattgcccaacttgcttcacaaagtcctccaaaaatggcttaagaacttaaagtccctatcactaacaatgctccttggcaaaccatggagtctcacaatctccttgaaaaacaaatcagccacatgggaagcatcatcaatttttttacatggaataaaatgagccattttagaaaacctatcaacaaccacataaatggaatctctaccattgcttgtttatggcagccccaaaacaaaatccatggataaatcaatccaaggatcct

SEQ ID NO: 150210 - DNA, 383 bp, Glycine max
  unsure (1)..(383): unsure at all n locations
gggtcctggtcaagccccggcccctaacaccactaatgaaccgctaatggcacgtaagggattttggcctaaccgcgcttctctcgcttaatggatgagctgaagcgatgcttgatgacctgaagcggtgcgcttagcgaacttgatagctcatcttcttctggattcttcctcgtgcttagctactaaatgtcgtgctcagcgaatgctcgctaagccagcatgttggcttagcaagaaggtgaaaacaaaagtnttaccaatttgcctaattaacctganatngagagaaattgattattaaatacacacaacaaaagtataaattatctattacctatatttaacaaacattacttatagtattacaaaacaactataaa

SEQ ID NO: 150211 - DNA, 274 bp, Glycine max
  unsure (1)..(274): unsure at all n locations
acgagagcgcngaaaactaaaaaaatttttgatattttttcggcacttatattaataccttaaggtggagaatgaacattcatggatttattcatgcttccattagcgggatgaaatacactgcctaggcattggatgcttggacatatcctactggtcaaacctaatacaaaaggttcctaaataaaagatatggagactatattatataaaactaatttattatctacctgaccatggataatatggtaggtctcctttctattaagagtat

SEQ ID NO: 150212 - DNA, 212 bp, Glycine max
  unsure (1)..(212): unsure at all n locations
caaaagaacaaaggactaacggccngaannctnnnatggctctcttctcccttacaaaggattcaaagaactaaccgcctgagaattcttttgattctttccttccccttaagcaaaagatttcaaaggactaaccgcctgagatatcttttggttcccctttacaaagattcaaaggactaaccgcctgagaattctttgcccaacacatt

SEQ ID NO: 150213 - DNA, 336 bp, Glycine max
aaggataaaagggatgccccacattatttccatgacacaaatgcaaaaatgatgatttggaaactttatgccgaactggtcatgcatgcacctatgtggacactctagtgtcaaattcttatggtcatgtgattctagggctcacgattcatttcctatattttagtcaacccaacgtttccaaaatatgttcttatatcaatgtgcgcattcatctgagtccattgtgcgcgtctgggaaaatcttgacagcattcacccttcatgcgtatacacatcttttcaaaaactagttatgatcagtgaatttttttcaagaatagttggaagtcatct

SEQ ID NO: 150214 - DNA, 65 bp, Glycine max
  unsure (1)..(65): unsure at all n locations
cgacccggaatagctttgttttctacatncaanccnacaagagnnggcgcctacgcacgcacaag

SEQ ID NO: 150215 - DNA, 407 bp, Glycine max
  unsure (1)..(407): unsure at all n locations
agcttataatacacattggacggattcantttgatctatcagntcttttccttctctaataatattccaatttccttggngtaacatcatattttttatttattcaacatttttttagaagaatatctcattacagcaagactgcaacaataagctggtaaacggtaacagttcctggtttaaattgtaaaactgtatagtgtgggatatgaagtgnntattcacctaatatatatattcatttctaaccttctcggctgtgaacttcgctttcctttatacttttctctgttgctaacttgtctatctgttccttccttattcacttcctccatctttgttaccatatatcttacatattttctttccttcctctcctatattcacttaacacttctatcttattc

SEQ ID NO: 150216 - DNA, 297 bp, Glycine max
  unsure (1)..(297): unsure at all n locations
tgaacctcacagacccaattgcaatgatcttacatgacnttttgntttcagntaggactgaatcactaacttgttcatcaagatcctcaaaccaagacttgtttgggttcatatggactgaacacccaatgtccaagatccattttgtctcagtgtgctcatgagacaccattaaagccccagttgactcataaccatgttcaactaaagcagtatttctaggttctttacatcgatcttgcctgtttcctttctgtctatcaagacaaaatctctaagcatggccttctcttttat

SEQ ID NO: 150217 - DNA, 406 bp, Glycine max
  unsure (1)..(406): unsure at all n locations
agcttcttttggaccttgaactttcacttttctttctgtcanaaccatgccatgtgctcgcgactggtccctttcttcccttcgcaacttgagttcactattgctaccccatagagctccgcgaaatttgtaccggccatactcttccttgcgagccctcttggtctcttgttcaagggctcttgcggtaattgcattctcttcccgtaacccggcacactccttccgaacgtgtgtagcagccaacttgaacttctccttggcgagttttgcctttcctaactcgctcttgagagcttggacttcttcgtcctctttcggtgcttcaaaattctcttcgctgacgacttatacttagacgagccaatctaaacctcgtatgcgaactttcagccattcgtggtcc

SEQ ID NO: 150218 - DNA, 351 bp, Glycine max
  unsure (1)..(351): unsure at all n locations
aactcacgctgatttcctttagtagggaatctatccttcctatagaatgagccttacccaancaccctcattaagaactatctcttttcttcctctattgcctttagttgaatacacctttgtttggttctctatttggttcttaaccctctcatgcaacttctttacaaattctgacctagattccccttctttatgtataaaagaagtgtccagtgggaggggaatgaggtctaacggtgttaggggattgaacccatagacaacctcaaaaggggactgcttggtggttctatgaacccgcctgttgtangaaaatgctacctggggaatatagtcatctcaagactt

SEQ ID NO: 150219 - DNA, 343 bp, Glycine max
tgcagcttgagagcagagctattttaatctttcttttaggcccaaccaatatcaatgctatggtgttagtgtcagtgttacccaccaacatatagataaaacgggtgtctttttgtgagcatgtgagctggtccctctctttgatatcatctctctctctctctctctccctctttagccctacgaaacttactacgtacagattcattccactttctctaaacaaatgacatgctccaactatattcctcattctcatctgagctggggaaccatttttacaaaataaatatatacgtatcgttaccgtgaagacaaccaggtctaactctattgaccaccc

SEQ ID NO: 150220 - DNA, 456 bp, Glycine max
  unsure (1)..(456): unsure at all n locations
gcatgtccatcacctgcatacgtacctataataattatgttctatagaaagttggtgacgagaaaataaaatggttgttgtgtacgtcataccatcacataatattccccttgtctccctttgtagtgtactttaagtattccatgactgccaccaagggtgcttttcacaaaacaaaacattaaataaataanaaaactcaggcaatttcacttaaacacaaatcttgtgcataaccgaaagcaatcgtcgacacatatctcttgcaacataaacaaagcacctacttgtacacttgccactcgtaaggagggccatagttacagcctttgctgttcctgtgctcaaatttcaaagccacctgaaacacgaaagaatcagtcaatgccgtagaaaattgttcanacagtgaggtaacaagagaagcttttacctcagtggcaccagcaccagtgc

SEQ ID NO: 150221 - DNA, 450 bp, Glycine max
  unsure (1)..(450): unsure at all n locations
cgaagctggaaaaaagtcaatattgtatagaatttttactgtatctctaggnngngaaaggggcctcttttctcactatgacattcctacaatggtaaatgatcacatctgaaagttaaaaaataaaataaaattagcaatcaaatttcaaaatttcaaaatatataaattaaacttatttcaatatctcttgagaaatatgaagagttacatgctaatttaaccatatatatgttttatacgtataaatcatatttaatgatatgctatcgatctgatagttnttttttttttttggagaagtctgatagatttagtaaccatttgtcttgaaaaattatgccaacctaactatgtggccggctaanaatgaataattattcattcagcgaacaaaatgaataattattggtaagatattcttttataacagtggtaatagggtttaac

SEQ ID NO: 150222 - DNA, 249 bp, Glycine max
  unsure (1)..(249): unsure at all n locations
cattatcatccaatcataactcgccagataattggttgacttttataataactacttaaaagtcatttaaaggtgattttaattggctgacagtgtaaaaaaatcatgactgtttaactcttgtctttatgacnacagacagattaatcattctagttcgctttgctacacacgacctgagagcaacttggatatgcgcatcatactcggcaaaacgancacttcaccacactgacgctgaaaccatct

SEQ ID NO: 150223 - DNA, 464 bp, Glycine max
  unsure (1)..(464): unsure at all n locations
acctctacaattttcatatggcaataactctcacaaattgaattctaagagggaacgagggatcatttcataatgaatcttcacaaaaaaatcccaagaaaagaagatcaaacataactcgtaaaacagctggttaagtcctataataatgagccttacagaaaaatgctatgaggcatcattntgctaattgtttcaaaaagtaaaagatctaatctagagttggtgacctccttgatcatcattgaaaaacatagcctctcagcttgagccaaaagtttgaggcctgtgtttaagactggttcttgtgacagagccacagtaggatcatcaagaaactctaacaccatgtttgaaatgaaggcagagagagaaagcacgcagaatctgagatgatttcattattgaagaagagatagtgtggggtttatatataactgactactagctcagcagtaattcta

SEQ ID NO: 150224 - DNA, 212 bp, Glycine max
  unsure (1)..(212): unsure at all n locations
cttaaccagcacttgttccactccccngaaagacgctatgtgaccaagatattccacctgagaagttgcaaaagaacactntgaaagcttcagaaaaaattagtgcaagctacggatttcaaacgctntgcgaaggtgctccaagtgttctgggaatgttttgctataaattagaatatcataaaaaaagatggtaacgaatntacacaaat

SEQ ID NO: 150225 - DNA, 420 bp, Glycine max
  unsure (1)..(420): unsure at all n locations
ttcatctctgggggcgtccataactacacaagtaatgccaagattaacgtgtgtgactttgcataaaaaatgggaaataacgtcactcattaaaagaaatgcctaaactaatggaggagactgcagtgactaaagagagcacacggctctacggacttgcaattgcaatatatcaacctccttataattatatgtttctaatatgattccaggttgcaagaattcttcattgagtaacctcattgagtagctatatatgcatatagctacattgttgacatatatggcaagaatacatntngtgtcctctaagctaatcaacatacacacaagagctataagagaagaaaccattcttcacataacctagaatgataacgaggttcatatagccttacattacatatcagcgccttaata

SEQ ID NO: 150226 - DNA, 360 bp, Glycine max
  unsure (1)..(360): unsure at all n locations
taaaattaaattatactatagaaaatactggctaaaagccatcaaatcaagtaattttgaatctcaccattactatcacgcatgtcaaagagaaggagaatcagacatcgtaatgcataacacaacgaaacattaaaagaaaacatgcttcctaaagccaaccaagggaaaaatgtattcatatttcgtgaactttntcaaaattataagacacatataaccatatataaaaacatggtggaacaatctgaccacatgcacaacacagaccacacattatttcagaaaatgagttgaaggaanactaataatgcactgttaataacaccgtaggtgcactaagataacaagggtgtcatg

SEQ ID NO: 150227 - DNA, 402 bp, Glycine max
ctgcagcttgaaactttggtttctaggatttttccttttcttgtcaaattcaggatttaaccctacaagagaatcataaaccctgtgtttttcaataaattccttcggaacagcagcatcttcagcacaattagtcttaattactttgtaatgatctaattccatccaaagagactttaaatggtcagcatattcagtaacagatttgtttccctgttttgcagctaatgttttcacctttacatcatagacatgagcaaacaacttagttttagaataagtttgttctattgcgtcccaaatttcttttgctgtgctgagaaacataatggtatcactaatctctggattcatagaattccataaccaagcaattatcaatgaatctttctcatcccatgc

SEQ ID NO: 150228 - DNA, 310 bp, Glycine max
ttttccaacatattcgcttaccaatgccaatatggaaaagcagtcccagctatatttcatggatagatcctaagatgcaatgattggcatacagtcccagtgaatactataatcttgatatttaatgtctttagcataagtaataactgatcacgatgtctatggaaaatatattatttatttatggaaaagcaattacacactgagtgaatcatctttatgttgggctaattcttcgaacatatatgatatatatatgtcattggtctcacagctacttaaccatattatgtggcggcttactactacc

SEQ ID NO: 150229 - DNA, 439 bp, Glycine max
  unsure (1)..(439): unsure at all n locations
agcttctaagtctacctaaaaaagctttttgcttttatcttcaggctcatctaactcaaaagcatccaactcaaatctttctggtttagtaacaggcatacacaacgtttccacacatactaagccttctgtgttgacgacacaattgttgattntgacgagaacctcattacaatcttcaagcacatattcaacctttatatagaatattctgatagtgccaaaaagaagttagccaagcaatctgaaggatacagcatcaatttctggcaaaatcttgtctgcagaaggaaaaaatgaaatgaaaataatggcaaaacaatagcatatatcacaaatcttaaaatgatgtcacagaagaataaactcttaaaataacatcattttgttggcggctaattggctattcgcaatgactggtagacttctcaacaataat

SEQ ID NO: 150230 - DNA, 412 bp, Glycine max
  unsure (1)..(412): unsure at all n locations
tgcatgctgcaagcttgtagggtaaagtctacgaatgttttgtgctgatgcttcttattgggtagccggggctataacgagacaatcttgctcacacaatagtcagcggtatctcatatactcacgctgtaccttttncttccatgccatatgtggcgaaagcgttgatcttcgtcaagtttgacgagctgcaaaatgatgccgcagtatactgcgccagttggagatgtattttccccctgctttctttgacatcatgattcacttgagtgtgcatctggacagacaaatcaaatgttgtggtcctgtttatttgcggtggatgtacccgattgaccgataaataaagatcttaaaggggatacaaagaatctatttattcagaagctctattgttacaggtacattgcgc

SEQ ID NO: 150231 - DNA, 243 bp, Glycine max
  unsure (1)..(243): unsure at all n locations
ggatccttcccaatcataactcanacatggtggttttgatccccaagattcctgctatagagatcattaaagatttccgtctcatagcattggaaaatttccaatttaagatcatcactaaggtattgggagatagattggcagagatagctcctaattaagctcatttcttggcaacaatttggattcgttacaggtcgctacataggagaatgcataggcattacatctgaagctattaat

SEQ ID NO: 150232 - DNA, 302 bp, Glycine max
ctgaggctgcaactgaagtgggccttatttttttttttaacagggcgagggctatattatgagacgctcttacccgcatggagagcacttgcctgccaggctctcaccttgggcgtattcttgaagatcatgccccttgtgacatgtctatagttcatcctatccaagcctatagaattgtctaaactgccaatgaaggcaccattggcttccaagaatgacttgggaagtccaaggagtgtaccagaacatctccccagaagacttcttgaataatgatcacagttctcattgttggatgc

SEQ ID NO: 150233 - DNA, 360 bp, Glycine max
  unsure (1)..(360): unsure at all n locations
cttttccttatatctgcttgngagggtttgaagcctaacccaaacttcccacgatttcctttggcgcttatcaggctagttatgccgccattgtccttgcctaaacccattccgggttcgtaaccatttcccaacattacccgtgccaccatcactgccgtatctgacagacaaggttgcccagagaaggaatccatggaggaaatacttaccacctcgaaagactggaaagcggnttctaatcgctcctccgcggcctccacatatggcatagaggatgggcaactcaccaagatgtcttcctcgcccgatatgataaccaaatgcccttccactatgaacttcaatttctgatggagt

SEQ ID NO: 150234 - DNA, 267 bp, Glycine max
  unsure (1)..(267): unsure at all n locations
agctttactctgnngctctgtttgtgttcctgcgnnagagagaaggagaagaaattgtaaccttcattttactgtcaacatttgagactatttttctctctgcaaaaacattttttcgtaaatcccaacggctagactgtgtgcaaatgtactaggaaagtggtgtcccaatttcacaatgatctaacggttaacgagttcaaggtcttagttttactcggatagattttgggtgtcttcgggagactctaaatattttctttccac

SEQ ID NO: 150235 - DNA, 421 bp, Glycine max
  unsure (1)..(421): unsure at all n locations
acactatgaaactcagcttcccaacaactaactagggtaagtcccttcactcnttgntgttcttataggggatgccacatctgtggaggagcacatgagccagggcaatgcatagcccaagaagattcttccaggggtataaactacatgggagctcagaatcaccacggattccaaggctacaaccaaggaggaccgtcgagattcaaccaagggatgaatttcacacagggctcaagctcgaggaatcatctggggaaccagttcaacaaggagtaacgaagtcaaccagcccaaaattccaaccaagagatagatctttatgagaagactagcaagcttgaggagacgctgaatcaattcatgcagatatccatgtccaaccatatgagcacacaagcctccatcaagaacctggaga

SEQ ID NO: 150236 - DNA, 108 bp, Glycine max
ttcctccagaagcaacagccttctggatgaatattctggagggcccaagtgggccatggtgctatttgcacctccatttttactaaatacacccctgcctattttttt

SEQ ID NO: 150237 - DNA, 233 bp, Glycine max
agcacacactatacccaaaaggtatgccagtaggatctttcctgggttcatattttattagattatctatttcttggaacttacttgtccagattttggtatactttcgaaggattcaagactccagttaacttctgtagcattcttgatccaacaagaatctgtacctatatttatgaagtcatcgatgctggttctcttggacctcttatcaggcatcattcctaaccttg

SEQ ID NO: 150238 - DNA, 371 bp, Glycine max
  unsure (1)..(371): unsure at all n locations
aatgctttgtttgtcactttgccttttctggagtgtcaggtgagttccagtttcttggagaagctctttgtgactaccttttctagctntggtataagtaaacaagcaacatttttgtggaaatataaagtttatgctacagtttggtgcatttggctattaacgcatcttttaagtaaacaagctctttgaatgaagtaatgtcttagtcatttgatttccacttgatgtaacactttatgcttttgatcattttagagggactgggaacctctattgattnttcctcttttttctcccaggaggaaccctttttctnctagctttctgtaaaaatcttatctttcttctttttgtataaaaaacaatgc

SEQ ID NO: 150239 - DNA, 410 bp, Glycine max
  unsure (1)..(410): unsure at all n locations
agcttcattgagaaggattttgcttttatttattgagnnnngntcacagtacatggaaacaattgaagctgtgggggtaccgaaaattcgtcatgaccggacacgatgaggtcaagggacacgaggcttcaatgttgttaccatgagtcgacaagatgtgtcacaagcgcatttgtatatcttgaataacacacaggaggtcgttccatacatacaaactcacaaacaatatctgacatctattaacccaaaattgaacatgatgaaattgttgcaagagcataatagaactttcatgaactgcgttatagaaacaattatgagtgatgacaatgcttccaacacattaagattgttggctattggccgaatctaatgtcctactagcatgggtatgcatatacattatt

SEQ ID NO: 150240 - DNA, 435 bp, Glycine max
  unsure (1)..(435): unsure at all n locations
ttgagtgcgagccaccatcttagagancttttaattgtctaccatcacgantatcgtctccctttccatcattgggggtaccacttgggccgccagatccctccaccttttgggcgtgttctttgaaagatccgtccccctttttgcaaatgttctgtagttgcatcctatccagaaccatatcaaaattgtactaatactgcctaacaagggcaaccattagctccttccaagaatggactcaggaaggttcctaagttagtataccaggtgacagttgtcctagtaagactttctcaggaaaaatgtatcagcagtttctcatcttttgcatatgcccncatcttccgacaatacatccttagatggttcttggagcaagtagtccccttgtacttgtcaaagtccagcaccttgaacttgggaatgaccatg

SEQ ID NO: 150241 - DNA, 395 bp, Glycine max
  unsure (1)..(395): unsure at all n locations
acacagcaggttctttcagatcacaaagaagaatgagactggacacaacactcattaatggacggaaactctattaacacaagacgtgtgactcaatcacaaaacagatggacaggactagaccataattggataggagacacatgtgttctcacatctaattctagaagcatagcgatgcaagcataaacctcatcatggtatgagaaatgagggttttaccaacaagaacatgatgtctctcgactctctgctgcgctcgcagaaatcgaccagcccttctagcaccgaggcttgcacgagcangaaaaggttcttcatgaaccctaacagcaccgcaagtagcaactgtgccagaccttgaaccctgcatgcaccagcattgaagcacagca

SEQ ID NO: 150242 - DNA, 295 bp, Glycine max
  unsure (1)..(295): unsure at all n locations
aatagctaatgggcattcgtgtacaataatataagagtaagatgatattttctaataaacatgtgaatntaattaaaatacattaataatatanaaaaattatattatcattcaattacaaaattattatgtataataattttgttgactctaataataattatctctaaattattttaaaaatgattttttattggtgataatgtaaagtttttttaacactaattgtatatgacaaatagatatgaaatatttttaattttttatatttctcaagagaatattaaatctaaat

SEQ ID NO: 150243 - DNA, 377 bp, Glycine max
ggagatgaggaagtgtagaagggagaaactttcttttttattctttgaccacagagtggtacctggagatatgtcgcgggggtcaggagaccttggggacgtcaagtggggtgctattgcccaaaaccaagcttgaccaatcctgacccaacccgggcatagtcggtcagtgagaacctgtgatgtacctaaacatgcgagctcctggcagtcaacagataaaaggaacaaagaccacaaagcaaggaggcttgtggtggctggccagctgtgaattttgtgtgatatatgggttgtggcctctggtaatcgattaccaagggtgggtaatcgattacaaggcttaaaaatgaagacaggaggctaagatggtctct

SEQ ID NO: 150244 - DNA, 422 bp, Glycine max
  unsure (1)..(422): unsure at all n locations
agcttataatacacattgtacggattcattttgcacttttctttctttnccttctctaataatattccaatttccttggggtaacatcatattctttatttattcaacatttttttagaagaatatctcattacagcaagactgcaacaataagctggtaaacggtaacagttcctggtttaaattgtaaaactgtatagtgtgggatatgaagtgttaattaacctaaatattatataatttctagaccaaatcgtggtgggaacccaatccaacatctaaaactaatagggttntaagatccaaggctccaaccaacacttatatggaccagagaaaatngcctagttatntattatgggaagcctggttatttctcatgagccaatcaccaagggactaactctttttattctataaca

SEQ ID NO: 150245 - DNA, 173 bp, Glycine max
  unsure (1)..(173): unsure at all n locations
cacatgggcttttattgggcttgtaacgtcgtcacgggtaagagggctatgaaagaaaagattagagaggcttaaagagtgtttaagggtgtcatacnctaatttcatccggcgaccatccgttgttgggatgcgacccttgtttgaccacttcgagtgatttggcacccatc

SEQ ID NO: 150246 - DNA, 330 bp, Glycine max
  unsure (1)..(330): unsure at all n locations
tggggacatcttgacttgctttcaatcggacattttcatttattccgcctcctcaattgcagaagggaatggcttaccagccccttggcaacgatattctcatgcctctaagtgcagatgtccaaatctttgatgccatattttgacttcatcttctttggaggatggacatgtggaggagtaattgggttcttgaggtgtccataggtagcagntgtccttcgatctgctgcccttcattanaacttcattcttctcatctgtcaccaagcattctgactttgcgaagngtaccatgaatcctttatcacacaactgactgatcctgtc

SEQ ID NO: 150247 - DNA, 426 bp, Glycine max
  unsure (1)..(426): unsure at all n locations
agctntagatccctccaccaaacagattctttctttttctagttacctcatctaaatcccttcaaccttcatattttgactccaatactctagtccacagctccccctggctatgaaataaactccatttccacttacccagcagcgagaggttaaaatagttaatgtcttttattccgagccccccaacttccttgggcaagcatacagtatcccaattaacctaagctattntgacttgatcttggtgaccaccccataaaaatcttctctgaatcctcactagctngtcttgcaccttcttagggaccctgaaaaaagagaaaaaataaatcggaatggacgttagcattgactntatgagagtcactctccccccanatgacaagtgtctttgtttcattttgctactttagctcacactta

SEQ ID NO: 150248 - DNA, 90 bp, Glycine max
  unsure (1)..(90): unsure at all n locations
accagcaggccgcagcttgaggatttcaaacgacaagaacttttttacttttatgtccgannagagcccgcaacatatcgagacgctcta

SEQ ID NO: 150249 - DNA, 257 bp, Glycine max
tgctagagcatcacatccaatttcgagcgtgtcgatatattaagagacttcatcagacattcgagcagaaaggtatggacgactgaatatgctcagagctcccgtattcaatttcgagcgtctcgatatatgacgggactcaatcatacatccgactaaaaagtgatcgccgtataaattttctgagatctacaacattcaatctcgagtgtttcgatatattccgggactcaatcggacatccgaaaaataagtta

SEQ ID NO: 150250 - DNA, 65 bp, Glycine max
  unsure (1)..(65): unsure at all n locations
acctaacggtgttttttttttctttaaaaaccagaanacacaanaccctgaagctaaccgacaag

SEQ ID NO: 150251 - DNA, 171 bp, Glycine max
aaggcctatgtagaaaaaagaaaaggctactcagagaaagaaccaatagaaaatgaaaaagacaaccgagctccaagcacagcaaccgcaaaagaaaagactcaagagcccatatgtcccgcacaaccgcgaacctagcgcatgacgaccagaagccgagaaacccaagcc

SEQ ID NO: 150252 - DNA, 166 bp, Glycine max
  unsure (1)..(166): unsure at all n locations
ccaaaaccctatgcgaaggcangattatttttttttgagaacggaccactatcagctataaaacataaaattaaagagcacagctcagagatactaggttgcctcctaggagcgctcctttaacgtctntagcccgatgcgtggttgtagtcgatgcctggccatc

SEQ ID NO: 150253 - DNA, 345 bp, Glycine max
aggtggcttaatgagcgtccgctaagcgcaacactgctaggctatgcgcgaggaacaatccaaaagacgatgagctatacaggttcgctgagcgcaccgctccaggtcatcaagcgcaccgcttcagctcatccgctaagcgagagaagtgcgctaagccaaaatccagtaatgtgcactaagcgaacgagcacgaacaaggccacctatttaagcctaaaattagagtttgtgaatagagtttggactgcgattcagagctttgcatgtctagggtttctagagagagaaaggtccaagttccagagagttttgagagattttgctgtgtgaagatctgcatag

SEQ ID NO: 150254 - DNA, 407 bp, Glycine max
  unsure (1)..(407): unsure at all n locations
gccaggattttttttccgccattgaggggccactcgagccggcaaggtttntcaaccttatggcgattcttttggaagaatcgtgcccctttttttgcaccttattttgtagttgcatcctatccgagccattataccgacactgcctanacgaaggcanacattaggtcctcccaggaatggactcgggaaggttccaagttagtgtaccangtaacaactaccccaataagactttcttggaaggaatgtatcaacaattcctcatcttttgcgtatgcccccatcttcccgacaatacatcttagatggttcttggngcangtaatccnctggtacttgtcaaagtccaacaccttgaacttgagaggggtgatgatattgggtatggggaacaactcttctag

SEQ ID NO: 150255 - DNA, 108 bp, Glycine max
aaattgcaaggtatgcacacacaatatacaaagctttaataatcgaagaaaataaagcagggcaaatcagtatttaagctcccgcctctcgcccccccaacctcccct

SEQ ID NO: 150256 - DNA, 376 bp, Glycine max
  unsure (1)..(376): unsure at all n locations
acttagaaactaacggtcgatccctgctgataaattaggacctcacttttcactanttccaaagaccttataggcagnaggaattaacagcaaaggataaaatattggatagatgaactaagaatatataacccatttatcattcattttctctcttctttntgaaaaattaaagtatcaatccatggcagcagacaaatagcttatgtgaccttaacctcccctactagaggaaaacttgaaacagtgaaaaagcactcaggtaagcgagaaatctacaaagtaaaaaatgcaatccaatactccatgcacatttaataagataaaaaaaaaagtccaactaaaaagccaatgttgcaagttttaccancttatt

SEQ ID NO: 150257 - DNA, 369 bp, Glycine max
  unsure (1)..(369): unsure at all n locations
agccgggacaagttaaactacatgnccctttgcagcacttggtatggcattgagtgtgaccatcatgacaacatgtctgtggtgtcacttgacatatccaatttgaatgcctcagggtcactttcaccttccatcacaggactcttgagccttgtgagtgtctcactccagggaaatggcttctctggggagtttccaagggacattcacaagctaccaatgctgaggttcctcaacatgtccaacaacatgttcagtggaaacttgagttggaaattctctcagctgaaggaacttgaagtgctggattgctattacacatgcttcaacggctcacttcctgaacgtgtcatccgtctccccagatca

SEQ ID NO: 150258 - DNA, 301 bp, Glycine max
  unsure (1)..(301): unsure at all n locations
acctgcaggcacgcaagcttgagatgaggaagtttgaagggnattttccttcntntatnggagaccacagagnggtactnggagatatgtcgcggnggtcacgagaccttggggacgtcaggtggggtgctattgcccaaaaccaagcttgaccaatcccgacccaacccgggcatagtcggtcagtgagaacctgtgatgtacctaaacaggcgagctcctggcagtcaacagataaaaggaacaaagaccacaatgctaggaggcttgtggtggctggccatctgtgaaacttgattga

SEQ ID NO: 150259 - DNA, 367 bp, Glycine max
  unsure (1)..(367): unsure at all n locations
cctggagtcaccaatggctacccaataaagctccgcgaaattggtcccggcatactcttcctgcgagccctcttgtctcttgtcagggctcttgcngtaaatgcattctcttcccgtaaccccgcgcactccttccgaacgtgtgtagcagccaactngaacttctccttggcgagttttgcctttcctaactcgcttttgagagcttggacttcttcgtcctcttccggtgcttcaaaattctcttcgttgacgacttttaacttggcgagccaatctaaacctcgtatgcgaactttcagccattcgtggtacccaccaatggtacccatacgaatgcctctaagctcttggtctttccttaacg

SEQ ID NO: 150260 - DNA, 145 bp, Glycine max
  unsure (1)..(145): unsure at all n locations
cagctgcagcttcaccttataaagtgaaccagttatctttttatttctcgcccncgcgaaaaattgtatatagaaaatgttaattatttttaaggattccatctgttcaaggttgcattcttgtttngcatataaatgtggcagt

SEQ ID NO: 150261 - DNA, 341 bp, Glycine max
  unsure (1)..(341): unsure at all n locations
aaactaagctcccacataaagaaataacattcaaacagccanatacctttttagaaacaggcaaaggccgaaactctgccaaaacaccacccaaatcacaggttttcttaattaaagaacccaagaaccaatcccttgaatccaattcgttacccgtgggatcgactccaaaatttactggaagtctatagtacataagcctacantttgaccgttgggatctactagtaaacatccagaactcattctgcactactctntccacagccaaccacacacaagcattnttctgcacanagccaaaatcctgctggcacctatttgacagctaaaatctgcat

SEQ ID NO: 150262 - DNA, 281 bp, Glycine max
accgaaaaaaaggcacccatatacaatcaaggcagcttcgttacctagattatttacacgtacttccaaggtgtatttgttacttacatcacacacatttccttggctaaattcacatacatgcatactcaaagcattttggggtaccaaaaatggcacatgtgcacatcttggtatttctaatacctatacatacacaaacttcatgatgaatcttgactatctacacaataaggtgctacatttcatgctcttttcaagtttttgtacctaaagccgca

SEQ ID NO: 150263 - DNA, 379 bp, Glycine max
  unsure (1)..(379): unsure at all n locations
agctntaattgacggatgaaaagatagatgtttcaanctgatntataaactcacgaatatgtacattatctagtccgaggtagagctctacttttttaatgcaacaacttgcataagcatcacaatagagtcttgttaggtggtttttgcatggtcaaatgaaaccacaagtttcaaaataataggactggcgtccaagtcatcttccataggactagtgcttatccaagcaattctaatctaaagactcaggttttggaataatgatttctcacatgtttgtacttgactaataaagaacaatgaacagttaaattaattaattaaagaactaatgtaagaacaatacgtgtgtataagagaatatgtgtagaacaat

SEQ ID NO: 150264 - DNA, 349 bp, Glycine max
atgctatatgtagcataatcattgatcttgtcaagtttgatgagttggaaaatgaggccgcaattatattgtgccagctggagatgtattttccccctattttctttgacatcatgattcacttgattgtgcatctggtcagagaaatcaaatgttgtggtcttgtttatctacggtggatgtacccgattgagcgatatatgaagatcttaaaagggtatacaaagaatctatattgtccagaagcatctattgttgaaaggtacattgcagaataaaccattgaatcttgttcagaatacttagagaatgctaaacctgttggccttcctgagtctcggcatgatga

SEQ ID NO: 150265 - DNA, 410 bp, Glycine max
aaaccacaaagacgcggagagccatgaaagaagcagagcaaccagcgcacaggaacgacaagaaacaatatgtccaactatttcaatatgcacatgaattgttgaggagcaattctggatcaacagttaagatcaacacagtgccaagtccagaaggtccaccacaattacagaggctatatatttgtcttgctggctataagaaggggtttgttgctggatgtagaccattcataggtctagatggatgtttcctacagagtgcatgtggaggaaacttgctctctgctgttgggcttgatggcaataaccacatcttatgtatcgcttatgctgttgtggacattgagaacaagacaattgcgaatggttttaactctgttgcatgaagatctcggggattacataca

SEQ ID NO: 150266 - DNA, 419 bp, Glycine max
  unsure (1)..(419): unsure at all n locations
gaatgttgtgtgtcgcaacccacttttttttttatatggaacgcggngctcaggggngcatcttccaagggaggaaggcacgcggagncgccaccaacgttnatttgaggaaaacgtcggataaaccggaaaggtgtagtctacgaactttaatcgtgaaaggtttgggagttgtttttacacacggagaaggtattagcaccctacgagtccgtcacaagggacggcagccttcaatcaagtgtgcaaatatgacttcaaaattatgtatttttcccttttttatgttcttttgcttattatgggtctttctgtaattttttttatcttctgtggtcgataacggttcttctctcgctcttatatatcctcaattgtgatgaggaaatcagacctacgtcagtcttttacaactacac

SEQ ID NO: 150267 - DNA, 325 bp, Glycine max
  unsure (1)..(325): unsure at all n locations
agctggcacatatattgaggacttgggcaaatanatattatcaaccacaatagtacaataaaagatgtcatatgttaactaagcacactcaatagtcaaagaaaacatgaaaagatgtagaatatagtacaaaatgtgaatatatctttctttctctcaacccttccctggttttctttcaaattaaggcttaaatccattatctacaaaggaaaatagcagtttcactgcatgcctaatttaaggggtagaaaagccttaccatacaaaaacagcttatcaggcaccagctaacttaggtgtctcccgcaccacgtccacatcg

SEQ ID NO: 150268 - DNA, 242 bp, Glycine max
  unsure (1)..(242): unsure at all n locations
taccgcgctcatcttatcctggcnctttttatttttcgcagccggngaaaacgccaagggaaaactaaaggctccttccactaggnccagagctaggaggngacctgaggcttctactacatgttnaaattccaatttgaaattcacaccttcatctgcacactctcatcttcctcctctgcttctaccacatttcttctcacagtttgttgaacggtgcgtggtcaacacggctacaatgt

SEQ ID NO: 150269 - DNA, 372 bp, Glycine max
acctggaagtgcgagagcgtttgtaatgagaatccacgggttaatgtttgggaaagcgaagcgttgttgtgattaggaggttcctggagtggagaacaaacaatattcacagtctgacatggagagagagggagaatggagaatataagattaccaggactcgaaggaaaagggttcttgcgcgactccacattttctatttctcttaggtgacgagaaagattatattaatatgtagagattatcgcggttggccaactgcttcttcgtcaatctacagcatcagcatgtgtgcgcactatataccaacattattcatttactccccttgttagaagcacacagacatgcctcaatatgctcttatttcta

SEQ ID NO: 150270 - DNA, 251 bp, Glycine max
atggcatccaaatcagactcacatctgaatgggatagatcgtagactctttacatcttgttcttcacataacatgcagaaaatggtttcaaacatggttcctagtgtcaaatctaagtggccaagtgcaagagaattgaatcttttaaagcgtaaagcataaataaactctaacgaccacacaaaaagctggtgtgaagatggaagcacagaggtatcacgtggtcaaaatgtgacttcgaaaggcacatg

SEQ ID NO: 150271 - DNA, 132 bp, Glycine max
  unsure (1)..(132): unsure at all n locations
accttagagcgacctgcaggctgcagcttgcactatcctttgtgatcttatcactattagnaaaaagttcctaagatcttttgacaacatttaaaaaatgttgccaaatatgaataaatggttctaatgtgt

SEQ ID NO: 150272 - DNA, 342 bp, Glycine max
  unsure (1)..(342): unsure at all n locations
gagcaagtgtgagatgttgagaataggaggaggaaatccccttcttgtgtaagaaactatcattctctgcttttaatctcctttattgctagggtttcttttgtatggctgactaaacaccctagttggggatttctaatgaacaactaatgtaaatacctaatatctaattgattatgttttctgtgttcaatgcttccttcaatgcttgatgtttgcatgcttttggtctgatcacccacttgtgtgcacagttaggtgactttagcattangaaatgtacttgtgccttanaacttgattgaagtaggatcgaaacttaatcttacatganggacctgc

SEQ ID NO: 150273 - DNA, 451 bp, Glycine max
  unsure (1)..(451): unsure at all n locations
agcttggnnncgggctttagtactttacttttattnccccaaggncgactgacccccgcgacatatcttcaggtaccactctgtgggcaacaataaaagcaggaagattcacccttcaacacttcctcatctcaagcttgtagaattatggggtacccatcacatgtggtactacgtggcggacgggcgatggtgcacaacaagctttccacatacacaatgcgcgcataaacccaccatcccctgttgcccaccttcatctgagctcacgtactcccacgtagcccatatcctcgtttctctcaacaccgggtccccatcaatcctctcaagcttccacaacattcaagcaaaacaacattcaaacagcacatgctatcacagccaagcataacagagcaaatgcagaaaactctgctcacacatcaaccaaatcacagctttctactta

SEQ ID NO: 150274 - DNA, 405 bp, Glycine max
  unsure (1)..(405): unsure at all n locations
tcgacaagcatggacaaaaagttatttttttttgatgntgacgaggaaccgngggggagctcactataggnaaggggagcccattataaaatctaccattttaacaccatagttaggattaaggaacctagctatgaggatatctgcctgtccttgtgcatgctgatttttcttcaaagaaaattacgttttaactaatgggatgcgatatatatattgtgatgaatgatattgttttggctgtttgaaggctgtgcgtgaggaaatgatattgttgtgtttgtttgaattgttgttgatgttgctattgaggattttaattgatatgtgatgataatgatgattatgatgatattgatttgagatgacattgctaataaagaccatgtcaacatgaattgttat

SEQ ID NO: 150275 - DNA, 140 bp, Glycine max
  unsure (1)..(140): unsure at all n locations
acccgcagctgcagcttgaagtccaattatnctaattttgttctttttttgtgaatcactagaatcggctaatgtgagggactcactgatcgcacgagacacataggaaattcgggatattaggtttccatccggcatgc

SEQ ID NO: 150276 - DNA, 465 bp, Glycine max
  unsure (1)..(465): unsure at all n locations
acctgcggcatgcaagcttctcaggagggagctaganttttatgggngtgttttnctaaacncnagctgctcaaggaagntttttcaaagaagcttctcaacgaagttttcttaagaaagcttctcaaggaagtttccttaagaaagcttctcaaggaagctacctagtctataaatagaagcatgtgtaacacttgttgtaactttgatgaatgaaagtcttatgagatacacttcaaatttccacttctctccctcttttattccttcaatttcgtgctccccccttctctctttcttttgccccattaaagcatcctcttcaagcttcttatccaaggcaattcttggtggtgaagctccttcttccttggcttattccctagtggatggtgcctncnctctcctcttctcttttgctttcgctgcatctcatgggaaaaatcaccatgaaggacctcattg

SEQ ID NO: 150277 - DNA, 196 bp, Glycine max
  unsure (1)..(196): unsure at all n locations
catatcaactagatcttgacgggtattcaagccatccttcgtcttgccttgaatgttaaggagcatcccaatcacactgtcacanaacattttctccacatgcataacatcaatacaatgtttaatgtcaagatcacaccagtacggaagatcaaagaaaatggacctcttcttccatatgcaactctgactttta

SEQ ID NO: 150278 - DNA, 310 bp, Glycine max
  unsure (1)..(310): unsure at all n locations
caagcttgacaacaactgataagaaccaaactagtactttttgtttttagtcatcaacaaagaagaatcggatgtattattcagtaggctnttactctgatcaaggtgatatagaagaagatgaaatacaatgtgttagtccacagggtattcaagatagccaaaagttctccccgattccaaccttaattacattccaacctcatcctttccctcctactcctatttaacctcccgctcccattctaactactccaaaccaatactgaccaatcaaattcattcaatcagagatggatatgatcctctg

SEQ ID NO: 150279 - DNA, 456 bp, Glycine max
  unsure (1)..(456): unsure at all n locations
agcaccgcagctgcagctgtatcaagaaatatggtatttttttccattattattccanagaggccatggnggagggaggaatgaanatgatgggtaattctagcccacttcggagactcgagttagttgggtagggtcaagaaagaaattctgagagagaaagaatgaagatgataacgaggaatgaagacgaagatgattggtttcggaacatgcatatttatactgaaacagaaacaaatttcttgtgattcagcatccaatccattcttttcttttctgggagttggaagatgcagtcacacatgccggaaatggaattactatcactattcttaaaccagtagtgtaccatttcattacaatntctggcatctatatacacacgcctaacccacctttgcccatacccttttcatgtttgaagagggaacataccaagctatgctgagttgg

SEQ ID NO: 150280 - DNA, 351 bp, Glycine max
  unsure (1)..(351): unsure at all n locations
gacaagcccgnngacacgcggagaagnacataancnnccgcgctcagaggagcngncatacngactnnngagncacgctgacaggcagaaaacccgaggggatccgcaaaacacccctgctatctggaaaacgaaaagctcgatagcacgcagagaaaaacgtcgtctcatgcgcccttcgtcattcgcggccgacaagcccgctgacacgcggagaaatacataatcttccgcgctcacaagatatgtcatactgacttttgagtcacgctgacgggcggaaatacccgaggggtatcccgataaaccttctcgctatctggaaaacgaaaagcctgatagcacgcagag

SEQ ID NO: 150281 - DNA, 209 bp, Glycine max
catacaaacaaacacaccgacggattcgcaatggaaatcataaccccacatacatagcacacagaacaacaacgaaccccataacgctggataacataaccacacacacaggaggtcagggagaagaagaacccacaatatacggaggacctcgatacacacaaattgacccccattaccggatcacgttctgaggaacaaccacgcac

SEQ ID NO: 150282 - DNA, 296 bp, Glycine max
ctagtgtatgtagatgacatcatcctgccaggaccaaattgtgcctctatgcaagctattcatacccaattgcaatctatgtttcaattgaagatccttggcactttgaaatattttcttggcttagaaatagctaaatccaacagtggtatctcactctcccagagaaaatacactctatctcttttagaagatgcatgtttcttggcatgcaaacctttcaatgaatcccaacctgaagctcaatcttcatgatagagacttactacctgatccctcagtgtataaaaggttaa

SEQ ID NO: 150283 - DNA, 174 bp, Glycine max
agtcagtagacgtatgccgcaccttaacaaaccagaattcttctgcgcaaagtttcaattcccttcgccgtgcttcttcacgtactccagtaggatcgcgttctcttctggggtccatggccccttccttacgccatcattcacctcaccctcttctttcgctgatgtatcatc

SEQ ID NO: 150284 - DNA, 313 bp, Glycine max
  unsure (1)..(313): unsure at all n locations
atcacaaattatgtctcatgtgccnttaatttntattataattattatattttttattaatgatgtttttttacaatgataataatgagatactaatattaaaatatgataaagtatagttgacaaatagtcatacctgtgaagcatgtgaataatgattcaatttctaatatatgtaaatggaataacatctattagaaaatgctcatttcttatataaatgttaatatttcaaataattgatatataagtcttaacacaaaaaatgctattaaccaaaagataccctaaatcgtaaaagaaacaaaatctc

SEQ ID NO: 150285 - DNA, 378 bp, Glycine max
  unsure (1)..(378): unsure at all n locations
agaaactaagcttcttacttcaaagcttaaagctcgngtagaatangtgncttgatagaccattagactctttgaattggtcgtggtggcgaatatttctcacaagaatttgaagcgtattgtgaacatcatggcattcgaagagatcttacagcaacatatacaccacaacaaaatggtgtatcggagaggaaaaacagaactatccttaacatggtgagaagtttgttaacaagaggaagattaccaaaaaccttttggccagaagcagttaattggagcattcatgtgctcaatagaagcccaactttntctgttcaaaacatgacaccgaaagaggcttggagtgagagacaaccatctgtgggtcatatcaaa

SEQ ID NO: 150286 - DNA, 197 bp, Glycine max
aggaacatacctataccaagggctggtgcccaaatcaccacttgtcacatgggacacattactgaaaagaccgctcatatgtatctcttaccagtaacctagctaggagatgtattctacaattgacagcctgagaaaatggctgcttccacaacaacaactctttttttgagaagataaaacagaccgggatgata

SEQ ID NO: 150287 - DNA, 382 bp, Glycine max
  unsure (1)..(382): unsure at all n locations
tgaaggtctaacactgagaatnnggataccctgttttgtgnccatctacctaagattngntggggacttagcatatctcctataataacgtgtcgccttgtggatagcttatctttgaataaaattgcactcgctaataattgattcgcattctacatatagcaatattatgggaaatttgaatcagatttgctttctctctctgtagtccctatcatttaaattgttcccgtgagacaggataagaattgatatacgacgcgtgaaaaataaaaagaaaaaagttaatatgattgtacaatgaaaatgagaaaagcgacgaatgagggaaagtggagacaatcttaactatgtttgagtgaacatttgggtatgtttattt

SEQ ID NO: 150288 - DNA, 376 bp, Glycine max
  unsure (1)..(376): unsure at all n locations
aacttaagtggtctacttctctaaagccattcgacgtgtattctcttgtgcttattttgacacactttgtcacaaaagcctatattggaaaacctttgtaaaaacttttttcactagcattggacgatagtctatntctgttttcatcaaagctattttttctatacattggatgatacattcaaaaccttgttntcagcatatctaattgagataaccatactcttcacgaaaagactttcatctttatctaattcattattcaaccccttgntctagtgtgatattttttattctgattttatctatcctgggcccaacctactattaagcttctcctactttaatggtcctatacaaactttataaatgatgg

SEQ ID NO: 150289 - DNA, 421 bp, Glycine max
  unsure (1)..(421): unsure at all n locations
actcgcttggtatcatacctattggaatttttccattgttgtttctgaataaatcaaaagatgtaactctctaaaaggttttctactttctcaaattggttntaagtttttctaaaagttataactcttctaaatggtcttcttggccagacatgaagagtctataaaagcaaggctttgatttacttttcaagacactttttacacttattcatacaatcctttacaagccttgaatctctttgaacttcttcttcttctttgtaccaaaagctttctgaagttttctggttttccaaaccttgaaaacttgtgctattcatcttttcattctcttctcccttttccaaanagaattcgccaggactaaccgnctgaattctctttgtgctctcttctccttttccaaaaaacaacgact

SEQ ID NO: 150290 - DNA, 395 bp, Glycine max
  unsure (1)..(395): unsure at all n locations
aataaaacatttaaatcgctcatatgacgcaaatttaatattcttttatcactatgatattacctcaaaatatccgttgaattttcattgctgaacattaatcattgtcaaaaaaattgatcggttatttttaatgaaatctcatctttcaatattcttttcattcataattcataaaatttgaatttgaaactctaagtaaaacattgaccgccttcaatgtcaattaacaattctcctatctcaaaattttctttatctttagtttccacgagacattaatctaattgaacttcccaacctcatatcttggtgcccttggtttatcaactnntttttgcccacatttactggaatagtcacgacgtgaataatggccaatgaattgtgtgctt

SEQ ID NO: 150291 - DNA, 400 bp, Glycine max
  unsure (1)..(400): unsure at all n locations
agacctacaaacagaagaggaaaagnagaaaacctagtctcgggccatcgcactcaccgttgcggagactcccttcaccgttgttggcttgttgcagccacacacttcaccgtcgccacggccaccacgcactcgcacggntgcagaagaaacacgcactcagtcactcgcacttccgcttcgcactgtggctgcgggcaccacgcatgcgcaccttgccttcgctttcacaatcccaccgttgcgggatagagtgagggaacaactgattgcaaagcaaggaggaagaaagaataacgaaatgattaggaagcactgcgatgctgacgcgaagtaaggaggaagaaagaaaatgaacanaccaaactcgcgactcgatgagactcgcantctatcctac

SEQ ID NO: 150292 - DNA, 339 bp, Glycine max
  unsure (1)..(339): unsure at all n locations
cctgaggcatgcaagctggattgaacagtgcatnatannatttattggtttattcttgatnncggaattcagtgtttgttgattggtttgaattgatcaattgtttgaattcagtgaattgaaatgcatagatcatatgcctagaatgagcatgcaattattagaagagaaagaacatagaattaggatcatgattgaaaatgttagttggtttgtcaggttgattgtgaaggaacgcattagccgcaaccggtgagagtgtgatctttaattgtgagagaacgactaacattgtggtattgggccctagacatggtttttcacgtatacttgtaagca

SEQ ID NO: 150293 - DNA, 283 bp, Glycine max
  unsure (1)..(283): unsure at all n locations
tcacactattccttaactacctaaagaaccaacttttctttgaacttccaacccttaatgacatggcaccaataaccagggcttcaagggtttttttttttggtatgcattttgcttcagctcatatttccccccttttttttctacgatgataggtattacaaaagaatgtagntctgattctctgtgtgtttgttactcatattcctagaacataatttacccaaaacagtcccccaaatttggaacaaaattgtcttgatccataataatgctctcctat

SEQ ID NO: 150294 - DNA, 321 bp, Glycine max
  unsure (1)..(321): unsure at all n locations
gcattgaccgtatcccggtgagagtgtgatccttaaattttgagagaaatgactatcatttaatactgatttttgcatgaatctttgaagtatggactgaatgcatgaaattgaggatgatgaaggccatgtttgattgggatagccacttagccacgtgtttgaatgatttatcctttgcacctaatttgagctgaatgaattattgattgattgaaccctgagtctatagagtgntatctcttgctaccttgacttangntgtaggagagcatcatncacagaaagtgtggttcacagcacatctgtcccaaatttggg

SEQ ID NO: 150295 - DNA, 238 bp, Glycine max
  unsure (1)..(238): unsure at all n locations
acctgagcactgcagctcccttctttcctataaaggttttgtgtaattattaaaaangnncaaccctcctgggatctgagattcacttaaaattactcaaaaaaattattctcgtgaagaaaatccaagccgaggcgtttccgtaacgcttccgtgacatttccgtgggtgaatttgcgaagatttacaaccgttcttcgtcgttcgtcgttcgtctttcgtcgttcgtcgttcgctc

SEQ ID NO: 150296 - DNA, 329 bp, Glycine max
  unsure (1)..(329): unsure at all n locations
gggaaatatagggggcatgggagctactaagttgttgaatattaaaaatgattgaatcattgaaaaggttttttttttgggaacttatttattaattatatatgttgttgtaggaaattggtgagctaaaattagtatcacatgggagaaagttgcaatcagagattatgctacatgatcaaataaaggatgtggtcaaggggtctagtttattctcattaacttcatgtagttatgagacaatagataagggacttttgtctttgctttttccgagagatggtatagagagataaacactcttcatctgtctgtggcacanatcacta

SEQ ID NO: 150297 - DNA, 387 bp, Glycine max
  unsure (1)..(387): unsure at all n locations
agcttcagnnnnnncatatatataatatatattgntgnatattaatgactcattccaaatcctgtctagggtagctttgctattcttagccggtcccaagcccgaataaaaggatagggttgtgttatgctatcgacagccaacgttaaactttgtcgaatctctatgacatggatcaattacgtaataatgtgaatgctaggtcgttgcccggaagcaacgcgctgtatggctcgagtacagtgtcaaaagagcaagagccgctgcatcgccgcccggatgtagtgaaaagtaagcaagggttcccacattttcgtgaacgggtgtgggtaaagaagctagttcatgacatgaggatcctctctggtacatgagatatatgcacac

SEQ ID NO: 150298 - DNA, 386 bp, Glycine max
  unsure (1)..(386): unsure at all n locations
ctcagctttaagaatagccttgataacactaacattctctatatttttctttcccaaagaagatggngtcttccgcaaactggagaatattcactgggaccttgttcttccctaccataaagctgtgaaataagtttctagacactgcttccctcatcaatcctgttaacccttcagcaaccaagacaaataacaaaggggccaaaggatccccttgtctcaatcctctttgaggcttaaattcttcagttgggcttccatttacgaggatggatattgaggctgatgcaaggcatcctttaacccagcaaatccacttttcatggaaccccattcttctcatcatataaaagaggaattgccaggacacagagtcataagctttt

SEQ ID NO: 150299 - DNA, 365 bp, Glycine max
  unsure (1)..(365): unsure at all n locations
agctatataggnnaangattttatnaataattatgnnaanngaatgaaaaatattgtacaatatactatggcgaatgtccttatttataagtgaatgaaatgtcaataaaaacactaatatttgctcacttgggaaccatgctttccctcccatcttttttcattgcttcgtgcggcaatccacgttcttctcgcaaatcaaaattcaattcccaacaaacaaactttttgacatggtgatctgatatcaataatcaatccacgttcttatgtttatcctagtttttggatagagaaaatgagcaaataatatagagacggacaggaactacaagttaaagagacagataactaaaagaggctaa

SEQ ID NO: 150300 - DNA, 249 bp, Glycine max
  unsure (1)..(249): unsure at all n locations
aactcagctttcatctgctgggagtttaattttttaatgtgaatgaattcacatacatataattatcaacaaaaaaattcaagcagcattaacaacctcacttctctaagagtgtcatagaagccaccaaaaagaataatcttgtgcttgtacaatacctgttaattaaccanaataaagcattagaacaaacaaatatatgatgaagacaaaaaaaactggattaatatgggtatccatatgatgggg

SEQ ID NO: 150301 - DNA, 313 bp, Glycine max
  unsure (1)..(313): unsure at all n locations
ctgcagcttgaacaaatatcgttcttcanttacnngtctttgggcttggcggccacgctcaacaaagtattttcgacacctactgtacgttgatttgaccaacgctgttatgggaatgttgcgacaatccttcaaaaccttattgatacattctgagaggttggttgtcatgtggccataccgacgtccttctctatcataatccatcgtatcatttatcttttaaatgcgaacatatctatgttgtttgtctgtacatcatccaccacattacttctaattactgtctcgaatgtccaacctaactattatt

SEQ ID NO: 150302 - DNA, 349 bp, Glycine max
  unsure (1)..(349): unsure at all n locations
tcacgcggatcaacttgatccgcaagtttcggggtaacatacntgatccanaggaactacacggacaaaaatgctcacggatctactntttcctactgcggcagaaaaaagaacgaagaaatgcagcagaaatgcaacagatcaatactagcctacactacaataccagaaatgcaacagaaaggtgaagcagcagaacgaagaagaagaagaacgcgcttacctcgatgtcgccaacaatggtgagcagtagaacgaagaagaagaacgcgccacaaggtgaagcaccaccaccagtcgaggtcgcgcangaggaggaagaagaagaatcaacccacgccgtcagcag

SEQ ID NO: 150303 - DNA, 284 bp, Glycine max
gaagggaaaggggcagccccttatgcacttctctcctttcgaattgcttaaaaaattgtttcgtgaaaaaatccagccaaggctcttcgtacgtttcgtacgttccggagtgattcggaagtttcaccgtcttcgacgtttattcgtcttcatcgtcttagcttcatgggaagtcctcaaccagctttcgatcttctatgtacccgggggccctatgtgttccgttattctcctttcttgcccctctaccctaatcgcctttctcttattctccgtttttcttt

SEQ ID NO: 150304 - DNA, 338 bp, Glycine max
  unsure (1)..(338): unsure at all n locations
tatcttgaacatcttgaactcattctttgattgacctttgagctttttgtcatcacctttgttatcatcaaaacatctttgaatcaatcttgattcatcatgaagctntgcttctacaagctctactttcctctacttgaatcgccattctgcttctagtcatcacagctatgcactcttccttaggatttttctctgtgtttcctgtgaagctgttggatggtctntcagctaactgctttgcaagttggcccacctggacttccagattcttaattgcagacttggtgctcttttggttagacattgacactngcatgaattaagctagagtctct

SEQ ID NO: 150305 - DNA, 56 bp, Glycine max
  unsure (1)..(56): unsure at all n locations
aaacaagagggggcgcccccccccccgagggacngccaaaaaaaaaagcgaggcca

SEQ ID NO: 150306 - DNA, 58 bp, Glycine max
cacaaaaagcggacaatgcaggtcggctaggccccaccgcgcgagcgcaaccgacggc

SEQ ID NO: 150307 - DNA, 449 bp, Glycine max
  unsure (1)..(449): unsure at all n locations
ttaagtcacctgcggcatgcaagctgatatangctttgtactcttgcttatctaacgnnangtctgggttcttaatttgggttttgttaaattgaaatcaagggaagtctataggtaatgcttttttctagctcgcataaatgacaaatttcgaagacctaacttcaactcttttatgttttgtgttgattgtaactgaagaattctaagaacattaaacatctgattggggattaattgtttgtttcaaccatgacacatgtgtgtttatacctatttgtattttttatcattgcattgtatttaaacaacacaagaggcaagtagcttttgaagaatattagttgaaacttttacaaacaacttgtgggcctatattttcctaacacagaaggcatataaatactcttaccaatattacaataaaacactattcatgtatcgatcta

SEQ ID NO: 150308 - DNA, 398 bp, Glycine max
atcgattaccatatatgtgtaatcgattacacattgcagattttgaattcaaatattaatagctgttgtaaatcatttttggccactggtaatcgattacatcctctggtaatcgattaccagagagtaaatctcttgaaaaagactgtttaacttaaatttcttggccaaaccttttgctacttcaattacgaattcccttcctatttaatatacccttcctaagactctagagactgtcttgatcatccatcttgaatatctttaatttcttatgtgatcctttggcatcatcataacattcagcttgatcctttgtctacacatttctatgtaccacaaaaataatttaactgtaaatactaatcataccttaaattatagagatgactcagatg

SEQ ID NO: 150309 - DNA, 368 bp, Glycine max
  unsure (1)..(368): unsure at all n locations
tgcttgtggagtttctatggaagatggatcttgttgcttattgaggtccttcaatggtgattnttcatcatggagatgcagtggaaggcaaaggagaagaggagaggggaggcaccatccactangaaataagccaaggaagaaggagcttcaccaccaagaattgccttggataagaagcttgaagaggatgctttaatggaggaaaagaaagagagaaggggggagcacgaaattgaaggagtaaaaaagggagagaagtggaactttgaagtgtatctcataaaactttcattcatcaaagttacaacaagtgttatacatgcttctatttatagactangtagcttccttgagaagctttctta

SEQ ID NO: 150310 - DNA, 445 bp, Glycine max
  unsure (1)..(445): unsure at all n locations
agcttgangagctggatatatgatttcgaattatactgngccagntggagatgtattttccccctgctttctttaacatcatgactcacttgattgtgcatctggtcagagaaatcaaatgttgtggtcctgtttatctatggnggatgtacccggttgagcgatacatgaagatcttaaaagggtatacaaagaatctatatcgtctagaagcatctattgttgagaggcacattgcaaaagaagccatctgaatttgttcagaatacattgagaaggctaaacctgctgccctctctgagcattggtatgatgacagagtgatgctaccccctcatcacgacttcataccattcactctctgtgccactcttatcccccccacgcacatgatctctctgattctctaaccttaccacacctctctaagacctctctatccgtt

SEQ ID NO: 150311 - DNA, 396 bp, Glycine max
  unsure (1)..(396): unsure at all n locations
ctaagcttatanaggtgcttggtgcattagtgagcccaaattgatcactagccatncatacaaaccaaacttagtcttgaaagcggttttccactcatcaccctttttcatcctgatttggtgatacccactnttaagatcaatttttgaaaagatattggcaccatgcaactcatcaagcanatcatcaagtctaggaatggggtgcctatactntacagtgatgttgttgatggccctgcaatttgtacacattctccacgtaccatcctttntgngcaccaacaacactggcacaacacatgggcttaggctctcttggacccagcccttcttcaacaattcttttacctgagactctatctccttagtctcctgaggaatagtcctataggt

SEQ ID NO: 150312 - DNA, 253 bp, Glycine max
  unsure (1)..(253): unsure at all n locations
atgaaccctctcacagcagatatttactttttttcgccncacatacatgaacctggcgtacttcctctgtaccctcggcaaaatacgcctctcaaccttggcaacattagaggaagcattctaatcacccataacaacattcccaccattggtgtggatgtctttttctacaccaaacatcgactgacttcatgggccatgtaagtccaagacattctatggctcggagtctccacattagaagaattcacct

SEQ ID NO: 150313 - DNA, 440 bp, Glycine max
  unsure (1)..(440): unsure at all n locations
agcttgtttgacagattgtggttcacaatgagtangctttattgtacgattgattctgggtaaatgaataccagacttagatctggattgcatagggtaggtgtttagtggtctgtgaggagatgtagggttaatagaggaggatgtagcttctgaactgatagctggaacaaaaagtaacagtagcacgaagagactgatccgtgggttcagtactaggggactgaactggactagatgctgaactagaagctggaataggtatgtcagtgtcagactgaactggctgatgattataagaggactgtgcagaaacagatgcagactgtccaacattaggagaattgagatgaccggaaacaaggaggtatgagtctgaggggaattagaactaggatgtgatagatttggatactgagtgattggactggaaggacact

SEQ ID NO: 150314 - DNA, 423 bp, Glycine max
ctccgcaccgacagcgaggagctctctatacgttggctctcatatttatatgcatgccactatatgatcatgttactttgttattagtggtgactgcactggtctgtgtcaaatataagatcaaagcagagaatatccttcttgcatgttacactgacatacatcttttcctttcaaatctctaaagaatttctgaactttatgactctgacttgtgtatatttgagcacatatactacttgactatgatcacctcccctaccaaaaaattatgtgaaacaccacacacactataattctcgagtgtccatgtctccatgaattttgaatagagaacatggcaaccaaatctgtcaaatagacagagttgtcctatactatgctcatgtttctcataacatgagcctccttgctgattcttat

SEQ ID NO: 150315 - DNA, 449 bp, Glycine max
ttaagcaccgccgctgcagcttagaagctgagttctagtctcttttgtagtgcactaaaatcacgagatgctcatgattttcttattctgttcccctatgctatacataaacatatcagggatatttttatgtgtaacgttctagtgttcttctgcttccaaatttaaaagttctttgacaaaaaagactgaaggaatgagtcattagccgaaaatccgatgcttccagggctcagcagcaagtccattggaaaaggatcttgacctgcagatgttggttgctttgtgtcatgaagtgagtttgtgaaacttgctgagttagaataattagtcagtgctgagggccttataggagcaggagctgttacattgctggtgtaggtgtttgtggaagtgatgttagagaatttctgtcatgcatagcttgaggtcctcgtctaatgggcatc

SEQ ID NO: 150316 - DNA, 477 bp, Glycine max
  unsure (1)..(477): unsure at all n locations
tattggtgagtntgttagctntctgttagtaacaggttctcatattattgtaagaaatgcttatgaataaaaagaagaagaagaagcgtttcctctactctctctctatctctcgctctcgtctattctttaaggaggttacttggacctcacaagccaagctataacattggtgttttcattgcacaacaatggtggacgcgactcgttctaatgtttccgcaaatcgcctggaagatgcaattgcgaaactcatagcctcttagctcgccatgaatacgacaattgatgatcttcttcatcaaatgtcacaactcgaagtgaaccagcaaccgccgcatacgccgctgtcttctttagtaggatagacgccgccgtcgtacagtctagtgcatcgaatgaagctcgacgtactgatggttgacggctccgatccaactgtgtggaccttcagatcacataattnttcagtatcac

SEQ ID NO: 150317 - DNA, 451 bp, Glycine max
  unsure (1)..(451): unsure at all n locations
tgccgcatgcaagcttgatctgggatcactttgatctctactgtttataaggaaaaacatnagtcaccacaaaaggaccaatccactttgacctcaacttaccactcatgagtccgagcctagagttatacaataaaactttttgtccaatcacaaagtccttcttagctatcaggctgtcatggaacttcttggtcttctcataggcatttaaacggatctcatctagctcacttagttgcaacttcctttcctctctagcctggtccatagagaagttgcaagtctttactgcccagtaggctttgtgctctatctctacaggaagatggcatgccttgccaaagacaacccgataaagagacatgcctatgggtgctttgtaggcagtcctatgcgcacaaagagcatcatctagcctggagctccaaatccttctgttctgctgcac

SEQ ID NO: 150318 - DNA, 283 bp, Glycine max
gctttagccaatggactaccttgattattgcttgatttctcctttgagcctttgatccctttccttgttatgaagctcactacaagccttaagtgaaaaaccatgatatcaccatatccttaatgaattttggagctttggaattgtattgggaataagtgtgggggggttctttgtttcatgggataacttgcttagttggctatactccatgatgtatattgggccatacttgatgtaccttgtatattggataaatgttggacatgcttaatgaaatgtt

SEQ ID NO: 150319 - DNA, 438 bp, Glycine max
  unsure (1)..(438): unsure at all n locations
gctagcactccgtaaatggncaagtaaataaataaatggatnnnagnaataggagcagccatatctcttatgactcgtgttagcaacgaggtgtcacgtacatggggcctagtttgcagattggatgtttttttggattcctatttgggtttgcggtgaagtgagaaagatttggccgtctctttctttgtatttntttagtgcatgagcccactgagtcagaacttgtcccattaaatgccagttacttttttatagtagcaaaatttgtctttagttccacactgagctgtattaggagattgtgggaggaaaaaaatgagctgtttcttctcacttattttgctgtcagcggttagcatgcaacttctggtgtagaaacttttcataccaagtcagcattttttgattaatatatgactgctttattttctttta

SEQ ID NO: 150320 - DNA, 395 bp, Glycine max
  unsure (1)..(395): unsure at all n locations
tagttgggaatcatctntttctacttggttcatgcctctcttcataatcctcatatctcgtaagttgttataagggttagagcacatatcttcaatcatcttgatggcattagtagggggttttaacatgatgttacccccacaactagcatctaaacttgtcctgttgtgtgaggacactactccaccatagaaaatatgaactangctctgcggagagaaaaccatgatatggacaactttgatcatctcttgcaatatttctcaagcttcaggtagactctcttgttccctttgcacaaagtttccaatgtccttgatatattgattcattttcataagagagaaatacctctttagaaggaactttacactagtccatgtatgatgttgtc

SEQ ID NO: 150321 - DNA, 367 bp, Glycine max
  unsure (1)..(367): unsure at all n locations
agctntatcaaccttgtcggtccactgaatgattcattagctaagagggttgtaaaaggagcggtgatagaggaatagccctgtatgaatcgcccgtagaatccggacaacccgaggaagctgccaagagcccaagtggaggtgggaacaggccaattttgaatagcttcgagttttgccggcacaagtgccacgccctggcaagacacgatatggccgaggtattccacctgagaggttgcaaaagagcattttgaaagcttcagaaaaaattgatgtaggctcatgacttcaaaggcccgacgaaggtggtccaagtgctctgcgaatgttntactataaattagtatatcatcaaagaagatga

SEQ ID NO: 150322 - DNA, 406 bp, Glycine max
  unsure (1)..(406): unsure at all n locations
ctcaagcttaatgaggcaaccaggaaagatncatttcccttgcctttcatggatcttatgctggagcgattagcaggacagtccttctactgtttcttagacgggtattcaggatacaatcagatagcagttgaccctaaggactatgagaagacaacatttacatgcctttttggtgtttttgcctatagaaagatgccatttgggttatgtaatgcacctgccactttccaaaggtgcatgctagccatctttgcggacatcataaagaagtgcatagaagtcttgatggacaatttcttagtgcttggtttatcctttgattgctgcctgacgaatttaaagatggtgctgcgaagatgtgtcgagaccaatctggtactaaactgngagaagtgtacttcat

SEQ ID NO: 150323 - DNA, 441 bp, Glycine max
agcttagggatggaacacttacttgtttgtattaacaaaagcgcaaaacggaatcaaaaaatgcgaaaaaggatgaccctagggctgcaaactcgtcaatcccgtgggtatggcttttgaaaggggggaaaagaagtttttgaatgcaaaaacgtcccccctttcgtcattcttataatttggtgcaggggtggctcgcccaggcgagctaatctgcacattttttttttttttgaggggaacattaaccatgtcccctcccttctcatggattagcatcttgcctaacttgaacttacttaggttagaattaggtgttgattacttatttttactttttaaaacaaacaaatagtaaaagaagctgcaaaatacaaaggatacggggctgccttgcagcgacattctctgcttgtttcgtgcagagaaggggcaacgatc

SEQ ID NO: 150324 - DNA, 470 bp, Glycine max
  unsure (1)..(470): unsure at all n locations
ntctaatgacacanaaacacctcanatggacaattatatcttaagatatgatgtcatcacactgtgaggaaactcattgtgttgacctcaccgttgcactacaatttgtatttacctttatcaactaactttgtgtatcttatgcacatcttgtgcttctctatattagtatacactactaggaaaacatatttgacgatgattcttgtagacattcaacaacggcttcgaactgtctttgaagccaacgttgtgaaaagtcaacactttttacgacggttccttaaccgtcctagaatgagagattcaacatcgattntgtgagaaactatctntanaacattaccattctaagacggaagtgtaactttctaagatgggtattacatgaaaatcattttataatgtatttttttataaaaaaaaataaaaatgtgaggatctagaagatttatgtgaaaccatttaaa

SEQ ID NO: 150325 - DNA, 462 bp, Glycine max
cggatccttaagcaccgcggctgcagctgtcagcatcaggtttggagcatttatcctcttcaagtgtttcttcaaccctctcgcctgaaatacacgagaaaagctacaaattagaatttgaggtcacaacttaagataccatatattcctaacaaatacaccacacaacgaatcattgtaagccagtgttttaaaaactagactgaactggccagtctgacaaattcaaccattaatcatagcattagccaacctagtcagtggtcaggtcatataaactgttaaatccaaaaaatcctagagattgacaatgcagcagccgaacacgacccctagatttacacacacacacacacacacacaccagttgaaccacagttgagtagtatgaaactggtaacagttctcaaagtattaaattgagtagtggaaaaacaaatacaggtaacccaataacaagag

SEQ ID NO: 150326 - DNA, 481 bp, Glycine max
  unsure (1)..(481): unsure at all n locations
ggcanatggttgagtcttgttgcttctacgctgagaagatatctacacaagtttgaacagatccacgtacgccaaaaataattatatagaaagagaaaaaatataatttaaaaaaaaaatagatgtaaggaatgtttgaccggaaaagaaaagaggaataaagataaacgaagagtgccaacgaaatgtctaaaatattgaaatatttaagtctcgctactcaaataaaaaaatttcaacacctttaactgctacaaccacgaaatttaagaattatttttgcagtcataaaataaaatagaaatttaacagaaaattctntgcttgaaaattattaataagaattgatttggcgtatgggagctaatttagttagttcctattaaatcaaagaaacttgaatgactntagtgtgattntttaatgatttaaacggagtcttgaacttttcatgaataaatataggaaaatatacttttaa

SEQ ID NO: 150327 - DNA, 449 bp, Glycine max
  unsure (1)..(449): unsure at all n locations
agccttgcgaaaggcttatcgttggagctgtcccatcaactgtcctaactctttcagactggcgactcctaggctcttgatcttgacttgatagaacctctttttaagcgaaggcgcttgactcaatcccatgttcttactaaagtggaataaaaaccagtgcgaattaagactccgacatctatcataggtgaaatggatgaatgcatgaagaaatgcgtatggcatagatgcatttaacggatacgagatcctgggagattatctctttcttaaatacaacatttgagcagcatagcactcgatgcatgcatttaagaaggcgacacagaccttccatcttctcgtgacaaagtgaggggatcaagacgcaacccgtgcatgatgacatgatgcagatgcganaaaggtggaagggtaacaaggagatgtacataacatggcaatat

SEQ ID NO: 150328 - DNA, 492 bp, Glycine max
  unsure (1)..(492): unsure at all n locations
ntcttgaganaacttccttgagaagcttctntgagaaaacttccttgagaagttagagcttagctacacacacccctctaataactaagctcacctccttgagaagcttctttgaaaagattcctaaagaagctagagcttagctacacacacctctctaatagctaagctcacctccttgagatgagaagctagaacttagctacacaccccctataatagctaagctcacccccatgacaaaatacatgaaaatacaaaaaaagtccctactacaaagactactcaaaatgcctcgaaatacaagactaaaaccctatactactagaatggccaaaatacaaggcctaaacgaagganaaaacctattctaatatttataaagataagcgggctcatacttagcccatggggctcaaatctaccctaaggctcatgagaaccctangggcctccctgggatctctggtcaatctactggagtcttctatc

SEQ ID NO: 150329 - DNA, 438 bp, Glycine max
agctggagctggttcacgcttgctgttgtacaactggtcaggaaatttattctccattcttagtggctttcacacatgaggtatgacttaatttgtttcaggtacttaattatggattaataatcatcaccatattatactcatgattttttttattgatcaaaactcggaaaactggaagtcctctcatttgacaaaaggaactatcatggatccaaattacagcttgcctcccaatattgctctgataactcttgacgtagagcaacttttccaaggatatatatctatagtctatagcactcttgactctttttgtctcaaactaaaatgttttgcatgagttggatggtggaattgtgcttctccgtttggcacatctatacgaggtgagtctattaaaatatttataattctattcgtattcacttcaaatga

SEQ ID NO: 150330 - DNA, 441 bp, Glycine max
  unsure (1)..(441): unsure at all n locations
tgagtctctccccatggatttgttggtatgttangggttttctatagttgttaatntaatgagtttttctctaatttgggtattntgtttgatatgtgagcgtttggatggaaatggtgcgtgtttgttgtttccggggagctagaaggggaaaaagagattattattatttttcgaatgagttaattggaatagtgattgtgtgaattgaaggttgcgtttgcgtttctctgttgttgaaaaccaatgttaatgggttacgatcttaggttctggaatttgggtatgttaatgaatgtgttggggcatacttgtgttcctatttgcttgccttgctctttggtgtgtaaatnntcgatttgatgtcanggaaattgttgatgtgtccttggatngtttgatgtttgatttgtatttttgtttgactcattttattatttt

SEQ ID NO: 150331 - DNA, 147 bp, Glycine max
gaacaaagcgccgctgctcagctccgttgggagattattttggtgtcggacaaaaagacggggttaatatggtccacacaaccttttgtcttggttctccgggatattatgctattgggcctgcagcactaaacaaaaatttccgta

SEQ ID NO: 150332 - DNA, 396 bp, Glycine max
cttaaaactacgcttaaattctgagggccaaaccattttgaattttttccgcccaaaggcttctgggatcagtgaatcacacatctggcagattgagtcctgagatggcaccctttcctcgcagaagattcatgctctacatatcggaaactctccaaaatctatgtttttgcaaccccaactggaacccatgtcttggggtagaaacttagttggacacagctccggagccattttgaacgcacacctccggattaaaatcaaataagtgagtcgatttgacacacctagaacgctgaagttcagattaatcatacaacagcaacaaactggcttctggagaattcaactcccaccttttttttatcacaaaaaatgcaaaacttgctcattttt

SEQ ID NO: 150333 - DNA, 450 bp, Glycine max
  unsure (1)..(450): unsure at all n locations
agcttaacatcagaccacttcaggtgctggttctacttcacatggacttgatggggcctatgcaagttgaaagccttggaggaaagaggtatgcctatgttgttgtggatgatttttccagatttacctgngtcaactttatcagagagaaaacagacacctttgaagtattcaaagagttgagtctaagacttcaaagagaaaaagactgtgtcatcaagagaattaggagtgaccatggcagagagtttgaaaacagcaagtttactgaattctgcacatctgaaggcatcactcatgagttctctgcagccatcacacctcaacaaaatggcatagttgaaaggaaaaacagaactttgcaagaagctgctagggtcatgcttcatgccaaagaacttccctataatctctgggctgaagccatgaacacagcatgctatatccaca

SEQ ID NO: 150334 - DNA, 415 bp, Glycine max
  unsure (1)..(415): unsure at all n locations
ctagcaaaagaccatgttgcccatacttgtggggtcttttgcgttcttgatcattctttgaacganctttcatctcgtgcggtaaatggtgtcgaacaacgtagttcatctagtgagaatcaaaacatcaatgaatgatagtccctggacgaaattagggtctgacactaaacacataaattaaaatttctagtgcaaattcaagttatcaacatacatatagaaataaatttggttcaatctcacataaagactatcaagcaacaagagagatgccccataccttgagaaagccttttacagtcaacaaaaccaatgggtctcactagggctgtttgagagctctagaaatgccatatattacaatgataacactacctcaatgatgggatacacaagatggaagagaaatatg

SEQ ID NO: 150335 - DNA, 446 bp, Glycine max
  unsure (1)..(446): unsure at all n locations
agctttggaaagataggagttgattcttgatatgtctgctgcatgttttttgactggacattaatgcttcgtgcatacctgttttcttcaacattatttataaagttctggtcgtttgtgtatatgaaattctctcgagcacgtttgataacttaaaagttaataagactgtcaatgaagatccatgtgagtttaaaatattttttgcatgcaaattaatttgggtttcctatctggatcttttttataaatctactgctcttggaagatgacttagtttagaggaccaatcaattattaaagagtttcgtgtttttcttaatgacaataaggatgtattgtatgaaacaactacaattaagctttggaaagctaatagttgattcttgatatgtttgctgcatgtnntttggctggacataaattcttggtgcatacctattttc

SEQ ID NO: 150336 - DNA, 341 bp, Glycine max
  unsure (1)..(341): unsure at all n locations
tcggaccttaaaactaagcctgtgggtaaagtctcacgattgtcacgtgctcatgctttatttgttagccgtggctatacgagacatctttccaaacaaagtcaggttagcgataactcgcctgtgctttttcttccatgctatatgtagcaaagtcattgatccagtcaagtttgatgagttggaaaatgaggccgcaattatactgtgccacttggagatgtattttcaccctgctttctttgacatcatgattcacttgattgtgcatctggtcagagaaatcaaatgtngtggtcctgtttatttaccgtggatgtacccggttgagcgatacatga

SEQ ID NO: 150337 - DNA, 442 bp, Glycine max
  unsure (1)..(442): unsure at all n locations
agcttaatgcaggaaacatgctatggctttttttcaaaatttggttttagaattagaaaaacatgaaaattaggatttgcttgtgagagtttttgctcgaatttgggctgccccatgtttgatactttacatagaggtagtgtggaaaacaccttgcaatagtgtgtatacataggtaaatataaggagcatgaaattcctagcaaagtgtgaatgattgtcttcctaaatgaatgtatgatagtgtggaatacctttttgaatgcaaatatgtgcaggatgtaattagctttccaatatgcatataaataaatatgagtgaaacagtaaaaatntgtatggtgtacttcaaatgtatgtaagtagtttgtgatagcacatgtttaggatataaattaggtgtaatagttgacgcaacactttgagcatgaaagtgtgtttt

SEQ ID NO: 150338 - DNA, 450 bp, Glycine max
ttggcgggtgcgaacatgatatattactgttacatcccctgtggctattactactttggctggttgtcgatatctttgaaggcaaacaaagataaattaccaaattatgagtcaagcaaaattctaacaattcttcatcagtcttttaattttaaaaataactaaaataaattactttcttgtaaaattaagaactagttgagaattcttcatccctttcaacttttttgtttggacatgatctcactgctttgtttctcaccacgtgtataatgtgtgctattctagttcagaaattgggattcgtactctatagtcaattttctgtggaataaattagttgggattttctttttttgaagaatatgctattctatcagtttctccttgttagttgttgagcatggcttctttcataaagaagataagatcttgaaagagtactatgtg

SEQ ID NO: 150339 - DNA, 382 bp, Glycine max
agccttgtcctcagatctctcttattgaactagttttataccaaacaacattattgtaacaacatatttaaaaccaaaacttaatccgcagatctctcttgtaagactaagtttcaattctgcttcattcaagttctaaggcagcaatacatttcccaatgctaaaatcacctaaccaggcacacaaatggttgatcagaccaagagcatacaaaatttaagcactgaaagaagcattgaacacaagaaacacaatcaattagatattaaaataattacatcagttgttctttagaaatccccaacaagggtgtttagcaagccattacaaaaaaatccctaacaataatgagattgcaaaacctatgtatctctgcaaaag

SEQ ID NO: 150340 - DNA, 455 bp, Glycine max
  unsure (1)..(455): unsure at all n locations
ctattacacatttaagtgattagtgagatatatgattattttaatatgatataaaatatgcagaagaaaatacttcagtgacaaaatttacaatataattataataggtgataaaatatgcaataaaactaacgtatgtgtattatgaaaatgaaaacaacagtgagataaataagatggtgccatggtgagctgggccaatgaaatgtgaacaaggaaaatggacaacgagaaagaaaaatcgctaaaattcacgaaagagcataattggcaaatgtccatagaccggacatgttgtctccaccaccaaaagtattactgtattatcctccggcatattccaaccacaataatatttccgttttcaatttcatttggccaaataacatcatcataatcataacgatccagagaattaanataaatatcaaagaaccattttttttcttttttta

SEQ ID NO: 150341 - DNA, 438 bp, Glycine max
  unsure (1)..(438): unsure at all n locations
agctngtaatttgtaatagatgctagatagaagtgatttactatatttcttgcgtggaaaccctctgtgaggtgaaaatctatgtccgtgcactttaaaacacaaaaacccctttgttgttgtaagtcaaacaatggttgtcaaggttaaaatccagtagtgttgttggtctaattgaggctaggttgaaagtctaatagaagtattagcaggttgttgaaattcagtggttggttgtgtttgtgaaatctcatcttaaagggcgaggactatgcgtagctcaagcttgggctgaaccagtataaaaatcaatgtgcactcttttttctttcttctatttgcactatttatgaacaaatttgnnttactagtttgttaatctttaaaacagaaaaaactttcacaatacacaaaaaactgaactaagtttatcaaaat

SEQ ID NO: 150342 - DNA, 379 bp, Glycine max
  unsure (1)..(379): unsure at all n locations
tcggaccttaaatctcagctttgcctanaacacattcattccaacatatcaaggctctggttatcgattaccaggcagtgtaatcgattaccagaagacaattttgcaaatctgcttttcgaaagggttttgaaatttgaattttgaaagttgtaatcgattaccattggtgtgtaatcaattaccagtaacgaaactcctaaaattaaatttgaaaaatcatgacccttcaaaatataactatgtaatcgatcatcagaaacttgtaatcgattaccagtgaagaatttcaaaaaaagctttttgaaaagacacatctcttcaaaccattttgaaaaggcacgaagggcctatatatatgtgtgtctgacttcgaaag

SEQ ID NO: 150343 - DNA, 438 bp, Glycine max
  unsure (1)..(438): unsure at all n locations
agcttccatcaagtggtaattagagtactagatcttcaagtaggtgctccttaaacctccattaattntcagctttaccttatcctccattgttgtttcttcatttttctccatgcatctcctcacatgtcttgtgctaaattttgttaacatgattctttataatttcaaccgattaaacttgctatagaagctagatttgattttctatggttcaaatttcttgttcttgttcttgaaccatgaattgtgttgagtttaggttcctttaagttttgtcttgctattttttgtggctgaaacctaaaccataaaattcttacaaaaacattaaagtataagaaaacctcaataatctagagtgacttgttcatctatttgtggttcgtcatagaagtcatgtcttgtcatgaaacttgtcattctttaagttatgtt

SEQ ID NO: 150344 - DNA, 397 bp, Glycine max
gtggagaggaggcttcaatggaggaaaagattttatggtgttaaagagagatgggggagcacgatatcgtaggaagagaaagggagagaagttaaactccgaggtatgtctcacaagactctcattcatcaaagttccaacaagtgttacacatgctgatatggatagactaggtagcttccttgagaagctttcttgagagaacttccttgagaagcttcttggagaaaagaatccttgagaagctagagctgagctgcacacacccctgtcatgactaagctcaactcctggagaagctgtcctatgaagattcctaatgaagctagagctgggctacacatacctcttctatgtctaagctcacctgcttgagatgagaagctggaacttaact

SEQ ID NO: 150345 - DNA, 446 bp, Glycine max
  unsure (1)..(446): unsure at all n locations
agcttctcanaagacttgtgtaattgattataatatagagtcatataacattgaagatgtttcttgccttagaaactatcttcctacttctctatgatgatgcatgatgtacacatagacaaactaaagaaaaaaaacaacaatcaatacaaatgtcactcaataaggagttagggcatgtaaaagtcaaaaaattttcatagcttgatcttctccccctatctctaacatatttgtcttttttttcccaaaatttatgtatcaaaaggaaaaataaaagtaagaaaaactaaatgttgaaattctaaaagatatattagaaagataaattcaaaatataaatatatgagattaatatgccaaaaatttaataacaaaaattaaaataaaaggtaagaagttacttattggcacgataataattgaagacgaaaacaataacgttg

SEQ ID NO: 150346 - DNA, 410 bp, Glycine max
  unsure (1)..(410): unsure at all n locations
ctggaccttgccctacctactttctctaaactaaatgtgttcttgagctntattcctagcacgggcttcatggggattagaggggttatccgggatggtgttggcacattgtagtttggtttctccacttgcatgggacttgaagatcatattatggttgaactactggcagtaaatcatggtctcatatatgcttgggataaggcttgagaaactatatttgtgagactgacaatagtgatattaccactgttagagatagggggagcaacataaagacttagccttgatgtgtgaagaagctttgtcttttacatgcccaactctcttgagtggaatatgtattgagttgtgaattgtgtgtggcatcttagactctatcatttcatatgtgcatcatgcatcatcat

SEQ ID NO: 150347 - DNA, 418 bp, Glycine max
cttgagtcacctgccgctgcagcttgtgaagatgcctgacctttcttttttctctctgtgatgcactgctcagctagttcctgatctgctgggacacctgctataattcttcaggatgcaaggaggaatctcttctgtacatctgtggaggcaatccaaagatttgcttgatggtggcaccggctccagcagcactgacacgtccagggagctctggacatccattatcagcagcgagaacattctgacgtccatgagggacgaactattcctgtgtggtctgctgctcaaacgaatcctgttctgaaaacacacagtggtacatggcattctcataatattgaaacataactggatggttagttgaaatgacttcaatctctaacgattcctttgtgactcattcatatctccctgt

SEQ ID NO: 150348 - DNA, 427 bp, Glycine max
  unsure (1)..(427): unsure at all n locations
tccatcacacataacanggttcaaccgcaatngatacctttctaacctttcgaacaacttcctcacgttgacaatgtgttcctcctcggtcttagaattggcaattatgtcatccacgtagacctcgatctctcagcgcatcatatcgtggaacaaagctaccatagcccgctgataaattgccccggcattcttgagtccaaaggacatcaccttgtaacagaatgttccccacagggtgacgaaggtaatcttttccatatcctccgacgccatctttatctgattgtaactggagaaccccgccatgaatgaaaacaaagcgaaattggccggattaccacgatgatatcgatatgcggaataagacaatctgctttgggactggctcgatcaaatcctgataatcaacacattccacattcca

SEQ ID NO: 150349 - DNA, 452 bp, Glycine max
  unsure (1)..(452): unsure at all n locations
agcttgtagaatggctagacataatttattgtggtgtttggtttggttcaaggataaaagggatgccccacatcatttccatgacacaaatgcaaaaatgatgatttggaaattttatgcaaaactggtcatgcatgcacctacgcggacactcaagtgtcaaacttttatggtcatgtgatgctagggctcaggattcatttcctctattttagtcaacccaatgtttccaaaatatgttcttttatcaatttgtgcattcatccgagtccattttgggtactcgggaaaatttcacagcattcacccttcaggtgtacacacatttttttcaacaactggctatgatcagcgaatgttntttcaaagaagagttggaagtcatctcttttcgaaagcatgtttggttttcagctagacaacttattattcttttctttttcctctctttt

SEQ ID NO: 150350 - DNA, 365 bp, Glycine max
tctcgattcattctatgtacccatagtggtcctcattgtgtttcgtgcatttttattctcgttttgtttacttttttataccccctattgacgtgcttaagccattttacttaagtcgtttctcgcttaacttaaaaataaaataaatttccaccgaacgtttgaattgtattatccattaacttcagttaaaatcaattccgaccgttcggtcgtgccgtaaccacgttggaaataaaaaaaaagaggttaaagaataatataataatcaaaaaaacatcttttagtaaaataaagcggaaaatcaatcggacgtgttctctttggaatttctcattcttaatcgaattgattaataactaaag

SEQ ID NO: 150351 - DNA, 446 bp, Glycine max
  unsure (1)..(446): unsure at all n locations
agctntagataccatatgttgaactatatgaagaaaagacataagttgttgaatntgcatgtttgaataacacaaaatctgatttatataaacttattacaaataaatgcacataaatattagaggatcgagttttgttcttctaattagatatgacttgcctataaatcatatatgatttgcctataaatctctgttaaataaaaacaaaatatttgaatttgattttcaatagagagaaaaatattaaagaaattaatccattttattaagaaaggtttaatagcttcacaagttggttgaacaaaaacttattggaaactagagagtctaattagaaattcaccaaaaatcacacaattgggataaaatgctaattcctggtttgcatanaaatggacatataattacacattgtcacccagaatcaaatcataattgcactt

SEQ ID NO: 150352 - DNA, 247 bp, Glycine max
agatgaattgcagagattgagactcgtgtgtgtgtttactgatgaataaccaaaacagtggtgcttgagtgatacagtgaccgtgagactatggatgatgatccatccttgatatctgtcttactgtttagcatattctagtcgtgtcgctaaataatatggtcataattcttaaaaactgcatgccttgtgagaagcttgtgattgaacattgaatgccactcatgtcatgtgatagaattctttg

SEQ ID NO: 150353 - DNA, 383 bp, Glycine max
  unsure (1)..(383): unsure at all n locations
agcnttaaaaaacaagaaatgatttgttagtctcggattcgaaaacttacccgttgaagaacgaagaacggatgaagaacgatgaagaacggacgaaaaaccttcacggatttgcttacggaaacatctcggaagcgttacggaagcacctcggcttggattttcttcacggaaacaatttttttcacccaaaacagctgaaatacatagccagggggctgcgggatccttagaacagcccccttcagtctatttataggaaaaagggggaggaggttgccgcccagctcgcccaggcgaccttagctcgcccaggcgaccttagctcgcccaggcgagctgggttcctttctccagaagcaacccagcttctaaaatgttct

SEQ ID NO: 150354 - DNA, 123 bp, Glycine max
ataaaagtctggtttgacttacaagcctatttaaaagcttgcttaaagacgtcttcgatcaatctattattttaatgcagaattacaaatgtggtcccccaatttatctccagtttccgattt

SEQ ID NO: 150355 - DNA, 439 bp, Glycine max
  unsure (1)..(439): unsure at all n locations
catgatgaatcaagagtgatncacttatgttttatgatcacaaagatgattaaaaaatatgatgactaaaaactctaggtcaatcaaagaatgagttcaagatgctcaagatataatcaagaacacttcaatattcaagaggaaagttgatttcgagaatctagaatcaagattcaagagatcaaggttcaagactcaagattcaagaatcaagaaatggcttttcaagaatcaagaaaaagcttaatcaagataagtatgaaaaggttntttcaaaaactgagtatcacatggatttttctcaaaacatgtctaccaaagagtttttactctctggtaatcgattactagattatcgtaatcgattaccagtagccaaatgcgattgaaaaagttttccaactgaatttatcacgctccaattcatttcaataagttg

SEQ ID NO: 150356 - DNA, 413 bp, Glycine max
actaagctatcactggttgtctaattagatatggtagcatgtaatttttttatagataaatgaatgacatatagagtaattattatgaaaataaaaaataaataaaactcataattaatcatcgaaaaataagaaattctttgcattctattaatataaattaaatatttatgaaaaatagaaaccaatactttagaaatctagcttattttcacttaaattaatgcaatgtaaatatgtaatgctcattatcttgaacatttaatatacattatagttatttattaaatttaagagaaatatgatgatagtgataaaaagttattagttgttgaaatgatttaaataattatctttgattagattacgggtacggtgtacaagatatgaaatgacacatattatgagaaaag

SEQ ID NO: 150357 - DNA, 415 bp, Glycine max
  unsure (1)..(415): unsure at all n locations
agcttcnntttgtagttgtgcagtctccttgtattattcgggtcttatcggagatttattaaaggatacgcgaagatggcgtctccacttactcaattactctgtaagggtcactttcggtggtcagaagcagccaccatggccttcaactcattaaaagaggcaagttccacagcgcccgtattagccctccctaacttttccattcccttcgtactaaagaccgatgcgtccggttccggtgtaggggccgtcctctcacaaaaagaacacccgatagcattatataacaaagaattttgtccaaagcttcgtgcctcctccacttatatccatgagcttgcggccataaccatggcggttaagaaatggcgccattacttgttaggtcaccctttcttgatcttactgatca

SEQ ID NO: 150358 - DNA, 429 bp, Glycine max
  unsure (1)..(429): unsure at all n locations
ctaaatattaataagaggtttaataaataaaagtattatgaatattggtatgtgagaaaataatttcttaaaaaaatttagtaaacagttagttgatggttaaattaattaggagagtgcaaaaaacattaattaaatagataattagagaaatattaaatttaatatttaaatgagtgtaaaatttaatcaattatttggataataattagattaattaattatatttttttctgttgggtttttaaaatccgtaagcctatatatatttatcttgagtattattattgtccctatataaatngttttcggcccctacttctaggtgaaaaccccattatatccctttttaaaattctcaatccccccttcttttctcttccttcttccccgtgccacccctcctacctcttctctattccccaactc

SEQ ID NO: 150359 - DNA, 378 bp, Glycine max
tagcgagcaattatacaatcagtaacacaatcatccatgttacaggtacaatgcagttatgcagagttggcaactcgcattcaactgggagcaaggattgaacactcatgttcaagatgtacgtgctcgcatcttgacagatatggcttgggttacaatgaaaacatacgttgatatggatacaggaccatttaatgtgaccaatatttatgagttccataatggacggtggtatatggctcatcatcacaattgtgtgatgaatggggatgtggacctgatgattgtgcatggatcatattgagagatgatgacacagtgttatgtctgaaactggttacagaaggtggttttatatgcagaagcaatatgcttgta

SEQ ID NO: 150360 - DNA, 346 bp, Glycine max
acaaatcatagcgacgacccttctattaattgatctcacatctcactgtcctggcgcgccacagacttatgctcatgaatgaatgactcgcgttaatcattgccgcccatatggtctgctctcatcgacttcccatatgagtaattttctgccggtagcataaacatatacccgtaatgagagacaactccctccatcttgaatcacacacgataataactcccctcgaacaaaccaaaatctaataccatcgtggggaaatgcaaacacgaaccgcctatcagaaactcaatataggcactgagcggaactgaaaagtcatatacagtagagagtacaccaacat

SEQ ID NO: 150361 - DNA, 185 bp, Glycine max
agcttcttccttcttcaaagattcaccattatattatcttaatttggcaacaagaaattgagtctaataatcttcttacgggggggggtggtgctctctcctcatccctcttaacccaatattctataattaattcaactattatcctcataaaatcttatctaatcctctcctctcacatacaa

SEQ ID NO: 150362 - DNA, 461 bp, Glycine max
  unsure (1)..(461): unsure at all n locations
tggcaaatatttggctgtagaagacatcaatagattatacaaagtcattgaatagtttggtaatttatttgtatccatcatntgaatagtttgcatttgaaatcacatacaagaccaacattgaaaagttggtatatatagttacattgaatagtacattgaagagtaaacaatgatattttctattactaataaatatgtaaatatatatttcattgctaaaaaatatatgtactaataaatatgaattaaagatttaagagaggtgtaagaaaagaaaagtggagtagtaaaaagagcaaaaacgcgtgtagaaaagaaagggagggagagatatgtaattcacaacaggaaaagaaaataaaggagatatatgagagatgagatatggagaatagaagaaagagagatgagagtngagattcatactacttagagcattagaaaagacttaattttta

SEQ ID NO: 150363 - DNA, 447 bp, Glycine max
agcttgtggccaacccctttcaattaagttcttgtatttttcactctactccaagcagtattgatgtgccatcattttcttctattttctaaaccctttttgctccattttaattattgattggtcttaattgtcaattaattaggcagttttattatttgggctcatttagctaattggatgtttctaatctaatttcacgaattaatgaaacattgggcttaatccggattttggttgtggacttgaagagggcaaataaagcatcgcttaccttagttaatttctaacttggaaatttctcaattttattttatgttgatcaatgactatttcgttttgggccaaaagtattgaatagggcccattgactttgaatgactcattttaaatagttgccttgggattcgtgtacggcatctgatctgctatgctattttattattc

SEQ ID NO: 150364 - DNA, 126 bp, Glycine max
ctttgtcgcttcttgcgcttagtgcgtccacgttcgcttttcgtctattcactaactctcaatcaacaagacattactcactgagcgtgccttcataaactaagaagcccaaaagtctttaaagct

SEQ ID NO: 150365 - DNA, 436 bp, Glycine max
  unsure (1)..(436): unsure at all n locations
agcttgtgtaatcgattacactaatttttttatcgattaccagtgattgtttctgaataaaatcaaaaaatgtaactcttcaaatggtttttgactttatctaattggttttaagttnttctaaaagttataactcttctaaatggttgtcttgaccagacatgatgagtctataaaagcaaggctcgttttgcatttttcaatgatctaaaatacttttccaatcaatctattactattctttacaagccttgaatctctttgaacttcttcttcttcttcttcttcttcttctttgtgccaaaagctttccaaagtttttctggttttctaaaccttgaaaacttgtgctattcatcatttcattcccttctccctgtgccaaaaagaattcgccaaggactaaccacctgaattcttttagagtctctcttct

SEQ ID NO: 150366 - DNA, 390 bp, Glycine max
  unsure (1)..(390): unsure at all n locations
cttgacttgatntagacatgattgatacatgatttgtgttttgtaggatttgatttgggcaagattggatgaggggaagtgtggttttcgaaatctgcactttgtgcagatttttgctgtgaaattgtgcagcaggattttgcacaagtgcagaaaaatgctatgtatttgctggttgtggaaagagtaatgtagaatgagttctggatgttttctagtagatcccaacggtcaaaatgtaggcttatgtactagatacttccagagatgaaaagccttaagataccccttttacttgcatgtagtggctatgagacgaatagtgttgcggcatagttagattcttgtgaaagagtctacccctttcttttctttcttgtagatcgtgat

SEQ ID NO: 150367 - DNA, 321 bp, Glycine max
  unsure (1)..(321): unsure at all n locations
agctntctacgtatcaagtactcaagtattttaataaaaacatagctcgattgagaaatacatattgcacaatgaaaggaaattggattaaataccatttacctctctaattcattgatatcatcttgaagttctgagtgtttagtatcacgattggattgaaagtaattttcctatttttcaagatcctaaaccaagagtgaataacacaagccacaaatctacaaacgaaaatgacaatcaccaaaattcccactcaatatggaagaccaccgatcaagaacacgaagaggggctttaagaaacggaatgaaactaatc

SEQ ID NO: 150368 - DNA, 455 bp, Glycine max
  unsure (1)..(455): unsure at all n locations
ntcacctttggtcctcctcatagttgttgcatgagaaaacatgctctattttcatctcccattccaagtaggcctccggatcattctttcctttaaatggaggaatgttgagtttaataccatcaattcggttttgtctaggaacaccattattccctcttctcctcctttcttcttcattatgatctctattctccatttgatccaacctctcatggagcgcatcatctcgttgtttcattaacctctccaaatgttgcatcaaagcttgcatttggaattgcgaaagccccactccatcattaggattagtacctgacatctcaaacaaacaaatcaaacgtaacaagacaattatagttgttgtttgaatacctcacccactcaagtgtatcacacaattatggcttttctctaatgaaacactctttgcctttaccactctaattcccctg

SEQ ID NO: 150369 - DNA, 394 bp, Glycine max
  unsure (1)..(394): unsure at all n locations
agcttgattttctggtcaattnngttatggtatgcatagaatgcaatgggatgagaatatgtagcaacccaaaacaatgtcatgatgtagttagcatgcacttcagcctcaaataagtaggataaattgaataggaatggaaataaggccttaccttgagcttttcttcaccaaggaatgacttcaagctctgaaaagagggcaattcacaactagtcatgatatattagagagaaaaaaatattacattgctaaactagtgagagagcgtgtgtaggggatgacttgtgctaaagaaaaagtttatcagttcaactttcaataggtgttaatggctataattccctttacatactttcaagcgaatcctgcctanggtagctntgctattctt

SEQ ID NO: 150370 - DNA, 440 bp, Glycine max
  unsure (1)..(440): unsure at all n locations
tcgcctcttaaaggaggggttgtcccatccataatnttctgttatccacctctgtgttgttccaactagcttatcaaaataaactgtttttaccttattttcagcttctccctttttaaataactttatacaaacatctaaaattttataatataagtgtttctataaaaaaacttaaccaaactcacccataatccattatgctaattacataatcgattatttgtcccaacccaagaacaactttttcacgagagtcctgagggaatggaaggatggactgttttggaatgataaatattcactggttttctttgcatttcatgtggctctcacctagtgttgtcagactcatcaatcatcaatcgggttgggtagaagttattaagtcaccattaactcgcatgactcaatttatattaatttttatctttataata

SEQ ID NO: 150371 - DNA, 374 bp, Glycine max
  unsure (1)..(374): unsure at all n locations
agcttagttgagtagcaaaatccactgctttactttgtgtcttatgttgnagggacaaacataaagatacaagagatgatcagaaacaaaaataaaaattggactttgtctttgataaaaacagcttcactgtttcatccgttgttctggacacaacatgttggtgtgacagcaaatagaagtggttaatatcagttgaattgcaaaacttggttgctagcacattttggacaaaggttgtgagtacaagagttcatcattgatgccttatttattgccgagtgcaagccgcatgtattccagatgatggttggttgttaatgctaattagttaaggaccaaatggcttttgcaaaaggtatccatccatggac

SEQ ID NO: 150372 - DNA, 437 bp, Glycine max
ctgtataggcgagtgcaagaatgccatatgctctccatgttgcttacttgtcagccattagaagttatcccagatcattcactcttggcttctaaccaatgaaagatgtttcaacaatctcccaagttgattgatttgttgaagaccagcattggtgaggtcaaatgtaattcttggttcaatcagtggtgcgtcttgaagaggtggatgatgttgaagccaatgaacagatggaagcgatgtctagtttctacatgatgctcgcaaccactcaatcctcctcctctctctcttttttgtcatatacaagcaattttgtatttggtgacacacaaacatcattattcgatcttagataatgtctttattacttggtaaataataatgttatttttatctatcataaaaatattttgcttgatctctcataattactg

SEQ ID NO: 150373 - DNA, 442 bp, Glycine max
  unsure (1)..(442): unsure at all n locations
agcttgctgccacggagttttccgacttgttcttgtgtggtggaacaagctacaaaaggagagagcaagaaatgaagagccaatggttgatacatggacggagatgaaaaagatcatgaggaagcggtatgtgccggctagttactcaagggacttgaaattcaagctccaaaaactaacccaaggcaacaagggggttgaagagtatttcaaggaaatggatgtgctcatgattcaagcaaatattgaagaagatgaggaggtaactatggctcgatttcttaatggtttgactaatgatatccgtgatattgttgagctgcaggagtttgttgaaatggatgatttgcttcacanagcaatccaagtagagcaacaattaataaggataggagtggctaagaggagttttaccaactttggttcctctagttggaaagac

SEQ ID NO: 150374 - DNA, 345 bp, Glycine max
  unsure (1)..(345): unsure at all n locations
tgtacctttgaacacttgcttatcttatccagtgctttctttttctaaactaagtgcttttaaactatttgcataactnttgttgattttgttacttatggtgtgtgtcaagtatttgtgttccattccttgtttagttatgatgcattttttgatgatactcaagtcatgtgtaacttttgaacatctacctagcccttgactggagatatctttcaagcatgcttttgatcatacaaaacttttcatttctattgcactttgatatgggaaaagcaagattntcctttcatgattctagctagtaaactctattctagtagtcctacttctattgtggctgat

SEQ ID NO: 150375 - DNA, 444 bp, Glycine max
agcttcaagagaagaagaaaatagtcttgagcatatgaagaggcttagaaaactcacctaaacctccaagaacttaagctctcaatgatggaggaagagaagaagaagaaaatgcaaagaactttcggtctctttctctctcattagacaaccaacacacaacaagaggggggagggggcgaggggtgcttctcttttataaagggaatggttaggttaagtgggagccccacatgtgggttcccataggttctttctttttttttcctattcaaactaactacacttaaggacttaagctctcaattagtctttaattaatactaatttctaaattaattctagagtgataagttcattcattattctcttctattaatcttgaataaaaataattaatgagaatgagagattaattatccctttccttaatagattgaacta

SEQ ID NO: 150376 - DNA, 371 bp, Glycine max
  unsure (1)..(371): unsure at all n locations
ggaccttaatctagcttctcagtggaatcgagccaagacttcagttgtgctccttaaacctccattaattgtnttgctttaccttctcatccattgatgtttcttcatttatttctccatgtatctcctcacatgtcttgtgataaatgttgttaacatgattctttagagtttccaccgattaaacttgctatagaagctagatctaattttctatggttcaaatttcttgttcttgttcttgaacaatgaattgtgttgagtgtacgttccctttgagtttgcttgctactttttgtgtctgaaacctacaccatanaattcttacaacagtattaaagtagaagaaaacctcaaaaatctagagtgac

SEQ ID NO: 150377 - DNA, 441 bp, Glycine max
  unsure (1)..(441): unsure at all n locations
agcttgtaaaattacaaacggatccatgcatgatctaatgggtggcgagctgaagtatgaggcaaaggtggatgatatgaagcgtctaagtaaagctatggtcggcgttgtgatacatccgggccaatcttatcttatacaagaacattttgctatgcaaggggtgtctacaattttagttactcccttaggagctaacatggttctcttagaaggtagtgtagatgacgaggacttccaaggctacatagaggaagcgaaagggtggctacaacaatggttcaaagaaatcaagccgtggaatgcgtcgatcgtagacgaggagagattggtttgggtgagatgttacggngttccaagccacgtatgggactccgatttcttctcttttttaacgaaggatattggcgtttttgtacattctgatgacaacaccatgaa

SEQ ID NO: 150378 - DNA, 478 bp, Glycine max
  unsure (1)..(478): unsure at all n locations
ctcagctntatggtgatccctacanatttctctaattcctgcctatgatgggggttccaaagtcgacttagaatctatagaatttaagataattnttctaattacaatcttagaatttaaaaaaaattaaaaaaacctacagtaatatttgtttatcaaataaaaactcaccataatggactatagaatttacaaatcatatttgataaaaatcgtctctcttcccaacatgatgatagtttgtgactcaataaaaataattttaaattcatgattgatttggtgaaaaaaatcttaatacttataagaaagtcacattntcccnctaattatgccatgcaataatattaaaaaattcaaatgagattttagattaaattatatatgaagaatatttgacttctgatgatacgcgtatctaattatttacttaccagaacttctaatatcaaaatagataatattctataaaaaaata

SEQ ID NO: 150379 - DNA, 443 bp, Glycine max
  unsure (1)..(443): unsure at all n locations
agctntatgacaataatgtgatataacatgtgatactcatcaaatattaaatcattactgaaagtatctaatagacatgatcgtttaaattaataaataagattaatgtatcatatttttttataaatttaaaaacaaaattttaatttttcatcttttaataatctaacttgtcaccaactaacaaattcaaagaaaacaataaatatttacctattaacagaccttcaaagaaaacaataaatatttacctattaacagacttacgttgcagtgtcggttgcacccttcattttctaaaattcacaaataaaagtttttttaataaaaaaaattgtaaataaaatcttacaatntattatttttgaattcactcattgtaatttttattaaatggcctgattaatcgggggtctgttagaattagaagagggaatgaagtg

SEQ ID NO: 150380 - DNA, 298 bp, Glycine max
  unsure (1)..(298): unsure at all n locations
ggacctatgaaactcagcttgacccgttgaggagatntctccatntacctgtntctttctttccaaacacctataattcttgcgcatcaccaatgttattcaactccacttgatagaaaattagaaattagaaagagcaattaatttcattttcttttctaatacagttcagtcaagaaaatgaaatggctgaggactaccctcaaatcattgtccaattttccagccaatgccagcaaaaggggtgttttccctgaagaagggggaccaagcaaaagggccatcctgcaaaaaaaca

SEQ ID NO: 150381 - DNA, 436 bp, Glycine max
  unsure (1)..(436): unsure at all n locations
agcttcctcggtgccatttcctgcgaaggctatctattggaatgttagttntaccaaggaatgctactcttaaaacaaaaatggcatacaacctcctccaataaatacaaacatcaatgtaaatttagagcaagcttatgcgcatacttctttacaaacgttcacttgcacaagacattcttataactaagaaaaatgcacccatatacactcaaagcaccttcgttacctagattatttatatgtacttccaaggtgtatttgttacctacatctcatgcacttccttggctaaatttacatacatgcgtactcaaagcatttggggtaccaaaatttgcacatatgcacattccggtgtttctaatacttatgcatatacaaactttgtgatgaatcttggctatctacacaataaggtgatacatttcatgct

SEQ ID NO: 150382 - DNA, 367 bp, Glycine max
  unsure (1)..(367): unsure at all n locations
tagcctaaatcaaatggtgtcccctccctagctggtggttgaaatatctccttgggagagacaccaaaattcaaatnttacaacaacttcttcattaagtttctacctatttttctattttctaaattatcctcacttacgtctttaaacctaagtctatgtttccacaaaacacactcatttctatctatgttcaagtggaccaaatcaacactctctcttccgccccccctcccctacctccccgcgactttctgtttcattttattttcaaactcaaagtgtanagagaagatgagaagtaagaagggtaagttgaaaacccataatctagcttccattttctctgtatttctactcgttcctt

SEQ ID NO: 150383 - DNA, 445 bp, Glycine max
  unsure (1)..(445): unsure at all n locations
gaccctaagtcacctgcggcatgcaagctttttgttaattatctctgtaatttattgtttattatgatgcttattaaggaagtatntgttaattgaaatctcttttaattgaaagttaggaacgatgcttagtgttgaattctggcaatgctaaggtggtcctctgaacatggacaaattatctgttaattgaaattctggcttcatcaagggtgggttgtgggttttgttactgccttttgggtagtgggttttgttgttgcccttttgagtaaactcttacgagtttacgattcgattctacgagtaaagtttatggaacttccacgattctacgtaaaatcgtgagtttaacaaccatgattggaagtatccgtgcttcctagctctttatatatcccattaataaagataataattgctgttagcagaatgcgtgcgttaa

SEQ ID NO: 150384 - DNA, 463 bp, Glycine max
ctcagcttctccatctcgctctcaacaattgcaaaagcaagtggaatattgttcttactaccatcttgttcgatggcagtcaacaaaataccatgatagtttccagttaaaaatgtttcatctacttgcacaagtggcttgcaatattggaagccttcaatgcatgggttaaatgcccaaaatactcgattaagaatcaccctaggagggccatcgtcaccttcctccattaagatgaagatttgtattttattatggtaccatggtacaaaatgtttagcagctgtcaaccatacaggcaggtaactatatgattgttcccaacttccaaatgtcatttcaagggctgtttgtttagttgtccatgcttttttgatgaaatagtgaaccaaacacgtgatgcatgtctacaatcaaggttttgattttgatccacgaattgtttcactaatgaacaatatat

SEQ ID NO: 150385 - DNA, 420 bp, Glycine max
  unsure (1)..(420): unsure at all n locations
tgcaagcttgcggatttggtcttcgctggcaaaatgttctaagtgggtctaaaaagaggcaaatatgatcatcatgctttgataaatgcaaaaaaactggggcaaatgaagagggtgagaatgagggagaaacccatgttgtgactgccattcctatacagccaagtttcccaccaacccaacaatgtcgttactcagccaataacaaaccttctccttccccaccacccaattatccacaaaggccatccctaaataaaccacaaagcctgctaccacacttccaatgacgaacaccacctttagcacaaaccaaaacaccaaccaagatatgaattttgcaacgaanaagcctatagaattcaccccaattccggtgtcctatgctgacttgctcccatatctactcgataattcaat

SEQ ID NO: 150386 - DNA, 486 bp, Glycine max
  unsure (1)..(486): unsure at all n locations
taagacacatcacgatattcacctaatgccattgagaaatgttaattattctaataagcacactaactgaagatgaggtagacacattctgctgctgctgctgcaaagagtactatanggacattgatcgatcttaaggtttccccttggaagtagatctatacaatggtgggggcttataaagagggagttgccgtggtatcccacaactaccatcaggacaagaaggaggtcgcaaaggagaaaaccacaacccancaagcgtcgaaggggtgaagaaggtaagcgaaaggaacaaaactagcaaggcagagtatgacatcttcatattcatagccttctattgtattgtattaaagcanaacgtgttttatatataccaaccgggtcctcgtctcaactatgaactaagtcctgtcaaattatcaacatgcgcaatgcatgcttactcataacagctataacgagaccttcctcgtagtcata

SEQ ID NO: 150387 - DNA, 414 bp, Glycine max
  unsure (1)..(414): unsure at all n locations
agcttgttagtaggaaaatttgtaagtcttatttcaccccccctcttaagttattaaggccacttatcctataagtggtgtcagagtagtattcttgtttaaaatttaaaaacttcaagaataattatggcctcatctgactttccattttctgagggaaattctattaataggcctcttgttttcaatggtgagggttatcattatggaaaacccgaatgcagatctttgtagaagacatatatttaaatatatgggaagccattaaaattggtcccttcattcctacaatggtagtgggaaatgcaactataaaaaaacctatacaagaattggatgatgatgaaagaagaagggttcaatacaatttacaggcaaaaatataatcacttctgcattangcatggatgaata

SEQ ID NO: 150388 - DNA, 305 bp, Glycine max
  unsure (1)..(305): unsure at all n locations
tactcagcttctgatgatgaaccacgctattgtggtgatgtctcnnttcccagtgagtgattcaagagggattcaagacgttaagatcaagcatcanntttcccttccaagattcaagattcacgagaagaaatcatgacgctactagtccagacctcatataggataagtattgaaagaatttatcagtaaccaaatagctcaattttgtttcacaagagaattttctgaaattgtctaagttaccagagtgattactctctggtgatcgattaccagttagcagtgatcgattaccagtcact

SEQ ID NO: 150389 - DNA, 459 bp, Glycine max
  unsure (1)..(459): unsure at all n locations
ttaagtcacctgcggcatgcaagctngcattnggaattgcgaaagcctcattctattttaggattagtacctgacatctctaacaatcaaatctaacgtaacaagacaattatagttgttgtttgaatacctcacccactcaagtgtatcacacaaatatggcttttctctaatgaaacactcttgccttttaccactctaattccccttgagttcttatgcaattcaagagattatggccacaacaaagaacaattcaccaatatgtgtaaggtaaggctagagagacaaggaaaaggttaaccaagaaaaaggctaacaatgtttttaggcacaaatgaaggaaataaatttcagaaattaggaattacaggtacaattcttcatgcaaccaatatattaccttaaagagattnnttttaatagtcttcaagcatgaaccattcatcccaatctttt

SEQ ID NO: 150390 - DNA, 372 bp, Glycine max
  unsure (1)..(372): unsure at all n locations
cttggcgttgtatatgaaaagcttaaataatgttgctcattatggatttataatgagaatatnggtatgtgcgtgactcattgataaattaatgaaatttacacaaatgaaaattaattgtgtatgtattattgctaacatgttattgtaatcgaatctcattaatttgtctccttttaacatgataaaggataatagagaaaccaaatcctttgtttactgattattttgtgcagctccatgatctagtttatgttgtcttgttggaagactatgggttacttaacatacatctcttggtgatataaatatatcataacctttgtcctatcaactttgaaagttctctgatatttgcacttctagcatatt

SEQ ID NO: 150391 - DNA, 440 bp, Glycine max
agcttccatcaagtggtaatcagagcacattatcttcaagtaggtgctccttaacctccattaattttttttctttaccttctcttccattgttgtttcttcattattctccatgtatctcctcacatgtcttgttctaaatgttgttaacatgattctttagagtttccaccgattaaacttgctatagaagttagatttgattttctatggttcaaatttcttgttcttgttcttgaaccatgaattgtgttgagtttaggttcctttgagttttgtcttgttattttttgtggctgaaacctaaaccataaaattcttacaaaaatattaaagtagaagacaacctcataaatctagagtgacttgttcacctattgtaggtttgccatagaagtcatgtctagtcatgaaacttgtcacataagatttcttatgtt

SEQ ID NO: 150392 - DNA, 446 bp, Glycine max
  unsure (1)..(446): unsure at all n locations
tgtngaaattgccatgttggatgagttaaacatacccattatgttttanggtttttgtgatgatgtttgtgatgtttatatgctgaaattgctgatggaaatttgttagagatgaagggtagaactaacctagggttagaaagtgagaatgtgatgttatgagtggaaaaagagtgaggctttgagggttggaaggctaantctgaattctgtggtaaatggaggttaaagtgagttaatactagcttgaaatgtcatttaggacttatgagaaagcttggactgtgctagagagaaaaacaaatgaccaaagtgaaccaagagccatttctagggcaaaattgggtgttgaagagtcaaatnttgattcggtgagattttatgtgtaaatccagtttgaacaagtctatatagatgttatggactggagtgaggtgagagtttgc

SEQ ID NO: 150393 - DNA, 452 bp, Glycine max
  unsure (1)..(452): unsure at all n locations
agcttgtctgagcagttgaaaaaaactgattatttcatgtgggccatcatcgaccaatacaaggaaaagctaaacctagcagcgactcatgaatagaggctagaggacgagtatgccaaggtatcagtcctacaagcggacagggaagcaagggaaagggtgatcgattcattgcacagagaagcaatgatgtggatggacaagttcacctttactttgaatggaagtcaatagcttccctgactgctagccaaggccaaggcaatggaggatgggtactcagctcccaaggaggttcatgggctcctcgattactgccaacacatgtttgatctaatggcccacttaattaggagccgttgaggcaattgtattgtcactttgaatttgactagataaaccctctttgttccctaataaaatgaggtngatttaatcctacatgttcaaaa

SEQ ID NO: 150394 - DNA, 356 bp, Glycine max
  unsure (1)..(356): unsure at all n locations
tgtaatcgattacacatatactgtaatcgattaccagatcagattttcagaaaatattctcaacagtcacatctttntatgtggttcttgaatggctataaaaggcctatatatatgtgacttgagacacgaatttgcgaagagtttttcagaacaaaaaggtcttatcctcttataaagcaaaatcattttatcctcttacaaattccttggccaaattacttgtgattcaataaggaattatttgagtgctcaaattgttcaatctatctctttcaagagagatttcttcttttcttcttctttattctgaaaagggattaagagaccgatggtctcttgttgtgaaagaattc

SEQ ID NO: 150395 - DNA, 458 bp, Glycine max
  unsure (1)..(458): unsure at all n locations
tcttagtttcagatgatgcagctgagtttgtagctacctcatgcactcctctaatgactatagcatcatttctagcactaaactgctgggagctggaagccatcttctcaattaaatttctggcttcagtaggagtcatgtctccaagggctccaccactggcagcatctatcatacttctctccatattactgagtccttcataaaaatattggagaagcagctgctctgaaatctgatggtgagggcaactagcacatagttttttaaatctctcccagtattcatacaggctctctccactgagttgtctaatacctgagatatctttcctgatggctgtggtcctggaagcanggaaaatgntttctaagaatactctcttcangtcatcccagctcgtgatggaccttggagcaggtaatacagccagtcctttgccactccctctaaaaaat

SEQ ID NO: 150396 - DNA, 414 bp, Glycine max
agcttagaatgcagaagaagcaacatcaattaatttaataatgttctataaacatgcaaggcaaaattgattgcaataacataaatgagataagggaagagagaatgcaaacacaattttatactggttcggccacttcccgtgcctacatccagtactcaagcaacccacttgagatttccactaacttgtaaattccttttacaagttctaaacacacaaggacaacccttcctttgtgtttagagattctttacaacaagagactcacagtctcttaatcccttagagaatgagaagaagaagaggaacaaatctctctagaaagagatggattttacaaattgagcactcaattaattccttaatgaattgcaattgaattggccaaggaattcttaagaggaataaatg

SEQ ID NO: 150397 - DNA, 472 bp, Glycine max
  unsure (1)..(472): unsure at all n locations
tccatcaagtggtattatagcacaagagcttcaagtatgtgctccttaaacctccatatantttttgctttaccttctcttctattgntgnttcttcatttttctccatgtatctcctcacatgtcttgtgataaatgtttttaacatgattatttagagtttccactgattaaatttgctatagaagctagatttgattttctatggttcaaatttcttgttcttgttcttgaaccatgaattttgttgagtttaagttcctttgagttctgtcttgttatnttttgtggctgaaaccgaaaccataaaattcttacaaaaatattaaagtataagaaaacctcanaaatctagagtgcctttgttcacctattgtagtntgtcatagaagtcatgtctagttatgaaacttgtcacataagatttcttatgttgngctgaatttantttcttgttctttgtctactcatt

SEQ ID NO: 150398 - DNA, 450 bp, Glycine max
  unsure (1)..(450): unsure at all n locations
agctntgagctngctcaatgttccaggttgttgcatggaagggcaaaggtctgtatggtggtcagcagaggagcacaaaccacatactcttgcgacaggtatagatttctgattcaaggccagttgggttaccaagttaaccaatgcatctagttttccttctagcttcttagtttcgaatgatgcagctgagtttgtagctacctcatgcactcctctaatgactatagcatcatttctggtactaaactgataggagttggaagccatcttctcaattaaatttctggcttcggtaggagtcatgtctccaagggctccaccactggcggcatctatcatacttctctccatattacagagtccttcataaaaatattggagaagcagctgctctgaaatctgatggtgagggcaactggcacatagttntttaaatctctccagtat

SEQ ID NO: 150399 - DNA, 451 bp, Glycine max
  unsure (1)..(451): unsure at all n locations
agcttgtgatgtaactactaaaaaatagcacttactaatcttctntggtttccgttcagcctcctacgaacaaatggaaaataaataaggctctatggcagtcattaaccgaatcgaatcggtaatttttaagaccttgtgcctctattgaatagaaacccctcactagcagaaaatatgtaattgctacaaaacaaggggtgtgaataaaaaaccatcttttgttgtcattctccaataaatctccgaatactaaaaagagggcaatctcaaattggataaaaagatatatcaaatgttgtgatttcacaattttgaatatgattatatgaatgaaccgctactgtacttgctgcaatgatgaatgatgactaaactgagatacgtgatcccaaaatatgtgcctcttagaatctaanaaccccttttgtgtngcgcatgaattacataa

SEQ ID NO: 150400 - DNA, 369 bp, Glycine max
  unsure (1)..(369): unsure at all n locations
ggattgaacaatgcacttattntatttagtggttgatgtttgattttggaaatcagtgtttgttgattgatttgaatggatcgattgtatgatgtgagtgaattggaatgcataaatcatatgctttgaatgagcatgcagtcattagaagagagagaacatgaaattaggatcatgattgaaaatgttagttggtttgtcaggttgattgtgaaggaacatgttagccacaactcggtgagagtgtgatctttaattgtgagagaacgactagcagtaagtaatggtgtttgcatgaatctctgagtatggaatgaatgcatatgttggaagatgatgaaagccatgttttaattgaaagtatccact

SEQ ID NO: 150401 - DNA, 446 bp, Glycine max
agcttatatctacttgagatgtttaaatttataccacatgatatacatgcttgcttctccaatcaataaggtgtttacgttattaaaacaattcttaaatttatttgcaggtgtttacgttattaaaacaatcaataaggtgtataattcttatatacatgcatgcttgcttctccaatcaataatgtataattttgaatgagtgtatttttaaaaactaaaatgagtatattttaagtatacatactgtttttttggaaagctttaagcatatataaatactaaaatataaagattgtgcagtatagagattaaataaataattaaattcaggaaaagaatttatctctctaactaataatgcaatttatctattatgctacaatgagtgaatccaagagaaattgctcagtgagattaatttatgaacaaaatggcaactttct

SEQ ID NO: 150402 - DNA, 489 bp, Glycine max
  unsure (1)..(489): unsure at all n locations
ngaggagagtgtatatatatatatatgaattatcatatctagagaacatgctacttngatgagttatgaattattgtatatatcataaaaaaggtgtatgactatgagaacttcaaaagtatatccgaacacttgcacttttttttcattgtcatacattatatatatacggtgtttttaaatatgctaaatcaatttctattattaattttacaaatgcataaaattggcagagaaactacgttatataatctaattaatttggatttcactatataattaaacaggcctcaattgtcctttgttatttaatttcacgtaaacaaaataattaaaggaaacgaatgtctgtattattattaacttgtgcaaactatgatacatataataatggccagattattacatgcactgtaacgtcaatcagtgaatcaatcatgttagttgtggggtatatatgcctctcaacatgcatgccttcacaagctt

SEQ ID NO: 150403 - DNA, 429 bp, Glycine max
agcttggcataaatgggcattattcaacacagctgtgatgtctcattatactctaagaggattccccgatgttgcagcacaatttgttgctgcagctgtcactggatactttcattctatagcatgtgcagcaaattccaaaggtgttgatgatagtatacaggtaagttacaatttctgttataatatgaaaccatccgtacatgtattgatcaatttggacaatattggcaataacgaataacttctaggttcagtaattattgtatgcactgactcaaggacaaagcgatctactattagttactgtatccaagtgtttggaaaagctctcatgctttcatgtttgcttcataattttaactatcagccttgctttctagagcttgctagcataactggtctttaaatttatttatttctcataaa

SEQ ID NO: 150404 - DNA, 378 bp, Glycine max
  unsure (1)..(378): unsure at all n locations
tgaacaagtcgaaagtgtnnttggtttgaagttaattaatcagattatggatcttaaaaattaagggggatatgtacaattcaaagatgaggtaatacttagagttggtctaaatnttaaaatatctcaggttggaatatttgatgaaaaagtacgtatgtatgtaagtatgtatgcatgtggagatgggaagagagggagttacatcatctccagagggagagatggtggagaggctggggccgggagccaatgaaggagagagtgcatgagcaaccaccttggcaggagctggagctggagaantggctggtggagaggaaagtgtgtttgggtaatgcntgtggaggcgttgctggtggaggagttgctggtggt

SEQ ID NO: 150405 - DNA, 466 bp, Glycine max
ctcttagtcacctgccgcatgcaagcttgccaagacaacgtacacgtcctctttttttttatcctttgacttttgaatatatatcatttgtccaattagtagaatcttgggtgctttgtaaattttgcgaactctctgcttcaaccattttcttttttagttcatcctacataaatacaccttataaattattatcatacatcaatatcctgaatacttcaatatcattaaacaaaactcatctccacattagttactccccctcaccccataaccttctattataaaattgagcaaaacaaagacaaagtattgaaataaaaattaaaattcttacaattagaatagcagcctttttagtaacaatgcttccatcttttcgagttcgagtgtcaattataaattctgccctagaaggttgcactctcttagcctttgtagtctaacattagttaataaaatcaat

SEQ ID NO: 150406 - DNA, 452 bp, Glycine max
  unsure (1)..(452): unsure at all n locations
taaaaaactatagaagataatgccacggcggccgcttctaatacatctagggaagcagaaccggtgctacagctcgtaataaacttgggccgagacaaaaatgcgacaggtttcaatcggaggtatagtcctcaaacttacccttatggtttgcctccagacttcactcctcgtaccgctccagacgattagagccaagcccctaccttcgaggggcagctccctcctcatgccgactatcctctgcaagaagatgatgaatgagatgcccatttatgccctctacttcccctcaaggatcctaccccccatgagttaccccaaccaaacatattctgccacgttccgtctccattcgcacccagtaaggaactcgtttcctttgcctcaacgaagcccacgtncacacaacatctcatacgagggttttaaggcattatnatcatataact

SEQ ID NO: 150407 - DNA, 429 bp, Glycine max
  unsure (1)..(429): unsure at all n locations
agctnganacccttagttattagttttggttttacaantttgcaatgtctaacatattgaatagatgaggcagttgtattaaatgttttagactaggcatgtgtgtgatataatctaagtctttctcatgcttagtgattgatcaaatatgaagtgaatgaagtattcttattctctaagtttcttaagaacatacttctacttgaaatttggttagaagcatcaaattaattgattgtctaacttggtaatcgaatgcccaagccaatttcataagaaggaatgatctgtagcttatgataatcgattactcaacacctgtaaacaaagaaaagctctctgtgtgattttataatcgattaccacacatgataatttattaccatgactacactaaagatatggaaaatattagatgaaatgaataat

SEQ ID NO: 150408 - DNA, 381 bp, Glycine max
  unsure (1)..(381): unsure at all n locations
ctaagcttcagcaccagcgatttaacctagnatcattagtagtgntttgttgctcaaagcctggatatttacaattcaacctagagccatgagcataaagctccaagaggattgggctagtagctctgaagaatgccctacggttctcatgaactacagggtatatttctgagcccattggccaagtttgggtccaatcctctttgtacatattatactaggatgtcattatattggatccttgtatttatggcaccatattgtaggtatggtactctataaatatacgaatttttagcccttggatttcatggcacctatacaagtttttatattaagggtagtctttgtattttacatgcactatgcgaatatttgatg

SEQ ID NO: 150409 - DNA, 379 bp, Glycine max
agcttatcagattagattgaatgtaataaatatttattcaaattcaactgaacccaagtctaatacttttttattttcaatttctacactttagactaaattcattttcgacacttcaagccaaaacatctattttgtcaactctagcaactagtcaatagaacaagaaaaacacaaacaaattattttgtcatctaagttgttggaaattgaaaatgagtgctgtgttgaatgaacaaattattgaatgttttgatatcatctaaataatcgtcaccaaatgtcagataagtcaaacattctctctctctcactattatatacattgggtataaatatgtcttgaaacagtgtatcagtatcgagcaaagcatgtctt

SEQ ID NO: 150410 - DNA, 443 bp, Glycine max
  unsure (1)..(443): unsure at all n locations
tgctaaccaagtganaccatatttgaccatcaatctagattaccctctttatgttatgatcataaccccgtgattgctaacagaataattcaaatagtccaagtccaacacataacacatggccacaagaaatataagttatcctgcaattttctcttccattatattcagctacataattaaatgaaaagtgacatacccgcaatatttctcacagcaagttccaccattaatacaagtacattcctttccacacattgactgacatccacatggtgtatactgcttgcaagatntggttttcccatcagcaattctnttccatattgatgggtggccagcagatntccaagaatatttaaacttccttgtgttgcccctctttctcagcaaccgtgacctagatggcatctcctggtcctaaaatgaatacccagatggaa

SEQ ID NO: 150411 - DNA, 441 bp, Glycine max
  unsure (1)..(441): unsure at all n locations
agctttngaacatctctaaagctgcttggcctcatttcttgtctcagccctaccagattttactaaagaattcttcagtgaatgtgacgcttctggtcacgacattggagctgtgctgatgcaagatcgccaaccaatcgggtattttagcaaagctctgtctcatggcacaatatctaaatttgtgtatgaaaaggagatgatggctcttgctttatccgttcaacattggagacattacctcctaggtcacaatttcaaagtttatacggatcataaaagtcttcaacatttattgtagcaatgaatcaccaccacagaccaacaatgttggttctcaaaactgatggggttntagtttgaagtcttgtacaaaccacggctagagaacaaagtggcaaatgctctttctagcaaaaccctcaacttggagctcaacac

SEQ ID NO: 150412 - DNA, 419 bp, Glycine max
tcattcttagaaggaaacaacaccaggaaattatcctactcatcattttaacaaaagcagagaacataaatgaaactatgagcagaaacgtaaatgaagataaaagcatgaaacgtaaatgaaactaagaacaaaaaacataaatgaaactaaaggtagaagaagaaacaagaacaagattgtaattagaagcagaaaatggaaaattgcattacgtgaatagtagcattagaacagaaaaatgtagaaaccctaaaccgtgctctgaataatgaatagcccccttacatgaatcccaaggctactatttataagggtcactcaaagccattgggtcctattacaatactctggcccaaaacgaaataaaaactgaacacaaaaaaataaaattgcaatcttctaattagaaattaact

SEQ ID NO: 150413 - DNA, 432 bp, Glycine max
agcttctctagacttggcacttggatttctatattctcaagcattagacaaaaaacaacctctagctgtttgaggagaccaatattaccacacaccttctaatgcttcaaaccattacatctaacaagtgatatttcccttatcatagggcaactagtaaacaaccaatcaatgacattctctctttttacccatacattttctaaccttagaatttctaggtgggaaaactttattatatccctatcagagggctgaatcaatgtcaaaccacttaaccttagcaccacaaacgtcttcgcattataaatatgatgataaagttggcaccaattacctttagtcgcgtaaagacaatgatgcatgattttgaaatcgaactctttgactgtgctcgtctgcattatagtcttgtcaatcttcaatctcttt

SEQ ID NO: 150414 - DNA, 439 bp, Glycine max
  unsure (1)..(439): unsure at all n locations
actcaagctntatcatgatatcattattganacttcgggatattcattttacttaattatctatgggagtatctttaaaataacaaaaagatgagtttaacttatataaaatttcagcatacaatattttattatacactaaacaagatatgatgatgttactatgcaattttattcattgatatattatgataatcatgggcatccttattggatgtgagtgttttgtaagaagagagtgagaccctagaagacaaaaattatgtattctatctgtccctaaatatgtgtgatatttcactatacagtataacattaatttgtctttttcacccgaattcctaataactatcattataggttgtaaatataatattaatactactcattttcatctattccattacggataaggtataaaaatataattccctgtcac

SEQ ID NO: 150415 - DNA, 439 bp, Glycine max
  unsure (1)..(439): unsure at all n locations
agctntataatgagctttctcttcattgttactagcatcagtaatagtaacaaacttctcttccaatatagcaagatcaagatccaaaacaccgaaatgaaattggacttgctcattccagttagagaagttaagcccattaaaaattgacacaaatgatacatgagagttcaatgaatcgagaacatgtgctgtaaactataattcacatatgtgttttgagacaaaaacacatgtcacacatataatttattcatataactatcaatgtatattgatgttctcctttgggcgatacaccaacacataacatacaaacatgaggatattaataaaactcttaacattaattgacaattaaatatgtaccaattagtattacctatttcttttgggtatataaataaaaccaatgataaggcgtaatcacctacaatta

SEQ ID NO: 150416 - DNA, 414 bp, Glycine max
  unsure (1)..(414): unsure at all n locations
ngaanaccaaagaacaatattaaaactttagtaaaacatataagaaaagattagcatattaaaccagaagaaagcttgatgatgggtggatcaaatacaaatacatacctgacgctagaagggtaacacaagtaccgccagagcctgctcatcaagaaaaagagaaacagataaaagggtcagctacgattattgttccaaggaataaatgctaagagagaaaaaaaagaaaaagaaaagagagattgaaggatttactgtggtcagatgcagtaacagtggctgttcccgcaaagtcgcaggacccttgacccttcctttggaagtagctgttcacggcgtagttacagtgggccctaacggtgttgggctggaaacaagacccgttttagcggagagggttatattcagcac

SEQ ID NO: 150417 - DNA, 421 bp, Glycine max
agcttgagatgaggaagtgtagaagggtgttcttcctgcttttattcgttgaccacagagtggtacctggagatatgtcgcgggggtcaggagaccttggggacgtcaggcggggtgctattgcccaaaaccaagcttgaccaatcccgacccaacccgggcatagtcagtcagtgagaacctgtgatgtacctaaacaggcgagctcctgacagtcaacagataaaagaaacaaagaccacaaagcaaggaggcttgtggtggctggccagctgtgaattttgtgtgatatatggttgtggcctctggtaatcgattaccaagggtgggtaatcgattacaaggcttaaaaatgaagacagaaggctaagatggtctctggtaatcgattaccaaggggtgtaatcgattaccaggcttg

SEQ ID NO: 150418 - DNA, 357 bp, Glycine max
  unsure (1)..(357): unsure at all n locations
cagacactaaacagaactactcaacaagctagaatctataaaatataaaattaatatatttaatgttttaaaatataaaatgttaatattttacaaataataaaagattaaaaggaacattttagaagaattaaattattcttcacatacataatatangacttngtaaccggtatacgcactatnttcctccaaaactaattntcttaagtcaaacaccttaaacttgtaagttgaagttttttgtgtccatgtgtggaaaangataaaatgtaaaattaagttatcagcttatattgccaactttaatattatcaataaaaaattagttaactaacgtttatcttacaaaatcta

SEQ ID NO: 150419 - DNA, 418 bp, Glycine max
  unsure (1)..(418): unsure at all n locations
cgacaataactttttactccgatgtccgattgaatcgggtaatatatcgagacgcttaaaattgagactagatgctctgagcaaattgaaattacaataactntatacacggatgtccggttgagtcccgtaatatatcgagacgctgcaatttgaaaacggaaactcttagaaaattcagacgacaataactnttaactcggatgcccgatagagtgtcgtaatttatcgagggatgctccaaattgaaaacggaagctcgtatcaaattcaaacgacaataactttttactaggatgtctgattgagtcccgtaatatatcgagacgctcataatatagatccgaagctctgaaaaattgaattgacaataactttatacatggatgtccggttgagtcctgtaatatatcgagac

SEQ ID NO: 150420 - DNA, 335 bp, Glycine max
  unsure (1)..(335): unsure at all n locations
cctgtagacatttanatgacaataactatntactcggatgttcgacaaagttccgtaatatatttagacgctccaaattgaaaattgaagctcctagcaaattcaaatggcaataaatttttactcggatgtccgcttgagtccggtactatatcgaaatactcgaaattgaaaacggaagctcgtagcaaatgcagaccgcaataacatttaactcggatgtccgattgagtcccctaatatatcgagatgctcgaaattgagaatagaagctctgagcaatttcgaactacaataactttatactcggatgtccgattgagtcccgtaatata

SEQ ID NO: 150421 - DNA, 443 bp, Glycine max
agctacttatccaaggcaattcttggtggttaagttctttctcccttggcttattccctagtggatggtgcctcccctctcctcttctcctttgtcttccgctgcatctccatggtgtaaaatcaccattgaaggacctcatcgaagctcaaagatctagcctccatagaagctccacaagcaagcttccatcaactacgtccactaaagaagggtttgtgaggaatggcttaagtcggtgtccattgaccttgaagctcttgtttatggagtcgcttttgatctcaactgtaccataaggaaaaacattagtaacaacaaaaggaccaatccacttagacctcaacttaacactcatgagtccaagcctaaaattataccataacactttttgcccaaccatgaagtccttcttaatatcatgctatcatggaacttcttgg

SEQ ID NO: 150422 - DNA, 406 bp, Glycine max
  unsure (1)..(406): unsure at all n locations
ntntagcaaagaaaaagaatgttgttttgtttgtgtgtgtgttgtggggtgccggaaacggggaaaatacacaatcgaagtgattcatctcatctcataaaaattaccaataaccagaagattatcctcactcttacctacgatgttagagtaaattacattagttactcttcatgagattttgttaaattacacaattttttttttatcttttctactcatacactaatgccttaatatattatttaaaaaacatatactgacacccttatacattactctaactctcttaattatttaaaaaatattacaatgtgtttcctaccagaaagggtactataaatggttaaaaaagaaaaaaggctgtgtgcgtttatgaaaattcaagaatgattagtataattta

SEQ ID NO: 150423 - DNA, 439 bp, Glycine max
  unsure (1)..(439): unsure at all n locations
agcttgaaacccaagatgccactccacatgtggtttttgctntccaaatacaaacaagtcatcaaataggggttctcggagcagaaaatggtcaaaaaatatgtactcggatattttggagatagatggaagtccccttccaaagctccctgaagaagaagaagccgttggaattattaccatggaagatgtcattgaagagcttttacaggtactaaactacttatgatcattatgaacaatcttgttcattcattacgcattgtagttaaataagcttatttacgtgtagaacgatgtactgatgtgtcaatatttctgtgtaggaggagatctttgatgagacagatcatcattntgaagactcataacagtggcttgtttccataaaaccttccatgttcatatttcttgtttgggacctaaaaataattaaata

SEQ ID NO: 150424 - DNA, 454 bp, Glycine max
  unsure (1)..(454): unsure at all n locations
tctaagtcacctgcggcatgcagcttgagttgaattgaaaggaatanattgtgtgtgtgtgtgtattatggacctatctaactagaactagtgtgttttgaaaatttaagagtgacccttttttcaaaagctcctaattgttgatgggttcactcaagtctttcatctttatggttccttgatatggggtcaattgaggctcactgcaatttcccatggctgttttttgagaacctttttgtttgaaaaaagtacacaaagtgttttgcatgatcacagatggttcatgaaattatttacttttctttttcctttttcattaaattctatttaatattttcttaagtggtggccacaagtcattgtggggcactgacagtgaaactggatccagttattcccagatttaattttaagataactaatatatcgtgtggtggactcggttggtttt

SEQ ID NO: 150425 - DNA, 415 bp, Glycine max
  unsure (1)..(415): unsure at all n locations
actaagctgtatgaaaagaattggggaacaggtttagacttctactttcttttaatcttgctatgctaggaagcaagggtggagattctaatccaaccaggatactatggtttataatgttttcaaagctaaatattttcaactagtggacttcttggataccaatttaggatatactccaagttttgtttggcatagtattcatgcttcacgggttgttgtgagacaaggtataaagtggaagattggtaatggacaacccatcaatgtttggaaaaatccttggttaaaacattttgacattccttttattttttctccttcaccaatagactttgagcacttaaatgttggtgatattatagattctagttctcactcttggatatgcaactngtaaactctttgtttaaac

SEQ ID NO: 150426 - DNA, 454 bp, Glycine max
  unsure (1)..(454): unsure at all n locations
agcttctagccaaatggacttaccttgaatatattcctttgatagcccttttgagccttgtttccctttccttgttttgaaactcactacaagccttaagtgaaaaaccatgatattaccatatccttaaggaattttggagctttggaattgttttgggaataagtgtggggggtttttgtttcattggacaacttgttttgttggctatgcttcatgatgtattttgggccatacttgatgtacattgtatattggttaaatgttggacatgctgaatgaaatgttgtttctcaaaggctaaagagtaaaaaaaaaaaaaaaaaaatcgaaaaaaaaaaatcgaaaaaaaaagaaaagcaataaagttgagtgaataagatcttaaatggcacaagaatgatgaaactctnggttctactcttcatgtnntaattttatctttacttctttt

SEQ ID NO: 150427 - DNA, 413 bp, Glycine max
  unsure (1)..(413): unsure at all n locations
aagagagagacctatcacgagcacatagcatggtcttgaatgaggagttagctgcttgctcaaagtccaaaagaaacttggctcagcgtttatgcgagacagagacccggagaaactcgaaagagcaatggcggacacctactccgcccccgacgagatccacggacttctcagctattgtcagcatatgatagacttaatggcccatataattagaaaccgctaggaagtttgtattgtcgctcagatcttgactagttataactttctgaataaaatgagtttatcccatgtgtttactccaaggatcagtgcgaattaaatcactcccgcattntatctctagcatgcattcatttatctttacctactcctcacattgggttttttacgaaaaatgccataactaaaca

SEQ ID NO: 150428 - DNA, 426 bp, Glycine max
gatcttaagcaccgcggctgcagctttaatgtcggtgtgcctattattatgctttgtcgtgcagctaggtatgttggtgcgagctcaaccgaagttgtatttcagccgacgccggcattttgtcggccacgaaaacattagctccacctgggcaaaaaaaaatcctgattcaccggtgttgacagaaaaaaatgctggcctttgtctgccatgaaagatgaccgatcgaggtctaatagaaaagcatgaccggattacgctcatcgaacgtttcctaattgatatcctccaagttttattctgggattgaatggaaaaaacaatatccgacatcggaagtgacatatccgtgactggatatttttcacccatcattgctcaacttctatcaaaacgctggccgataatatttcttcacggtaagga

SEQ ID NO: 150429 - DNA, 438 bp, Glycine max
  unsure (1)..(438): unsure at all n locations
tgtaagaatggcaagatcatctatacttgacatctttcattatanaagattgccatcatatatagaagagatgacacatntacatgaagtgatcccaagactcttcaatatggagtttcccactgtaatcttatctaataggacagcgattgaagaacatcttacatgattagaagatcttccaacatgatctacgagagagcaccactcaattgtagttgtggaaaaatctaacctcacaatatttctcaatgccccaatatgatctgtcagattgcctgaaagatgtgaactctgaactgcaaatctctgtagtccatgggaaatacaatgatccagaatttctacaattcattaccccgttggttgaagtttggacaatataaacattcacccttaagttgcgacattacccaaaaagtcggaagtttcctcaag

SEQ ID NO: 150430 - DNA, 432 bp, Glycine max
agcttgtatagtttcccaatttatggtcattttgtagtaaattttgtaaataaatcttgttttatggttaacgctgtctctagaacaattccattggatttaatgatgaaagctgtgcattttcaggtgaaaaagaggctaagttttgaattgcaaaaagcagtagttgggctaagctcagccgttgggctaagtgcatatccaccgctaagcgcagcttcagcgcgcttagcacaaaggagaatctagcagagcatttgtatgaaagccgcacgctaagttcaagatcagtgcgctaagcacagcatgtgccttcagccaggctaactcgagactagcactaagcccgaatccacttactcgcgcttagcacgacggtggtgctaagtgtagtgtcacaatttcggagcctatttaaagcatgtcttatgt

SEQ ID NO: 150431 - DNA, 473 bp, Glycine max
  unsure (1)..(473): unsure at all n locations
ggacactcagaaactcagcttgtggattatggggtacccatcacatgtggtactatgtggcggtctggcgatggtgcaaaacaattctccacatccacaaatcacatataaacccaccatcccctgttgcccaccttcaactgggctcacgtactcccacgtagcccttatccttgtttctctcaacaccgggtccctatcaatcctcccaagcttccacaacatccaagtaattcaacattcaatcatcacaacctaacacagccaagaaaatagggcaaagacagaaaactctacctaaaacacaaaccaatatcacaactgttcacattcaaataccccagtaacattctcttcattacagtccgttaaaccgtggatcgactcgaaaaatttactggaagtctctagtacataagtctantatttgaaccgtgggatctgctagaaaatgttcaanaccccatatgtac

SEQ ID NO: 150432 - DNA, 440 bp, Glycine max
  unsure (1)..(440): unsure at all n locations
agcttgtatattccagaactacccctttattttttctggtattaacagtatcaacaaactcagaaccagtatatattgcttttaccacactctcatggtcctatgataagaaatggtgaagaacagaaatcaatggaaggcatagaagctgattccgatataatatctagtgcataaacagagtgaaaaagtctaatacaactgctcaaccaataaccaaaaattagtgtctctttcattatgtctacttccattgtaagtttaaaagatgcaaaccatcaaaatatcaagagcaaagaaggagtatgagggaagagaaacaatagtagaaactcctcaattcagtatcagtagtaggagtataaataaagttattcataaattatcaaatctcagctccttaatgcttatntagggtcggttggttatctaaacaaact

SEQ ID NO: 150433 - DNA, 323 bp, Glycine max
  unsure (1)..(323): unsure at all n locations
ngaagcactgatgggtgccacggacagagattcttctatgttggntccaacggcgggaaatctgggaccccaaccattcttgggaagggtgcacgatcgcaatctcccacaggtctcaagcgtctaacctacggaatccttttcgagcattgctggtgctggaacacgaataaacactgcacgaattcaaacgccaattcaataatcacatcggaatggtgaacgggttggacaaaccgcttctggtggaagtgtttctcaaggggctgaaccatgacatcagctatgtagttacgctccatgtaaccaagaacttgatggaa

SEQ ID NO: 150434 - DNA, 388 bp, Glycine max
  unsure (1)..(388): unsure at all n locations
agctngatcctttacagaaatatgtttgttctttctatgaagcacggacaccccagccccgtgtcctgtgtcagacacgcgtccgcgtcagtgtccgacaccgacacaacacccgtactacattctatatataggacattacaggtgtccatgtgtctgtatcatgtccaatgtacgagtcggtgctacatatgctcctctagataagacatggttctaaatcctagataaattgattatccattcttatgttactaaataattctctctccatacatgaaaacattaatcaaacagaattaagtgcacaaaaaggataatattgacacgatactacaaataatggacactgataactaagtcaactaaatgtaattcatacgatgta

SEQ ID NO: 150435 - DNA, 435 bp, Glycine max
  unsure (1)..(435): unsure at all n locations
taagtgcncatgttatgcatatgcannnaattttgtcttttctatnactaananccaggacacattttttgcgtagtatcaacatcaaagaatcccaagaaaatatatcgtgcaccagttccatggacaaccaccaaaaaatagaagagcaaaataaaatataaaactatgattgggacctttgcaacaaaacttaagggtccatgtgctgcattttttttaaattatgtccaaggcactactaatatccgttacacattttttccatattttaaacatcaaagaatcccagagaaataattcgtgcactagttccatggacaaccaccttctgaaaggacaacaatataaaaaaaactatgatttggacccttggaacaaagctaagtgcccatgctcattgtgaaataaataagtaataataaaatttttata

SEQ ID NO: 150436 - DNA, 438 bp, Glycine max
agcttgcctaccgctctctctaattttatttatttaatatagacagcaagtacaaaacaattatgaccttgagcagaagatcaaactcaaattacacaaaactaaggtgttttgacccatcaggtgccttgcttttgtttaaattaagctactgcttattgccactaatggcacgcttattatttgataagattgagaacaaggatgttgtttcttggagcagtatgattaggagctatgatagaagtggattgcttcatgaagcattggaccttttgagagatacgcatgttatgagagtcaagcctagtgaaattggaattataagcatcacacatgtattggcagaacttgcttatttgaaattggggaaagccatgcttgcttatgtaatgagaaatgggaagtgtggaaaatcaggagttcctctattgtact

SEQ ID NO: 150437 - DNA, 403 bp, Glycine max
ccttgaatctcagctgtacataatggcatcaacagactacttatttctagattgaagttcactcactcgacctccaatctgtgatggagaggattaccactactggacaacccgaatgagaatatttattgaggcgatacacttaaatatatgggaagccattgaaatagagccttatatacccaccacagttgaaagaattacaattgatgggagcacatctagtgaaagcataacaatataaaaacctaaagatatattgtctgaagaggatagaacactagttcgatacactttaaaagccaaaaacataataacatctgccctgggaatggatgaatattctagggtttcaaattgttagagtgctgaggaaatgtgggacactttacaattaacacat

SEQ ID NO: 150438 - DNA, 429 bp, Glycine max
  unsure (1)..(429): unsure at all n locations
agctngcatgatttacaatnttcacttatctattcagtcacatcatacctaagcgtcaacacataactcaaaagtgtactagctaattctattgcaccaacaaaacatgataagtaacttccagaatatctattgaattataaattcatggcatactcccaggtagttttacataaataatcccaacatgttctgagaatggagaaattcaaagcacttgtctacagtgaaatttataacgtaacatcaaaacttaaggtcacaaaaagcttcaaatttagccaccatacataatgaacattgaatcaaaaccaagggctatcttggacccaaatggacgaaagtgatatctagtacacttaatctcactggtgaatatcacaccctaatgggcacaaatgtaggctagtattataatccactcatcat

SEQ ID NO: 150439 - DNA, 334 bp, Glycine max
  unsure (1)..(334): unsure at all n locations
ntcatctagccaagactatacaaaggtgttacaagagatcctaacgattcctaattatatgggccatcaaatctatcaagtgttgacagtaattgattagcccatgaatctcctcgggggccgtacacactntagccatggctttttctntggctaatagacgcgggaggtcttgacttccattcaaggtcaaggcgaacctatccatccacatagtcgcttcttgatgcaacgcatcaatcaccctccctcttgcttctntctcggcgtacacttatacaaaatcctcttgatgcaacgcatgaattcttagccatccatgataacctccgat

SEQ ID NO: 150440 - DNA, 438 bp, Glycine max
  unsure (1)..(438): unsure at all n locations
agcttctagacatcattcttctaaattggtctagctntntttgcatttctttggcccagtattcattagatatagcgtcatccatgtgctttggctcgatcttggaaagtagtgttgtgtgcttgagagaattccttgtctggactttgcccttaggatcaccaatgatctaggactcttgatgatattttctcagcaagtgtctagttggttctctaacttctttaggttgatcatccattggtgagttggacacaagttggttctgactggatgcaacaatagacttgacgatatcttcaattttcatctctgcaaaggactcatccagttttgacatggtagtgttaggcttgttgtcattaaacctcacatgaatggcttctttccaagtcaagggtctggagttgtacactctatatgcctacactattatca

SEQ ID NO: 150441 - DNA, 480 bp, Glycine max
  unsure (1)..(480): unsure at all n locations
tgtaccctaaaataagacccagtggaatattttnaaagttgtnacaagcaatattcacgtaagcaaccacagcctgccaccctgcgccaacagcaacacctgagagaacgggttgcacgttgttgatgacaatgcaaagggccaacatgggcgtgagctctaccacaatctttctcacttctgaatcatttgaaaacaagaaagggtactggttccggaagattatcagcaccatcgagagcatgacaccgatcagagttgaagtaatcacagcaacaagaagttgaaaacttgctgttcttgggtgacatgctcctagttcatttgacaccctcacactgcannatgtaattttggtcactgactgatgtagggtaatcattcaagtttaatggttatcacaataacgtacaacagtctatactattgtaactaataataaatcattgataatatagnttttgacaatagtattattaa

SEQ ID NO: 150442 - DNA, 418 bp, Glycine max
  unsure (1)..(418): unsure at all n locations
agcttaagcagttaggttacagctcataaattattctatatttctaactgaccaccttcgtgagagttacaaaaaccacagaaacagataaaaaatgaaacaaccctaacatgatttacaagttgagcacatactttaattatattatacaaataccacaagttagactgtaatcaatgtgaaacaaaacttaagcataaaattgtgattcaaaatctataaaacttttgcataaaattgtgattcaagatcttctagtgatgaagtgtacaaaataaagataataattttaataagtaattagacccctgattttaggttaattccttaatttgctggatatgagctgtagcccatgggtcctattgaatntgtcaatgttattaggctccataaacaaccaactcatcctgaaagc

SEQ ID NO: 150443 - DNA, 415 bp, Glycine max
  unsure (1)..(415): unsure at all n locations
tctcaatgcanattgccattcgtactggcgattccaggctaccactgcaccactgcaccacctgcgccactgctgcacctgcgcgcctagagcctatccctcagcctaggaactcgccagtcaaactggcagttccctatgcatggctatgtcgccattgcaaccagcgattccttcagaatcaccaaactcgccagtggtactggcggtttgggtgctgtatgcatgcatgccacgtaaaaaacagccccattgtgtaaatttttntaaaaagaccccatctggggaaatatttttgtaaagaaccctatatggggaaatttgccgagggataagcccttggttttggttttgctatcctgaacctaanagtatgtgattgtagcctttattgaaagacattataccctttatc

SEQ ID NO: 150444 - DNA, 444 bp, Glycine max
tgcttgactatgcgagtagagtttagccttatgttctctttatttattagtcaattcgatcaagaatgagaaatcccaaagagaaaacgtccgattgagtttccgctttattttactaaaaaaaaaagatgcttttttattattatattattttttatctctttttgttttccaacgtggttacggcacgaccgaacggtcggaattcattttaaccgaagtttacggatcatacaattcaaacgttcggtggaaatttattttatttttaagttaagcgagaaatgactcaagtaaaatggcttaagcacgtcaacagggggtatgaaaagtaaatgaaacgagaatagaaatacacaaaacactatttggaccaccactggtacatataatgaatcgaaaagcttggttcgaggtacttaccctgtgaagatcaaagaacga

SEQ ID NO: 150445 - DNA, 289 bp, Glycine max
ttgaatggaggctctggtctcttgttgaaactgcatgttttgcatattcatttgcctcacaagttcttcaagggaaggttgcggatgggcctcaactgtttgttgtttatggggctattgctgttgttactgttggattggtggaggaacgtatggtctgcttgatccatcagcattatgaaaataatgttgttgttgttgctgttgtgaaagattcgaccatctaaagttggcatgattccttcacccgcgattgtacctgttgctggagaggtcataattgttctgt

SEQ ID NO: 150446 - DNA, 318 bp, Glycine max
agctttagagacacgagcagaggccgatatgagttgattgtatcttttaattaagtcatctatggatttgaatattagctcttcacaatcagagttgataatgtcatcaggctgagagtcctcattatctgaacttgggtccaatgttgggtctgctttgctggtggacacatcagccattagacataagatggcttctccctcattgtcttcatcagacgaggaatcatccaagtcctcccaagtgcttataaggctcttctttttggatatgaagaatttcttcttcttatcttttgtcttttcatggtcaagacg

SEQ ID NO: 150447 - DNA, 422 bp, Glycine max
tctagcagggtccttataatcaacaaggacagtagaggtcacaccctatcaatcatttcaataaagaccagtgtggaccttcgaacatgccaatccaacaagggcctaacatctttcataggactactaagttggaggagactttgacttattttatgcaggtaacaatgtcaaatcataaaagcagtgagtcagcactgaataaccttgaggtctatgtgggacaactggtctagcagatagctgacaagtcatccaacattttgtggcgagtatagaaaagaatcttaacgaggaatgcaacgttgtgattgacaagagtaagacggttgttgaggctgaagatgatgacagtgttgtgcactacataaatactgcttgaaataaaagttcttatgtgcagaaaaatgatgtgagaagtg

SEQ ID NO: 150448 - DNA, 444 bp, Glycine max
  unsure (1)..(444): unsure at all n locations
agcttattaaagaataatgtatgttttatattattttttatataaatttaactcaggtactaaaaatttacaataatactaaagctttattattttcattttaaacattgtgtgaatttaattgtgaaaatttaatactctctttgttccaaaacaattgtcattctagattattttacacaaataaaaaagaaataataaatttatttatagattttattgttcatgattaataatacaaaatatataagtaaaaaaaatttaatgttacataataattataattggacagagagaatgtcatctttattatttttaaattatattaactataaatntaacatgacattaattatgttttaattgtaagaatntaatattttattatgacctttaattgtgagaatttgatgcatctcaatcatgaactntatcacanattga

SEQ ID NO: 150449 - DNA, 431 bp, Glycine max
  unsure (1)..(431): unsure at all n locations
ggacactataaaactaagctttaagcccctgtggcattgatacaatattaaagttttatctactttntctcatattttccaattttttctttattattgatatcaggattcattttgtttccactaaaataccatctctcagcttttgtacattttgtcattttaagctaagccatgttcaaatgtacaattatttgtataaattatgacttcgttcttggcacatataattaactatttttcttaccactccctgcacgtccaggatagttgtactttgatctatgtgcttctttgcagcaattgaacaagctgcaaacttaacatcaaatgtcctctcaaactcctttacgtggtatttgatgtaacgatccatggttgtgacttgcatcatcttcgtggcatcgacttggcctaatctctctatgtac

SEQ ID NO: 150450 - DNA, 398 bp, Glycine max
agcttcaaggtcaatggacaccggctgaaatcattcctcacaaatccctccttagtggatgtagtggtggaggatacctccctacttctcttccgccatgacttaggaagttttctttttctgtctccttctttacttttcttgcacttgtccaaatttattgattgctttgattgttcttgatcttttgattgtgctacattgaggacaatgtgttgtttaagtgtgagggggagggggagaagattgttctttaattttgttaggtattctagtttaattttattatgttatctagtttaagtttgttaggttctaagctaattttgttatttcggtttatgtttgaagcaatattgatattctggtttatgttatcatttccctcttgaaatttg

SEQ ID NO: 150451 - DNA, 292 bp, Glycine max
ctaataatacagcgagctgattaacggctaagggaatacatggtatagtacagcacacacgcaccgatcaccattctttgtgctcatattacaaaatgccactctccactagaatctactaacatttagagctgacagacgctacggtacacgtggcctggatgggccttgatatttcacacattggactgctaataccctatgataggagaacatgatgggggacgctacaaacacagaacctttacgctcaactagcactactcaattttagattaacctcgacggttac

SEQ ID NO: 150452 - DNA, 436 bp, Glycine max
  unsure (1)..(436): unsure at all n locations
agctttgatgatatggtcttcaccgataaatggatcttatctggnctaaaatgaggcaaatctgatcatcatgctttgataaataccaaaaaaaactagggcaaatgaagagggtgagaatgagggaaaagcccatgctgtgactgccattcctatacagccaagattcccaccaacccaacaatgtcattactcagccaataacaaaacttctccttacccaccgcccagttatccacaaaggcaatccctaaatcaaccacaaagtctgtctaccgcacttccaatgaagaacaccgtctttagcacaaaccaaatacaccaaccaagaaatgaattttgcaatgagaaagcctgtagaattcaccccaattccagtgtcctatgctgacttgctcccatatctacttgaatatgcaatggtagccattaccct

SEQ ID NO: 150453 - DNA, 478 bp, Glycine max
  unsure (1)..(478): unsure at all n locations
tgctttntctcatggaggttcaaaccttgctttctctctcgtgcagtgcttttgcaaattgcaatcatagtataatcccttccacgagagtgcctcttcctccaatggcgatagagaattatcttcatgttcaacaaaaacatttatcgacagactaacaccagtgttgttgtcataatcattggagaaaagaagatccttgttgaaatcggaaaaaatggatgaactcggacgtggttgaacacgatgatggccgagatcgatggttcatcatagttcatgagcacaaagccaaacttctcttgtttcttctcatctacctcatctttgttatgcttctctttggttgtgcgttcaacgtttgcccatgatataatgtggtgcatttgcattttgagaagtgttctctctctaccaaatggaaaagatgatattgtcttttattatgtatataatctaatggatgatcaaaatatct

SEQ ID NO: 150454 - DNA, 443 bp, Glycine max
  unsure (1)..(443): unsure at all n locations
agcttctgaatttatgctgaaggaagagatatattntggcttttataaaaaaatgattgtctctttcctttttctaaaagcaatgccacatgtctcattttgagtggagcaaaaggggcccacctcttccccttgatgtgacttcatactcagccacaaggagagaaaaatttgatcttttgaatgctaaaatcctgcctcggtttgcgtgcttcttctctggttccagttcctcgcgtttctctccactcgtcggggcccgttttcgaaagtaggcaatatatatatcaaaacgctcagaatgaaaccctgagcgtggttcagatgttggatttgttaaatttttagttgcacgcaaaacgataatttttctagactaattaattgagaatatatctataactgtccatctatggattactcttcgtaaatagcctaacccg

SEQ ID NO: 150455 - DNA, 468 bp, Glycine max
ctcagcttactaaattgcttatgttattgaagaatatgcttcctgacgataacacgttacccaagaattattacgaggcgaagaacatattatgtcttgtgggtatggaataccaaaaaatacatgcatgccctaatgattagtatttgtatagaaatcagtttgtcgaaattcacaactaccctacatgtgggctctcaagctacaaggtcaagtatgactaatgcagtgatgatgctgccactaacaaccattgtccaaaaaaagtgtgttggtatcttccaataataccaaagtttaagtgattgtgtgctaatgcacatgacacaataaaacctcacatgcatgcagatggtaagaaaaatgatggatttcttcgtcatcctgctgattctcctcattggaagacattgatcactagtatttgattttgataggatctataacctaagcttggcttcttcaacg

SEQ ID NO: 150456 - DNA, 442 bp, Glycine max
agctttgaatatatggcgccggtggtagatgatttcatactttcaacgtttttgtctttactttcgattgcatataaattaaaatccaaaaagaaggtgaagtgaactgaaagtttgttttttgtcataacctcatcatcgtaattatctcttttattaaagttattagatgacttaaaaagaagaaagttgtttgggaatattaatatgcagtgtaatttgataaagttgcttttaacggaagtcttaaaggagaataattaaaaaaaatgtatcattgtcctgatgggatggaaaaaaaaaaaaacgtaggcatacaaatatgttgatagaaagattaatctgtacagtatagtatctaatgctacagtgaagagagcatttaatggaatgaaaatgatagaagaagatatgctcatcgtttttttttttttttgtacag

SEQ ID NO: 150457 - DNA, 470 bp, Glycine max
  unsure (1)..(470): unsure at all n locations
tgtcaanagggaagcaagttagaaactcttttcaagctagaacattgtttctacttcgaaaccccttgaactacttcacactgatttatntggtccctctagaactatgagtttgggttgtaattactatggcttagttatagtagatgattactctacgttcacatggactttgtttttgaaaacaaaaaatgaagcttntgatgcttttcgcacacttgccaaggtgattcacaatgagataggtcttaacattgtttcacttagaagtgatcatgaaggttgaattcanaatgagtcttttgaaatattgtgtgaagaaaatggaatttaccacaatttttctgccccaagaacaccccaacaatatggtgttgtggagaggagaaatagattccttgaataaagtgcaagaacccttctaattgaaacaagttccctagatctttgggctgatggtggcatactat

SEQ ID NO: 150458 - DNA, 435 bp, Glycine max
agctttcataggtgaaatcaggtgcatccattttccttagagtcctctcacgaggtggaggttgtgccatgttctcagaatgtgcaaaatcagaatgctcagaatcagaatgctcaaaattataatgctcaagattaggatgttcaaaatcaccaataacagaatgcacagattcaccagttatacaatgctcagaatgatcaaaaggtataaaatgatgcctaactgaaattctgatactgaggacagatgtcgtacaggatgtcacgacatcgcgcttcagaacatgcagattgtatatgacagtatgaacagattaaacaagtaaataacacaagagaattgttaacccagttcggtgcaacgtcacctacatctgggggctaccaagccagggaggaaatccactaaaatagtattagttcgaagatctaa

SEQ ID NO: 150459 - DNA, 378 bp, Glycine max
  unsure (1)..(378): unsure at all n locations
cttgcttggagcttcaatggagattgaataataagaatatggccacgtgagggagagagagagctgtctgaaaagtgtgggggctgagtgaagagagagaaaagctttttggttttaaatgaaagggttttctcttttttctattattttattcaagctatgccacatgtcttcatttgaatggagcaaaagggcccactttccctntttactgtgacccacactcagccacaaaagtgagaaaaatctgacctttgaaacactaatatcctgcctcgatttgcgtgccgtttctctggttccagtttctcgcgtttctctgcgtccgtcagggccagttgtcgaaagtatgcaatatatatatatcacaacgctcag

SEQ ID NO: 150460 - DNA, 422 bp, Glycine max
  unsure (1)..(422): unsure at all n locations
agcttgcgctgttccggcgactttctcagnatccttcaacgtcggngcagagatgcagcagcagcaacacacaaagcgtagaaggaacctcgacgaagattcgcttccaatttaccaccggagcctcaccggaaggagggacactttccggtcacgctcgccggcgacggagaaaggcatccacgcgatccctgcgcttgttctgctgtgcctctttactctctggtggttctcttttccaggtacgtacgtaacttttagttttccgtaaatcacttaatcttatgttatgcttagcgatatagattcagatatgcgaattaattcctagttaagtaagcgtccattcaattcatgacgcattgtattgttttcgatcaatttgtcgatgcgaaatcttttgaaaacagtggatgtggaga

SEQ ID NO: 150461 - DNA, 387 bp, Glycine max
actcagctttattggagcaggtagaatctggcaccattgcttaagtatgggaaacagctttgcattctgctgcgagaaatggacatttggaggttgtgaaagcgctattggggaaggagcctgtggttgcaacgcggacagataagaatggacagacagcacttcacatggcagtgaagggacagagtcttgaggtggtggaggagttgataaaagctgatccctcaacaataaacatggttgataataatggtaacacagcattgcatatatcaaccaggaatggcacggctcaagtaaattagactatgcctgtcttaattatgcttatagtgacataaacaattcatatgtaggaatatgatgattaagagtagaatgtgatta

SEQ ID NO: 150462 - DNA, 437 bp, Glycine max
  unsure (1)..(437): unsure at all n locations
agctncctaaacaccctcagaccagggccagattantttatattacannganngagcgcacgaacagagtgattatgctaacaagaaatcaatcttaatctaatgtgagaagaaggaaacctgacagcacctgcttctaaactatgtccagaataagcaaggaaaaaagtgattctatgatacaacatttttagagcttttgcttagaagataacattttaacacctgaggggaaaaaaaaacaaattttttgaagagtttgcattgatgactataattattataaacatatcttctaacagaaaaaagggcctttttctttgaagcacatacaactctattaaattcgcaatattgcttgatgaggtatagatttaaaatattaaatggcacatcgccagtgtttgaatattttatatacagaagtcaacttacaa

SEQ ID NO: 150463 - DNA, 401 bp, Glycine max
aactaagctgtcagctcctctagacaaagaaacgagaagttttttcttgcatacgagcccgccgaggtggacctgaacgacccgagagtatatctccatgtgcctcccagattgcttaaaaattaaatctggtgcaagctggcctcaaagcatgctatccaccctaacatatataggtggaacctatacatttggactctggaacttctaaatacagaatctatcttcaaagacacaagagattccatgtagaagactgatatcatttgctcctaaaataggcaagctgtaaaatccacatgagtgatgctgcaccgatgacattgcaagctaagtcacagctaaaactcttcagggtacggtaacttagatcagtgtgctccactatagattgcctattg

SEQ ID NO: 150464 - DNA, 434 bp, Glycine max
agctagacctgtgtgcttagcgagttcatatttttttgtgttttatgggtttttgatgaactctcttagcctgacctatgtgcttagcgagttcatgcctttcttagaatatttgctgggttttgatgaactcgctaagcctgacctttgcgctttgcaagtttctgaattttcttcgtaattttttggtgttctagatgaacttgctaagcctaacccgtgtgcatagtgagttcatgatttttcttcatattgtctaggttttttataaactcactaagcccgaccttgcgcttagcgagttcattcatgtgttcatagtctctaagatttttgtgttttagagcctgagttaagcgtgtcaagtcgtgctaaagcccaatgccttattgtatctcatgccttggcttacagcactagtggcgctaatccta

SEQ ID NO: 150465 - DNA, 472 bp, Glycine max
  unsure (1)..(472): unsure at all n locations
tctcctaatcggcgactcttctgttggaaaatcctgcttgcttcttatattcgctgngagtcatcactttatttgcttctcctaatctctctnnttgttcacttcctttgtttcatcatttcatttcaggatgactcctatgtcgacaactacataagtaccattggagttgatttcgtaattatcactcttcttcttttttgttatttttatttatggcccaacactcatttttattttattttcagaaaatcagaaccgtggagctggaagggaaaatcgtcaagctgcagattgtgagtattcacacttcactgacacgaatcaatgtctnttaccgactacttcatttataatgcctccgatctatattattgtgtttttagtttgcttggtgtaattaccataatntctgcatttccctctgtcggtgttggataatgagaatcatagcgaaatcatcatttcactt

SEQ ID NO: 150466 - DNA, 436 bp, Glycine max
agcttcttcccgtatcgtccagtctgcatttcgttggattctttactaaacccttgaccccggtagttatccagcatctttgtaacaagctgggaatgatcaacatacattcccagcttgaggggggcgtgttaacagtataactgcaattataacaacttttcagttagtagttaaagagttgtgtagattagttagtcggatataacaacttcatgctgcagatgtatataaatcccaatattaatgaataaaccagcaagctgagactgatcatttcacgttcactaattacgtatctttacttcatgctgcttcgtttcatcaatactcaccttatactcttttaatataaaatgcaggacaaaattaatgtataagtgtataactagtatttctcctaagcatatcactttggtagccttgcgatgctatc

SEQ ID NO: 150467 - DNA, 435 bp, Glycine max
tgcagttaagctatggctggtccttaactatatcgtgtattatcatttttacgtatctttgagattaaaatataacaaggacattctaacacattgttctcgaggtagtaattccaaagtgttgacaacaatgatggcacaccatggtatgttaacagataattttgttcttcaaatatatagttaaagtatatgcacagggaattagggaataacatatattaaaagatattagtatgttaaataaattttagaacttaaaccatgttcaagttatacagggtttagtctttttgattaaaaagaaaaagatttaatttcaagtttatgcatgaataatagtattaatagagaagaattcattaaaatacagtgagatgtttaacaacatttatttaataagagtcactttatctcgatcttttattgaaattc

SEQ ID NO: 150468 - DNA, 439 bp, Glycine max
agcttgttctctgcattctctctctccaaaaattcacccattgtgcatctgtgcttccctttcgcattttctacttacaatcacaaaacatttatcatccaagtaagttccttgctttatattctcttttacttgtctaaactttatgggtagaaaaccttacttttagttttagatttttagggttttaatgttttgttagaattagtttaagattaggactttatatacgtttgtattgtattgagtattttgggaacgttgcatgtctgatatgccttttagaggcttgaaaagggcaagaaaacgaactgcgttttctacgttctctggaaaacgcgatgaactccctaagcgagcatgttgcactaagcgagttcatcagtattcattgaatatgtgccgttttagaagaactcgctaagcgctcttaccatgc

SEQ ID NO: 150469 - DNA, 439 bp, Glycine max
ggccacccagctcgcccaggcgagctaggttgcttcctccagaatcaactgccttctggaggaattttcaggaaggcccaagtgggcctggttgctatttgcacccccatttttactaagtacaccgcctgctcttttttggtgattcttttttcgtaacgttacgaaactttacgaaattcgtaacgatgcttgttttctttccgtaatgttacgaaaccttacggattacgtaatcatccccttttttccttccggaacgttacagaactttacggattgcgcactaacacttccttttaatttctggcatgtcacggaacttcacggattgtgctacaatgcttttctttgacttccgacatgtctcggaacttcatgaattacctaacgatgggtgccaagtacctcgaagtggtcaaacgagggtcgcatccca

SEQ ID NO: 150470 - DNA, 418 bp, Glycine max
agcctggttatagcccaatactatatttgttctattgaatagccacccaagttttgcacaaaggagaacgccattgcccctatgtggttttgaagaacccctccacacacaacaaccccagttttcgacacaactccatcacatgtgagcttataagacccctcacaaggagaatccacaccatgtccatctggctatgcagaccaccaattcctccttgaagaatccatcttttcaagccatcgtatttagtatgataaattttaagctaaaaaataaagtaaaattttttcgttttaattgtatatatgttcacttttttttaaaaaaaaatatttgttctcacaaaaaatattttattcaaattaatatttcgggtcgtggacaacgtatgtcaatagagcccaaattgggattc

SEQ ID NO: 150471 - DNA, 410 bp, Glycine max
  unsure (1)..(410): unsure at all n locations
ttaaaactcagcttggntgattctacctttagtttttttattgtgtttgcttccgctagcggctaaacattgtgttgtggcttctgcttaatggctcaccatattccaattgtcttcagatgtgttcagtcattatctatctgctgctaatgtatttccggcatgtttcactgactatttttctacttgtattgttcatcccaagctggaaggtagagtcccctcaaagtgtttggaagtggtgactccaccttccatctcatgtctgagagtgtcaaagttctaccttatctggatctagttngcagtccacctgtgatgtttggcttcacatttatacatcatcatcattcactgcatctgttacttttgccattctccagtgcatcaactacccatgcttatttact

SEQ ID NO: 150472 - DNA, 444 bp, Glycine max
  unsure (1)..(444): unsure at all n locations
agcttgatcttntttgttgnttagtgnttaatttacttcaaaaacactatctgtagttgcatcaataataccaacggatttaatgaggacacccttaccattctatgaagcataaaaagaattgtcaaagcagtttcaaaggcagaaaaataaaggcaacaaaagtaagcattcatatagttgttatgtgatatagtcaagttttctacttttataatttttgttggaataacatacatgaatttaatcataattattttttaagatatatgatgagaattagttcacccatgagtcccaaagtcttatgagcatacataccttatgactaaaaacatcttcaaagattcgaatgccttaaaccacaaataaaaaggcatcttgaaggataagggtaaatctaactataatanttttatttatgaccaatgaaagcaataatta

SEQ ID NO: 150473 - DNA, 368 bp, Glycine max
  unsure (1)..(368): unsure at all n locations
ntataagcacgggtctcggagacgaagggcatgtggtctctatatacgaagatgacgntccgagtacattagatttggtacgactatgccctcctgatctccagctgggaaattggcgagtggaggaacgccctggcatttacgcaacgagcataatgtaaacctttacggttgtaaaagctctatagttgggcctaggctttagagtgtttccttctgtaaagctttgtgtcttttgttttgaatttaaatacaaagatctttcttcatctgttcctacgtctctacccattctcattcatttgcatgtgcacttctctttgtgaaacgacagatccgatgactagtcccccgagagactaatacct

SEQ ID NO: 150474 - DNA, 412 bp, Glycine max
  unsure (1)..(412): unsure at all n locations
agctttggtcgattcggtcattttgatggttatatttagaatgaaaatcacagcctctgcatttgaataattgggctatgagtttggacttttgttttgtgtaattagtttaattagatagattagatgggcctaatcaaggcccatccattccttcttattagtgttagttagttagataattactagttgctctatatattagtgatagttagttagaggagttacttcattttgtacaaaacttgttgtgcaatttcttttctctttttctctcttttctctcaattgttcttcattcttcttcatctttagacttctcttccaccatattcttgcacaaaattttgtgactnttcattggtgatgatcatggagggataaacaattaatctattcaaggatccactcc

SEQ ID NO: 150475 - DNA, 353 bp, Glycine max
  unsure (1)..(353): unsure at all n locations
ggagttcattactactacctaacaaagccccttgtgacttgtttctatttgactcttcctttntggctttcttcgtttcctactctaacgcttcaaccgtggacatgttgatatctttcagcctatcacattctttcctaactctagtgacaaccactttcagcttctccttcgccacttttgtctgttccaactctgccttcaagacttacacctcttcactttcctcgaacacctttgtctttntttcatttagaccctctaagcttttgacccaagcaatccttgcctttaaatttcagccatttgtgataacccctatgacatcatggctcttctctaacgccctatct

SEQ ID NO: 150476 - DNA, 400 bp, Glycine max
  unsure (1)..(400): unsure at all n locations
agcttaggatcaacctagctctgngataccttatattatttaaagagaagagagaaattgtaagagatttgntattgtggaaattcaacccaactgaaaactgattacaattcagtacaaatagtagttacacaactgtaactgtcaactaacctgagttagtgacagctgtaatatggctgtcctaactaacagactaactactaactgtctaactactatggttagacttacagcttcagctaaaaagaaatattacaagtatactcctataaaagcatgtgaattaatctgaatcttgattaagaataaccgaatagtttttaacacatgctgatactctcttgtatggtatggactggccctgccatgtataaataggttttctaaactgatggtt

SEQ ID NO: 150477 - DNA, 441 bp, Glycine max
  unsure (1)..(441): unsure at all n locations
ntcacaatatccaaacaattcaatctcatttgtcttgattctaccttaaacaaagaanaacagagtggaggcagatatctttgcacaagattcattcaaattccacagagtttttcctacccacatacctcagtaacatactcttcgttctgattcgttaaccattggatcgccttgaaaatttaactgagagttcctaatacagaaatctaagtctttaccgttgggatctactagagaatgtctagaacacgagatatactgtctgtcccgtgacagcagaaactagcactgcacaaccattttttctgcataattggcagttttgctgcacaatttgacagcttttgtctgcataactttgaagaattcgaaatccagcttacgtgcatcaaatttcacttcaattggatcctacaagtcctataccatgtataaatc

SEQ ID NO: 150478 - DNA, 402 bp, Glycine max
  unsure (1)..(402): unsure at all n locations
agctntgaaggtgcgtagcccaccattttttattgtagaatactggtaatgtgtctactatcattgtcatcgtttttttgtcattgaggtgccactttgagcttccaggttctccacctttgggcgtattctttgaaagatttgtgccccctttttgcacatgttctgtagttgcatcctatccgaagacattatactgacactgcctaacgaaggaaaccactaggtccttccaagaatggactcgggaaggttccaagttagtgtaccaggtaacagctaccccagtaagactttcttggaagaaatgtattagcagttcctcatctttgtgtatgcccttatcttccgataatacatctttggatgggtcttggggcaagtagtccccttgtacttgtc

SEQ ID NO: 150479 - DNA, 456 bp, Glycine max
  unsure (1)..(456): unsure at all n locations
ctgatggtgtcgagaagaaatcacatgtntgtcatcatctaaaagggggagaatgtgaatgtatgtatacatgattntgatgatgtcaaagaagaatctaacaaggctgcttcaaatgataagcatttgcttcaagaataattcaagattgcttcaacaaacaaagccttgtttcaagattcactaaagaccaagccttgccttaaaacaaagtgctttcaagacatgcaaggctctggtaatcgattaccaggaagtgtaatcgattactagaagacagggttgagaaatagctgttgaaaaatgttttgaatttgaatttcaacatgtaatcgattaccatatgtctgttatcgattaccagcaacggaacttttgaaattcaaattcaagtcataacccttcaaatataactgtgaatcgatacacacacattgtatcgattacaatggaaag

SEQ ID NO: 150480 - DNA, 449 bp, Glycine max
  unsure (1)..(449): unsure at all n locations
agctntcaacaaatgtcttcacaaataatcttcacacagcagaaaactaacaaatctacccatcatatctcccaaaaccccatacccacgaaaatcaaaggagaaagaagtccacccaaacctgaagtttcgaagtcccactcgtagccacgcacttcacgactccggaaatgccctccttttgcgatttggagcggaaatgggcaccaaaggttgaagctttgtgtggagcttcaatggtggatgaagaagagagaaagctacgtgagagagggagagaaaaggcttctgaacttctttcttttggctgagtgaggagagagaacagctttttttttggttttaaataaagggttttctctttttctattattttatttaagcaatgccacatgtctccatttgagtggagcaaaaagggcccactttctctttggattgtgacccat

SEQ ID NO: 150481 - DNA, 338 bp, Glycine max
  unsure (1)..(338): unsure at all n locations
tctgaagaaggacctcactactctggcgcttactnggagcgtcttggcctacttcaaccttgcccttacatcacatacatcttatctgaacttaaatagggcaaggttggtgtatggacttgttatgaagatggatatgaatcttggagccctcatttctggacagatatctctgatagctcagtccaactcctcccggctaggatttctagcgattatcactgctntatgcatggccacaggagtcaccttaaactcgttgactntcaaaactctcagcccaactattaacttggcttacatcaagaagaacttctagaacttggatgacccttcgg

SEQ ID NO: 150482 - DNA, 429 bp, Glycine max
agctttgatgttgcgatttatgtcttgtctatataatagctatattgcccatgtagtagcttaagtagatttctatcgaatccactatatgtttgtaaactttagacttgaagataagaatacatgaatggacatagttacactactacaaaaatcactttttgcgacgttgattttatgccggttgataaaaaaactgacttagaaagaaatacagaggcatctttgtaaataaatgctacatctttatgacggttttgtgaaaaccgtcttagaaggctatcaatctaagaagtttttacaaaaccgtcttagaatattttccattgtttttaatatttcatttctccttccactctctcatgctctcactcttgaacttctcctctcactcttcaactccccctcttgggttcctaagccaccacc

SEQ ID NO: 150483 - DNA, 469 bp, Glycine max
  unsure (1)..(469): unsure at all n locations
gtaatactctnttcttctntggtcaccatatcaaaggatcaagcagtnttgataccacttttgagggagaacacacacctcttcattatgcacaacgatgagaaaacanatccatctctacatctacaatcatcatcacaagtttttntgacaaacttgccaatcctccttcatgacccccctctcctctctcacttagggtgatgaccatctctataggttgaatagtttttcttatctcatgaatatntatntttataaacctaagatcttaatctcaaaagagaaaacaaatcgctaatctacaattaatatctntaaaaatctaaacaatatcctaaaaatttgaaattacagattggaattgtttcccaacaaatatttactcactgataagaatatgatacttanntataaacgatattntgatgttgattctttggctctcgaatacatgtgctttttatcg

SEQ ID NO: 150484 - DNA, 403 bp, Glycine max
tagctggagggtttgatggcgaccctttgtttatatgaacaaggataagggctacgtgggggtacttgagctcagttgaaggtgggcaactgtggatggtgggttcatgtttgatttgtggatgtgggagagatgatatgcaccatcgccctatcgccacctagtaccacatatgacgggtaccccataatcctacaagcttgaagtgagaaagcgtggaagagtcagtcttcctacttttgcttgttgaccacagagtggtacctgtagatatgtcgtgggggtcaggagaccttggggacgtcaggtggggtgctatagcccaaaaccaagcttgatcaatcccgacccaacctgtgcataatcagtcagtgagaacctgtgacgttcctaaacatgcgag

SEQ ID NO: 150485 - DNA, 332 bp, Glycine max
tcgattgtgggatatacatatacatggactgtgactacataggtaacacttgaggtgatcttaccatgggtatgtctgccttaggaactacaccacattatcttatctccaaaaagctaccttgaacttcgacatatgaagctggcaatattagcatagctaattgagcgcatactccatggaaaactcagtgttatctacccttctcatctatgcctttctacactgtcttcaaaaaatgggtgatctgacaatggcatggatagactattttattgactggcagcattttaagcacctgttgatcaacaagcgacgccatctaattatta

SEQ ID NO: 150486 - DNA, 452 bp, Glycine max
  unsure (1)..(452): unsure at all n locations
aagctcatgatgaatcaatattgattcaagagtctcgatgattcttttgtttgacaaaaagctacgataacagagatgatgatctcaagaatcaaagactgaattcaagattgaatcaagaacacttcaaggttaaagaggacatttgatttcaagaatcaagttccaagaatcaacatcaagattcaagactcaagattcaagaatcaagagaagacttaatcaagataagtattaaaaagtttttcaaaaactgagtagcacatgaatttttctcacaaccttctaccaaagagtntttactctctggtaatcgattaccacattattgtaatcgattaccagcagcacaatggttctcaaaagctttcactgaattacaacgttccattgattcaaacgttgaatcgatacaatgtttgtaatcataccatgtgttgacgttgaatcaa

SEQ ID NO: 150487 - DNA, 476 bp, Glycine max
  unsure (1)..(476): unsure at all n locations
aagcttctacaataggacaaagaaaaaagttcttagacagtgttgatctgtgttgcacntaaatccgacttgaccaggatatgggcacctgcagcccacaaggatgatgtggacgacactatctgtgaaaaatacaacattatcaaggagaaatgggcctacttttgttagacccgccgagatccctcatgggaggtatgtactttgtaatttgaattgtttccactaaaaattcagttcttataatagattatagaaatcatcttgattaatgtttgaattttgaaggatgtgcggaaaaaagcacaggccatccagaagcaaaacaccgccccccacgtgttgtctcgtgagggttatgattatttagaacagaagctgatggctgagaagacatagaaaaaactataggaagctgctcagtccggaagcactgagggcgtcactaacactccatattccatcacatgatacat

SEQ ID NO: 150488 - DNA, 466 bp, Glycine max
  unsure (1)..(466): unsure at all n locations
ttttaaacaagtaaacaaagtggaaattttaggtctaatatttcatacgtagaaggcactaattaaagatccgggtccagaggaattgcttgtagtctcatggcctacgtgttggttctgcatagtattgaatgtttggagcaacttgaataaacaataaatagttcatacgttttgttgttaattaagtagttaatcaagtaattgcaataagaagcataggaatggaatgatactgcgtgtgggtttgtgtgtattgtgcaccacagaaatcagagcaaagaataggtggtttttaagcttaaagattaaaaattcaaattcagatgaactgccattatgagtacatgaaacatccaanaatatttaattctaagtttaaataattaatgtgtgcttaaaaagaaagttaaataatttatgaattcttgctatagaagccaacaatctattaggtgctagtaag

SEQ ID NO: 150489 - DNA, 408 bp, Glycine max
  unsure (1)..(408): unsure at all n locations
gataataataagaggttaaacataaaaggacgagttcctggggtgactataagagtgttcctgtatatagacagaattgaaagtagtttattaattgaatcatcttaatatatctgtctggttcttgacaattaattatcaaaacttatagttctcatcctacaccttatatatttctctttatttctttcttattataaaattatattgcttatcacatctatactttctatctcttctatttcattctctctgggtttctatagcataagtgttcacaaaatatttaaagaaagagatataaagagagaaaagtttatgcaggatattgacgtaccagaagaagtcnataggatatatatatatatatatatatatatatatatgaaaagaaatatatgagaaatg

SEQ ID NO: 150490 - DNA, 263 bp, Glycine max
gggccagcagtgaagcctgagaaaagatgcatgtgtgggagattctcgattactgggcatttatcaaaaaatcaacccttgagattaagagcgatctaacttaaaaaaagatggtataagaaatagaggacatgagaagtgaaacacagtactgatttgacttgagctatatagtttgagcataccaacaatggtgtgagaacagattgaagtgtggatctatgaaactcttatttgctgactaccgttctccacatcctgaa

SEQ ID NO: 150491 - DNA, 486 bp, Glycine max
  unsure (1)..(486): unsure at all n locations
acactatgaatactaagcttgtggcctgtcctgtcgttggactgggtttcatttaccatttatgaanatgctaccaaactgacaattgcagaggctaccaattaaattatatgcctaagcatcctggtgaaaccagaactcagttactaaaaaaacaaaatatacaacaacaaagcatatagtgcagtcttggttatctgttgaatgaactatattgaatgttttgcatgtgttttctttttaacttatcatgttatatctggttttggattgttttcagtaggcatctactcttttagtttagaagagtttttcctttatttctatggcctagattaaatntatctttggaatttatttttttattaaactgtgttggtttactatagaattttcatacaaaaactaagataatatttttaggtttgttgttcaagatgataaggaaaggtggttntaatgtttagaaatgagtctgcaattaaa

SEQ ID NO: 150492 - DNA, 419 bp, Glycine max
gagttaaacgtaggaagatatattgttggaaaggcaccttaattgtagtcacccctaacctgtcttaattgtggtcacccctaagcccgccttaattatggcctattagagttggttgtcaatgtcttggaaagagctacctacaaagggactgattagaaggctgagtaaagtgtcattgtatgcagtcaccaggatgttagctcttagggggttgagatcccccatcaactagagatacaatctaaatagtgcttgtaaagcaatcctgactatacaaactggttttgtgtggtagagttaggctttaattcaaatcctaaatatattttttgaaatattaaactgaatgcagtttggttaactgatagagaccagaatgatgggtgtaggctcaagtaattattgaatgagagacg

SEQ ID NO: 150493 - DNA, 461 bp, Glycine max
  unsure (1)..(461): unsure at all n locations
tgagatgaggaagtgttgaagggtgaaacttcctgcttttattgttgaccacagagtggtacctggagatatgtcgcgggggtcaggagaccttggggacgtcaggtggggtgctattgcccaaaaccaagcttgaccaatcccgacctaacccgggcatagtcggtcagtgagaacctgtgatgtacctaaacaggcgagctcctggcagtcaacagataaaaggaacaaagaccacaaagcaaggaggcttgtggtggctggccagctgtgaattntgtgtgacatgtggattgtggcctctggtaatcgattaccaagggtgggtaatggattacaaggcttaaaaatgaagataggaggctaagatggtctctggtaatcgattaccatggggtgtaagtgattaccaggaatgaaaacgaagtcaggaagctaagggagcctctggtaatcgatta

SEQ ID NO: 150494 - DNA, 419 bp, Glycine max
  unsure (1)..(419): unsure at all n locations
tgactcctctgcggcttccacataaggcatagaggatgggcagctcaccaagatgtcttcctcgcctgatacgatgaccagatgcccttccactacgaatttcaacttttggtggagtgttgagggaacaactcctactgagtggatccacgggcgccccaacagacagctgtagggggggttaatatccattatttggaaggtaacttgacaagtgtgagggcctatctgtactgggagatcgatctctcccctaacctctcggcgggtgccgtcgaaggcacgaaccaccattgaactctgctttaagtgggaagcattgaatggtaatttctccaaagtgcttttaggcatcacgtttaaactggaaccattatcgatgagcancttggctacgatatggtccatacacttgactg

SEQ ID NO: 150495 - DNA, 417 bp, Glycine max
  unsure (1)..(417): unsure at all n locations
cctaagcgctngtgccataatgctcctgagtttgtattatcaattctacgcttagtaccacacaattctgtattaaaggattcaccataggaagctacactatcaagtaaatatagattatcattaaccaagagtgaagcagttccaacaatatctgaattaaaaggtaacctaaacacattgtttccaaatgaacacaaataacccaatttatccaaataagaaactgaaaccaaatttcgtctaaatgacagtacaacaaaagtgtctttcaaatccaaataaaaaccaatacataataataatctaaagtgccttatagcttccacttccaccgatttaccatctccaacatagatccatctttcataatcaattggcttccggtagcttaagcaaccctgcattgaaacacta

SEQ ID NO: 150496 - DNA, 468 bp, Glycine max
  unsure (1)..(468): unsure at all n locations
tctacttatgtggcagggcgggcttccttcactntcttgtcccaactttatctctgccactgttttccttcccgcgatgcttcttttcatgttcgcctgagtgggcttatagcctaaaccatacttcccacgatttccttgggtttttatcaggctagttatgccgccattgtctttgcctaaacccatcccgggttcataaccgttccccaacataactcgggccatcattaccgccgcatcggacaggcaaggttgcccaaagagggagtccacggaggaaatgctgaccacctcaaaagactggaaagcggtttctaacgattcttctgcggcttccacataaggcatggaggatgggcagcttaccaagatatcttcctcgcctgacacgatgaccaagtgtccctccactacgaacttcagcttttggtggagtgtagaaggcacaactcccactgagtggat

SEQ ID NO: 150497 - DNA, 468 bp, Glycine max
  unsure (1)..(468): unsure at all n locations
gaaactaagcttttatccaggctcgtcttggtggtgaagctccttctttctggcttttttcctagnggatggcgcctcctctcacctcttctcctttgtcttccgctgcatctccatggtgaaaaatcaccattaaaggacctcattgaagctcanagatccagcctccatagaagccccacaagcaagcttccatcaagtgataatcagagcccaagagcttaaagtaggtgctccttaaacctccattaatttttttgctttaccttctcttccattgttggttattcatttttctccatgtatctcctcacatgtcttgtgctaaatgtttttaacatgattctttagattttccaccgattaaacttgctatagaagctagatntgattttctatgggtcaaatatcttggtcttgttcttgaaccatgaattgtgttgagtttacgctcctttgaagtttggc

SEQ ID NO: 150498 - DNA, 464 bp, Glycine max
ctagctttatgtaattcagcggacatagtatgcctttatcgtcatccgtgtgaaaagttatgaccattcgaatttctcgagagcttccattgctcaatttcgagcgtgttgctatattatgtcccacaatcggacattcgtgtgaaaagttatgaccattcaaatttctcgaaagcttccgttgttcaatttcgagcatctcgatatattatgaccccaaatcgaacattcatgggcaaagttacgaccattcaaatttctcaagaggttccgctgttctatttcgagcgtctcattatattatgtcccacaatcgaaccatcgtgtgaaaaggtatgatcattcgaatttctcgagagcctccgtttgtcaatttcgagcgtctcgatatattatgtactccgatcggatatcagcgttaacaggtatgtctatttcaattttcgagaacttcattattaaat

SEQ ID NO: 150499 - DNA, 393 bp, Glycine max
cttttgttatagtagattctgactaattattataatttggataaatttgtaatgattgatacactattacaatgtttacttttgtacattaatagaatgtttattttgaaaattttctattgtgacagcattaggtagtgacaaaatttaattggatcatactttttgtgaggattaacttaatggttgtacatttttgtttgagtatcatattttggataaagtactgttatattagaaatttcatagcaacaaaaaattatgcttattaatcaatattatgtctattattatgtttggtctaacttatgttagcttccctatttttttgaagttcttattgtaatattatgctcgcaacgataaaaaaggaggaagatgaagaataaatta

SEQ ID NO: 150500 - DNA, 467 bp, Glycine max
  unsure (1)..(467): unsure at all n locations
ctaaaggtaaactanatgccttggtagcctgtaacccatctgttcatgaatcananatctactcctgtcaccagactctgtggtttatgctcctctgtcgaccaccacacagacctttgcccttctatgtagcaatctgaaacaattgaacagcttgaagcttatgctgcaaacatctacaatagacctcctcaaccttagcagcaaaatcaaccacaatagaacaattatgacctctccagcaacaggtacaatcccgggtggaggaatcatcccaaccttagatggtcgagtccttcacaacagcagcaacaacaacagccttattttcagaatattgctggcccaagcagaccatacgttcctccaccaatccagcagcatcaacaacaacaacatcaacagcaacaaccccagaaacaacanatagttgaggctcctccgcaaccttcccttgaagaactcgt

SEQ ID NO: 150501 - DNA, 463 bp, Glycine max
  unsure (1)..(463): unsure at all n locations
tccactctagttcacattcgagtacctaatgggtgtgantttatatacgtnaaaactagaatacacaatacccttaagctaaccgacaagcaatttttggatgaaatttactaccggcggtctttcacatatgcaggtaatcaatttcggtttcaatgtatgcaactgaaagatgatgcagatgttaacacaatgttaatgtgtaatcatgaattttcgtttgttggtccgattgagttattatgtagcattgctagaaccccatatggtattttaaacttacttcaagctactatgacccctactcatgatgccctgctttattaaaatgggaggtggaacatgtcacgccaaaatgagtttcttggttactcgttcacagaaaaaaaaaatcccaaaaagtttgacattcccaccgatgtaccatggatgaactgaaggatttgatcaaacaagttacacc

SEQ ID NO: 150502 - DNA, 469 bp, Glycine max
  unsure (1)..(469): unsure at all n locations
taagctaagtgtaaaagttaacattgaagtggacttttaatttgtatattgaatntccacatggtgtagtagataaacatatcacagctacaagcacaacattgaacaaatgtagtagatgtagcccattgggagcctttgataattntacaaaacaagttaattactacaagaatgagtagcctaagctaatgaaaaaaattatattccttgatccaatcacaagattctttgaaggaagttggttcattgttatgcatctctttgaatgggctatcaagctgtttgacttagtccactatatactttcatcaataaatattttgctaattaatatttagacttttaggttaaaattgtatactaaaaataaatttaaatttaattaggtaagaccaatttgagttacagggagttttttttctcgagtatttctcaaatactcaataatatttggttctacttttaa

SEQ ID NO: 150503 - DNA, 436 bp, Glycine max
  unsure (1)..(436): unsure at all n locations
ctctaaattctttttctctctttttaaaaagtataaaattntttagaacctctccaatcaagaaggaatcccaacacattccttaatgcggatatcttcatttcaagaagaattaagtgatgaaaatataaggttggcttgatgataaagggtgaaggaagagagggataggaatcttccggttaacaaaaactaataaattaacaactaacatttaccgataaaaaaaaaaaagatagaattaagtgattagttntatctccttttcacattataggttcttcaatgtttcttcacaatttctaaaacattgtctgtagactgctccaagcccagttccttctcaaacagccccagagaaatgacattgatgtgtctaatataagttctctcttagtcttaaaatttcaaatctagnggttactatactttgatg

SEQ ID NO: 150504 - DNA, 404 bp, Glycine max
caaatgggcataacttttcacacggatgtccgattcgatcgcataagatgtcgagaggctcgaatttgaacaacggaaggtcttgagaaattcaaatggtcataacatttcacacggatgtccgattcaggcttataatctatcgatacgctcgaaattaaacgtcggaaactctcgggaaattcaaatggtcataacttttcacacgaatgtccgattctggcgcataatatatcgagaggctcgaaattgaacaacggaagctcttgagaaattcaaatggtcataacttttcacacagaggaccgattcaggcttataatatatcgatacgctcgaaactaaacatcggaaacactcgagaaattcaaatggtcataacttctcacacggatgttcgattc

SEQ ID NO: 150505 - DNA, 466 bp, Glycine max
tactcagcttatacggtggctcgcacttgttgccgaaatactagtgtttcttgatggagctcgtggcggcgtgtgtgttgtttctaattgagccatgcgatgcaagagttcatcaatcttgaaggacatcgaagatgaaagccgcgcaaacgcttcttcccaacgatcagtgttgactttcgaatgtgtagcttccgccatggcacgtcaatgaaagcaccagtgatagcctagggtattcgaggcccctagctaacctcccagagatgaagaagagactgagaagggaagagagagatgagatagagagagctatagtttttaggaagaagaagcttttattactaacatatcctcaggaaggaagatacagctcttataaccactgagtggtagttacaacgtcctaacggtctaaccgccagcctcaactactgctccttctcgaaccttcgtgcgctagcta

SEQ ID NO: 150506 - DNA, 290 bp, Glycine max
  unsure (1)..(290): unsure at all n locations
atcctactgagcaagattccactgattcgtgatggctagagttaaaataagccgattagtgacacgcttcactactggagaaaagatttctgaaaatcaaagccttgtacttcattaaaaccttttgcaaccagtctagccttaaacttattgattgaaccatctgcattttctttgaccctaaaaaccgcattacaaccaaattgcttntctgtgtgggnggaagagacactaatattccgagtggtgaattcttcatcaatcgcttccattattctttgtgtgcattg

SEQ ID NO: 150507 - DNA, 478 bp, Glycine max
  unsure (1)..(478): unsure at all n locations
cagctntagcctgatcgctaagcgacaacttatcagtggctaagcgggatctattgttgccaagcgcaattccctacggccttaattgaggtccatgaggctaagcaccagtcatggcagctaagcgagattctttgcggcaatatgagcgctaagcgagtacctcttagctaagcgcatgttcctttgtactcaagatgcatcattttagctaagctggtcaagactaggcttagcgagagttgcagcttttctaatctgcaggtctcgctaagcggacataccctcgcgctaagccgagtttctgttcataaaaaaaatatttttattttgaatttgaatcgtcggttcagcgcgcgtgttcgctaagcgagcctggttgagaaaccaaacatctctcttgctcacttagtgcaacggtctgctaagcgaaagtatcgaaactacttaagtgagtgtaacaacaattacactcaca

SEQ ID NO: 150508 - DNA, 470 bp, Glycine max
  unsure (1)..(470): unsure at all n locations
tatcgtaatcgattagataattattttttagacaatgactggtttttcatgagtctctactttaatcaattaccaggtgatgtaatcgattacttctctcttaaaagtgtttctgaagtgatcaataacactttatcgattatatcaagaatctaattgattacattgttcttgaaagttctccagattctgggaagaatactttaatcgattgaaatgataatataatcgattacttctttgaaataattgattacattgtatatttaatcgattacatgcgattataactattttctctataaatagccaccttgtgttctcacttcaatgtggaaaaattaagtgtgaaattatatgagttgaagtaacagattaagagaaaagaaaaaaagtgcttagatacaatgtgactcacaacttctcaatcttgattatgaagatcatatngtgaaaagtgagttatgaat

SEQ ID NO: 150509 - DNA, 476 bp, Glycine max
tcaatcgcagattgtagagagtagtgagctatggctagtatttctatttacatagggatatgcaagaaaacatttgttaatggtgttaagagttttgtttagatttcttaaaaagaaaataatagtaataacaacactgctgttgctcacgtccctatttgactcgtgtttgaggtcccttataaacttccttttaacttaaagcgtgtttgaggtctcggacgtggagaaagagtctataatccacgttaaatagttaaataagtgtttccaaacacccattatagaaggagaatccggcaacatttaaacatggatattttttactcgtgagaactgctaatttgcagtgaagttattataggctgaagcaatataagaattctatacagcgcataatgatcaggaaaaaaaaaatgttcaaaagatgaataaattatccatattataaatgatcagtgagcaccaggaaacaa

SEQ ID NO: 150510 - DNA, 394 bp, Glycine max
  unsure (1)..(394): unsure at all n locations
ccttcctggacttatatatagatgacatcaaacttcttcttagtttaacagcttcatggtatcatcagcttcctctgtagacatccaagcaaaattccctaagtcttgctcccatttcttcttttagaatgagaaacttatcaactttctccttctttagagccaacgtttcattctctaatttcacttgagcaaggacaaattgcaatttgtcatacttgacatcaatgcttgactacatctcattaaatcctgagacaactntatttatcttatattctactgcttctaaattagagtcattgtactatctccgtttcattctgtctaactaaagcaaaaagttggttcaattcacccattaacacattctttcttttacaaaggatctctc

SEQ ID NO: 150511 - DNA, 468 bp, Glycine max
  unsure (1)..(468): unsure at all n locations
ttctcctggcaatcaatngtgtaggcattataattgatcttgtctagtacttgaaatgcaccatctcttcttggcatgagcttggagttcctttgggaagggaaccactctttcttgaaatgtacccaaacccaatcacctggttcaaatgttacgtttttccttcctttgtttgcatattttgcatacccttccattttttttctcaatttgggacttgactttctcatgcatcttcttgacatattctactttaacctgcccagacttatttttaaattgtgaaattttaggtaaaggcaacaaatccaaaggagttaaagggttaaaaccataaacaatttcaaaaggtgacaattgagtagtactatgcacaaccctattataagaaaattccacttgtggtaaacacttttcccaagtcttaatatttctcttaataacagccctaagaagagtagaaagagt

SEQ ID NO: 150512 - DNA, 439 bp, Glycine max
  unsure (1)..(439): unsure at all n locations
ttctatcaatggcaaatgctggtcctgacaccaatggctcacaattnttcattacaaccgtgacaactagctggtaattaaacctagatcaatagcttattgcagaagaaaacaaatatcaaaatcttatgttctactgcttactaaattattttgctcttttcattaaagcatatttgtagtgcataatactttgattctgctatgatcttatgacatacatcaatttatgaaggcctgtatttcctgtaaccatttatgcagattgtgcagtgtgactttagatatacgaatgagtttctttggcattttatttgtcataaatgttgttgccatgcattaagaaactactaactattaatatatacatctatttgataggttggacggaaggcatgttgtntttggtagagatctttctggattggatgttgttaca

SEQ ID NO: 150513 - DNA, 420 bp, Glycine max
gtggggcctagctcatacaatcttgctattttctgacgtgcgaagacgcagactcctatcgctgcaatagatctatatatctgggaagccattgatataaggccttatatacccaccacagcagaaagagtttcaatagatggttgttcatcaagtgaaagcataaccatataaaaacctatagatatatggtctgaagaggatagaaaacgagttcaatacaacctataagccaaaaacataataacatctgccctatgaatggatgaatatttcagagtttcaaattgcaagagtgctaaggaaatgtgggacactcttctattaacacatgaaggaactacagatgttaaaagatctaggataaatgcactaactcatgagtatgaattatttagaatgaatacaaatgaagatatt

SEQ ID NO: 150514 - DNA, 489 bp, Glycine max
acacttaaaactaagctgagaatacgccagttatgttatcttgagatacttatttcttcgtaaaaacataatttaaaagggtaattggactgcttagctctatgcttttagtaaatgataaacaacaaataacacacaactattgagatattggaagattaatgtagactatcttctgttatttttttgtattatgcttgtgtatgtattatacgattgttgtatttaggaaggcatgttgtattttagaatatctgattgatatctcctagatttaggatattctttcctcttttcatgttccttgctaggagagatcctacacacactgattacttaataaatacaaaagataagataaggagaataagatcaaatcagaattgaataatttgatcttgatcttaattacctaaatctttataatccttatttgagttttgaaataaaaacacataatgatacagctgttaacgtcttctaatctgt

SEQ ID NO: 150515 - DNA, 426 bp, Glycine max
  unsure (1)..(426): unsure at all n locations
caacagccttctggaggaatcttctggagggcccaagtgggcctggttgctatttgcacccccattnttactaagtacaccccctgcctttttttggtgattcttttttcgtaaagttacggaaacttacgaatttcgtaacgatacttgttttctttctgtaatgttacggaaccttgcagattgcataatcatcccattttttacttacggaatgttacggaaccttgcggattacataatcatccctttttttgacttacagaatgttacggaatctcgctaattgtgcaacaatgcttccattagatttccggtgtgtcacggaaccttacggattgtgcatcaatattttcttttgtttttcggcatgtcccggaatttcacaaatcgcctaatgatgggtggccagcacctcacaaggac

SEQ ID NO: 150516 - DNA, 454 bp, Glycine max
ctcagcttcgctggaggaggttaactgtggtgtatggacttttcaagtgcttgtgtgtgggtgacaaccgtgaataagagagaaccgagctcagggggtaacaaaccttcgttgaagtattggtatcgtgtgaagagagttcacggtggtagtcttgtaggtacgatggtgcttgtttgggtcgtgttgagcgtctgggttgtgagaaaatgggttcctccacacgtgtaatgtttacgggttcatgtactggaggtagtgttggtgaggttcctgtaattgggtcatgttgggtaatggagaagggttctgggagtagtgtgctgggttttatatctgaatgttgtgggttaatgatttgcggaaaatgattttcataaaacacaacatttcgggatgtagtgatgctatgtgaatgtaaatcatacatcaaatatcctttcgtgtttgtttt

SEQ ID NO: 150517 - DNA, 221 bp, Glycine max
gtatcatagaaaatcggttcacagcgaagacttcataatagcagtggagcgcttctcactggacatttgtatgtgacctcgtgtaccactacgcggaatactatgatacgatagtctagagataaatacaagtctggaccgcttctttacctcattttcacatgatatttcgagatgcaccgtattttattttggccgtattattattacccgtggaatct

SEQ ID NO: 150518 - DNA, 392 bp, Glycine max
ttctcaaggaagttttctcaaagaagcttctcaaggaagttttctcaagaaagcttctcaaggaagctacctagtctataaatagaagcatgtgtaacacttgttgtaactttgatgaatgagagtcttgtgagacatacttcaaagttccacttctatacctcttttattccttcaatttcgtgctcccccctctctctttctctccctctttcttttcctccattgaagcatcctctccaagcttcttatccaaggctcatcttggtggtgaagctccttcttccatggcttattccttaatggatggcgcctcctctcacctattttcctttgtcttccgctgcatctccatggtggaagatcacccataaaggaccccattgaagctc

SEQ ID NO: 150519 - DNA, 199 bp, Glycine max
aaatgtcacatatattaataaaaaaagtgcatattttagcataagattcactatataactctctcgtttacagctaaaagaatctctgaaaatttattttaggtctcactcattgttgagtcggtcttgtctttcggtctcaaatatgagaccaacaaggaataactacactgtttacgttcccgacacatcaactgaa

SEQ ID NO: 150520 - DNA, 453 bp, Glycine max
  unsure (1)..(453): unsure at all n locations
gtttctanagaagcttctcaggaagttttctaaganatcttttcaaggaagctacctagtctataaatagaagcatgtgtaacacttgttgtaactntgatgaatgagagtcttgtgagacacaactcanagttcaacttctctctctttttcttccttcaatttcgtgctcccccctctctctntctctccctctttcttttcctccattgaagcatcctctccaagcttcttatccaaggctcatcttggtggtgaagctccttcttccattgcttattccctagtggatggtgcctcctctcacctcttctcctttgtcttccgctgcatctccatggtggaaaatcaccattaaaggacctcattaaagctcanagatccagcctccatagaagccccacaagcaagcttccatcacctacttcgggaaaagagctctggaagcagcaa

SEQ ID NO: 150521 - DNA, 404 bp, Glycine max
taaacaatcccaatcagctcctcttaccgtggaagaacagataataaggatttatactggaataaatggttatcttgattcattagaaattggacaggtaagaaaatttcttgttgagttacgtgcttacttaaacatgaataaacctcaattcagagaaatcatatattcaaatgaaataaaaagatattaaaacatcctaattataagaatttgaaagtgaaattataaatttattaaatgattaatcaatttttttctacctgttcctgtagtaaaaagagttcgtctccacaggaactctagtttacttaattcatttggataaaggttattagttcaatagttatatacacaattaatcgaatgtcattggtgttggtttgattaactaaagacaacat

SEQ ID NO: 150522 - DNA, 282 bp, Glycine max
ttcaccaccaagagagtgtcttggataaaaagcttagagaggaagcttcaatggaggaagagaatgagagggagagagggagaaagtggcgtgggaaagaaggaaagagagggagagaagttgaactttgaagtgtgttttataagactcttattcatcaaagttaccacaagtgctatacatgattttatttatagcctaggtagcttcctttaaaaacttccttgagaagctagtgttacacccctccaatagctaagctcacccccatgccaaaataca

SEQ ID NO: 150523 - DNA, 466 bp, Glycine max
  unsure (1)..(466): unsure at all n locations
tcagctttgtcctccactagtctgccttaagttaccaaatctacatttcttacatcctgtnaaactagngcaccccagatactaaggctttntagaatcaacttgtaattgctcatacaaaggtgcatgtgcttgccgaaaaccctcttgtccaagatcgtgtatcatttcttctatacgatcttcgatgtcttcatcaactgggttagtatgagaagctattgtcacatatgcctattcaccattccaaatccattttgtgtaattcgaaatgatcccctcacatataagatatggtcttatttcatttagtgaatgtcgtctcccattcccacatttgacacatggaaaaaaatatttcccacggataatcggtgcatatcgttcaacaaattgcaagaattgttcaacttcattgtcatactcatcacttatgcgacatgctgtcatccaacttcagtccatg

SEQ ID NO: 150524 - DNA, 474 bp, Glycine max
  unsure (1)..(474): unsure at all n locations
actaagctaaagatcatcctcgacacttattggtgaatctataaggtttatcaactagacattctcttaaagatttatgcaataatatggcttttgtatctatgattgaacctaaaaatataaaagaagctatagtagatgataactggatcattgccatgcaagaagaactgaaccaatttgaaagaaacaatgtgtggaaattagtagaaaaacctaaaaattatcctgttatagggacaaaatgggtttttagaaataaattagatgaacatggtataattattagaaataaagccaggttagtagcaaaagggtataatcaagaagaaggaatagactatgaagaaacatatgctcctgttgcaagattagaagccattagaatgcttttggcatatgcatccataatggattntaaactttatcaaatggatgttaagagtgcctttctaaatggcttaattcaagaag

SEQ ID NO: 150525 - DNA, 415 bp, Glycine max
  unsure (1)..(415): unsure at all n locations
ccttgccagtgtggaatgtaatccttaccctcgggagcaaaaaagaaaagaaggaaaatttccaatcaaagaggaagcaaaaaaaaaaatggagagaaggaaaatttccaatcaaaggaaaggaaattccctatcaaagaatgggagaaagaaaaaaagagaagtaaaaaagaagagagctcaaggatcgaaagaaaacagaagaaatgtgcaggaaggtcgttggaccacacaatatctgaacaatacagaattgtcaccaaatgaacaaaagaaagaaaaggaaaccacgacctaaaatggtcttccccctttaattgccaaccaaaatcttgtgcgctagcgactntntcgccccgcactaaacaaaaacagaaaaggaaaaagccaacaaaaaaatcaaaagcccaaaaca

SEQ ID NO: 150526 - DNA, 427 bp, Glycine max
aagatttcgtcaaggcctctccctcttgattcagatccaacccacaacacattttaacgtgtgcctctgtctataaactatacaaaatacatgactcctcaattattctcaaaataagtttaactcgtcgtgcctcaaactgattcaactcattggctttccacagtggatcccatcacaatactcgtcgcgcaaaaacttattctcctcaaaggacccacggtcgtgtgattgtacagttcatagcttacaacttaatgcacacaacatctcaatacacatgtgatctcacaatttaatacatactcaacttgtcacttacacacagttcatcacactttcctaatcccaaggcaacaagttgtcacacctcatgcatcatatacatatcacaccgcaataatattaatatgttatgttcatatga

SEQ ID NO: 150527 - DNA, 463 bp, Glycine max
  unsure (1)..(463): unsure at all n locations
gtgttctanaagttggttatggaattcttatatattcttgttaaattctgaatgcttatgtgatactttatgaattgcttatatttttgaaacttataacttgttatttattattttataattattatttataggttctagatcaattgaagaatcaacttttactgatgagattgaatccaatgatgaaggtatattcacttttagttgttctaattttttttaatatcattatacatatctaatttttcaaatattttaaaatataagtggatctttggtcagtaacattactcaatgtttgcaagattagtagacattattgttgatcggtaaagtaataactatacttatttactaatgtgatgtgtgattttaagatttgaaacatctacaatatgatgtttgattgtataaataccaggttgagcgctgaagaagaatgttgatgacatctttggtg

SEQ ID NO: 150528 - DNA, 418 bp, Glycine max
gtgtgaaaataagttcaaatcctatatctgaaatgaaattatgcaaggctttgatgtcaagaatggattaaatacttgcatttgtagagattcattgatcttattctgagtatctaggtttaagttacctaaataattagggatttgacttggaactcaagcattaattgctaagggattatgattagtaattgtagtttggatcttggttgcattgaactaggagattgactaggaacgaatttcatatgaaaaattatatggatttcatctcagcaacattttgatatgttagattcatttttcgctccaaaaattgtgttttgaaaaaccaaaatcaatttggtttcgtcatagaaaattgacacctctctacaatgaaacatttttttctaataaaaagtaaaactccacacat

SEQ ID NO: 150529 - DNA, 442 bp, Glycine max
  unsure (1)..(442): unsure at all n locations
tctggtgtcttctatacacacaaaccaatgccataattcanaataggtaagatagaaatgatgatagtcattggcagaaatattaacttctgcaactgctactaagcttgcaatggaagatattgtatatatagtaatgaactttccattcagtaacacaaatttgttttatttgtacgctcaaatatgttagattgtgtgttcaacttgaaatcttaaatttctattttacatcttttatttggcattatgtaacaaaagatgcaaaaaaaaagtttactaaatgtttatatcaaagatgggcatcggttgtttatatattgctagtctggcgcaccacaaattcttttttgatttcttttgtccatagattagacttgttttatatagttctagtttgctctagttaaaatcagtattatacttgcataagccatcaatg

SEQ ID NO: 150530 - DNA, 454 bp, Glycine max
  unsure (1)..(454): unsure at all n locations
agttcagcatcgtgattggttctttgtttttataacaggttgattgctaattctgaccaaaatgttatgaatttggactctaatgataaaattntgtgtgaagggggaatagtggatgatggtgctagattccctttgtgagtagagttttggaagtgtttaagaataaatgaaagtgttatagcccaaagatcacaggctcgatggattaaggagggtgatatgaactcccgttactttcgtttctctttaaggccgcacagagatctaactagttgattgcacttcattgtggagatcaatatatggaaagtgtggaggaaataaaggatgaagttatcagtcactctaaatagattttctctaagccaatttctatcaagcctcatcttcctggtatagagtttaaacaacttttagctaataatatctctattttatcttgcccttttat

SEQ ID NO: 150531 - DNA, 471 bp, Glycine max
  unsure (1)..(471): unsure at all n locations
aagcttctaaggaggtgagcctagtatgagaggtgtgtgtgttactgatctctagcttctcaaggaagttttctcaaagaagcttctcaaggaagttntcttaagaaagcttctcaaggaagctacctagtctataaatagaagcatgtgtaacacttgttgtaactttgatgaatgagagtcttgtgagacatactagaaagttccacttctctccctcttttattccttcaatttcgtgctccccccctctctctttctatccctctttcttttcctccattgaagcatccttccaagcttcttatccaaggctcatcttggtggtgaagctccttcttccatggcttattccctagtggatggcgcctcctctcacctcttctcctttgtcttccgctgcatctccatggtggaaaatcacaattaaaggacctcattgaagctcaaagatccagcctncatagaagc

SEQ ID NO: 150532 - DNA, 441 bp, Glycine max
  unsure (1)..(441): unsure at all n locations
tcatgatgatgaacctagaaantttgatgatgccaaatgttcctgtgattgattcaagacttcaagatcaagcatcaagaatccaatccaagattcaagattcaagagaagaaatcaagaagcaacaagtcaagacttcatataggataagtattaaaagtttttttcaaaaagtaaatagcacagtcttgttttacaaaagaattttctcaaattttctaagttaccagagtgattactctctagtaatcgattaccagtgaccagtttggttttcaaaatgttttcaaatggtttacaacgttccaaaatgattttcaaatagtgtaatcgattacactatattagtaattgattacaagtgaatctgaacgttggaattcaaatccaattgtgaagagcacaacttttataaaatgaattgtgaatcgatacaccttt

SEQ ID NO: 150533 - DNA, 467 bp, Glycine max
  unsure (1)..(467): unsure at all n locations
agcttagcaaaagtttaactttattatnaataatttgatgttattatnttntattaatgaatctcacatgacatgtcacgtgagagtttgtctaatatatatatttttattataaaaaacacaaatggcatcaaactaattagttagacttgctagtttgaccagtgagtttgactttcattgcttaggtgacatggaagcttatgtggcatgaaactaactaattggtttagccaactgttcaaaagtagttccaaaatcactaaacttgtttggaagaataaaaatccttgaacattcaaggagtgtctatacttaaaaagtgataaaaagataaaagagataaatgattgatataattaataatatgacatgacaaanaattactaattaacacattagtcctacaaaaaatntctctggaatgtgnttttnntttttgctactactttaatactttcaatatt

SEQ ID NO: 150534 - DNA, 477 bp, Glycine max
  unsure (1)..(477): unsure at all n locations
ctattatacttttccttcttaatttcttctcctatnagtgtttgtggatattnttatccaagcatgcccttatatacctttcgaagaagttgaatgaaaagagtttttatagaagtgcataaattgattttagtttatgtggaatatcaactcattttaccttatcatcttctcctgtaagtacttatagagaagtttatctagagaggaccttgtacactntctaatgtgtaatataatcctttctttttgttctaagaaaataataacagggtcttgcagcggaaaaaggtgacatcgcaagaggcacagatttcactgcgacattgcctctgcctcacacaacagctattgatttcaggcaaacttccaaaatgacatttctatttattatcaaacataatttgttgtatttaatttcgagcaagactttgacgttccttcanatttaacgtatcaatntagttagttagatgt

SEQ ID NO: 150535 - DNA, 419 bp, Glycine max
  unsure (1)..(419): unsure at all n locations
acttaggggggaacttccttaaaatcacaacagaacacacttcattgagaccaattgtagcaaagtccaccaactttcctttatttgaaagaatntattttaaatatttggattactttgacatttgagcaattgcctcagcaaatgagaaactgatgtgcatctatttaagcatctcaataaatctagaaaactaccaatccttactcttgtcttttaatctttgagggaagggaacatttacctgatgagatgttaatacatatttcacaccctcttagttttccccttggttctcttcagtaagagcctcttttttttgatggtggattgactntctccttctttttcaactntgtcataggacttcctctcttgttacttaaaaaattcacttcctccttcttaggattgacttc

SEQ ID NO: 150536 - DNA, 477 bp, Glycine max
  unsure (1)..(477): unsure at all n locations
tttgcccaattcgcttttgatctcgataaagctgctcattttctttttcttgaggtcaatgattgcgcgagttgcttaaacaatcccaatcagctcctcttaccgtggaagaacagataataaggatttatactggaataaatggttatcttgattcattagaaattggacaggtaagaaaatttcttgttgagttacgtgcttacttaaacatgaataaacctcaattcaaagaaatcatatattcaaatgaaataaaaagatattaaaacatcctaattataagaatttgaaagtgaaattataaatctattaaatgattaatcaatttttttctacctgttcctgtagtaaaaagagttcgtctccacaggaactctagtttacttaattcatttggataaaggttattagttcaatagttatatacaaatttaatcgaatgtcattggttntggtttgataactaaagacaac

SEQ ID NO: 150537 - DNA, 392 bp, Glycine max
acccaccatcccctggtgcccacctccagctgagctcacgtactcccacgtagcccatatcctcgtttctctcaacaccgggtccccatcaatcctcccaagcttccacaacatccaagcaaaacaacattcacacagcacaagctatcacagccaagcaaaacagagcaaaggcagaaaactctgccaaaacaccaaccaaaaatcacagcttttcccactcaaagaccccagtaacaatttccttcgatccaattcgttaaccgttggatcgactccaaaattttactggaagtctatagtgcataagcctacattttgaccgttgggatctactagcaaacatccagaactcattctacattactctttccacaaccagcaaatacatg

SEQ ID NO: 150538 - DNA, 487 bp, Glycine max
  unsure (1)..(487): unsure at all n locations
acacataaaactaacctagttctctctagtcttcgcacaactaaagttctcgaaattctctggaactnggacctttctctctttagaaatctctaaaaatgcagaagctcaaggaatagcccaaactccatctccatttctgatttcaggcttaaataggtggccttgttggtgcttgtgagcttaacgcatgtctgcctcgcttagcacacataagtgaatttcggcttggcgctcgtcttctcacttagcggatgcatgcaagtggagcacttagcaggatgagctctcgcttagcgcgtgtgtccagctcatccttcttctagattcttcctcgcactcagccgcaagagaggtgcgctcagcggatggcttgctaagccagcagattggcttagcgagcagattaaaatcagcacttcacaaacttacctaattaacttgaaattgaaaggaaatgattattaaatacacaaaatgggagtac

SEQ ID NO: 150539 - DNA, 364 bp, Glycine max
  unsure (1)..(364): unsure at all n locations
tctgatacggaccttaactagctatatattgaaatagctacctgttatatgattaaactatataataagttttgtatgcgatctatgatgaaggaatccttctcagagtagttaagaagtactctattttgaccccttatttattttaaccgatagttcagattaaatccctaaagatccacatgtgacctctcttcccaattatccactaatgctctatcttattcttgccagttcttcaccaccgaanagtagatagcattaagggtgatggccaaatgagaaaagaaaaagagaagtccaattgctcgatgacacctggtaaatagggcctttgcactggactcanaactacaagttatgg

SEQ ID NO: 150540 - DNA, 422 bp, Glycine max
  unsure (1)..(422): unsure at all n locations
ggagtgngggatctaagtagatcttagaagagtgtagggatgggaatccaagttccgtttggatccaggatataaagttagccctctggtttgttgttgataggcttatataattgttttctagcgggaaaatccattacatgctcatggtcatgtgtatccaatggttgccaattgacaaagtttatccccttgttagtcaccaagcgtcggcgatgctaagagatctcgacggagacatctaagatgcccaggtccaatatacatccataacaatattaaataatgtattaaaatatattgctaaggtgacattgatttgaatctttgtttcttatntttatttttttaaaacaattttcattntcaaatttagaanaaatgttcgttttgatttgctattatatattcttaaaatatga

SEQ ID NO: 150541 - DNA, 451 bp, Glycine max
  unsure (1)..(451): unsure at all n locations
ctccctcagttggtaacatgcttctagacttatanatctctcattntcttattagcttttaatctataatatcatgtatttatgcacatgaactgcatatacctgtgtaatgaactgcttgcaaatgaagtgtgagaggtgaatgcttttatgaaaatagcttgattgatgaatttctgttaccattcagtgaaatctgtcaaagtatcatgtagttatgctcacaatttttttaaatgtattttgatttttaaacaatttatgtaagtaatctttccttgctgttgttgagaagaataaaanattgtttgttctagcattttagaactaagtgatctttattttattattatctgataaacactcggtgatccttatatcaacttttaatcaatgtcctttngttgttcacggatttattgcatctgcccttaattatggactcattaca

SEQ ID NO: 150542 - DNA, 465 bp, Glycine max
  unsure (1)..(465): unsure at all n locations
cttagaatctcagcttaagctcacaaagggatttccttcaacaacttcttttttctatattaaaggggtatcaacacaagagaaacgaggagaacatcttgccttgaagagaatcaagcctcagaaaaggatgtaggctttgatctcccactcacaacaagaaaagacataaaggaagaatgaagaatgaaagaaatgtggaattaagggaggctcttgcacatttaaatgccctcttcaattacttttgttttttgcacccaagttcctctaaatcaccctttctatatctaacactctcaaaatctacactttaagccgnacaactttatgaaaaactatcaataatactatagaagatagcacaacaatatatttattaaattcgattatagatatcatgaatcaaaatttaattacttcttataggatttatcaagtacttaacatacattacgaaaatca

SEQ ID NO: 150543 - DNA, 187 bp, Glycine max
aggatactctacatttcaatacttttgttctctgccaagttttcaacgagttcaactctataagtatggagaaacttaatgtgttccaaggcattcaccaaaaccacttatttcttggaattgtggggattactttggttcttcaagcattgatggaggaactcctaaggaaattcgctgataccac

SEQ ID NO: 150544 - DNA, 452 bp, Glycine max
  unsure (1)..(452): unsure at all n locations
gttcctctgttgagtgtatatcacatncctcttatttatacatattcacgtaataatatatcaaaaattgttgattgtgctactaccgttgggccattcatctcttcagtgattgtgtgcacttctgcttttggatttaggcctcagattatgtcttgaagcataaaattttaaattaactcaaggtatctaatagtaaacaactgtctacctgaaagcacgtcatcttcacagagtgtatgtacacaactacacattctacagtgtctattttatttcttaaaaaaaaattgtcaaatcatgaagtccctagttcctcttctggtagaacatagtttgattgctctagcacacaattaaatctcctttagatagcaatctgagagaaaaaatggacattaagtggtttctgtcctgctgtcatatatgatcacacaggtgtgtgcactaaa

SEQ ID NO: 150545 - DNA, 421 bp, Glycine max
  unsure (1)..(421): unsure at all n locations
cgccactggtaatcatgaatccttttggtagattaataattatttttggcagttaccaaaactaaccatctttttcattcaaaattttgggtttataaccggcttggatcctgatttgattatacatgctactgatgaaaaagaacaatcagtttcattctgaaactaaagttatcttaacctttcattatctcctcctgtagtatcatttcatttcactagttnttctatatgcagacaaacttgtatagcccagtttgctaagttttgcttcattatagctaagctaactgccaatcactgctatttgttttgtttggaatagctcttgcgcaataagcttgtatctgttgcacgaaaaagcaagcagaanaatacgaacctgtgtcagttataccgaagtatgcaagaagcatatgat

SEQ ID NO: 150546 - DNA, 375 bp, Glycine max
  unsure (1)..(375): unsure at all n locations
ctttctcacacccgccccagggccccggctttcttgtttcttttgaaaccccaccccgagaggaacccttctaccganacggaatcttccaaatttgcctcgcgaattgattaataacaaagccccggtctgaccttcgtggttntctcctgaagtaaccattgattatatgctcgttccttgttagattcaacttgtctttgcatcttttctgactttggaaccaccattgtatgttttgcgcttcctttgaaaaaccctatagaaagagactttgtaaatgttatcttttcatgaaatgggtggtantttcgtgaccttcactgaaccccggtcacataggcgtgattagaatttacaatgatgttccttttc

SEQ ID NO: 150547 - DNA, 475 bp, Glycine max
  unsure (1)..(475): unsure at all n locations
ntgatgttgttagtcgtcatttggatgtcgagagtgtcatcttgttttattctgagaagaagatcaataaaatcttggtcctctaattcagctccatcttcttttgcaattttgttcttttcttgatgctctctgatgatgttttccaagaccttgtcaacctgcttgtgcaacttcttcaatctgttcatctttccagttaggaaatataagaatggaattgaaggaaagacatcagcaaggtcgaatcctcccccggattctacgatttttcggatcaaagacacaacaaactcatcttgctccttgtatatgccaccgaatgtgatgcaagctccattggagcttgtaggcctaggatcttcttcatcaatggattcctttgcttcttggaatatgaatggcagcggaatggagaaaggaagagagagaggagacgccacttcaaggagaagatgagtctagaagaagctca

SEQ ID NO: 150548 - DNA, 293 bp, Glycine max
tcgcggatgaatatgctcaagtatatgcggaaaaagaggcttgaggaacggtgatccactctttacaccaagaggcaaccatggggatggatcggtttgctcttaccttgaacgagagtcaagaacttccccgattggtagcccaggccaaggcgatggcagacacctactccacccccgaagagattcatgggcttctcggctattgtcagcatatgatagacttaatggcccacataattagaaatcgttaggaaacttgtatggtctcttagaccttgactagatatgac

SEQ ID NO: 150549 - DNA, 395 bp, Glycine max
cagatcacttgatgaagacctagacactgcgtgatggatcattgatcatctcaggtgtactggttaatcatcaaaaggaatatatataggtatttaaatagcaaccagatatcattaaattaatggagatttcagtgaggttctttagctgtttcgtttagcagtgaatgttgccaaagatttttcatgttattattacctcaacatgtattgtaactcaacattgataaactttcaccatggtttttgtttacaagattcttgtgtaaaaattgtgaatctgcagtttgtgcattggaagtcgataggattaattgaccaaaaagactagctattcagagttaacatatattgaaccatctttgagtgttgattactaatcatttgtttaatca

SEQ ID NO: 150550 - DNA, 475 bp, Glycine max
  unsure (1)..(475): unsure at all n locations
ccttgatactcagctgtcttggttagatatgattatacatgatttangactttgtttgatccaattgggcaaaattggatgagggcaagagtgatttcgaaaatctgcactattatgcagaattttgctgttgaaatgtgcagcagaattttgtgcttgtgcagaaaatgcttatgcatggctggttgtggaaagggttgtacatattangttttggacgttttctagaagatcccaacggtcaaaatgtagacttatgtactagggacctccaataaaattttcgagtcgatccaacggtgaacgaattggaacgaagagaatgttactggggtatttgagtaaggaaagctgtggttntggtttgtgttttgggcagagttttctgcctctgccctgttttcttggttttggatagttcatgatgtttggatgttgaattgcttggatgttgtggaagcttggagggattgat

SEQ ID NO: 150551 - DNA, 389 bp, Glycine max
gattgcacttggctttgtggatgttgctcatgagacaatgtgtcgtcctataagacagttgactgaaatgaagggccatgagacaaagaaccattcacttgcttgctttggtggtgctggacctcagcatgcttgtgctatagctaggtcgttaggtatgaaagaagtgctcattcacagattttgtgggatcttaagtgcatatggaatggggttggcaaatgttgtggaagaggcacaggaaccttattctgcagtgtatggagttgaatctattgttgaggtctcacaacgagaagctgttttacttagacaggtaaagcagaaattgcaaattcaaggatttaaggaggaaaatatttcaacagagacatatttaaacttgagat

SEQ ID NO: 150552 - DNA, 415 bp, Glycine max
  unsure (1)..(415): unsure at all n locations
aattgagcagaacactgtcagagtttcatggcattgctgcttagtgaaagtggtgtcatggaagtatgacatgatggaagcaccatgctttgaagatgatggatggttagctttttgagggaggggaggtattttggagtttgtctaagaaaatgttttcaaaaaactaaaccaggtcctgatttggttagtgcatattgcagtcaaacagagaagcgatccctttttgtctccatctctggtgcatctcttcactgtctccatctctggtgtgctgtctacactagcaattctgcatcatctgacaactcattcctctgtggaaactccaaacctcatcctattaggctntcacatctcacttctcaccacctctctgttctctcacacaaacccatccacccattatccaaca

SEQ ID NO: 150553 - DNA, 426 bp, Glycine max
  unsure (1)..(426): unsure at all n locations
cccgattgagactacctccttcataagcacctgtaagagaagaaaataaaaaagtaaaatgaataaaactcctcccataagttagatgagacaacttttataagagttaagtacataagttgatccaaacaggattttagttcacttcaaataggctcaacaaaactaaatgcaacagctcacaaaaagcaccaacgtagagataataatggaagcgcatctcaccaaaacatgtagagataataatgtacaatgcacaaacaacaccaagaaacctgcaattaaaaaccatcaaaacccaattgattctaaagaaatcggataaaagttagaccatcaataaaattataaaaaagggaagcaaaagtcaaaacttttccattcaacaaanaatggacaacagcaaagggaccaaaaactgatgag

SEQ ID NO: 150554 - DNA, 423 bp, Glycine max
  unsure (1)..(423): unsure at all n locations
agtcatcctgctntgacaaatgagaaaagtagggcaaatgaagagggtgagaatgagggagaagcccatgctgtgactgccattcctattcagccaagtttcccaccaacccaacaatgtcattactcagccaataacaaaccttctccttacccaccgcccagttatccacaaaggcaatccctaaatcaaccacaaagtctatctaccgcacttccaatgacgaacaccacctttagcacaaaccaaaaacaccaaccaagaaatgaattttgcagcgagaaagcctgtagaattcaccccaattccagtgtcctatgctgacttgctcccatatctacttgataattcaatggtagccataaccctagccaaggttcatcaacctccatttctccgagaatacgactcgaacgcaacgtg

SEQ ID NO: 150555 - DNA, 443 bp, Glycine max
  unsure (1)..(443): unsure at all n locations
tttntcttttcctattcaaagcaggtttctcactgtttaaaggttattctttcacttacctgttgaaagataacgaagtgattgatgatgttcttttaaacctaaatgttaccgaatcgatattcacctcctggatggatgcaaatagaaaatatccagaggcaaagaatctaacctatactcagtttgtgtccaagtttgtctatgtcaaaacttgaagaacttggaaaccacgcaagtcaggttatacaattggaaggttgatgtgggttcctccaagcacatatgagttatattttcttagatcaatgttaactgttgcaaaaggaccatgtggttatgaagcaattaagactgtgggaaacattgaataaccaactttcaaggaagcatngtttgttatggtttcattggagatgataaggaatatgttgaggcaatta

SEQ ID NO: 150556 - DNA, 421 bp, Glycine max
atatgaaagctcttatttaatacttaattaattttatttttatcggattgacctatttttaaataaagtgatattttctctaaaaaaataaaataatacatccaattataactttatatttaaattgaaaatcaaattttaaatttcaattaaaagacccaaatggcaaactacttgtatcaataattttggttatctcaaaatagtttaaacaaataaactgtttaataggtatgatgtgagacagcatttatgtagaaaccatttacctataaggttaaaatgccagaccatggtccgtggctactttgaatgtcacagtaactgtgggttaattttctttaaataaatttgcagggcagcctcactgtcgtacttgaccatgcagcagaaaactgacactacgttgtgtcgctttcgt

SEQ ID NO: 150557 - DNA, 456 bp, Glycine max
  unsure (1)..(456): unsure at all n locations
tgaccggtgtgattcgttcatttcgtcttctgatgtgtattctttcaagnggggtctagctcatacaatcttgctattttttcacgtgggaggacaaagccacctagccctaccacacaacctcaactttataggatcttttttacgtttctacgtgcattttgggaacacatggtctctcaggagattgcatatatacttaattagtgatactctacaatttggtaaatatttatatgagagagaaatctcactttgccacattagaaaaaaaaaaacccatttggctaactagtttggtttaaaaaaattaattttcaatcattataattaaaagaagttaataatcatggactatagggtaaaaaanattgtattgttattcaatcataaattaatattngatattgaatttaagatattcatattataaaattaataaacttatcctatatt

SEQ ID NO: 150558 - DNA, 345 bp, Glycine max
acgaacacatatgcagctcattctaggctacacgacagttgataatacttaaccataatcacgatctctaaaaacgacacctaaacaacattaccgcgccatagcgcaccgataatctcatacccttcacctagagaattttcactgctacgactgctatcaatacagaagagcggtacctaccatcccgtcatcaaaatattgatgcacattgagaaggcgatcaaacccaactgtgtgggatgcttcaagacataaagaaatgaacggtctagagaagataccacctcaccctgcatattgtgaaccgtactcaacgtggggactgattatggatagaggagt

SEQ ID NO: 150559 - DNA, 432 bp, Glycine max
  unsure (1)..(432): unsure at all n locations
ntgagntaattaaaacgacaataacgtgngactctgatgttctatngagtcccgtaatatatcgagacgctcgtaattgaaaacagaaactntgagcatattcgaacgacaataacttttgactcagatgtccgcttgtgttccttagtatatcgagacgctcgtaatagaaaagggaagctctaagaaaaatcaaacgacaataactttgtactctgatgttggatagagccccgtaaaatatcgagacgctctaaattgaaaacagaagctctaagcaaattctaacggcaataacttttgattctgatgtctgatggattcctactatgtcgagacgctcgaaattgataatagaagcgttgaccaatactaacgacaattactatttactctgatgtgcgattgagttccgtaatatattgtgacgct

SEQ ID NO: 150560 - DNA, 462 bp, Glycine max
  unsure (1)..(462): unsure at all n locations
nttcgtcttacagaatgcaaaaagttgatatgtataacctctcgtgtatttccgcccgtcagcgtgactcanaagtcagtatgacagatcttttgagcacggaagatgacgtaaatcaccgcgtgtaaacgggcttgttggccgcaattgacgaatggcgcagaatacgacgttagtctctacgtgctatcaggcttttcgtcttacagacagcaaaaagtttatacggataaccactcgggtattttcgcccgtcagcgtgactcaaaagttagtatgacagatcttgtgagcgcggaagataacgtaaatctccacgtgtcaacgagcttgtcggccacgattggcgaatggcgtagaagacgacgttagtctctgcgtgctatcaggcttttcggcttacagacatcanaaagtttatatgaataaccactcaggtatttccgcccgtcagcgtgactc

SEQ ID NO: 150561 - DNA, 473 bp, Glycine max
  unsure (1)..(473): unsure at all n locations
tcccatgtccgcacttggaaggatctgattatcttctttcttatgcagnatcagtacaattctgatatggctcctgaccggactcaactacataacatggttaagagggaaagcgagtcccttaatgagtacgctcagcgttggagggatctggcagcgcaagtagcccctcccatggttgaaagggaaatgattaccatgatggtagacaccttgccggtgttttactatgataaattggtgggctgcatgccctccagcttcgcagactagatgttcgccggggaaagaatctaaatgggcttgaagagaaggaagttcgattacgtctcctccacaggtaccaacgctaggaagatcggagtaactggtgcaaagaagaatgaatgagatacccatgttgtcacttcaacgcccgcatggatcaagccgncgcagatctcccaccgtacccatcagtacgcgcaacatca

SEQ ID NO: 150562 - DNA, 465 bp, Glycine max
  unsure (1)..(465): unsure at all n locations
actcagctntctccctatttgctataatagggggagaagtgaagtttaaaagggttcaaccccttaggcacttctctctctttcgaatttgctgaggaaaattatttccgtgaagaaaatccaagccgagacccttccgtaacatttccgtgagtaattacgcgaagattctcgaccgttattcaagatccatcgttcgttcttcgttttcttcagtcttcaacgggtaagtacctcaaaccaagcttttcaattcattatatgtacccgtgttggtccacattgtgtttcatgtattttcattctcgttttcatttactttttatacccccttttgacgtgcttaagccatttatttaagtcatttctcacctaatctaaaaataaaataaatttccaccgatcgtttgaattgtataatccgttaattttggttaaaatgaattccgactgttcggtcgtgcc

SEQ ID NO: 150563 - DNA, 394 bp, Glycine max
tcaatttgggcaaaattggatgagggaaagtgtgatttcgaaaatctgcactttatgcagaattttgctgtcaaataggtgcagcagaattttggctttgtgcagaaagtgttgtgttttgctggttgtggaaagagtagtacagattgggttctggacgttttctagcagatcccaatggtcataatgtagatttatgtgctagagacttccagtaaaatttttgagtcgatccaacggttaacgaattggaacgaagagaatattactggggtaattgagtgtgaacagttgtgatgttggtttgtgttttgggcagagtattctgccctctgcctgttttcttggatgtgttatatcatgatgcctggatgtagaattacttggatgttgt

SEQ ID NO: 150564 - DNA, 315 bp, Glycine max
  unsure (1)..(315): unsure at all n locations
agcttcaacaccgtaatcttgtcaaacttttttggtctgtttcatngaaggtgatgaaaagatgttgatatatgaatacatgccaaataaaagcttggatgtgttaatctttggttagttcttctaatatttgctcatctaattccaaatttatatgttttactttatttaggacacaaatatttaagatataaacaatcatttcataactaagttttcttgaaagcatactaatcaggggaattggatgactcagcttcacgatatactcttcatatattattgtcacaagagtataatgcttccattactttt

SEQ ID NO: 150565 - DNA, 365 bp, Glycine max
  unsure (1)..(365): unsure at all n locations
gaacctncacccgacgaatacactgacaaaaacttatcttctcctttttggacaaagtatggcatgctggtggcacagtaattttcataccatcagaccttggatgcaactgtgatctgatgcgcatatcagctagatcttaacgggtattcaaaccatcctttcacttgccttgaatgttaatgagcagtcaaatacactgtcaaaacattatgcgcacatgcatacatcaaacattgttaacgtcaagacagaccattcgaagacaaagaaatggcctttcttcatatcaacttactttatccttttgggcttcaattagtattagggtgacctctgtaaccactaccgacacgtgtggacaa

SEQ ID NO: 150566 - DNA, 420 bp, Glycine max
  unsure (1)..(420): unsure at all n locations
agcttgttggaggacagattctcattattctttctnttatgaactagctcagcaaaggccaattatgagtgtagagcagttcattgagaaggtggtcaggcctggggctcgaccttcttttgtgggggataatgaatgttttacagcccaggcacctcaacagcatgagccagaaccagaaaatgatcactcatctgaagccaccatctctggagtcgttgattgtaaaaaaagaagattagagacgatatccaatgaggctgctcatcatggaccaatgccaacgtcagctaatgcaccatttccaggagtggatccatctccacctcaacacacagtaaactcttccattcctgtcttaaagatacatgagggctagaccataccaggtttgcctttggacacttctcctccagctac

SEQ ID NO: 150567 - DNA, 241 bp, Glycine max
  unsure (1)..(241): unsure at all n locations
aaatgaggtaggcggcgtctaatctctaagactgcattttgnttttctcttcatcaaatcctttgattcccatagctatgagtaacttattccatgtgtgctgggtttggtgtaattagactaccttcatgtaatncctgctttctctattcaataaagcaattaggattggtcttcttttgagcctattgcctttgattgatcacctaatgactcgatccattgagtgcaattgcatttg

SEQ ID NO: 150568 - DNA, 409 bp, Glycine max
  unsure (1)..(409): unsure at all n locations
agcttgaaattgaacaacggaggctctcgtgattttatantggnataatncgncacacggaagtccgattcaggcgcataatataccgagacgctcaaaatngaacaacggaagctctcgagaaattcaaatggtcataatttgtaacacggaaatccgattcaggcgcataatatatcgagacgctcgaaattgaacaacggaggctctcgagaaattcaaatggtcataagttttgaaacggaagttcaattcaggcgcataatatgtcgagaagcatgaaattgaacaacagaagctctcgagaaattcaaatggtcataacttgtcacacgatagtccgattcagacgcaatatataccgagacgctcgaaattgaacaatgaaagctctcgacaaaatcaaatg

SEQ ID NO: 150569 - DNA, 322 bp, Glycine max
  unsure (1)..(322): unsure at all n locations
aagtagtggatggcagggttcttgactaacatattgttacctatgtggaggatgagcgacntcttcgattctacccggaccaagtcccagataaatctgttgtggaggaggtgggcctcgcatgggacccaaatttctaatttgcttatctgcaaattcaaatgacaacatattgttacctcttcaagatgtaatatatgtttctacattcatgacagtttactttgtacatattaaactcctacatggaatatctaaccgaacacttaatataacctggtgaaagctcgaggaatcgctgtgatctacgaacatgcatact

SEQ ID NO: 150570 - DNA, 378 bp, Glycine max
ctttaaactaaaattaattcttcattaattaatctataagaaaaatagtataacttctctaagaaataaaaataaaaaatcatctacaaaagaattaatgttaccttataaaaaatcattcaattttattttaattgcgtttctgtagaaggttacctaaacaatcctatactgatattaatggagagtctgttgagtgaatggtattggctgccactcgacattctataaccttgtgtcatgatcatatatttaacttaaggcaagcgtcagcatcctttgcattcgcggaaatcatcacctcacatctcaaactgtgccctgcatatctttcttattaaaatcctactagcgaatggagtcatcacaacaactaac

SEQ ID NO: 150571 - DNA, 419 bp, Glycine max
  unsure (1)..(419): unsure at all n locations
agtcacctgaggcatgcaatcttgcttgtggagctacnatggattgctttantctnngancttcaatgaggagccttcaatgagtgattatccacccatggaccatgcanngcggaagacatatngagaaagagggtgagaagggaggcgccatttcactannggaatatagacatnggaaagaaggaaagcttcaccaccaaagaatcgtgccttggattaagaaagctttgagaatgatgctttatatggaggaaaaagaaagagagaaggggggaacatgaaattgaaggaataaaatatggagagaagtggaacttcgaagtcatggaatacctggtgttcccaaagaagtttgttgatgagggtggcatantagatgtcgttcacttccttcaggtcttcaagtttcttaatat

SEQ ID NO: 150572 - DNA, 379 bp, Glycine max
aacataatgagagaactcttaccctgcaatccatccctgacaatgcagatatttagccctggttctatcaagttctatagcaacagcacatttcccaatagagtgaagtcacctaacaggacacacaagtgggagatcagaccataagcatgcagtaatcttagccttgaaagaagcattgaacacacacaacacaatgcattagatatgaaaggtaattacatcaacccggcattagatatccccaactaaggtttttagccagccatacaaagaaccctaatacaagtgagatagaaaatgaagagcaatagctgcttacacaagaaagaggatgcctcctcctcttcttggcacctcacaatcactcaaacactct

SEQ ID NO: 150573 - DNA, 437 bp, Glycine max
atgccagcttgaaattgaacaactgtttctctcgataaaatcgagttgtcataaagcttcacacagatgtccgattcggggaaataatatatcgagacgcacgaaattgaacaacggaagctctcgagaaatttgaatggtcataacatttcactcggatgttcgatccggggacataatttatcgagacgctcgaaattgaacaaccgaagctctcgacaaattagaatggtcgtaacttttcacgcgaatgttcgattcggggacataactcatctagacgctcgaaattgaacaacggaagctctcgagaaatttgaatggtcataaagtttcacacggatgttcgattcgggaacataatatatcaagacgatcgaaattgaacaacggaagctctcgagaaaatcgaatggtcataacgtttcacacagatg

SEQ ID NO: 150574 - DNA, 346 bp, Glycine max
  unsure (1)..(346): unsure at all n locations
gaaacaacgtgatgatgcgctccatgagatggaggatcaaatggagaatagagatcataatgaagaagaaaagaagagaagatggaatgatagtgttcctagacaaaaccgaattgatggtattaaactcaacattcctccatttaaaagaaagaatgatccggaagcctacgttgagtgggagatgaaaatagagcatgttttctcatgcaacaactatgaagaagaccagaaagtgaagcttgccgccacagagttntccgactatgctcttgtgtggaggaacaagcttcaaaaagagagatcnagaaatgaagatccnatggctgatacatggacggagatg

SEQ ID NO: 150575 - DNA, 445 bp, Glycine max
  unsure (1)..(445): unsure at all n locations
agctngacagggaaaggatcttcgttatataattcnnnnnnccctcccnagataccgngtcttttgtactcattatttggtctgcaaacaaaacaggagagagaaaaataattgatggaaaagaaaaaggaaataaaaaagaatgaaatggagaccacacactccaccgttcctcatctaaaatttctgtttcactggttcttttcgtggaatagaaaaaatgtaaacgatacatccaacatagatgtattagggcagaaggaggagaagatagaaagattaagataaaagaagaaaaaaaaaacttgattgttgaatttttttccctaagtgatttaatcgtaaagaaagagagaaataattaagaaaatgaggtaaaaatgatatgggagaaaaaaaaaatagaatacttataagagcgcacacttcaacttattaaaataat

SEQ ID NO: 150576 - DNA, 432 bp, Glycine max
  unsure (1)..(432): unsure at all n locations
ctgcaactccccttgctactatctatcttctatctctttccatggcccattcgactcgcgtcacctttgtcggcgtcaacacctatagccaccaccacaacaccttcgagttgcaataccttcgtatggtctcaccttcacttcgcgtcaccaccttcggccatggtagcgtctcacgtcaccttcactgacgtcaacacctccggccatggtcgcatctggcaacaacacctctatcatggtgcatatgccgtcacctttgctgtgctgggcttttactttttcccctatacgtgtttgntgaatctgaattagatctttatttttcaaattgatgattttgggattaatcgggatgtcacaaattatatgtacactgtcttccttgacattatatccctatgttaacctgcctatggagacatcaatttt

SEQ ID NO: 150577 - DNA, 364 bp, Glycine max
  unsure (1)..(364): unsure at all n locations
agctcggcagctagcacatgagtgagtgtttttttctttgtgtnncatctgaggcataaccaaacatgtggccttgatcaccggctccaatttcctcgggcttcttggtcaggtgaccatgaactccctgtgcaatgtcggggctctgttgctcgatgttgacaaaaacattgcacttgtcagcatcgagaccaacatcagcagacacaaaaccaatacctctgcaagtgtcgcggactattttctcgtagttcaccttggccttggttgtgatctcaccaaagaccatgaccagtgtggtttttgtacatgtctcgcaggcaaccttgctctctatgtcctgctccaggcaagcatcgaggat

SEQ ID NO: 150578 - DNA, 324 bp, Glycine max
ctaaatatccgctagagccttatatagaattaaaaaaaaaagagaacaaactttgataattgattaaagtgaatttagtactttatgataactcttaaaaatatatcaagtatatatataataggataataatataaaacttttttcaatcagacataccattaaatctaaagattatatagtagaatgagactaaataataatataaacacctgtcgatgaaacatcattctaaggaaatatttgttcttctaaaaaaggaaattcctaccataaaactagcctagatgccaaaaataattatagatcttacatcttatatat

SEQ ID NO: 150579 - DNA, 414 bp, Glycine max
  unsure (1)..(414): unsure at all n locations
cgccagcttgcaaacaaagggccccactgaagctacanctttttatttgncgaagttctaaacagaggggagaacgccacgtgttggagacactgtaactttggtttgctttcacagtttagattaaaaacttggcaacgcgtcaacagttgccacgccatcacgtcacctcactcgccccacctatctgctgccacaccctaccttccctgctcatctacatttcctttgttcaccgtttcctcttctctattttatttaaaaataatgttcttagttcttgtttatgcatttttttttatctttttttaaatataagtgagattgtctcacaataaaaattaactatcatataaatagaagaaagattatacaccttattctttaattttaaatggaaggataatattaaat

SEQ ID NO: 150580 - DNA, 208 bp, Glycine max
  unsure (1)..(208): unsure at all n locations
acttcctgattagttcatctttgcttgtgcatgtagattgtgaatatgtgtcaccattcaagagaactatgaaccattcttcatggcctacaaatctctaggagagaggacttcacaaaagaattgagtatgtgtctgtgagagcttttcgatgtgtccataagatatttngagcttgagcctataagctctcccagatagactataa

SEQ ID NO: 150581 - DNA, 449 bp, Glycine max
  unsure (1)..(449): unsure at all n locations
agcttagaagaataagaccaaacctatattattctactctaaacagaggagacactttccacctgccaagtaccatatttactacgatgtagttaacggaaacaatagttgttacaaggcataactacaactacaattcccttaaggacaggcaaggttttaaaaaaccatctgggaacgcgatttcagccacaacatcaaccacaatttcccacaataacaaggaacacaacaaaaccatgatcgcaaccacaattcaaaaccttgaggaaaagcacaacagtctaactcanaacacatcttccacacaaaaccaaccttcctggggtttccaattccaatcaacaatcctcaattgatgaatcactaccatcactactatnnttactcagttatttcaaattcaaccttccattcacattttgtacactctagatagaataaccctc

SEQ ID NO: 150582 - DNA, 371 bp, Glycine max
  unsure (1)..(371): unsure at all n locations
ntatataagcaaagcaaaggaccccttctaaagaccctttatgttatagntgttttattatnagactcctccatcaaaagtcaataatacaaaataaaaatctagtaccaactacttatattttgtttataagccacacaacggntatatgagaacaattatataacattggttatgaaaagcaaaagcttttgtttccatctcaccacagttctagaactcaacaacgtagaagaaacctttcatcctacatgataatcatgcccatgacctaattatagntcctttgcatgtatatatgtgacaccctctacaccaaaatgcatataaatgggaaaaccatataaaatacgaaatctaatgaaatcaat

SEQ ID NO: 150583 - DNA, 445 bp, Glycine max
  unsure (1)..(445): unsure at all n locations
agcttgtcacccagcccgccttgttatctggtgtgcttcctccagaagcaacaaccttctggaggaaccttctggagggcccaagtgggcctggttgatatttgcacccctatttttactaagtacaccccttgccttttttttggtgattcttttttttgtaaaattacggaaacttacgaatttcgtaacgatacttgttttctttccgtaatgttacggaaccttgcggattacataatcatccccttnttgacttacggaatgttacggaacctcactaattgtgcaacgatgcttccatttgatttccggtgtgtcacggaacattacggattgtgcatcaatatntttctttgttttccggcatgtcccgaaatttcacaaatgcctaatgatgggtgccaagcacctcacaaggaccaaacaatagttgcatgtcatc

SEQ ID NO: 150584 - DNA, 386 bp, Glycine max
  unsure (1)..(386): unsure at all n locations
cagctncctcttatgagagcatagctctttcaaaaatntctcactctcttggaatttgctnnatagcatccagnagaagtatgtnnacctctactcttctaaatgtntccaagatctccttctccgcctcttccattttcttgtaggaaattgctcttggtgggaatggaagaaggatatgctactactagaagtcagaattaccagtagaagattcacctgcatagaaattgttaagcaacttactctctaaatnnttgccatcatctttttctggagtagagtgaagctgggcaagttcatttgcagatgaagaagatgctactagttgatagccttgatactgnnttcccaacctcaatagaattgcactcacatttttggga

SEQ ID NO: 150585 - DNA, 447 bp, Glycine max
  unsure (1)..(447): unsure at all n locations
agctntgaattgagtgttgttgccatgttttggcgtatgggaggctgtacctacaaataaggtgtttctaggtgaatttctccacttcgttggtcgtagtttccggcagtggccttgcttctatccactgggtaaaatagtttatggtgactagtaagtatttgttgcttctagggcatttggcagtggtcctagtatgtccattccccacatggtgaagggatagggggagctcagactatggagattgttaagaggggtgcatggaacttctgcaatctcttggcatcgtctgcacctcttggtgaagtcgagggcatctgccctgagtgttggcttgtagtagctggctcccaccactttggtggcaagggagcatcctctagtgtggagatcgcaaatcccttcacgaagttatctcataacatagtctngcctgtggttgtt

SEQ ID NO: 150586 - DNA, 300 bp, Glycine max
  unsure (1)..(300): unsure at all n locations
tcatccatggctgcaactagctagntgncaatagtgcattctcttggcccacgcacaatcccacatttatcacaagttgggaatgaaagtgtagagatggggacttgagcttaagctttcatgagtgtcttaatcttcaatgttagaagatgcatctacattcccaattaagtttgggaatcatcttgctccacctggntgacatgtctcttcataatcctcttatcctataggatgaagacacttcaccataagatatatggaccaatctctattgagtaatgccatggagtggatagc

SEQ ID NO: 150587 - DNA, 424 bp, Glycine max
  unsure (1)..(424): unsure at all n locations
agctgcaactataaataaaatttttttaattgatggcnggaatcccgatggaggacaatgtttgcctggatttggcccaactgctggtgctgcattaagctcacacatggatgttgataatgtaattaaatttacatgtcaagcatatagaagtaccataaaatcttaaataagactagttaaatattatattaatctatatattcgagtatatgcttctttacttggtggtatgttcaggttagctttactggttcaacacaaacaggccgtgagataatgcaggctgcagctaagagtaacttgaaacaagtttcacttgaattaggaggcaagtcacccctcataatttttgatgatgctgatatagacaaagctgctgagctagctctactatgcattctatataacaaggtgaaattgc

SEQ ID NO: 150588 - DNA, 206 bp, Glycine max
  unsure (1)..(206): unsure at all n locations
caccatggccacacctacattttgattgattcctgaatcattctatagatctgacatgtttctttatatttcagntttagagattactagagttactagcattagctatattttcagtttctggatgccaagctaagaatgtcaaatatgtattcctagctagaagggggatcttaacatagagcatggtgaattcagctaatcat

SEQ ID NO: 150589 - DNA, 395 bp, Glycine max
  unsure (1)..(395): unsure at all n locations
acctgangcatgcaagcttggatctaccaccaccgtcgccattttatcntagattatatngggnnaaagactagtactgtgatttccagccatgtatttggctatattattatgatatttgaacaatttactatgtctttatttgcatgggatgctcgaacaaatattaattatgttatttgactatgtggatattatatttgatctattcatggctcttgcttcatggttcgagcttcataatatggtttatattattccatgaatgttgtatggatgctaagttgtattggcatgcttcagactagttacgcacttaggctttatgttgatgccaaagggggagagaaatacggattaaatcaagaactcacatgagtaatcaacttaatttt

SEQ ID NO: 150590 - DNA, 265 bp, Glycine max
  unsure (1)..(265): unsure at all n locations
ccaacatatagctctagaatccaatagtagcaattccataatccccatacatttaagtncaattaaattcattcaaaaaccatggaataaagagtgcaacatgaattttcacttaaccttaacctaaatctcgcttaagcatacaatttagaggccatttcaaactttctatatatttctcttaagcataagtcaatccttgcttaaaccaaatnttctcttaagctcagattcatttacgcttaagcttgaaattcaacaacta

SEQ ID NO: 150591 - DNA, 277 bp, Glycine max
acttatttcaagattgagtcaacacgttcaagatcaacgagtaacttcaagagtcattagaagtaactccgacgattcactttcaagagaagttgatttccagattcaagagtagacgtcaagaagaatcacgattcaagagaagatgaattcaacattcaagagaagaaatcaagaagcaacaagtcaagacttcacaagggaagtattgaaaaggatttttcaaaaaccaaacatagcacagtttggttttacaaaagagttttctcaaagtttt

SEQ ID NO: 150592 - DNA, 315 bp, Glycine max
aagtgttctaggaactcttccctttgacgattctttctaagaactctagccttatggcggaactaattaaggagaacggagcactactcatttggttcaacctatactggagtgaaggcattcctatgaccccagcatataattgaaattactactatgattaccaagagggttatgatcatctaatctcatgcagttggaaaaatatgatatgagccacagcattcaggatctgagtgcagaaacaaagtccttatagagaaattggtgggtactactttatgcacattttgaataatgagatatatgggtggg

SEQ ID NO: 150593 - DNA, 306 bp, Glycine max
  unsure (1)..(306): unsure at all n locations
tgaattggacattgttataccgccaattagggcatgacgaatttacagggttggcccacaccccggtgtgaaataaactaaaaaagcacaagcatcccaattgcatattcacacatctcattaccaccttctccaccccatcaaaacttccgttaaagaggtcacccaggttgcattttctgaattgtatagatgaattgagatatcccactggacaaagttctcanggacttgtttagattttacaattgccacagtataacagtgagattccctgttcactgagatngctaatgcactgtaatc

SEQ ID NO: 150594 - DNA, 408 bp, Glycine max
  unsure (1)..(408): unsure at all n locations
agcttctatccnccactgtagctaagagatttaattctcataggtgttttctnncntaangnctagagcttccttgggtgcttgctaacgtattggtaaacccttactttcccttattttgacctctttgttcatttttccaatcccaccaagaaactagtgaatgggtttatctaacaatttattcacgaatcaaaatttgattggagcttgcttttgtgttgattaggtcatccttcatcagcaccaacaaccatatttagtgaacgaaatctcttggatcaccatgttgctgactttagattccttctcaagaaagttgcaaaatttttatggtaacatgtgaaaattgaatttttgttagctggaagccatgagatggcattaatcatcaaaaattcaaaaatt

SEQ ID NO: 150595 - DNA, 335 bp, Glycine max
  unsure (1)..(335): unsure at all n locations
attaattccaacatcaatgtnaattgaaagccagcttatgcgcctgtttccttacgaacggtcacttgcggaagatatcctattaaccgaaaaatgcacccatattctatcaaagcagctctgctacctagattatttacacgtatttccaagagagatttagtagttacatcacacacattccgttagctaaattcacatacatgcatactcctagcattttggggtacccaaaaattgcacatgtgcacactcttggatttctaatacccatacatacaccaacttcatgatgaatcttgactatcgtcacaacaaagactacatttcatgcc

SEQ ID NO: 150596 - DNA, 428 bp, Glycine max
  unsure (1)..(428): unsure at all n locations
aagcaccgcagctgcagctttcagagagctaaaaaaaagttttagtnattttgatcataatgaaaagngattataattcatactataccctttatgctaaaccttcctttttatcacatagtagcggttcgaagacaagggttgattcaatactggaacaaacaagtcttcttcaccatcgctttcatagttgattgataagtttttgttctgaggaaaaggaagatcccttatagctctgtccttgaacaaaccaaagaaagagtaagcctgggcttctttatcaaggattacaaggtaacctgaatntggccctaatggagggtctgaaacagcactagggttccctttgcacataaaaaagggtcttggtacatacattgtcttacccttacaaataatctttcaattgttttggttcacatata

SEQ ID NO: 150597 - DNA, 451 bp, Glycine max
  unsure (1)..(451): unsure at all n locations
agctttcagaggatggacagaaatagacatttcatggtcttttgangattagactgacaatggtgcgttactctgtatgctgattcgtatctaaatgatgcgtggtcataggcgcatgttatctaattaattgtgtgaaatattaacggtgaagtatatagagattcggaatttaggattcataaataaatatattttgagtgacatgagatttacttatgttcttcatatcagtttatattggtgaatagcttttgtttgatgtcttgagccactaagataagatatttttatgattaaatttcaacttgatcaagtgcaacatttttcactaccagaaagcagggtgacacagcagtgtagtagttagattcacttatactaacatctttcaactctntgtagtaggtgacagcacacgacttacttattacactgttggtgtatgaaa

SEQ ID NO: 150598 - DNA, 452 bp, Glycine max
  unsure (1)..(452): unsure at all n locations
agctntctcatgcacatcagttctcttgaataccacattctttnngacaagttcatttaaaggtgcaataagttgatgtaagctccattggagcttgtaggcctaaaatcttcattaatggattcctttgcttcttggaagatgaatggcaacagaatggagaaggaagagagagaggatatgccacttcaaggagaagatgagtctagaagaagctcaccaccataggaggccatggataagagcttggaggaagaaggagatgaatgaagggagaggaagagaagagcactaaattttatgctctaaaagaactctaaaatctgaagtttaattttcaaatgatcaaagtttcaaaaaatgcacacacatgacctctatttatagcctaagtgtcacacanaattggagggaannattgaattcaatccaaatttcacttgaatttggaa

SEQ ID NO: 150599 - DNA, 337 bp, Glycine max
  unsure (1)..(337): unsure at all n locations
acttctctctctttcgaatttgcttaagataattgnnnccgtgtagttaatccaagccgatgcgcttccgtaacgtttccgagtgtgatttcgcgtttgttttcgaccgttcttcgacgttcttcattcattcttcatccgntcttcgntcttcaacaggtaagtgttcgaatccgagactttcaattcatttcttgttttttaagctttcatctttatttcgttcattttcgatttcttttcttccatctttaacgcgcttttaccgtttatttaagccgntntctcacctaataaatgataaaatgaatttcaaccgatcatttgtgttgaatct

SEQ ID NO: 150600 - DNA, 449 bp, Glycine max
  unsure (1)..(449): unsure at all n locations
agcttgaagaagaaatcaatgacacccttttttaattacttgagactgaggggatgatnttattgaaggagaaagagttggcaatggtcaaataccaaaagctacttttggcagctgctactgctagagcttgaaaagctgctgctgtaaaaatgggtgatgtggaagaagctaatctcctacttgctgaagccgaggcagcagactgtgatgctgagaaacttaaatcaacttacaaatttgaggcagaagacttcactgatctacaaagacatttaatttcaatggatcttgtttcgcatcttgatcagaagcaactggaagaattagctgtgtcacttcgtctatttactggctgattgttgaaaacaggattttaatggaatnnggtgatgataatcaaagatatgaaagcttagttactggaagtactgaagtacgacatgagt

SEQ ID NO: 150601 - DNA, 347 bp, Glycine max
  unsure (1)..(347): unsure at all n locations
gaatatatggagctctctatnnagatncagattaaactgtatgnatttgtatnnaacnaacaanaaatagagtntcatcaacttggtgcataaaataataaagataaagnactctttttttaaaataaaaaaaaaaaggaaaagataaagnactcttgnctacttttatagtatgggcatacataagtggcaaaacaatnaattcataattatccatataaaattcaacccaatccatcgaagttgttttttaagcaatcggntcagcaatgcaagacatcccataatcaaaagactgcaaactagcaaaagatacaaaagcacgtgccaaggtatgaactactaaa

SEQ ID NO: 150602 - DNA, 457 bp, Glycine max
  unsure (1)..(457): unsure at all n locations
ggaccttaagcacctgagctgcaagctggttaaagaagattgtccaaatggggggaaataccgggtcaaaaatgaagtggtcaaagtaaacaacataaacacactgatttatgtacatacatatactggttctgtatatatgtgtgtgtgtgtgtgtgtatatatatggatcaatttaataaatgtgtatgctgtaattccgtgaatgaaagctgagtgcctaaatcaaggcaagtatggggtaggatctaaaaaaacaaaagtaaaggtttatctatggatgaatgctctcctagaaactaagcttttgaatcctagaaaaaccatgatttgttggaagcctaacctcattacaagcctagaaagtcctttagattcattttgtgtgttcattnttgatggtatgagatgaaattcanaggttatgacttgtgttagttggttataatggaatgag

SEQ ID NO: 150603 - DNA, 259 bp, Glycine max
  unsure (1)..(259): unsure at all n locations
aaaacgcgaaaaatgatagaccctgtggctgcaaattcgncaatcccgtgggtaaggcttttgaaaagggggaaaataagcttttgaatgcaaaaacgtcccccctttcgtcattcttataatttggagcaagggtggctcgcccaggcgagctaacctgcacatttttttttttaaaacaaacaaatatgaaaagaaagctgcaaaatacaaaagatacagagctgccttgcagcgacattctctgcttgtttagcac

SEQ ID NO: 150604 - DNA, 450 bp, Glycine max
  unsure (1)..(450): unsure at all n locations
catgcagcttataacagtggcggatctagagaattttttaagtggtggaaaaaaatagtctaatattntctcaaacgaaaaattgtataagctctattaaaaatagtaataaaaaatttaaaacagtaaaattaaaaaggataaagtgagtaaaattagtatcaatttattttctcttttatcttttacaactatttatattcatcttattaaaaaaaattatcttgtggggacaagacctattcttttatcgggacaaaaaaaatatttattcaatatattcaagtaaaagatttactttgtgggagcaattgcccccacaccccaatgagtggatctgccactggttataccgtctgattaaaattagacaccattaactggacttaattgttacgtgaaaagaatactggtgggacaagtgctnttcaaatcagatagaattttatt

SEQ ID NO: 150605 - DNA, 462 bp, Glycine max
  unsure (1)..(462): unsure at all n locations
ctgagctcgacgctgcagctgctgtgggcncattgttgcttgatctnngagcttcaaagggggcctttaatggagattntccaccatggagatgcagcggaagacaaaggaaaggaggtgagaggaggcgccatccattaaggaataagccatagaagaaggagcttcaccaccaagatgaacctttgaataagaagctnggaggggatgcttcaatggaggaaaagaaagagggagagaaagagagaggngggagcacganattgaaggaagaaaaagggagagaagttgaactttgagttgtgtctcacaagactctcattcatcanagttacaacaagtgttacacnatgcttctattatagactangtagcttccttgagaagctntctttgagaaaacttcttgagaagcttcttngagaaaacttncttgagaagctagagcttagctacacacac

SEQ ID NO: 150606 - DNA, 333 bp, Glycine max
  unsure (1)..(333): unsure at all n locations
ctttaggggagataacagacaacagctngcgcctaatgcttcgaacaatggattgatggcgactcgactaacatgccctatatttaaaccaatatcaagagaagtccgcacggattcaactttcttaaaggcaaccatattgatggactcattataatataacaagtgtaaatgatgaactctacttgacaaatgagtcaaccacaatgctcatgaaccacacattcttcacccataatagactgggcaagatcatgatatagatcatgcctcttgaaacttgtaatgataccaaactcatgtgactatgcttcttgaaaaaatgatctattg

SEQ ID NO: 150607 - DNA, 216 bp, Glycine max
  unsure (1)..(216): unsure at all n locations
taaaaccntattactctcagattcttaattntaaaaaaatgtatgcaatatgtactctagaattcatatctaataangacagacgtttttgtaataaggaagcattcttaacaaagcgattaatttgctcacactaactaaaaaacaaagcgattaattaagcttataacttgaggtaggttgatttctcaattgcgcagaagctgaggacatata

SEQ ID NO: 150608 - DNA, 255 bp, Glycine max
  unsure (1)..(255): unsure at all n locations
aaacgcccnccagnnctatcttcttatcgatcactcacttaattctccccccttgtttttgagngtaagcctcacttgaaattaagggatttaattatatgagtgcttgattcaatcctaaggttctctccccctttggcatcaacaaaaagccaaagagcgtattgagacaaaaaatcataccaaaactcattatcgtccaagcattttaatccattcaacaaataaagaggacaataattcatacataaacct

SEQ ID NO: 150609 - DNA, 340 bp, Glycine max
  unsure (1)..(340): unsure at all n locations
gcttttaatcggcggtaccaattggacttgaaacatcattgataatttgtgtngngaaagcgnnnccaaacacgtgctttgaaaatcacatctaaaatgtagaaaattacattcaagactggaaccaaagatggtattaagggtggtttaacttaaaattaatttctcctcataaaatcaaatatattcatgtttgggtgtatatcaaattcaacttatcaatccatgtttgtggaaagcaacaataaatgtgtttttagtttcacgttacattctacaaaattatgtaaaaatgttagttaatgtgatagaataaattttatatatttaattgcatatt

SEQ ID NO: 150610 - DNA, 269 bp, Glycine max
  unsure (1)..(269): unsure at all n locations
acactggacattcagccaatcttctataatcaaatgggagaacctttagnctttcataaatgaatacatactactaggaacatcttgacataaacaataacttagttcgagaaatgatataataaaaaaaattgacagataaaggagcttttgaattaattaagtatatagctaagtaacttaccaagttgttgcacatgaccttgtattcattcagaagcaccttgaaagtgattgaactcagcacttgatggtataatgcatgccat

SEQ ID NO: 150611 - DNA, 345 bp, Glycine max
  unsure (1)..(345): unsure at all n locations
agcttctcccncattttcttataaataggtgttagaagttaatagaaatttcgttcagccctcctggtaattcagaatcacttaaaattagtgaaaaaaaattggttccgtgatgaaaatccaagctgaggcgcttccgtaacgtttccgtgggtgatttcgcgaaggttttcaaccgttcttcgacgttcttcattcgttcttcatcgttcttcggtcttcaaccggtaagatccctaaatcatacttttcaattcgttctatgtccccttagtgagcctcattagcttttacgtgctttcatttactttccgtacccccttttgacgtgctataggtcattgc

SEQ ID NO: 150612 - DNA, 391 bp, Glycine max
  unsure (1)..(391): unsure at all n locations
gccctctaatgaaggcgtgcatcctgtggcgtccccaaaataatgactaggttaatagnaatgatntaattaacaaaaaccatgagaaattnttttttcttctttttctttttcatttctttctcttttcaccataacaaggtttagaaagaaaatcctcactatagagtcctgaatggccagttcacaactctattcggagtcatttctttcttaccattcataatctctaaactattttgctgnttcaaaaagaagaatgtaccagccattactttaagtcttcacgtgaaaataaaagatataaatacggncgataaactcttttacaaataaagnagctaatgctntcttttcaaataaaaagattgatcataaatacattcatcat

SEQ ID NO: 150613 - DNA, 397 bp, Glycine max
  unsure (1)..(397): unsure at all n locations
agcttgtaagggcaaganngganaagagtttggagaattgagcttcnaatgnnncccngncaaggggctcagatcctagagaatctcaacaaccctgactcttggctaggaatccttaacccggttttcttaccttttatcattaaggaacatgagtaatataaacaaaaaatatgcgtgtaaacattcaatccgatgcccacatgttgatctcaacatcaagtaaattttcttctgagatgaataaatttaatttgggcatcactaaactctaattttctggtgcacgtcttaatcaatactcgatcatcttctactggtttcaaccctatctttgatgacaaggaaactttttctagtcattgttctttcgctaaattggcaaacgtcacgtact

SEQ ID NO: 150614 - DNA, 164 bp, Glycine max
  unsure (1)..(164): unsure at all n locations
attcacccacagctgctttggtgtttagggtaaaccataccaacacactggaatcttcaaataatgtagatgccctacctcttcttttaacaccctcatccccagaaaagagtcaagagatctctgngatctctacgacatagtcatgagctanactagttcga

SEQ ID NO: 150615 - DNA, 463 bp, Glycine max
  unsure (1)..(463): unsure at all n locations
gcatgcaagccttgatggaagagacttcaagaacacatgtatgaacttggaagatgttttaaaatatggnttcccctctctctaaaagcttcaagcaaaatgggagaagcttcctagatcatggcttttaaaaacaacacttattgtagttgtttctgcttggaccaatggaaattgcaagacctaattcttatcttcttaatctaagcactggaatgacaattaatatgactaatgggtagcttggacagcccatgattccaaaactaactataaaaggctaaagtatgtttaagccaaaaatggaaaaactccttttactaaaattgataactcctatcttaaccctctagataaatgtgctaaccttcctagattaatttcctaatctctcttggaatatgtgcactcaaagtggaccttggacagagttcactcacaaatagccaaattacactaatgc

SEQ ID NO: 150616 - DNA, 389 bp, Glycine max
  unsure (1)..(389): unsure at all n locations
atcaccattccagcccaagcctatgtcaggctcgatccatgatccttatcacacgggctaccatgaacatgggtccagatgagcgcggntgcaccggaggagactccacataagcgttgctcaccactttgaatgcttgaaaagcagaggccaaagactcctccttagcctccatatagagagtagaagaaagacaacttacaagaatgtcttcctcccccaagactatgatcaaatgcccttccactacaaatntcaacttttggaggagcgntgaaagtactaccccaactgagtgaatcctaagtcaggctaataagcaaccataagctgaggtgaatccatcacatggaaagagatttggcagatggagagccaatctgaattgg

SEQ ID NO: 150617 - DNA, 453 bp, Glycine max
  unsure (1)..(453): unsure at all n locations
agctntanaaagttaaatcatttaatattttatacttaaatgacttgatcgatggcaagtttatatggatcagactaaaatttcggtttaaaagcttcggcagctaaagtattactcaaaagataaagatccaaaatcaaatcaatcttaaaaataaaataaagaatcaaaattaaaaataaaataaaaaatcaaaagtataatttatcctaaattatattttagatttcgaataaatattttaaattttaatataataacgataaaagaaggtaaactaaaaaataatttaagatgattagaagatcaatttttttactaattgtgagggtagtctaataccttgattttcaatatttcacgtttaacttccttgatcaccgttataattggaaatgtcatttaaaacataaaatttaattaaatgaactttatgtcaatttctaagcaagt

SEQ ID NO: 150618 - DNA, 354 bp, Glycine max
  unsure (1)..(354): unsure at all n locations
gaggcattattaactcttgtctactactattgtcccttctctgcagcctctacacaatntgagacgtatggttctctctcattccaaaaatctaatcgagttagccagatctaagggaggctctcaatcttgagtggctagatctgaaaggatgcatagtactcaagataattaatccatccatcggncttctaagaaagctggcttatctgaatctgaaagactgcacaaggcttgttgagtcaccacatttcaaagaggacctaaatcttccacatctaactcttgaaagatgtacacatctcaagcatatcaatccatccgacggncttctaagaaagctagaatattaga

SEQ ID NO: 150619 - DNA, 444 bp, Glycine max
  unsure (1)..(444): unsure at all n locations
agcttatcggacaataccatatgttcgagngtgactctgccatnggaccaaggacaacgagagcactaaatggggagagctatagaaactgattctagcttcgaggaccagtacctcctaacataacagagaggaagaagaagactaaaggtaattttccattattttgccttattacaatgatcttatatttatactgattntgaaataacaaaatttgtaattctgtgtaataagatactaatagaatggaaatgcaacaaggaaatggtagacaaaacaaaggtgaggccgacaggattgccagctgagcatcattcaattaaacaaaatccttgaggtatgctggggtagtgatcctccttntaggccttgttcttgatggtgcttgtatttcctaattgctatcaatgaaccagaggggaaaaatgcctaatatgattc

SEQ ID NO: 150620 - DNA, 409 bp, Glycine max
  unsure (1)..(409): unsure at all n locations
gtgaccgaggacgcatcaacaagaatgaagccaaagatatatgtgcaagcaatcaatggcgcaaaacacaccaaatgattataatgatggatggctcaatattctcacaaaggtaaaatcatcactttcaaattgagctttcaaaactatcatgacatgtagagaagaatcaaggatttcaagtcacaaaatgtcaagaacttttattttcaaaacaattacccatttcttgaacatatcctgtaattcaaagaaaaacatgcaaagtcgtacgtgcacatgaaatngacccaaaatattaaactgaaaatccgatgaaactaacaacattaacaaattaacacaactaacaatataacaaaaccaacaaaactagcaaaaccaaagaacacttccccccatacttaaa

SEQ ID NO: 150621 - DNA, 302 bp, Glycine max
  unsure (1)..(302): unsure at all n locations
gcccctactttcgaagggcagctcccaccttatgacgactatcccgggcnagacaatgaggaaagagatacccatctcgggcccctgctccacctcaaagatccgtctccccatgaactaccccaaccaaacatagtccgccatatcccggcttcacccacacccataaaagaatctgttcccttcgtggaagataaaggaaagattgaagcgcttgaagagaagttgaaagcagncgaaggcctcggcaattacccattctcggatctagcggacttatgtctcgtacccaatattgtcat

SEQ ID NO: 150622 - DNA, 424 bp, Glycine max
  unsure (1)..(424): unsure at all n locations
acctgaggctgccgctnnagttggcagatttctactttaatctgaaagtctacgganggaaaaaggggctgatacttgcagaaaatactataaaatatctgttggaaaatttcgttatatatattgatcgacttccagatatacctagcccacttactagacttcacttatgtcttattgatggaatctaattatatacaatcacaagtatagtttatcttttaacaatataggaagaacttgtatcgctaaagtgtacacttaaaatctttgcgaatttatgtctaaaattcacacacatagaagttatanttatgggaagtgaacacatgaatctatgttgttaggtttacacgagtcttaaatggtggtaaagaattttcaactttgcatagatatcttatatgcaggcttttgttttgac

SEQ ID NO: 150623 - DNA, 365 bp, Glycine max
  unsure (1)..(365): unsure at all n locations
actttattgaattaacacacccccggacagcgaaaagtttttgagttaaaaactttctagatgtgaatcaataaaattattattagtataactttcaaaaattcttttattaatgataataaactattactatacattagttgcaattataaatcctttaaaaaaattgcaattataaaaaaatttacacgatcaatgcaaaattatttatcccaagttttttacattcttaatttataaaacaaatcatccaccgtcaatccggtatcaccgccgtcacgaggttattcttattttcattaatgggaaaaataangatgggacatatatatattaaagtatattagagatatattattgataca

SEQ ID NO: 150624 - DNA, 137 bp, Glycine max
  unsure (1)..(137): unsure at all n locations
tactaagnncatttgagccaggattttggntatgtgcaaacaacatccactgaaggtttgaagncatatgttttcaatgatccaattgtgattgatgctgcacagatgcctccacttggccctgcttccatttttat

SEQ ID NO: 150625 - DNA, 456 bp, Glycine max
  unsure (1)..(456): unsure at all n locations
agcttgcatttggaattgcgaaagcccctcttattatatgattagtacctgacatctcaaacaaacaaatcaaacgtaacaagacaattatagttgttgtttgaatacctcacccactcaagtttatcacacaatgatggcttttctctaatgaaacactcttgccttttaccactctaattccccttgagttcttaggcaattcaagagattatggccacaacaaagaacaattcaccaatatgtgtaaggtaaggctagagagacaaggaaaaggttaacaaggaaaaaggctaacaatgtttttaggcacaaatgaaggaaataaaattcagaatttaggaattcaggtaacattccttcatgcaaccaatatattaccttaaagagatntttttttaaaagttcttcaagcatgaaccattcagcccaatttttattttttttttaattttg

SEQ ID NO: 150626 - DNA, 328 bp, Glycine max
  unsure (1)..(328): unsure at all n locations
ttttctcaatagcctccaaaccttctcgagaaagacgaagtttcgagtgaccaggatcaagttccacgatgggaaagctgttaatactgaaattgggcaggaataagcgaagctcgccccaacttgaatgaaaaagcacttcacagaaaactaaagaaactccagcatacaaagccctagaagagatcactaaaaccatgcctatgaacagaatatgcagnatataatagaagcaataaagaagacttgctcactattcacaccaataacaacaaacatagncccagactcaaaatacacctacctctcaacaaatagaaatagaaat

SEQ ID NO: 150627 - DNA, 306 bp, Glycine max
  unsure (1)..(306): unsure at all n locations
agaaaaaatgtcccgatcgattctttttattattntatttaaagatattttgattattttattattattttgccctttttttgtttaaccgaggttacagcgtgaacgatcggttagattttgttttaacagtgattaaacgagattacaatgcanatgatcggttgaaattcatttcatcatttattaggcgagaaaacggcttaaacgatcgggtaaagctcgttaaaaacaaaagaaaagaaaccgaaattgaatgaaataaagatgaaaccccaaaaatangaaatgaattaaaagtctcgg

SEQ ID NO: 150628 - DNA, 302 bp, Glycine max
  unsure (1)..(302): unsure at all n locations
tatagagncttagaaatggtatattaaataagaaaggaattccaattgaagtagcaaaatgtttggccaagataattaagttaaaaagtcttttagaagaaatttactctctgagaattgattaccagaagatgtaatcgattaccagtggccaaaactgatttacaacagctattaaaattagaattcaaaatttgccctgtgtaatcgattacacatatatgagaatcgattaccagcagnttctgaacgttttaattcaaattntatagcttagaatcgattacacatatactagaatc

SEQ ID NO: 150629 - DNA, 345 bp, Glycine max
ccttaatggtggatgtccaccatggagatgcaacggaagacaaaggagaagaggtgagaggaggcgtcatccactagggaataagccatggaagaatgagcttcatcaccaaggatgcgccttggataagaagcttgagaggatgcttcaatggaggataagaaagagggagagaaagagagaggggggagcacgaaattgaaggaagaaaaagggagagaagtttaactttgagttgtgtctcacaagactctcattcatcaaagttacaacaagtgtcacagatgcttctatttatagactaggtagcttccttaagaatgcttcttgagaaaactttcttga

SEQ ID NO: 150630 - DNA, 426 bp, Glycine max
agcttgggccgctcttctcctatcttctctttcttctatgagactggtttggcctgagggcaaatgactaatttatgacatgatgctaggatagattcctaacatatcagaaggttgccacacgaataaatatgtgttcctttgcaggacttagctatgtgtctatactcgtggctggtgaggtccttgctaagttgagtgcactgcccaggtttggttctaagttgtaacttaacaagttcttcgatttgttttgggcctttttcgttaatgtcatcacgtggaaatacattgaatacgtcatcttgatctcccctagttgcttcatagacagacagagtctggattggggacccttcgtccatgcccatgacttgattgtagctgccacgagaggtggggtgaggcttgtctggctcatgaata

SEQ ID NO: 150631 - DNA, 319 bp, Glycine max
  unsure (1)..(319): unsure at all n locations
atggatcacatgactcgacggcctgatcttacgatatggtgcattcnctaccccagagaagaggaactcatgataccacttgtcattcccttatatggaaacaacgctcatctcatatagtatgagcagtttgcacctccagtcacccttatattatgacataagtttacccagtatcttcgttaccaatagtgaattctattgatccatgcatcattaacgtcacaaggaacagatcattcgaccgttcgccttaattagaggtcgtatgaatattatgataacgcttctcatgttccatgtctttaaagaactcacg

SEQ ID NO: 150632 - DNA, 364 bp, Glycine max
  unsure (1)..(364): unsure at all n locations
caccgacgcatgcaagctggcggactatacctattacctaacttcgccgcgtttttatctangcccggacgcaaggcgggctgcagcaccggctccgcttccctaactgtactggaggcgggagaggaggatccaaactaatggatgctggaggattaacatgaccggcgagacggacgccatctgatcttttaacgccgacagatcagactgcatctgttcatacacgccctcttcattatacattactctggatcaaacgtaataagggtgccttggagaggcttataatgatgaaattcctaaagaaaccacaaccgtgagtacgcccgccaacatgaggatgctatggatgagcagacgc

SEQ ID NO: 150633 - DNA, 214 bp, Glycine max
cccatctatagagcttttgacaataaaacaaagaactaccatcttaattgcaccccttgccgattcgaaacccgaacaggctacaaggaattcttaatcaaaggttaaatgattaatgaatcgcaatgttttgaaattagtgtgaaaaataagacacgcttaggagaacgaaatctagggtgaggttgacaatgagatgtcacaagaacatatg

SEQ ID NO: 150634 - DNA, 433 bp, Glycine max
  unsure (1)..(433): unsure at all n locations
agcttgtagtgtttttatagatggttatttattctcttataagctgtcctgtaatctgncaccataggctaggcagtagccttcatcatgaactattttttgtactatctgtccattcatatacatatatatatatatatatatatatatatatacatctcagcaaactaaggttgaggatcctttttgtgtgcatattttcatactcaaacatttcaagtaattctaaagagtctaaacgtctaaccattttaattcatggaatctaaataagccttatagatgcaaacatccaagatattaccattcatgataatntaatcatttgaaatagcactaactgcagataacacaaaccttattacaatngctntatctgtatatccttcccgtcggtcactaaatgaaatccgcaccatactcattggctaca

SEQ ID NO: 150635 - DNA, 440 bp, Glycine max
  unsure (1)..(440): unsure at all n locations
ncagatccaagcaactcanaatctaagtatctaaaacctctctatctagtggattttcaaagggagagaagagaaaatgagaatggagtnattntggagcaaactatcatctcacacaagtctataacattaatctaaacttgctcaaactggttttacaactaaaactccaccgaatcaaaatttgacccctcaacacccaatttaccctataaatgactcttgccttcactttggtcactcattttcctcctttgctcagcccaagctttcccacaagtcctaaatgacatttcaaactagtattaactcactttaacctccaattaccactaaatccagattgagcttttcaaaccctcaaagcatcgcactnttccactcatatcactacattctcaccttttaaccataagttaactctacccttcatctctatc

SEQ ID NO: 150636 - DNA, 391 bp, Glycine max
  unsure (1)..(391): unsure at all n locations
agcgcatacatccgtcgtgaaggaatagattaaatcacgttgcttaggnaggacaaacgcctgccgcaagtgatatggatgaagactagggcatatgatgctagcagtggtctaatgacaaccaacaccaggtgcatcccccaactatagggttggcaaaaaaaaacactgctgccaaccgccaatctaattgagcttatgctcttatgcggacatggctgatgaccaaatgatcaagagatctcattaattgattaggagcgagatctattcaatgataggacaacgcgccacggtgcgaaatcatgtctgcggactagactgttgaatgtcactacacaagaatgagatgcaggatcactcctaatgctttgcggctcattagattcac

SEQ ID NO: 150637 - DNA, 198 bp, Glycine max
atctgctggaagcaacttgacaatgaaaagaaaaccgccgattttattagctcatcgagtgcattcgatcgcatgaatcctttaaaaggcaggattttttcttcgaaacgtaaatagcatgcgatatagaaatgttacagaaatctcaagatggctcactaacaaacctacattctccttgtgttctcgtttctctct

SEQ ID NO: 150638 - DNA, 394 bp, Glycine max
agcttctcccccattttcctataaatagtgtggtatatgtgattggaaaaaatgttcagccctcctggtaattcaagaatcatatgaaattagtgaaaaaaattgtttccatgaagaaaatccaagtctaggcacttccgtaacattcccgtaggcgatttcgtgaagattttcaactgttcttcaacgttcttcgtcgttcttcggtcttcaaccagtaagttcccgaaatcgaacttttcaattcattctatgtacccttagtggtcctcatttattttcgcatgcttttattttcatttcatttacttttcgtacccccttttgacgtgctttagccatttacttaagtcattttctcgcctaatcaaaaaataacataaatttccaccga

SEQ ID NO: 150639 - DNA, 264 bp, Glycine max
  unsure (1)..(264): unsure at all n locations
agcncacctccttgagatgagaagctagagcttanctacacacacccatctctaaactaagctcacctncttgacaaaaatagatgaaaattcaagaaaagcccctgccacaaagactactcaaaacgccctagaattcaaggctttnaccctattctagtcgaatggtcaaaatactaagcccaaaagaaagaagaaccgcttctaatatttagaaagaggagtggatccaacctggatccatgggctctaagatctaccctg

SEQ ID NO: 150640 - DNA, 439 bp, Glycine max
  unsure (1)..(439): unsure at all n locations
agcttgagccaattctaacgataataacttttacnctgatgtccgattgagtctcgtaatatatcgacacgctcgaaattgaatgttgaagctctaggcctattcaaacaacaataacgttttactcggaagtccgattcagtgacgtaatatatcgggacgctcgaaattgaatgttgaacctctgagccaactcaaacgacaataactttttactcggatgtctgattgagtcccgtattatatcgagacgctcgaaattgaatgttgaacctctgagccaattcaaacgacaataactttttactcggatgtctgattgagtcccataatatatcgagacgctcgaaattgaatggtgaacctctgagccaattcaaacgacaataactttttactcggatgtccgattgagtctcgtaatatatcgacacgctcg

SEQ ID NO: 150641 - DNA, 238 bp, Glycine max
gcttaaacattcaactttgagcgtctcgatatattacgggactcaatcagacatccgagtaaaaagttatagccgtttgaattggctcagaagttcaaaattcaatttcgagcgtctcgatatatttcgggactcaatcagacatccgagtaaaaagttattgtcggtagatttggctcagaggttcaacattcaatttcgagcggcccgatatattacgtcactgaattggacatcc

SEQ ID NO: 150642 - DNA, 429 bp, Glycine max
  unsure (1)..(429): unsure at all n locations
agcttatgataagttgagatgcatgagtttattttatgttttaacatatgggatattttttactcattttatctcgttaattcttttttattttcctctcacccaagtacttgttgagaagattatccaaactagtgctatgctttttggttaatgattgtcgtgtgatcaacccttacctagtggatatttgctaaaattattttttgcaatggcaaaaaataggtcccctgttttgagctacatttcaaccttactcgtcttttgcccttttactatgttacctaagtgtgtatcttgcggaaacaattcttatcaatgtcatttgactttttggtgtagaaacaagaaatactagaagatgtttcanataaaaatcgtttcagcctctggtgagtattattataactnttactttctagtttttca

SEQ ID NO: 150643 - DNA, 430 bp, Glycine max
  unsure (1)..(430): unsure at all n locations
agcttgcatttggaatagcgtataccccattctatcattangatnagnacctgacatctcaaacaaacaaatcaaacgtaacaagacaattatagttgttgtttgaatacctcacccactcaagtgtatcacacaattatggcttttctctaatgaaacactcttgccttttaccactctaattccccttgagttcttaggcaattcaagagattatggccacaacaaagaacaattcaccaatatgtgtaaggtaaggctagagagacaaggaaaaggttaaccaagaaaaaggctaacaatgtttttaggcacaaatgaaggaaataaaattcagaatttaggaattcaagtaacaatccttcatgcaaccaatatattaccttaaagagatnttttttttttaaagttcttcaagcatgaaccattc

SEQ ID NO: 150644 - DNA, 370 bp, Glycine max
  unsure (1)..(370): unsure at all n locations
ntgagccaattcanacgacaataactntntactcttgtttctgatagaggcccgncatatatcgagacgctcgaaattgaatgttgaagctctgatccaattcaggcgacaatatctttttactcggatgtctgatagagtcctgtaatatatcgagacgctcaaaattgaatgtagaacctctgagcaaattcaaacgacaataacttttttctcggatgtctgattgaggcctgtcatatatcgagacgctcgaaattgaatgttgaagctctgagccaattcaaacgacaataactttttactcagatgtctgantgatagcccgcatatatcgagacgctcgaaattgaatgtggaagctctgagc

SEQ ID NO: 150645 - DNA, 291 bp, Glycine max
  unsure (1)..(291): unsure at all n locations
attagagggctttccttctgtgtccagcatcttgggatgttcccagcctttgatgacagctttccaggctctgctatccagagatttgaagaaagccaccattcttgctttccagtattcatagctggttccatcaagaattagggagctgttcacttggcctccttctttctccatgttcatcagaatttatctgcctagatctcactcagagatttcgagtgcctgctctgataccaattgaaattctgatactgtggacagatgtcgnacaggatgtcacgacatcac

SEQ ID NO: 150646 - DNA, 447 bp, Glycine max
agctttcgagaaattcgaatgtgtcatacgttttacacagatgtccaattcggggtcataatatatcgagacgctcgaaattgaacaacggaagctctcgagaaaatcgaatggtcataacttttcaaacgaatgttcgattcggggacataactcatctagacgctcgaaattgaacaatggatgctctcgagaaattcgaatggtcataagttttaacacggatgtccgattcgtggacgtattatatcgagacgctcgaaattgaacaacggaagctccggagaaatttgaatggtcataacatttcactcggatgcccaattcgggaacataatatatcgagacgctcgaaattgaacagcggaagctctcgagaaaatcgaatggtcataagttttcacacggatgtccgattcggggacataactcatctacacgctcgaa

SEQ ID NO: 150647 - DNA, 319 bp, Glycine max
  unsure (1)..(319): unsure at all n locations
cctgacatcnnaaacaaacaaatcaaacgtnacaagacaattatagnagctggttgaatacctcacccactcaagtgtatcacacaattatggcttttctctaatgaaacactcttgccttttaccactctaattccccttgagttcttaagcaattcaagagattatggccacaacaaagaacaattcaccaatatgtgtaagagaaggctagagagacaaagaaaaggttaaccaagaaaaaagctaacaatgtttttaggcacaaatgaaagaaataaaattcagaatttaagaattcaagtaacaatccttcatg

SEQ ID NO: 150648 - DNA, 381 bp, Glycine max
  unsure (1)..(381): unsure at all n locations
agcttccttaagaagatncctatagaagcttgatattagctacacatacctctctaatagctaagctcacctccttgagatgaaagctagagcttanctncncaccccctataatagctaagctcacccncatgacaaaaaaaaaaaaaacctgaaaatacaaaaaaagtccttactacaaagactacctcaaatgccccgaaatacaaggctaaaaccctatactactagaatggccaaaatacaaggcccaaacgaaggaaaaacctattctaatatttacaaatataagcgggctcatacttagcccatgggctcaaaatataccctaaggctcatgagaaccctatggccgtcccttggatctctagcccaatctac

SEQ ID NO: 150649 - DNA, 300 bp, Glycine max
  unsure (1)..(300): unsure at all n locations
tgacctataatactcagctntgatagagtagnttcaccttctcgctaagcttatcttctggctnatcgagcatccactaagcgnaacactcctgagctaagcatgaagaagaatccaaaagaagatgagttntacaagtttgctaagcgcaccacttcatctcactaagcgcaccacttcagttcatccgctaagcgtgaaaggcgcgcttagccaaaaatcactaacgtgcgctaagcgagccataagtgcgctaagcgcatcaacacaaacaaagccacctatttaagcctgaaatca

SEQ ID NO: 150650 - DNA, 227 bp, Glycine max
tgggccaccccctgatattggaggagggcccaactgtgcgagtacaaccagagagggaggctatcacacagctactatgcttacacagatatagatgacattgcttgttagcaacattctgcccaacgaccgcaatgccaattgcccgcacaaaaatatcagttggtctgtgtcgtcccgacatgggtaagtatgcatatgggtcaactgatttctgataccatcta

SEQ ID NO: 150651 - DNA, 356 bp, Glycine max
  unsure (1)..(356): unsure at all n locations
tgagattaagaagagtagaaaggtgaaacttcctacctttattcggagaccacagagaggtacctggatatatgtcgaggggagccagagactttggagacctcaagtggggtgctatttcccaaaaccaagcttgaccaatcccgacccaacccaggcatagtcagncagtgagaacctgtgatgtacctaagcaagcgagctcctggcaggcaacagataaaaagaactaagaccacaaagcaaagaagcttgtgtggtggctggccagctgagaactctgattgatatatgggatatggcctctgagaatcgattaccaaaggtgggtgatcgattacaatgcctaaaaatga

SEQ ID NO: 150652 - DNA, 199 bp, Glycine max
tcaaggccataggcgtcacagtctgaaaagagtgtgatgaactatggggacgtcaaacgtgcaccgctagagccttggaacaaaaacccttaatgcccgtaaggaataacacgcgcctacaaaaaattgacgggctatatatggcatcattaataatctcaatcttcataaaaggtgaaggaatcaatacgggtcaaat

SEQ ID NO: 150653 - DNA, 456 bp, Glycine max
  unsure (1)..(456): unsure at all n locations
agctngaattgttggtcaaaatagcagctttcattcctattaacctgtattgaaaaggaaatcctttantttaaatcaataattggtccttacaggtgacactcatttaagaatcagtccctagtgaaaaaactttagtacctgtaagtccttaattagtaccaaatggtccttgttgttcctatgtttcttaagtattattagtcccttaaaaacttaacttttagtccttataagtataaggactaaaacttactctttttttcctatacttgaatgagtgtcacctataaagatcaagaccctgtttggataactttctcaataagcacttatgaaagaagaaaaacaaaagatgaaataagttaagtttcttttataagttaagctaaattcaacttattcacttcaactgttatagaaactctctcacttaacttgttcacaagctcattg

SEQ ID NO: 150654 - DNA, 441 bp, Glycine max
  unsure (1)..(441): unsure at all n locations
agctcgactngacccatgtttccttctagttagagtgtttatgtaatgnnctaactcctaanaaacattattagcgcgataaattagtctactacagtaagcctttaaggtgtgtcgttagggtataataatcttcatcagctaagagaccaagagacattcgagagaagagcttaaagaaacaagggttagaccaatttctcagactttggcaaggagtttgccctaattcatgtaattgatttctttcttccaaatgtaagttattcgcaattttattgtatattttaaatgtgtgggacttaaaaacagtctcaagaaaaattataataatttacttatattgttcaacctattcagttagactctctaatattcataatttaatgtaattctatgctatatgaagtgccattacactgacttataaacattataatg

SEQ ID NO: 150655 - DNA, 293 bp, Glycine max
  unsure (1)..(293): unsure at all n locations
acatagatagaactatatcaaatcttgaaaagctcatatggaggctctctaaaatgtattcccctagcaaagaagaaaagctatcaagattttccagactaaaccactcaatgctgatgtgggacactctcaagtactctttgacatcaatggagattgctgcacagagtggaaagacttcttttacaccaaactttgctcttagtgcattgcatgaagaactgaaatcttcaagaggctttatattatccctgatgctgaaacttgcncaaaagacacgatagaataattct

SEQ ID NO: 150656 - DNA, 451 bp, Glycine max
  unsure (1)..(451): unsure at all n locations
agcttctctnttatcttgttgaaaactaatctgtccatatatgagatgggttcttccctgaaacaaatgaaaatatggatgttgaaagtaagttttctcttttatgatactaaaattttaagccaaaatcataagttacaattttttagacatgtctatcattctaagagaacttttccgcctatttaaatgacaaactacaaatttaggaaaacagatatcctactattgttgaaaataagattcaacccagcgaacccactatgagaaataaaaatggagcagggcaagaatcttgcatataaacagagagtttataaccatcaatgaatggaggataggggaacagccaaggtttggcatataattagaatcaatatttagggcactatagtgtcctaatataatgaataaatcanggtagaatactatatanatgaaagatagatca

SEQ ID NO: 150657 - DNA, 273 bp, Glycine max
  unsure (1)..(273): unsure at all n locations
atataataatgctaagacaaaacaaaaaacagcacgggtgcccatgtctagcctcatcctactcttatctatccagnatccatcgncaatttttcatttcctcctttatttaataaatcataaattntcctatattataatcntagactatttttatttttttgttgaacgaaaacaaaaccaagtccaactcactatatacaactactgaactataagaaccaaccggggcatcagnataagagattctcaaacaggccaccaagcccaatc

SEQ ID NO: 150658 - DNA, 454 bp, Glycine max
  unsure (1)..(454): unsure at all n locations
agcttcaaaacacagcaacacaaaatctttttgttccattcccctcaatttaatagatgttctaggtttgagaagtgaaattgagaatgaggtaaatttgaagcaaactctcacctcacacaagtcaataacatcaatctaaacttgctcatactggatttacacctaaaattccaccgaatcaaaatttgactcctccacacccaattttgccctagaaatggctcttggttcactttggtcatttgtttttctctctagcacagtccaagctgtctcataagtgctaaatgacatttcaagctaggattaactcactttaacctccatttaccacagaattcagatttaaccttccaactctcaaggcctcactctttntccactcataacaccacattctcactttctaaccctaggttaactctacccttcatctctaacagttttccat

SEQ ID NO: 150659 - DNA, 447 bp, Glycine max
  unsure (1)..(447): unsure at all n locations
agctcgnctcaacgttnatgttagacagattctaacatgnnagctatcatcgccaagtaccaagaagagttaggtctagccacggcccacgagcatagaatcgcggatgagtatgcccaagtatacgcggaaaaagaggctagaggaagggtgatcgactctttacaccaagaggcaaccatgtggatggatcggtttgctcttaccttgaacgggagtcaagaacttccccgattgttagccaaggccaaggcgatggcagacacctactccgcccccgaagagattcatgggcttctcggctattgtcagcatatgatagacttaatggcccacattaattagaaatcgtaggaaacttgtatggtctctcagaccttgactagatatgaacttccttttgaaataaaatgagttggtcccatgtttctactccaaatagcttgt

SEQ ID NO: 150660 - DNA, 231 bp, Glycine max
  unsure (1)..(231): unsure at all n locations
tgccacatgagtncgcgtgagtggagcaaaaacggcccactttcccttgtgactgagacccatactcagccacaaaagaggggaaaatctgacctttgaaacgctaaaatcctgcctcggntagcgtgccatttctctggtcccagttactcgcgtttctttgcgtgcgtcggggccatgttttgaaagcaagcaatatatatatctnaacgctcagaatataaccccgag

SEQ ID NO: 150661 - DNA, 443 bp, Glycine max
  unsure (1)..(443): unsure at all n locations
agcttatggtaagatctgggacctaaccattgcagaggtctccacggaggccattgcctccctcgcccaatattatgaccagcctttgaggtgcttcacctttggggacttccagttaacacccacggtggaagagtttgaagagatcctgggatgccctctgggaggaaggaaaccatatctttnttcgggattctatccttccttaggtagaatttctaagatagtcaaaatctcgacacaggaattggaccgcgggaagcaagtcgaaaatggggtggttgggggtaccaaggaaatgtttggaagcaaaggcgagagtcttggcaagtcaagaggaatgggccccgttcatggacatcctgagactcttgatctttggggtggtcctctttccaaatgtggatgggttggtggaccgggcaacaattgatgcttttctc

SEQ ID NO: 150662 - DNA, 444 bp, Glycine max
  unsure (1)..(444): unsure at all n locations
agcttcttcacatagtccgcctttgcttgtccttctttatgcttaanaacagaaacattaggcataggcaaaagatcaagaggagttagtgggttaaaaccataaacaacttcaaaatcatcaaaagtgttagtggtcaaaatctgatttttgcaaaacaagatatatagtgactgtttagcacgaaacaacctcttgacctcactttttgtggctaaatagctctccctcacttcaagtgtttcactcttcttttgttcactctttttcctctcaagtgtttccctctttttctcactctcaagtgttttgctcactttttctttttcttttttctcttgaagaagtttttctctcattttcttttgatcctcacacacttcttgtggactcaatggcttgagcacaatcttnttgtcttggtgcatgaaagagatcttgttg

SEQ ID NO: 150663 - DNA, 414 bp, Glycine max
  unsure (1)..(414): unsure at all n locations
aagtaaacattnggaaagttagttttaccagtgggatactattcttaaaacaaaaatgacatacaacctcctcccataaatacagacatcaatgtaaatttagagcaagcttatgcgcatatttccttacaaacgttctcttgcacaagacattctattaaccgaaaaaaatgcacccatatacaatcaaggcagcttcgtttacctagattatttacacgtacttccaaggtgtatttgttacttacatcacacacctccttggctaaattcacacacatgcatactcaaagcattttggggtaccaaaaattgcacatgtgcacatcttggtatttctaatacctatacatacacaaacttcatgatgaatcttgactatctacacaataaggtgctacattttatgctctt

SEQ ID NO: 150664 - DNA, 397 bp, Glycine max
  unsure (1)..(397): unsure at all n locations
ttagatttcggggacatcttgatgtctgcaagataaacaactacttatgccattatgatgcgagaggtatctttcatggatacaggagaaaaggtttctttgtagtcaactctttcccttcgagcgaatgctttggcaaccaatcaggtcttgtgtctctcaatgttacctaatgaatccttcttggttttgaaaatccatttacatccaataggctttatcccattangacattcaacaagatcccatactttattattttccatacattccaattcatctttcatagcatcgaaccatagcttagaattacaagtgttaatcgcttgcaataatgactcaggatcattttcaacttccaagtcatattgagactcttaatacactngataatcac

SEQ ID NO: 150665 - DNA, 416 bp, Glycine max
  unsure (1)..(416): unsure at all n locations
agctntaacatccagcaacaacaatagtttatagaaatataagtttgatggtctatngaaatgggttttgttctattgtccaaatttccctaatcggtatacaagtagtagagagaaatggaagtttgaaggtctatttaaatggttgtaagttgtaacatttatttagggagaacattangtttatgaattatggtcttcttcgtcatgcaatgaaacccaatcttgatacacaatagacccaaggaatgaagcctagatttctgctattttatgatttctttaattttctctacaacactaacattttctatggtagacagcagtaaaaatccaactcatcaaacaatagttcctttccttaagcttccctnaaacccattaaaattagaaaactaaccacagataatgttcac

SEQ ID NO: 150666 - DNA, 443 bp, Glycine max
  unsure (1)..(443): unsure at all n locations
aaactcagctnctaactntgacaagattgaagctctgataccacttgtttgtctagaggtctctgatatcnnaagaaagggggggntgaattaagatattcgatactttctcttctaattaaaaatctatcttactttttacttaagntatgaattcccttaatgacaatcttcttaaatattaattcaaatgaagcaacttgaatatgaatataaagcaataataaataaaggagattaaaggaagagaaaatgcaaactcagttttatactggttcggccacacccttgtgcctacgtccagtccccaagcaacccgcttgagagttccactaacctagaaattccttttacaagttctaaacacacaaagacaacccttcctttgagttagagttctttacaacaagagactcacagnctcttaatcccttagagaatga

SEQ ID NO: 150667 - DNA, 410 bp, Glycine max
  unsure (1)..(410): unsure at all n locations
agcttatcaatccagtcaagttcagctccttcttaagtatattatgngataggttgagatgcacgagcttgtggcagtgcctcaagtcctcaggaatctcatcagagagcgtgttctgagagagatcaagatgtgtgagttcagtgagctgcgagaaattcttaaatatctcaccagtgatgtcactattagaaaggtctatgccaaccaccctcttcgtaacactgcatgaaattcctttccattcacaaggattggagctattggtgttccaatatatgtaccctcctctgtctgcaagaattntgctgtccaggtacaatttcagcttcagcagaacctctttgtctttgtcaaagattccctacacagctttccctgccaaaccaaacacaatagcccaaaaaaaa

SEQ ID NO: 150668 - DNA, 414 bp, Glycine max
  unsure (1)..(414): unsure at all n locations
ccatagagagaaattagaagccttacattagtgcttattcatnncagagnaggctnttttctttgagaatcacatattggtatatgcaaaaatgttaaagccatctaaggaactggacagttgaaattattctttggaaatatgtttcccctctcctgttacaatttttcagctntatatatctgattatgttctcttgatttaagagaaaagtctgggagctaaagctggagttgtcttaaaccctgctacccccttaagagcaatagaatatgtccttgatggagagccatttttactcccttntttttagcttcttttcttttcattatactataagaacactagatgattatgacacgggttcctagtatgctttatatggctttccaaggctttaaccatggaccaata

SEQ ID NO: 150669 - DNA, 452 bp, Glycine max
  unsure (1)..(452): unsure at all n locations
agcttnttggagtagaaacatgggaccatctctttntattttcaaaaagaaagtcgtatctagtcaaggtctgagagaccatacaagtttcctaacgatttctaattatgtgggccattaagtctatcatatgctgacaatagccgagaagcccatgaatctcttcgggggcggagtaggtgtctgccatcaccttggccttggctaacaagcggggaagttcttgactcccgttcaaggtaagagcaaaccgatccatccacatggttgcctcttggtgtaaagagtcgatcacccttcctctagcctctttttccgcgtatacttgagcatactcgtccgcgatcctatgctcgtgggtcgtggctagacctaactcttcttggacttggcgatgatagctagcatgttggtctccgtctcgcataaacgctgagacaaagcttctttgg

SEQ ID NO: 150670 - DNA, 457 bp, Glycine max
  unsure (1)..(457): unsure at all n locations
agctnttaggagttacctaaaatgcaatatatagcccatgaaagaaatgacccccagaatccacgaacaaagtttggagattaaaataaagaagacaatgcagtaacagagtgagaagaaaacaaacagatgacataatgaatatatacccatgaaaggcagaaaccctaaccctagctaatagctaaagtaacaaaatatagactacagagtggttaaaaaaactgtagtttagtccatttattttgacatattttgatattataaacaatcataacatgactcacaaatagttatcttgcagcttaatgtacatataaatacaagaccagtgatctgccagttggatgtagggggaaagtgatggaaaattatgtaataaaagaagaaatgctagtaatttgagccttgtaaggatgcnnttgtactccacttcatagcataatcactaaccata

SEQ ID NO: 150671 - DNA, 225 bp, Glycine max
  unsure (1)..(225): unsure at all n locations
tacagatgtcaccattttctttgaggaagcgccactggaaaacgtaagagccatcaaggcgatgctgaagagctttaagatggaggcacagatgataattatctttgcaaaatatcagctnggggcgataggtattgccattgcatggacgaagaatgcttcaacctacctttactgcagcctgtagactagaccttttacttggatatcttgagcaagacaaat

SEQ ID NO: 150672 - DNA, 340 bp, Glycine max
  unsure (1)..(340): unsure at all n locations
ttgtgtgtaaataaggatttgttaaccgatttagtaaaatgtcttgggttccttctgttgtgtagtggttatcggaccaatggataggaggatttgatcgtcctttntttttttttcaattaaatcaacatatagattatacaatttcagctgtttgtagagagtttaccctcttctcatgccattatcgatctttataagcatcttttgaagagttatacatctctcaatatgctagcattatcttgacaggttattttggataaatngtgaatttgagctaggataaacgataactctgatcttaaatgtgtaatggtgaataattgatccttgaatg

SEQ ID NO: 150673 - DNA, 331 bp, Glycine max
  unsure (1)..(331): unsure at all n locations
gacaccttagaacactcaagctctctcttgtgagcagctagctcatcctctttttcaggtgttgtaagaaagccgacaagggcaagagcaagagctgctactggaggaggcacttcaatttactcgccaaacctccaagagatggcactcacattttctggattttgcacccgctgtgaaagcaactttgcagaattttgggactgaacttggntcaactgagtagccatctgccccatctgatttgncaaactctaaatggaagctcttgnctcttgctgaaattgcatattctggatagtcgnaggcctcactaactcctctaaagaaa

SEQ ID NO: 150674 - DNA, 398 bp, Glycine max
  unsure (1)..(398): unsure at all n locations
acaaaaataattattagttttgcacataagctaattctttaatatgcatatacacgtgtaaaggtataaaagatatttttttctatacacggacactaattagatttacaataggaccacacgatttacatcgtaatgagtaaggatcaccttgagtcttcctaaaaaaaaggaccaacttgtgtgaaagaaaataagtttacttaagtagcttgagccgtaccttagtcaaggcctcgtttgcttatcttagctgttagaacgagtttttctttttcctttattatgcgtgtgtcgggggggcacagctgtttcaacgtatttaaaagtattaacaagttgtatcgaattattaatnggcaatagtgtgaccgtatttaaaaacagggtgtacgcac

SEQ ID NO: 150675 - DNA, 442 bp, Glycine max
  unsure (1)..(442): unsure at all n locations
agcttctgggtctggnggagtctatnncatattaagancttatattcngaacnggaatcagggttttgttttttcgttatcttcctcagtaagcaatgtcttctcccgctgagtaattctctggatccttcattcttcgttttatcattgtccaaataaatacaatgctgatgaatctctntaattataattaagttgacctatcaaacttttcctgtcgaattatatccaattttaagtcaatgaagaggtttttgtatgaatgttttctcttttcacaaacctaagttgagcgctttccagtttcagtagtgactgaagtaatcatttaatcgtgttattacaagtttccattcattaatatactcggattaggtgtacattttttcttggatcaanntactttgttaatgcttcaaaatttgcatgctttcatggttta

SEQ ID NO: 150676 - DNA, 402 bp, Glycine max
  unsure (1)..(402): unsure at all n locations
aagtgaaaaagggttcagccccttaggcacttctctctctttcgaatttgcttggaaaaattgtttccgtgaagaaaatccatgccgaggcgcttccaaaacgtttccgtgaggaatttcgcgaaggtttcgaccgttcttcgacgttcttcattcgttcttcatcgttcttcgatcttcaacgggtaagtacctcgaaccaagcttttcgattcattctatgtacccgtggtggtccacattgtgtttcgtgtattcttattctcgtttcatttactttttataccccctttngacgtgcttaagccattttatttaagtcatttctcgcttaacctaagaataaaataaatttccaacgatcgtttgaattgtattatccgttaacttcggttagaatga

SEQ ID NO: 150677 - DNA, 263 bp, Glycine max
  unsure (1)..(263): unsure at all n locations
tctntgagataacttncttgagaagctagagcttatctttctcacccctctcataactaagctcacctncttgagaagattcctaaagaagctagagcttagctacacacacctttcttatagcttagctcaccttcttaagaagagaagctagagcttagcttcacaccccctataatagcttagctcactcccatgacaaaatacatttgagataccctaatttcatccggagattatnactagatgacatgcaacctttg

SEQ ID NO: 150678 - DNA, 422 bp, Glycine max
tatatatatatatatttatatatatatacatatactatataaggtgtgtatttgttcatgtgcttggcagtttcgctagaggaatgaacatcgccagaaaattaccatcgttatccccatcgaatgatgagactctcactcaaaaattgaaatgtctcatcttatagtaagtgatatcggagcgacgaggcgggtcgttacactccatctctgcaatatgggttggagttggcagagagtgtcattgtttgtcatggtagttacgaggagattggaactttatggaggtggctctcgcttgagaccggatcgcatactaaccattgtacaggtggccatggagagaagtttgtcgcggtcccaagatgagcaccatatgtacttacccaaatctagagtatactgatgtcaacgctgacctg

SEQ ID NO: 150679 - DNA, 443 bp, Glycine max
  unsure (1)..(443): unsure at all n locations
agctncatgtaaaagattgtctcagcaaattccttatttccagaagggaattctatcaatagacctccaatctttaatggagagggttaccactactggaaaaccggaatgcaaatttttatcgaggcaatagatctaaatatctgggaagccataaaaataaggccttatatacccaccacagtagaaagagtttcaatagatggtagttcatcaagtgaaagcataaccatagaaaaacctagagatagatggtctgaagaggatagaaaatgagtacaatacaacctanaagccaaaaacataataacatctgccctaggaatggatgaatatttcagggattcaaattgtaagagtgctaaggaaatgtgggacactcttcgataacacatgaaggaactacagatgttaaaagatctaggataaatgcactaactcat

SEQ ID NO: 150680 - DNA, 310 bp, Glycine max
  unsure (1)..(310): unsure at all n locations
agaacacagagccgtccctgcagacatgncgcggggggcaagagaacctggggacgtcaggtggggtgctattgtccaaaaacaagcttgaacaatcccgacccaacccgggcatattcagtcagtgaaaacctgtgatgtacctaaacaggcgagctcctgtaagtcaaccgataaaagaacaaagaccacaaagcaaggaggcttgtgtggtggctggccanctatggatcttgagtgatatttggaagatggcctctggtaatcgattacaaaggatgtgtaatcgattacaaagcttaaaaatggg

SEQ ID NO: 150681 - DNA, 400 bp, Glycine max
  unsure (1)..(400): unsure at all n locations
gtgatatgaacctggagatgtagggcaagcgccccaagaaaccccacactttctttttagtgcatggcttctgcatttcgaggatggctttaactttttcggggtcaacctctatccctttttggcttacgatgaaacccaacagttttcccgatttgacctcgaaagtgcacttggctgggttcaaccttagctggtactttcgcaacctctcgaacaacttccgtaagttgattagatgctcttctttggtttggacttagaaatcatatcggccacatacacttcgatttcttggtgcatatatcgnggacaaagctaccatcgcttgctgataggttgccccggtgttcttgagtccgaacgacatcaccttatngtaaaagcacgcttcatgatg

SEQ ID NO: 150682 - DNA, 390 bp, Glycine max
  unsure (1)..(390): unsure at all n locations
gcgcgcacgtgcttttggaggtatgttcatattatatgtagaagaaagttaaataatggaagaacagcgtgtacacttctatgtacatattagatgttgaagaagaaaagtacattttataagaagaatgattgagaagagatattntcaatttcttttaaaaaatctctacttttccttttgtgtcattagcaatagatacatagtttttaagaattttatatcattcatttatttttaaaaagatatttacaagtttaaaatttttttatcacaattatgaaaatgtcaaattttcaataaaaactctttggtgtaccaagattttgtgtcatctttatatggtttgatgtatatttattgctttaaatttctagaaaacacattaca

SEQ ID NO: 150683 - DNA, 320 bp, Glycine max
  unsure (1)..(320): unsure at all n locations
agcttggantgattcagcctaactacggatcgatgtttatttatttacgctttttcttacaacacaaaagtatgattgattagacaaacatctttatattcatcaacttgattgtttaatagacccaacacttttacctaatgatgtcaatcttaattacttgcatttttattagtttacacctacactaatctaaattctattctaaaccatccattatcaatgttctttcaacaatgccctatatctgatcttaactctgtctataactaatcttttgagatcgatacacaatttcatccatattaattttaaatatt

SEQ ID NO: 150684 - DNA, 320 bp, Glycine max
  unsure (1)..(320): unsure at all n locations
tatgaattaaataacaatattgtacatgtgtaattatatgtcttaataaaaatgcttttataattgctttcaagaattgctttaaacttactggtttctaaataacctattcatccaagcatgtgaacttctattctttgtataaagcttttattaacttaagttcaaattgccacctatgtgagtngcttaacaaaaacatgtgaacttgtgaaaacttgaatatgcttactgaaaaaggatttggctagggtgggttatcaatttttactttctattcgattgataagatttatttcttatttctctttctatattta

SEQ ID NO: 150685 - DNA, 394 bp, Glycine max
agcttggagagatgaatcgttacgaaacgtgtaaacggcgtttaccaaaacaggtcctggctgagaatgaagtccatatcgtcgtccagagaagaagaagaaatcaccaagtccaagtcctgcttctcgttctgcattttcctattcatctcgttcgcccgcctgtagaggagtgcgtgtgtgagactgagagcactgagtgatcaaacaaaacgcataaataaataagaaaaggggtggagggactgaggagagaaaaaatgttttttgggttaaggcggcggaaagtgcttttgcttttctttggagaatacgatctctgccggtcgtgttgctgaactaagacaccgttgttaatttgaaggcttggattttaacttcttctcgtgaactg

SEQ ID NO: 150686 - DNA, 415 bp, Glycine max
agcttcctcgtttgcaaaatgaacgtgattagcgccacaagataagattcttatgccctaggaaaagaaaaacagaacatctgatgcacgtgaacctatcattaaaaaaatattccgtttgtgtatcacatccctaagagggctgtaatggcttccatgcagtttgaaaacatgcatgaaaaaatataaatataaactaagcataaacttcataattatacataacatcgacaacacttttttttcaatactttatttttggataaaattattgcagccttactaaataacgtgggctcactctgtattaaggcagtatcatgagattctatcaaataaaaaataaagtattgaaagtatattgtcaccactttcttgtgatataacaatccatggtaaacctgaacagagaaaa

SEQ ID NO: 150687 - DNA, 403 bp, Glycine max
  unsure (1)..(403): unsure at all n locations
agcttaggtaaactaacaagtgtggaaaatgtgatctgagctagcactgagaaaagcacgcgccataaaagctctgatatggtgcatgtgcacagtatggaaaatggaacaaagaccccccaacataaagcaagcaattggtcaggagaatatntaccaaacatgactaagcacccagttaggattagcagtaataagagattagcaaaagctgacaaaagaagaagcaaaataattaaagagaagaagagaaaggtttgaagtgtgaacagaaacattaaaaagcaaacaacacaaggaatgaacatgaatattaaaaagtagcattcaagacccacgggagcctagcttatgcacgaattaatcaatgaatgaatgaacgaatacaaacattacaaatgaa

SEQ ID NO: 150688 - DNA, 299 bp, Glycine max
  unsure (1)..(299): unsure at all n locations
agctgtgaaaagtgttatgttttaccttctaactaagccaatctggtggcttagcgagtgtccgcaaagcgcaacactcatgggctaagcacgaggaagactctgcagtaagatgagttgtacagggtcgcntaacgccccgcttcatttcactaagtgcaccgctttagttcatccactaagtgagaaaggtgcgcgctaatccgaaattcactaatgtgcgctaagcggtccataagtgcgctaagtgcatgagcacgaacaaggcccccaagttccatagagttttgagagatttt

SEQ ID NO: 150689 - DNA, 400 bp, Glycine max
agctatattatgccctctcccctcggcggtgatttcttcttcggcgaaggcgagatagttattggcagtgatattattgaccagccctccgaaaccttctaccgagatgtcttgggccacatgggcctcgtttagaacttttactagcagagcccgatgaggctcggagctcatgagtaactccaacagcgagaccctggccggagttttgttgagctgttcaataaccttgaattcgctctgctgaattatacggaggaactcactggcttcctctagcgacacctcctttttaccatcccttttctccggaagacctttcgccggaatatctttatccgaagtgaggggtgcttcgtcatcttgttcctccaccacttttcctttccccttgacgttc

SEQ ID NO: 150690 - DNA, 378 bp, Glycine max
  unsure (1)..(378): unsure at all n locations
agctntactaaatcaatcacacaagcgctcgcacacacacacacatacatagcaaaaaattctatgattaaaaacatataactattgaaattaaattcatacatgcacaaatgacaaaacacaaagtttcttctgtcaatcggagttgtaatttttcagggtgttacagctctaacttattttaattattctacatcatataattatacactttaattagtcaccaattaattaaactaaaattctatttttaaactagttatatagtcatttatgaaaatgccctccactttaaactcttatggcttaattatccctttctaattctatggaatctagatcaccattaatcaaccttaattatccccactttaattt

SEQ ID NO: 150691 - DNA, 423 bp, Glycine max
  unsure (1)..(423): unsure at all n locations
gctgcagctatgaatattcttgaaattgtcttgttaaaatctattggtttagctttcatttcattttttttgtctttggatattgcttgtctctttgtttctttggttgtgagttgccatatagggaattgccaaggaggattggtgccatccctttaagaatttgagtcaagaaataaggggtcaaccaccttaagagctattggactaagaaacactccaaattgagtgaatcaccaaagagagaaaaaccaccaaaattgaggacctttttataantttttaattgagaatttacttaccttcattgctttcaaattttgtacaaaaaggtctttcattggaagtaagttgggagcctccaatangtcaccctacttccatttgtgtgtaataattttaagcaattttcccttatgatag

SEQ ID NO: 150692 - DNA, 390 bp, Glycine max
  unsure (1)..(390): unsure at all n locations
ttgacttttacatgcctaactcccttgtgtggtatntgtatatggtggtatcttgtgtgttgcatcttagtacatatgatatctatattgcatcatgtatcatcatggtttgtgtgaagaaaagtttctaagtcagaaacgtttcttgaagaggcaaaaactctctgtttaatcgattacatggttgtcgtaatcgattacaacaagctttatgaagcttgaagagttgggtcttgtatcattttaatcgattacagtagtctcataatcgattgcactattgtttgagacaatgcctatattattcacgagtctctgctttaatcgattaccaattggggtaatcgattatttctctcacatttantgtgtttagaagtgatcaagaac

SEQ ID NO: 150693 - DNA, 400 bp, Glycine max
agcttcttaatctcacttgatgaatacgtgctacttcatgcactcctctaatgacatagcatcacttctgcactaaattgctagagttgaagccatttctaattaatttttggctacagcaggggtcatgtctccaagggctccaccactggcggcatctatcatactactctccatgttactgagtccttcaaaaaatattggaggagaaactgctcataaatctattggtgaggacaactggcacatagtttcttgaatctctcccagtattcatataagctctctccactgagttgtctaatgcctgaaaatcctttctgatggtcgtggtcctggaagcaagaaattttttttctaagaacactctcttgaggtcatccccacctcgcgatggacc

SEQ ID NO: 150694 - DNA, 410 bp, Glycine max
  unsure (1)..(410): unsure at all n locations
tgcactatatatatacaatcgcacttatttagaccctgagacaaatcctcatagacttctatcattatttgctggaatgaatcacgtaaacctgcattttttttattcacaaagattttggcatattaatatcaccaaactatgactaggcagcttctgcaaatcctatacggagattgccataatcaaacactgtatgatatgcccccaagaaaatacttccaagaaccctgcacaaataccagtattgtcatatacaaggtagaggttgaatagagagggagaagcatgcatttgtcgcatttctgcaatgacttatgaacatacataatttacattntatcaaagaaagacattaacaagactagtgttgattaccagaggggaccctgtgggggaggcacatctat

SEQ ID NO: 150695 - DNA, 363 bp, Glycine max
  unsure (1)..(363): unsure at all n locations
agctatgagaatatggatgctgccattgttcaatatggtccacatttgcccatctcaagctatcatgacatcatagttccactcttgaagaaggaagctgaatacactaaaaatttgatgaaaggccacagggagcaatgggtcaagtatggttgtactattatgtccgatgcatggactgatctgaaataaagatgcatcattaatttttttattaactttcaagctggtaccatatttttgaagtctgttgctggctcttaatttgtaaagacatgttaaaagctctttgagttgctcgatgctattgtggaggaagttggaaaacaaacattgttctagtngtatttgataatggagcaa

SEQ ID NO: 150696 - DNA, 382 bp, Glycine max
agcgtgctactgccaccatattaatttataatcaagcatgtctcattcataacaaagaaatagttaaaccaccacttaagtatatccaatatacatgagcagagatacactattgttggagactgtcttagcacgaggataataaagaacgtgttttctatttaatgtactgagagagccactgaaagccttcaccatatcctatcttgcggacaatactgcacataaaaaccttcaaaggacgaacattggagtcaaccaaattaaccttgcccttgcctggtgtgaagttagtgagacccatgttatagcgtagttcatcctttgaggcagtgtaaggtatatccatcttggttcccaagataaagaaacggacatttgt

SEQ ID NO: 150697 - DNA, 398 bp, Glycine max
agcttgtcgagccattactcattcctacattatcccattctgggctcatactcattcttcaacataactcacgcaaccatctggaggcaccaaatagacgtggttgctcccgaggagccttcacataagcattgttcacaatttctagcactcgaaaagatgtttctaatgattcttccacagctactacatatggcgtagaggatggacaacccactagtatatcttcttcccatgacattataaccagcttatccttccaccactaacatcaatttctggtgcaacattgacgggaccaccccaacagaatggatccaatgcttacctagcaggcaacctgatgtgccattattttcacctatttcttaccctttttgcaccatttaagtactgat

SEQ ID NO: 150698 - DNA, 381 bp, Glycine max
agctgtcaaataaagtgatcgggtatcatctccatcatctaaaactccctacaccttcgttattgagagtgagagagagttttaagtgagtgtttctatgaatttttctcttctcaattatgaatatgtaggggttcggtgtataggaccaatacatctcatttccaatggataacaagtactttttttcctggttgatgtgctttaaattatatttatgcaatcatagtactacctccttcccgtatcttttgatttttaagattattgcacatagattaagaaatatttaatggaactaaaaattgctatatttggactaaaatgtcctcatataacacttggatatttgatactcgcaccactcagtagggatattaa

SEQ ID NO: 150699 - DNA, 413 bp, Glycine max
gggatcttaagtcacctgcagctgcagcttcttgtaatatcttctgagattttctttgagaaacttccttgagaggctagagcatatctacacacacccttctaataactaagctcacctccttgaaatacttccttgagaagattcctaaagaagctctagcttagttacacacaccccctattatagctaggctcacctccatgccataatacatgaatatttataaaaatattcctattacaatgactactctaaatgcgctatatacaatgctaaaaccctatatctctagaatgggcaaaaacaaggcccattagaaggaaaaccaatttatacattgcaaagacaatggattcatcttgaccatgggcttaaaattaccctaggttcttagaaccctaggccttctt

SEQ ID NO: 150700 - DNA, 344 bp, Glycine max
tgctgtcttctttgctactgtaagcattttctgtcccatcaagcttatcgacacattgacagctcaccatctttcatgactctgtctcacgtacttttcaacagtgagtctagtgtcaaactaagttaggtattttagaacgagacagcaaacatggccaattctcagtactgtcacgactctgactcatgaatttttgaacgggtttgcccctacatcgaggactataaatcataacaggggatgtggtacgttactttttttgcaagtaccaatcttctgcagaacattagctctctttaccattgatgagtatgcttggttgtttaagatttaatatggtg

SEQ ID NO: 150701 - DNA, 414 bp, Glycine max
  unsure (1)..(414): unsure at all n locations
agtataataggaagcacgaatacgaatatcttgatgcctactattgatatatagcatngaccatacatgaaactagctagacagaatagaaattgctgataatagtaagctccctaggtagtcatgctacgtaaaccactactacaagaaagcactttaaattatagtattaggtagtaatttctgcatttgtgttgatcatggtcgccctcacataactgacaggtgccctcactttaaatttccaattggccggtgccacattgaagcttgtcacagttctaccatcacaggtatgaatttctctgccaattttgcccccaattccttgacatgggttgccaactagttttggaccctttgatggacactgaattgacatcagcagctccacccacgttggtgagtatgagt

SEQ ID NO: 150702 - DNA, 409 bp, Glycine max
agcttagtcttcatgttgctcccctatctctaacaggatttctcatggcctcaaaaatttgaaatgcacaacatcatcaccaaactccatggaaaaagttcctgcatgcacatcaatttcggtcctaactgtcatcaagaatggtctccctaagaccaatatggacccatggttggaagactcattctccatatccaaaatgtaaaaatctactggaaaaatcaaatccttaacttgcaccaacacatcttcaataactccaagtggaatcacgacactccggttggctagatgaatgacaacaatgatgggtttcaaatcacaaagatgtattgatttgtaaattgaagtgtgtgtgacattaattgaggctccaagatcaagcatggcctctgtaaaagtgcaatct

SEQ ID NO: 150703 - DNA, 380 bp, Glycine max
cagcagcaagctccttaaaagatgctaagagcttgtactactaccaacctcttattagctaagctcacctccttgagatgagaagctagagcttagctacacacccactataattactaggctcacccacatgacaaaataaacatgataatacaaaaaaaatgtattattacgaagaaaactcaaattgccccgaaatacaaggcttaaaccctatactactagaatggccaaattacaatgcctatacgaaggaaaaacctattctaatatatacaataaatagcgggctcatacttagcccatgggcttcaaatctaccctaaggctcatgagaacctctaggccttttcttggatctctagcccaatctacttgga

SEQ ID NO: 150704 - DNA, 349 bp, Glycine max
cgcagctgcaagcttacttcataggagatctattattgatacttctcaagtacgtgagcttatttatgataggggattgtgtagctaagctctagcttctcaaggaagatttctcaaagaatcttctcaaggaagttttctcaagatagcttctaaatgaagctacctaatctataaatagaatcatgtgtaactttgatgaatgagagtcttgtgagacacaactcaaagttcaacttctctccctttttcttccttcaattacgagctcccccctctctcttactctcccactttctatttcctcattgaagcatactctccaagcttcttatcctaagctcatctt

SEQ ID NO: 150705 - DNA, 433 bp, Glycine max
  unsure (1)..(433): unsure at all n locations
gatccttaagtcacctgagctgcagctttgatattattaatgttagcggttatttgatttttgtattaattacctttataataaactcacccctcgcaatttttgtatcatgtggttggtacctgtgatgatcgtgaacctttattcgtgggagcagaatgacaacagtatggtcaagaagtgagattcttctgtggagcccccgagccgacatgatgacattgggattattttgggagagagttgtgttttgttaatcaactcctccatagttggttccataattctttntgttgaattaaggatgtaaatcataaatctaattatatttatgaacaaatttactttccattatgtgaatgatgtgtactgagttactatacccatatatatatatatatatatatatatatatatatatatatatgtatat

SEQ ID NO: 150706 - DNA, 368 bp, Glycine max
gcttagctgcaaacatctactatatattcctcacctcagcagcagaaaccgtcacatctaaacaattttgacctcttcagcaacaggttcaatcctgggtggaggaatcatcccaaccttagatggtcgagtccttcacaacagcagcagcaacaacaacagccttattttcagaatgttgctggcccaagcataccatatgttcctccacccatcctacaactgcaacaaatgcgttaatccgcaactgcccagaaacaacaaacagatgatgcttctccgtaaccttcccttacagaacttatgaggctaatgactattcctatactgcagttcaacatgagatctggagccttctattagagctt

SEQ ID NO: 150707 - DNA, 413 bp, Glycine max
agcttgatactcttagctgctgtaggtgttatgaacagacccaaagcagtagtcactttgggagaaatgaaattgtggctcgcaccactatcaatcaacaccaataaatccacattctgtatcttcccttcaaccttcatggtgtgagactcgcccatgcttcccaatacccccatcagtttacattccacctccactttttcttcactttccaccgtcacatcctccatacttacaatttccccttcctttgtcatggtttcaccttctcctaggattagaaccctaagagctcattctggacatttatgcaatgtagggtggtattttcccccacattagaaacaaagaccctttgctctcctctcttcgaattcatcattgtggatacttcgtattcccttccacctctt

SEQ ID NO: 150708 - DNA, 385 bp, Glycine max
gctgcaacattggggcagagtcttttatctttttcgggtgaactacaacctcttatatggaccacaaataattcctttgctgacgagagtgaactcactacaaatggaaacgcttcactaataataagaacaaatcaacgtggtgtgccatttaaactcagagttagctaaccagtaacacattctatacatggattagctgcaaccatgcaccctaaggagaaacccggcaacacagtactcaaacatatctcacattgaatacaagcagtggaaacttggtctttataataacgtcaagtttctacccataagaggaagcaacatgcctttcttctatgtcttttcaaagtaagtctcgttcatgaatataacccatagacta

SEQ ID NO: 150709 - DNA, 351 bp, Glycine max
agcatgacctgcgccaagatatatatgatggacacacggactttatgaatgacaaactcctagagataaaggaagcgacgccaagattaaaagcccgaactaacgcagtacaacgccctatcacaagtcgaatagttaaggcaggaccactcaacgtacaaaaaaaaaccattggatgaccttcatgcaaaacacaagccccaaacccaacaaatgaaacaccacactcaacactaaaaagattcatgaagagttggcaacagcaagtaagggggcaaaaaccaagcttatgctaaaaacattgaaagcatcacattgacacctccccaaatgaaaaccacataatacttg

SEQ ID NO: 150710 - DNA, 403 bp, Glycine max
  unsure (1)..(403): unsure at all n locations
agctgtaacctcatcgttcctcacagtctttagattngggagccaatccaatccttgtgttcggactctcagccacttatgatagccgccgatgatcccattactgcttcccctaagctctctgtcctttcttcacgccgcatcccatgccttgcgaactccttggagtaccctcgcgttgtggtcactaaaaccccgtgcgatgaaaggcgtgatgctttcgtctaatggcgctcctctcatggggtagccaagctgtcttatggtgagaacgggattataattaatacaaccccttgttcccatcaagggaacatttggacatccttcgcatggagatagaatcttgattcttcctttcttctatcgagggaaccaatatacagacgcccccccatgctag

SEQ ID NO: 150711 - DNA, 75 bp, Glycine max
acccggatccttaagtcacctgcgggctgcagcttggagctcttctgggagggatttttaacatgcgtggaatgg

SEQ ID NO: 150712 - DNA, 379 bp, Glycine max
  unsure (1)..(379): unsure at all n locations
agcttgaaaactattgngactaaatgggtaatttaacctatgtttaattggatggtgcataatcaattattctttgatagataaggtgcacatgttaagtttgctttcctctacaaattttatagtaattattttgagaagtgacaactaataataataatcaaagaattggatcatgtgaaggggtttagaagtagtatgggtttgattccatagagggaggatgaacttgtggtaaaagagaagggttactagtgaataatatttgattcttaaacattaaagtagcatgctagcataggcattctataattcctaatggcttaattaagttttttcttatctggacattcatggacttattaaaatatatcctatt

SEQ ID NO: 150713 - DNA, 414 bp, Glycine max
  unsure (1)..(414): unsure at all n locations
cctgaagctgcagctgatcanacgtgactaatcttttttcccatcttttcatacagntgctcattcaaatcattctcaacactcattttatacaaaacaaaccactgcatatcgttttcaatcagttctcttgtcaaacaagcttttttgtacatgcaaacatctcaaagtactaaaatttaaagaacgggaacataaaaactgaaatttaaatgactgaacataaatcataaaataattcaagtaaactaaaatgtcaaaatgcacaaattaatatggcctgcttctgtggagcacttgtgcatgcttattaagaaccaccacctgactaactggtaatcctgagaagtagtgttctttaaccacatgttggtgagatggttggcttcatcagtataagtgctgggatggttt

SEQ ID NO: 150714 - DNA, 319 bp, Glycine max
tttcacattgaatacttgaggcaggggaaggactacccaaaaagggtcaaaatggtcgaggcatatcatagtctagagggataggtcagagaaaatttcaaagtgacgttacttgttggaattgtgacaagagaggtcactttatcaatcattgccaggccccaaagaagaacagtcgcacaaaaacaagaagcccgatgatgattaatcctcacatgccgcaactgatgaacttgatgatgcattattttgcaatttggatagtcctgttgattcatggatcatggactcaggtgcgtcgttccacactactccctct

SEQ ID NO: 150715 - DNA, 410 bp, Glycine max
  unsure (1)..(410): unsure at all n locations
ctngggtgatgttgcgcgtactgatgggtaccatgaggtggttgctgggttttgacccacgcaggtgttgaagagacggcatgggcatctccctccttcctttttgcccctgttgccccgattcttttggcattcgcgtntgtggaggaaacgtaatcaaactttcctcttttcaatccaacctcgattctttccccgacaaacaccatatccgcaaagctggacggcatgtaacctactatctcctcatagtagaacactggcggagtgtccaccatcatggtgatcatctctctctcaaccatgggaggagctacttgtgccgcccaaacccctccttcgctgcgcatattctttataggtttcaccctctttttgaacatattctgccggtgagtacggccaggagc

SEQ ID NO: 150716 - DNA, 431 bp, Glycine max
ctcgacccggaccttaagcaccgcggctcagcttgactatgcttgtctgatttgtcattgatgcactgatcgtacacatggaaaccctcttgtattatttattgataatatatcatgaatattgtttctctatctcttttgtgtgtcttcgtgggtatttaatatttagctttattaattaatatatctttcaatctaaatatgacaacatataggtcacggtgttttaataaaaacataagatacataattaccagtataaacatgaaacgataaatacataatgctattttttaataaagaaaattctgcatcattattaaaatcaatgtagtagatgaaacttttaacattggttatgttaataattgatgttggacgtgacttgaaccatttcacaatctaataaaaaaaaacttttttcacttttg

SEQ ID NO: 150717 - DNA, 362 bp, Glycine max
agctttgggaggaacatggacaatgatgctatccgaccattttgtttctagacttcttggacgttggtcgggatctacatctccagtatggcagtgcatttgttagggttggcttcaatcccccggtgagtgatcatgaaaccaaagaacttgccttcacctaccctaaaagtacatttttcaaggttgaagtgcatgtcatatttgcggaattccccgaagacttcttctaggtttgccacatgttgagttatgctttgaaacttgatgaccatgccatccacatataccttgacattttgtccaatctactgtcatagctgtcgaatgaggatgggagccttcgaaagggatctcgcgtc

SEQ ID NO: 150718 - DNA, 372 bp, Glycine max
agcttcagaccaaagcatttcaaaatctatgtatctaatacccctcaatttactggattctcaaggtttgggaagtgaaaatgagaatagggtaattttggagcaaactctcatctcaaacaagtctataacattaatctaaactcgctcaaactggttttacgatgaaaactctaccgaatcaaaatttgactcctcaacacccaatttaccctataaatggctcttgccttcactttggtcactcattttcctcctttgcacagcccaagctttcccacagtcctaaatgacatttcaaactaggattaactcactttaaccctcaattaccactaaatccatatttagcttttcaaacccttaaagcat

SEQ ID NO: 150719 - DNA, 367 bp, Glycine max
acagctgtgcataccccaattattctattatttaattacttgattaagagagccatgacggtgggctcatgggccatctttggataaacaagacccttgtcttactcaaagagaatgtttattgggcccatatgaagaaagatgtccataagcattgcactaagtgtatggctagtatcaaaccacatctaggtgatgcctcatgggctatacacacccttacttaacccctttgcaccttgggtaaacatcagaatggactttgtccttgtgcttcctacaacccaaagaaggtgtaactctatccttgtggtagaggatatggatagcaagatgggaccctctttctctgccacatggtggatga

SEQ ID NO: 150720 - DNA, 401 bp, Glycine max
agcttgaagaaagaaatttgaagcaaatttcacttacgccagaaattttggcttatacgaaattgtctttttaggaacatacaaaaagaagaatttgcttaagtcggaattttttgacttaagagaaaatggcattgaatgtttagcttcagaatttgttggcttaagccatatttcactaaagtgttgtactttttggatgttatttaaaggatttattagttttgttatttgaatttcattttatctaagcttgctcttattttagaaatccacaaatatttgcaaaatttataggttcgatttttctgttttattgtcccacaatgtcatgcttatttacctattgttctattcatctagcctagtgtgtagaaatttattaaaaccttacaactatt

SEQ ID NO: 150721 - DNA, 235 bp, Glycine max
caccgaggctgcagctttctcagcttcagcataatttttttgtgccccccatctctaaccgttcccctttctggctttgatgatccaacttgatatacattgaggcatttgggggcctagtcttggaaagagacttattttctaagcaactctgctgcttataaacttcattttttcctcatatgattctactttactttctatcatttgctgtgataaatatgttaacacaaag

SEQ ID NO: 150722 - DNA, 378 bp, Glycine max
agcatatttgaactcgatgcaaatcacttgtttttactctcgttcaaagaaaaaaattctaaaattggtccaaaaaagtcccaccattgaaggaactagtttggaaaattgtgcaccgtgttagtcttgaaatagatcaaccacgagtgcttgtatttgttgttttgatgccaaaaatatttggtccaggcatccatatagtcccaataagtataaccgattgggtcaaaaggcttagcattttttttgtactcattcaaattggttccaaaatgtctgggttgttaaacctttaaaatttggattgttgaatgggtgttcagaagagggtcatttatgtctttgaaaatgttaatacatactaaagtttgaatatat

SEQ ID NO: 150723 - DNA, 354 bp, Glycine max
aatctcaatcacttgggctccaatgaatccccttatccaagtaagagaccataaggtcttgccacctctgtctcacctgaattatagacttgaatcataaacttctctttcgcaaacaaaccaataaacaataaaccctaagtgccacacatcccacgcaattgggctgcttctaatggatcatcatatagggccacaatgttgagcccaattagtacccaagtgagacaaaccccaaagaatgttcacctatggccttaacaactaagcatccaaaagtgatggcaacaaatcctcctagaaagccattgcacgcctcaacagcattccagtggtcgactaataaccatcggc

SEQ ID NO: 150724 - DNA, 433 bp, Glycine max
  unsure (1)..(433): unsure at all n locations
taagtcaccgcagctgcagctgcctaataacctgaaattgagagtttatgattatttaacacacaaaatagaattattaagtatttattacctatacttaatagaaaatacctataacactacaaaataaccataaattggaagagtttgatacaatttacacacattttatacacaaaatntagtcgtattcaccgactaatagtttacacacctgttcatagtaaacacatatcttttcgcactagacacctattcactgaaatagctttaccaagtgacacaagttccccgagagtttgatactcggttcttaccgctttatactatttgcgtgatccggtgcacttgccaaaagcgaacacatacactatttcttggattctcgcagctagataaggaaatcatgcttctcttaccactgatgatctgg

SEQ ID NO: 150725 - DNA, 342 bp, Glycine max
aactgtctattgcacgggttggcatcaattgatattgatatggattttcttcttatatcaataggggctttcatggatcactatctataacctcaaaagtgctcttacatgcctggctttacaatccagtgaatacagctaattatagctgttatctctttgagttgatcagaatcaaacttgtctaaaaattgtttgatgcctaacttgtcctaatattttattctgtgtcttttgccatctacattattgatgactgtgatgttgagtcatctaaggttctcttacattgaagataatataattcaactttctatgccagttgcatactgcaaatgaatg

SEQ ID NO: 150726 - DNA, 385 bp, Glycine max
  unsure (1)..(385): unsure at all n locations
agctngtctgctgacagcctaagtgacttatatgactgtatataaactcacttgaatcctatagaaggctttgagatcgtatattgatttcaatatttccttttaaaggtacttcctttttctatctggactgacaaagaagttgcacgaagaagttgatgagttctcaaatacttactacttggaccttcatgttggagacatgaagcaggaaatagcatctgctactagctagtttctatcttgtcaaattttggactctatctatcttaagtaaatattcacattgaaatgtgaaggaaacaaagcaccatgttaatatgaaactcggggtatggttctgagttatancctaaattgttacttgaccggcagtgttttactt

SEQ ID NO: 150727 - DNA, 397 bp, Glycine max
  unsure (1)..(397): unsure at all n locations
agcttaacgcctatggcttgtagtnttgtgatgtttnggaaagaaaacagngaaaaacacaaaaagcggaaaaaggggggtgcatcaggaatattcctgagtaagcaaccagctcgcccagctgggcggcaagaacctccccccactttgttgaaaatggtttcggaggcttttgtaatgcttccgtaacattttcgaaaccctaagtaagcatatttcactcaagattggtgaaagggaagagaaaaaagaagaaaatcaagtctgatatgcttccgtaactttttcataaagtacgaaaaggggggttgaacttaacaatttggggggtgcatcaggaagcttcctaagaagccacctgctcgcctgggcgagctgagctcacctaggcgagctg

SEQ ID NO: 150728 - DNA, 406 bp, Glycine max
agcttataacattgcttatattgtgtatgtatcagattagacaaatttgttttcaatatcaaaagaattcccattgtaattgacaggttgtaggctattagatcagattagacaaatttcttttcaatatcaaaataaatttagaaacagagtaacacaagaactttgttctcttgtctcatattttttcttaattacaagtctagcagtagtctaatagttgcatatgagtatcctaacttaccttgttttttttttcttaaccctctcattcatcaaggaaaaagaatcctaactaatccacataatttatgcagtgtatacagtcatttagacatcctaaccaaatgacagcaaataacaattcaatttagacatcctaaccaaatgaaagcaaaatacaata

SEQ ID NO: 150729 - DNA, 333 bp, Glycine max
cattcttggcaccccaagattagacattatcatcaagaaggtcaccttccaggagacttaaaatgcttgcacacaagagtcattagctttccataaggaacacactaaaaatgaatttgatggatttggttgcccccttgatcatgtgattaatgattaagtgaggcaaactgggagtaatctttttttcacagtcagtaaatgactaaaagatcatacttatttacttcttgaaaggtaccaactttgggcagcacatagtgcatgcacattcaatggataatccttccaaaagattttagaaatttggatttgaagtcatctctcttgttc

SEQ ID NO: 150730 - DNA, 363 bp, Glycine max
agcttgtgcactcatgtacaattaggtttacctaaattatatccatggaatgggaagaataatatatcatctgtttcaagttggacttaaaatgtagtgaattcgactttatagcattattatagtataaattccataaaataattggaattgctataaaattatttaactaaacatgttgaatatgataaatataatactaatgcaacaacaataaaaatagataagtccatataaaccaactatccttccaattccaagggaagggaaacatagtattcgagcatttggatttggctcattcgaaggccaatgcgagaaaagagggaaacactatgggggaggccctagctggagggacca

SEQ ID NO: 150731 - DNA, 378 bp, Glycine max
agctgtaagccttggatcttgttcatctatggagtcctttgcttcttgattattaatggagcggaatggagatggaagaatactgattggaaatgccacttcaaggagaagatgagtcaagaagaagctcaccaccataggaagccatggataagagcttgaaggtaggagaaaataataggagggagagggagagaacgaacacataattttgtgcctcaaaacaggtctgaactgtgaagtgtaattctcacatgatctaagttgataaatgcacacacatgacctctatttgtagccgacgcgccctcggcaacggatggagcatgcacattctatggataattctctcgaaagagaatatagatttggggttgc

SEQ ID NO: 150732 - DNA, 404 bp, Glycine max
agcttcaaataaggagataaacttcacgttatatattttctgccaatgtatactaaggatggaattaatactacatattatctatttatacttggcattagctcaagcatattatcaaatgggttgtatgcaagtatgcaatttgaaaacaaaaactcttcaggaccacatcaccagatcacatcatgttatcaacacaacatgaactatttattcatctcttagctcaaacatttcataaatatggaggatgcaacatggttatatacttaaataccgaaagtcctaacaaccaccccaacacaaggcaataactaccattcaagatcatgttacacaactatacatagcacaatatattgtgtgtgagaaagacatacctgtggacctttcaacagcgactg

SEQ ID NO: 150733 - DNA, 420 bp, Glycine max
  unsure (1)..(420): unsure at all n locations
gatcctcaagtcacctgcatgcatgcagctatgttctaatgtcaagcgtcttgatatattacatgactcaaccggacattcgacttanaagttaatgttcgttgaatttgctacgagcttccggtttcaattacgagcgtctagatatattacgggactcaatcagacacccgtgtaaaaagttattcgcgttataattgctcagaacttccgattctaatacaatcgtgttgaattattaccggttacatattggacatccgacttaaaagttattgtggtttgcatttgtgcacagcttctgttttatatttctaacgtgtggatatacttcggggtacaatcggacatccgaacaaaaagaatttgtcctttgaatatgctcacagcttttgctttcattttgagtggccggatatt

SEQ ID NO: 150734 - DNA, 409 bp, Glycine max
agcttgactccatccggcattgacttgattctctcactcttgcatcctctactcctacctcaccttcaccacagtggttgcaaccgtcgccgccgtcgccgccagcttctccgacgaacgcttattcttaccaccctagcctgtaccctccttcgtctcactctcacgtgcatccttcttagttcacaccacacttctacgttcctccccatccttatcctcaagaatggggcaatccaaactggccaccttcaccaaatgcacccatgcccaatatgctccccatactaactttgcatccatgccccgcataccggtaccaaatccccacacccatctctaatctgtttcccatggttggacaaagagatggttttactaccggaattcattccggtccacctaattc

SEQ ID NO: 150735 - DNA, 321 bp, Glycine max
acctgaggcatgcaagctgtgacccatgtaccacagagcatgtagtatctataaaataccagacactcaccactttctttccttcataacattcacatacaattcttctaagctctacccgacaagcatacatacaaaaaatcgaagattttactattattattactatagcaacatggtttagtcatggacaaaagggagagtgtttcggcgtgccataaaggggaaagagttgaaaaacttctgcggcgacttggagatagacaatgcgattcccacctcacttcggagccacgtaacattgaacatgaagaaggaccc

SEQ ID NO: 150736 - DNA, 209 bp, Glycine max
  unsure (1)..(209): unsure at all n locations
ggggcttttatagtggcagngcaatatgtgatgctctaagtctccgtaagagggtgtaaatgaattcattcacgggttcaaagagcattgaatcttgaagggacgatgctaaatggcttgcctttatgtccgaaatagaaattttgtccccaacagtttagaagagactcgaacggaatatgtgggccattatcgatgagtgcaaagag

SEQ ID NO: 150737 - DNA, 394 bp, Glycine max
agcttcaattctgaatttctagcgtctctatatactatggacacaatcagacatccgagtaaaaagttattgtcattagattttgctcagagcttatattctgaatatcgaacgtcttgatatacaacgggagacaatcggacaggagagtaaaatgatattgtcgattgattttgcttaaagcttcaattctgaattacgagcgtctcgatatactatgggacacaatcggacatccgagtaagaagttattggcgtttgaatttgcttacagcttttgttttcaatttcgagcgtctcgatattttactagagacaatcggacctccgagtaaaatgtagttgtcgttagaatttgctgagaactcctatattcaatcactggagttcaatt

SEQ ID NO: 150738 - DNA, 402 bp, Glycine max
taccagtttcatatcccatgtagcactttgaagctttgattttcttttattcttctttcccaattttcaattaactattactaacaattatttgtaaacatgtctttgctgcctgaaaatcaaaaatctcaattggatggtggagccatgcattattgaggaaggtaccttaaggtaccatggagcctcgcaccaatgatagaagggtcattggaaaggtcaactgtaagggtggtcttgcacctacttggatccattcttttggtgttacagaagtcaaagtcccttccactttgcatgatcaatatttaaggaaagtctgcagccccattacccatacatgaattaaaagataagcctaattagtgataccacttcttatatgcatgcttatgttatatt

SEQ ID NO: 150739 - DNA, 333 bp, Glycine max
ctagtatctgagaatcacttaaaattagagaagaaaaatgtttccgtgaagaaaatcaagccgaagcgcttccgtaacgcattcaagacgttttcgtgggtgatttcgcgaagattttccgccattcttcgttcgttcttcgtcgttcttcggtcttcaaccggtaagttcccgaaatcgaacttttcaattcattctatgtattcttagtggtcatcatttgtttcgcgtgctcttatttttatttaatttgctttccgtatccccttttgacgtgctttagtcatttatttaagtcattttcccgcctaatcaaaaattaaataaatatcc

SEQ ID NO: 150740 - DNA, 406 bp, Glycine max
  unsure (1)..(406): unsure at all n locations
agcttatggtgaataccaatgttnntgttgcatcatatcgtggttggctcatcttacgtgattntgccttggctttatctacacagacttcactcaagtcagagaaacagaaagctgatgactttgaaagaaaatacaacgaagcccaagtttgttgcgaagaaagaggtaaaaaactggaagacacggagaagaagacacgtctgcttcaagaatcactgactaggtaatataaataatgaaaagtatgccctgatgtaattgttttcccgtgataatcaatgatgtcttgcaagggagagccttgtcacaatgttaaggttgttacttgtaaccctgaggttaccagtacaaatcttggaaacagtctctctgcttatggagttacagctgcatacatttacta

SEQ ID NO: 150741 - DNA, 408 bp, Glycine max
  unsure (1)..(408): unsure at all n locations
agcntctgcagaattggcttagctggacagtgcctgctattctgaacatctgccacaaggatatgcgctaagctccttaaaggctgtgcttagcggcaccaactctttaaaaaaattcactaaatgttgggagcttaatgagagaagcttgcttatctcagcggatgccgcaacaaattgtgcttggcccaggaaagctctacttatcgcgcggctatcaatcaacaaaaacaaaaaaaaattgtctaagttacctgggcttagcgattcaacctcacttagccacaggtagttcagcaagaggatgagtgttcatcctcaaaggatgaactcgcttagcgcggtaagcgcgcttagctagttcttcagagaatgcctatattcacaatgagtattgatgaactccct

SEQ ID NO: 150742 - DNA, 412 bp, Glycine max
  unsure (1)..(412): unsure at all n locations
cctgcncgcacgccagctttatgatgatgaaccaagcaatgtttatgatgccttttgcccaagggattgattcaagacttcaagatcagaaatcaagaatccaatcctggactcaagagaagaaatcaagatgcaacatggcaagacttcatataggataagcgtgaaaataatttttcaaaaaccaaatagcacagttttgttttacaaaataattttctcaaattttctaaggtaccacagtgataactctctggtaatcgaataccagttatcagtaatcaagtaccaatgaaccgtttgtgtttcaaatgtttcaaatgatttgtaacattcaaaatgattctgaactagtgggatcgattacactatattagtaagtggactncgcgtgaatctgaacattgggaat

SEQ ID NO: 150743 - DNA, 398 bp, Glycine max
agctggatgatctgcatagggagtatgttgatggagaactacaacaataaactctactttcttcagttataattaaaactcttattgtttgtagaattaaggttttaccaaactaaaaagtttatgattcaagaaatgatggattcaggaattttaagttgtgggattaataatacaaattttgttgtattaaaaatattaaattttttaaaagtatagatatacatcatacttattcttaacattattttatattctgaaaataattgatgattttttcatttataatattagcaaaaatctcatccactgtaagtaacttaacaattattcaattatttgtctcccatacgtttattcaagaggacgacaaatggaggagaaaatgaacagagcat

SEQ ID NO: 150744 - DNA, 381 bp, Glycine max
  unsure (1)..(381): unsure at all n locations
agctcttacatagttatacaacacaattatgaccatanacataacatggtttgatagattaaaatagaaaagcagtttggataaacaccaacagtgtagacaaaaatatcataacccatttaaggatattggtgatggattggcaaatgcttcaatgcatccaagtagtaaagttaaaatggaagtctgagtgtctaatccacagggactttatttgtacttaggtagatgaaatatttattgataaaagaaattaaagaaaattgacttgaaaaggttatgagaaaatcagttatttaaaatggcataaaattaaatcaaataagaggaagaattaaacaagaatttaaattaattaattaattaaagacataaagataa

SEQ ID NO: 150745 - DNA, 382 bp, Glycine max
  unsure (1)..(382): unsure at all n locations
agcttgatacttccattgctagcttttattgtcctttagngtatcatggtgtgtcttatctcgttgatcttatatgcttgcctttgtctggtttggatgtcatacttggtatgaatcggttgacttgaaaatatgtcgctataaattgttcagataaaactacttccattgataaactaccaatgacaattgattcttctctgcctaaatccattatttttactattgcctgccgtaattctttatttgaggaggctcaaggatacatgcttttgttccatgctaaagtaaaggttgaaaataatgtgttaactatacctgtagcatatgaatatctatatgtttttctaaggaagattttattttaccccccaaaatggat

SEQ ID NO: 150746 - DNA, 361 bp, Glycine max
agcttgtgtgcctctatctttgctttgttttggaactatactttgagaacgttgttctatttgatatggttggaaaccttcgggttctcctctgtgctactttatttgctcaccatgacatatatgagtcatgaacccatctttttggataggccggagatgttcgcgcacgtgaccccgaaccactatcatggcatcgctatcatttcaaatagagaaagctgcgtctcctaaggcatccacgacaaacttttaagtgagaagtgccatgtcctctgaggagagagaatcaaatgggtgaatgaataagatgaaccacgtatacggcaacctatataacttttatgtactatatatatat

SEQ ID NO: 150747 - DNA, 322 bp, Glycine max
agctttgcttatggttctcattgatgccatcttaattttctatctgaaagccaaaaacattttatgatgaacaaatgatgaaaattattattattggggtttggtggcccagttttaaaagaagcaaagtcttccaccgaaagcatatatttaatatgtagtaaacaaagaagaaatgtatatatatatatatatatacttatatatatatatatatatatatatgaagactcgtgaatctaggggtgggaaatttgaatggtttgaaatttataaaatgaggccacatcctcgcattatattttatattgtgtatgagcgt

SEQ ID NO: 150748 - DNA, 229 bp, Glycine max
ctgcactttttaactggactttattttaaccaagtgagtttattcaaaaattaagtttctcttcttctatgagaggattcttctaatttgggtgatcaagaacccctgctgtttaaagactttacaccttttgttgtgccccctcgaaaagagatttttcctttctttaacttcatcttgtcttttatccaccctttcataaatcccttcttttaaatattttttgtcc

SEQ ID NO: 150749 - DNA, 412 bp, Glycine max
  unsure (1)..(412): unsure at all n locations
agcttgaaccataacccggtgagagtgtgatctngaattgtgagtgaacgattaacattaagtaatattctttgtatcagtctctgaattttagaatgaaatgcataaatntgaaagtgatgaaggccattgttctatttgtaaactacttgaccaaaaagcttaccttgaattataattgtatcctttgcaccctttgtgagctgaattaaattttcaaattgaaccctgaacttgaaagaatatctccagctaccctgtttaaattctaggagagcatatggttcaaggcaatttgccccaaatttgggggagttagttgggatgtgaagtaaaaaggcaagacacctcagcacacacaacaaattaattgtgtttaaaaaaagaaaaacagagaaagagagaaaagttc

SEQ ID NO: 150750 - DNA, 317 bp, Glycine max
agcttgatatgaggaagcgctgaagggtgtttttttctgcttttattgaagccacacacggttcctggagatatgtcgcgggggtcaggagaccttggggacgtcaggtggggtgctattgcccaaaaccaagtcttgacctttcccgacccaacccgggcatattcggtcagtgagaacctgcgatgtacctaagcatgcgagctcctggcagtctactaataacagggaaactagaccacctaacaaggaggctagtggtggcttgccttctgtgatatttgtgctaatatgtggattgtggcctctggtaatcg

SEQ ID NO: 150751 - DNA, 407 bp, Glycine max
  unsure (1)..(407): unsure at all n locations
agcttgcctaataacctgaaattgagagtaaatgantattataacacacaaacagaaaatacttagtatttattacctatacttaacagaaaatacttattacatttacaaataaccataaattgggacagtttgatacaatttatacaagtttcatacacaaaagatagttgttgtcaccgactaacatgccacttcttctctgtaaacatttcattgtagcagcgctaagagtgctatcctgcactaagccccaagtccattctgtaacttgagcttttaagctgggcttatttggccaagaggcgctaagcgccaatctcttacggtttttgaactcttggaagtacgctaagcgcgcctattgcgctaagcctgaactactctctgtaagttgaagcttgatg

SEQ ID NO: 150752 - DNA, 338 bp, Glycine max
ccgcggctgcagctttcacttggaagcaaacttttttggtcttctacggtacttgatttatatgctttggcttgatcagtagaagctgcttattagggtcattcaacattgggaaatggttcgatccttaaaacttgatacgatggggttagtttatcgtattttcacaagggattggggtactgcaacctagttattggtatgtatgtcttaatgcaattctggtcaagcttattccaacaagagagatctgaggacaacactggattatgattaggctaacatgcacaagacattggggttttgtttcccagagacaactttaacacaggaacgtt

SEQ ID NO: 150753 - DNA, 202 bp, Glycine max
tggagatcacagataacaaagtacttaccggcacctactatctgttgacttgtccaacgctggaattggtatgctgtcgaatatctctcaacacccttttcacacattctgatcggccggatgacaagtgcaccatatctgactccaatacgtttcgaaagccttgctctatatttccttgatatgcgataaatccatcttg

SEQ ID NO: 150754 - DNA, 385 bp, Glycine max
atctcatgaataggtggatcttgccatttgtgaaggttaacaacacttgttagataaggaggtgctcatctaccttaactttggccttgcaaaatcctagctaccagttctgtcatcaactgttttaagaaagatgattgctatggagcatttccccccactcactgtttggtctgcagtattggcacacatgttatcacactgcacagggaagttacctcgctgctgagttgatccttgaaatacgatttttctttcataataatatagtagatccgcgtaagaagagcaatgcacctttgatatccattgaagccaaacgctgctgcttttaacattgctttggcacggtgtctcttttttgagacatctatgaaagcagaag

SEQ ID NO: 150755 - DNA, 397 bp, Glycine max
  unsure (1)..(397): unsure at all n locations
cacctgctgcatgcaagcagaggactggactttactaatacttatntttcacaattatcccctatgactatatctgcgtattgcagcataaggcatctctcattggacaaaaatcatatgcctttcttcaagtgtttttggagttgctcttcatttctattgcagttttaccctgatgattcgcacaataatattgctttacattattggtcaatataaattcttgaaagaaaactctaattctgactcaagaaagcactacaagttcttaataaactgtatctaaaccttgtcccaatttatagtgtaagcctaaccgcactacaacctattgtgtgatgtgatgatgagatgcggggtggggaaattcttgtcaaagcctcccactccactggtg

SEQ ID NO: 150756 - DNA, 391 bp, Glycine max
tgcttgcttctacagttagtaactgtgatatgcctgaacaacctgtggttaagcttattactaagagggatgggcctgaaagaattatatcccttctttggaagatgaatcatgaatgcttattgactaatttgaggagagtttgtttgggaatctggttagatagctcgtgtactagtggtaattattgaagaccttgttttatactttcaaaaaactacaaggatgtgttgctagtttggattcaatgtgtaacaccctaaggggtattgctttaaatttacattttagtcatcaaatgcacataataaaaacatatatgatttcataactcaagattatcaaaggtatgtgtcatacatcattttcaagtaaaatcatcatttacata

SEQ ID NO: 150757 - DNA, 386 bp, Glycine max
  unsure (1)..(386): unsure at all n locations
agcttctataataatggcctcagcaaacttcttatttccagaaggaaattcaatcaatagacctccaatctttaatggagagggttaccactactggaaaacccgaatgcaaatttttattgaggcaatagacttaaatatttgggaagccatataaatatggccttatatacccaccacagtagaaagaattacaatagatgggagcataacaagtgaaagcataacaatagaaaaacctatagatatatggtctgaagaggatagaagacgagtacaatacaatttaaaagccaaaagcataattacatctgccctgggaatggatgaatatttcanggtttcaaattgtaagagtgctaaggaaatgtgggacactctacaat

SEQ ID NO: 150758 - DNA, 386 bp, Glycine max
agctatgaagtaagtttaagcttacgttttacgtcggggttattggttggtggcctatttgactatttgtgatgttatgctaagtaaattaattaaatttattttatttaatgatatttatattaaataccttttatttaattgcattactatttttaagatttttattttattcttaatatatttaatctcaatgaaaatattttaaaaataattttgttttttatttaagatttgtgaaattagatggttttatctaatattcttaatttaggtgaaaatgatattttttatttatacatgacttctaaggaaatatatatctagtagtcatagtttttattattaattacttggattcattgtaagctttgtgtaatactact

SEQ ID NO: 150759 - DNA, 265 bp, Glycine max
agcttgttacaatgtggtaaaaccaatagaaatgattattatgatagttccagttgtgtggctgcgccaaaaaaccttgatgatagccaacaatggctcgtagttacaatgggtgttcaattgtgaatacaacatgccctgtggcggaaagaggtggttccagtgtgatgctcgtcgagaatgcccacgagtcggtggataacttccctacaatgatggtgattggtggctgggacactggatttgaaggtgtactaactacaaa

SEQ ID NO: 150760 - DNA, 455 bp, Glycine max
  unsure (1)..(455): unsure at all n locations
gcttctaaataggaaaatccctntctagagccatgtttttctttcttctccatccctattcttcttgcatccccatcaacccctaaagtgtaaatgagccctcattgttgggaacctagcagccaaactcttgtaatgtaattttcccactactatctctttaatgtaatttcaatttttattgttccttttctgtgtttctcattattgattgtggtttgatcatccatactcatgcatttgttgaggatttangcaatggaaattgtttattttctaaacaattgggaaaggatatctaaatgaatcatatatagtaatagaatgatattgtttagcctattcatgtatttctaattgtaatgcaatttatctaatctaatctcttaagggattaggggaacagattagataaattacggcttttcactcgacggatcangttagagtatcat

SEQ ID NO: 150761 - DNA, 224 bp, Glycine max
tgcccatggacgtgcccgaagcatttgttttcagtgtgaagggaatagtaaaatctggagtggcaagatccaaagcctttgtcattaattactttaacttgtcaaatacttgttgcgcctctgaatgccacgagagatgatccttgcaaatgagagatgtttaaggttccacgatggcgacatagccctctattaacttttgtgcaaaacccttatcattaccc

SEQ ID NO: 150762 - DNA, 256 bp, Glycine max
gacgtcaagtggagtgctattgctcaaaaccaaacttgaacaatccttacccatcccaggcatatactgtcagtgagaacctgtgatgtacctaaacatgcgagctcctggctatctacagattaaacgcacatagaccacaaagcaatgacgcttgtggtggctggccaactgagaatattgtgtgatatgtggataatggcctctggttatcgaataccaacggtgggtaatctattacaacgcttataattga

SEQ ID NO: 150763 - DNA, 486 bp, Glycine max
  unsure (1)..(486): unsure at all n locations
tagaatactaagctgggtataaggtgcatcagtagttgatgtttgtctatgatgttctttctcgaccataacctaatccccaatcttaaaattcacttccctcctatggttgtcagcaaaatgcttcatgctttcatgtgccttcataagtttgtttttcaaactggcaaacacagcttccttgttggccaaaaatcatcaactgcttcaatctttgatgtacccacaatatattgtggaatgctaggaggtttcttgtcaaaggtgacttcatagggagaaacacccatgctggagtgcctagaagtgttataagaccattcatcccatatcaagggtatgccccaagaagaaggttgattgtgcaaaaatgcttgcagatattgtcgataaggtgatgaacactnttgtctggccaccagattaaaactcatacgcaactnggtcccactcagtttgaataactccttccagaagtgactaatg

SEQ ID NO: 150764 - DNA, 432 bp, Glycine max
  unsure (1)..(432): unsure at all n locations
ctgcagcttgatagttgataaactntagtatttttaattaaatcatatatacaaaatatggtgaaattgaacaccagacaaactaattttgaaaatttcagctgattatttatataaaactaatacataaaagtgaaaacaatgaacagtcaaacaggacacaatccattagtagggttgccctgaacagacctgagatagacagtgacccctgacatatttcaacaagtgctgaacagtggataaatgaagttcatagatacagaattgttggagcaatgatcctcaattacacacaaaccaacagaaaatttaaattttcaaccttttacatagttgaaattcactccaaaaccataacttccctgataagataaccatgtnaaacagatcacacacacacacacaaaatgttcaaaaccataagttaat

SEQ ID NO: 150765 - DNA, 460 bp, Glycine max
  unsure (1)..(460): unsure at all n locations
ctgagaggttggctttgaactcttgttagattcttatttgtgtttatctgtgattgcagnggtctgtggtgcacgttcatgaatctcactatttaaaataagaaataaagttgatcgaaaaaaagaaaatgaaatagagggtatttaaaaactagttaaataattgtttaaccagttatttatccgtaaccggttatataactggtttttaaaaacaataaccagttataactagttatacaaaactagttatggttatagttataataaccccttataatctagtaatttattagttatagttatgattatttaaataaccaaaccataagcacccctagtcacggttgcacactaatatntttaatataacttggttgctgtgttgcattaatttacaatccaataatntagtagtgaatcactgtataagaatgtactccggtagaacagatgtgta

SEQ ID NO: 150766 - DNA, 448 bp, Glycine max
  unsure (1)..(448): unsure at all n locations
agcttcatcctcaattcaagaagaaagtgatcttgattatgatccanatgatgatgatgatctaagtctttttgtaaaaagattcaacaagtttcttaaagtaagaggaaatcagaggcgacccaattttaaatcaaagagaaggacagaaacttcatcctctactttaaaatgctttgaatgcaatcaacctggacatctgagggttgattgtcccatcttcaagaaaaagatggagaaatctgaaaagaaaaatcttagtgaaaataaactgaagaaagcatatatcacatgggatgaaaatgatatggaatcttttgaagattcaganaatgaagagataaatctctgccttatggctaaaagttatgaaagtgatgaagaggtaacatctttaaataacttatctatttcttttgatgaattgcaagatgcatttgctgatctg

SEQ ID NO: 150767 - DNA, 325 bp, Glycine max
aagaaacaacaaaccgctagctgaggccctagatgatcacactaatcaccaatcgaaaattaggaactaagatgggtataaaaaaggaaccaactatagaataaattgtgagccaaaacaacaagcacacatccctttcactattttattcctggatactgatatttctgccaacttgtgcgagtgtgagaattggttccatgtatccaaatcacttggttctgatgcaataactcgtatccagatgtctagaaaatgcgggaaaaaaattcatctcaaaagtcgcagtgaccaattctcaggaattgttacaagtgcggatggc

SEQ ID NO: 150768 - DNA, 424 bp, Glycine max
agcttgtagcaaattcaaacgacaataacttttatctcagatttccgaatgaattccgtagtatatctagacgctcgaaattcagaacaaaagctctgagcaaattcaaacgaaaataactttttactcgtatgtccgattgtttcccgtagtatatcgagaccctcgtaattgaaaccagaagcccgtagcaaactcaaacggcaataaattttaactcggatgtccgaatgaatcccatgatatatcgaggcgatcgtaattgaaaacagaagctatgagcaaattcaaatgacaataactttttactcggatgtccgattgagtcccgtaatatatcgagacgctcgtaattgaaaacagaagctcttagcatattctaacgacaataactttttactcggatggcggattgtttttcgtt

SEQ ID NO: 150769 - DNA, 327 bp, Glycine max
gccttaaattcagcgctcgataatacgtttttttgactgcagccaagtattgcgttgacttctagactttattctgattcagcgttcgattactcggaccatcgactccgataaagtattgcgttgatttgctcaactttgtctaattccaggtgtcattacactgcccatcgacatcagtaaagtattgtcgtgattgctaacttttgttcaattgacgtgcattatacagactcatcggactcgataaaatatatcgtaaattgtcaacttcatttaatacagtgctcattatactgataatttgacatcataaaagtatgcggg

SEQ ID NO: 150770 - DNA, 216 bp, Glycine max
tctgacttaatttcactcctatccttatcttatatccacttaaatttgcttttttctcaatgagatttatggataagtgaagtctgttctatttccacctctatcatacatgctacaaaccatgttgaacagacctttaatttatcctttctttagtgtatttttgtgggaaaccatattgtgggggggggggaactattttaatatacgcgttct

SEQ ID NO: 150771 - DNA, 383 bp, Glycine max
tgtggaaggagaatctcagggtaaatgtctgggaaagcgaaacgttgttgtgattaggaggttcctggagtggagaagaaacaatatctcaagtcagagatggagagagagggagaaaggagaatagaagattaccaggacgcgaaggataagggttcttgcgcgactccacattttctatttctctcaggtgacgagaaagattatattaatatgtagagattatcgcgggtggccaactgcttcttcgtcaatctacagcatcagcatgtgtgcgcactatagaccaacattattcattaactccccttgttagaagcacaaagacatgctccaatatgctcttatttctatttatcagattaaataaataattgccattc

SEQ ID NO: 150772 - DNA, 331 bp, Glycine max
ttaagtcacctgcggcatgcaagcttgcctgtccgatgcagcaattattatggttcgagttatgttggggagcggttacgaacccggaatgggtttaggcaaagacaacggcggcataactagcctaataaatgccaaaggaaaccgtgggaagtatgggttaggctataagcccactcacgcaaatataaagaggagcgttgccggaaggaagagcggaagtcaaggctctcggttgatacaagaaggtgaaggaaacccaccctgccaaataagtaagagctttataagcgcgggtctggaggacgaacgtcaagtcgtcactatatat

SEQ ID NO: 150773 - DNA, 302 bp, Glycine max
  unsure (1)..(302): unsure at all n locations
aacgaaaaaggcatacaaccaccgccaacacaaacatcaatggaaaataagacacacacatgacatacttccgaacaacaaaactcgcacgagagatgcccctaactaaggaaaaaaacacacccatgcacaagcaaggcatcctcgtgacctagaccacatacatgcaccacctgtgcaagaagtacagacatgcacactcaacggattgcggctaccaaagatngcacacgtgcacactcgggaatggctagcacccatacatacaccaattgcataaagaagctcggccatctacacca

SEQ ID NO: 150774 - DNA, 448 bp, Glycine max
ttaagtgagcgcggcatgaagcttacataagatttgaaaagttcaatttattctttctcgcatatattcaacggatggactagataagagatccatgaatagctaaaattcatttcacaaaaaagtctttggtcgacaattaactaaaaattaaaagagcaattaatctatcaacccccaagtttccagaagggaaaatttcatgttgccaaatgctagaacatagatgtgactaaaaacaaatatataaagccaaaacattggatcaagccttaagatcatggttgactacgatatcaaccctctatatccagtttgaatacgttacttgattatattggattgactattcttctacgcggccattcaatgataaggttatatgcctctcacttaatttgattcattttgtcaaccgttgtagttatgttcactagtatattgtact

SEQ ID NO: 150775 - DNA, 422 bp, Glycine max
  unsure (1)..(422): unsure at all n locations
agcttgacatcccaccaaanatcaagctctttttatggaggcttcaacgaaaaattcttcaaaataaaggctcatttcaaggggagtaaattgtgaatctctttgttggtattgcaactcaaattttgagaatgacttctaccttttttttttgggtgtatgcaagctcaacatgtgtgggtagcagctggactttggcaccaaattgaaggtgcaatttttcaagctaaaaactctattgatttaactttcactctcttggaggacttagttgattatgagaatgagtctttagctttgactctatggtgcatttagaggaggataaatgataagatctangaagatgttgatgttcatccaacacatttagtttctcaagctcaacaatacctccatgaatggcggnttgttcgaatcaa

SEQ ID NO: 150776 - DNA, 343 bp, Glycine max
aacatagccattatacatcttaaaaagttgcacgagtgttgcaaagaccgaatggcattctcctataatcaaacacaccataaagacaggtgaatgctgtcatttcttgatcatttaggtccacaacaatctgattgtagccagagtctgcatctaaagaaccatataatgatttttctaccagcctatcaagcatttgatccctgaagggaagtgggttatgatcctttctggtggcatcattcactattctataatcaatacacatcctccaacctgtgatgattcttgtgggaaacaaatcattcttctcattcctgagtaccatcatgcctcctttctt

SEQ ID NO: 150777 - DNA, 406 bp, Glycine max
  unsure (1)..(406): unsure at all n locations
agcttcacagcgacttggtgtcctgataactttttagaaattgccacgaatatgagcagttgaccacatcttcctcttttcatacatttcagtaacccatttattttcctacaaaccaagagtctcaaccatcttcaaccatgtatgttcaaaatctttcacttgtaagtcacctatcatacatctttgaaacattggcaaaaatgcaggattgtttacattggcttttgcattacgtatcaagtgccaagcacataacctaggcatgttttgaaaagtatctttcttatgcatntctcattgcaatatcaccatcagtaaatcgtggtgatagtttcttactattcatggcttgcacaaattgttctaataaccaaacatacgtctcttccggtgcatttggtac

SEQ ID NO: 150778 - DNA, 233 bp, Glycine max
ctctacaagttactctcaccacccaatgcagcctaccgaaacaccctacacactcttaaaaaggaacctaaacctaacacataaatcactccaacgcctattatcactatctgctaccacctcatctagacccaaacctgcccttctcaacaatcctacgccttttcttcacaaatggctagtgacccatcaagagttcaaaaaaaggagaatgccaagcagccatcaatcgc

SEQ ID NO: 150779 - DNA, 377 bp, Glycine max
acacagttatattttgaagggttatgacttttgaatttgaatttcaagatttccgttgctggtgaatgattacaaatatttggtaatcgattagaggttcaaaattcaaatgtcaaaacccttttaaaaagttttttttttcaaaattatcttctggtaattgattacattgcctggtaatcgattaccagagccttggatgtcttgaaaacactttgttttgaggcaaggcttgatcttgagttaatcttgaagcagggctttgtttgttgaagcaaccttgtattaatcttgaagcaatgcttagcctttgaagcaaccttgtttgattcttctttggcatcatcaaaatcatgtattcatacattcacaccata

SEQ ID NO: 150780 - DNA, 470 bp, Glycine max
  unsure (1)..(470): unsure at all n locations
agaagaagaagaagttcaaagagattcaggcnttttattgattgtatgaaatatgtgttcaagattgttgttagaaagattgattcaaaatgcaaaacaaagccttgcttttatagactcttcatgtctggtcaagaaggccattcagaagagttataactttttagaaaaacttaaaacccatttgaaaaagtcaaaacctttttgaagagttacatcttttgattttttagaaacaatcactggtaatcgattaccaaataagtgtaatcgattacacaaagcttatgagtgaaacaatgtgactcttcatttttaaatttgaatttcaacgttcaaggacactggtaatcgattaccaaaacattgtaatcaattacagccttttgaaaatatttggaacgttgtaacatcagtttgagaactgtctcaaactcattttgctactggtgatcgagtacaacaatatg

SEQ ID NO: 150781 - DNA, 360 bp, Glycine max
agctggttcgaggtacttacccgttgaagatcgattatcgatgaagaacgaatgaagaacgtcgaagaacggttgaaacctttgcgagattcctcacggaaaacgttacggaaacgtttcggaagcgcctcggcttagattttcttcacggaaacaatttttccaagcaaattccaaagagagagaagtgcctgaggggctgggatccattccttcttcatttctccctattatagcaaaaggggggtggtgcgccactcgccggcagctactcgcaggcagcgggtgttctcaaacaccgctttggagactttgaggcaatggctggtgattcacccatttatagacccccttgtgttt

SEQ ID NO: 150782 - DNA, 472 bp, Glycine max
  unsure (1)..(472): unsure at all n locations
tagctcgcccaggcgagctanggtgcttcctccagatagtatcgncttctggagaacttcctggaaggcccaaatgggcttgatngtctattgcaccccctttntactaaatacacccctagccttatttgctgattctntttccgtaacgttacagaaacttacgaattatgtaacgatacttgttttcctttcgtaatgttacgaaaccttacagattacgtaatcatcccttttttgtcttccgaaatgttatagaactctacgaattgcacactaacacttccttttaatttccggcatgtcacagaacttcacggattgtgctataatactttcttttgactntcggaatgtctcggaacttcacgaattgcctaacgatgggtgccaagttccttgaagtgtgtcaacgagggtcgcatcccaacaatggatggtccccggacgaaattatggtatgacaataacc

SEQ ID NO: 150783 - DNA, 429 bp, Glycine max
  unsure (1)..(429): unsure at all n locations
agctttcgattcattctatgtacccgtgggggtccacattgtgtttcgtgtatntttatcctcatttcatttactttttatacctccttttgacgtgcttaagccattttagttaagtcatttcccgcttaacttaaaaataaaataaatttccaccgaacgtttgaattgtattatccgttaacttcggttaaaatgaattccgaccgttcggtcgtgccgtaaccacgttggaaatcagaaaaagaggtaaaaaataatataataatcaaaaaacatcttttagtaaaataaagcggaaaatcaatcggacgttttctctttgggatttctcattcttaatcgaattgactaaataactaaagtgaaactaaggctaaaatcaactcgcctagtcaagctcgtccataaaaatagggtttttttaag

SEQ ID NO: 150784 - DNA, 464 bp, Glycine max
  unsure (1)..(464): unsure at all n locations
caagaaccacgaggaagcttcttgaggaagcctctttttttatcttcttgaggaagctacatgagcttcttcggtaaaaacgtttcccagccttcgttaaccgttggatcttcctgaaacttggtctgtagcttcacaagacacttgtacaccatctgaccgttgggatctttaagaagatgtctggagtgttctcgaaacttccgttcccgagagcatttcttatttaagcatttcagcctttgcttttgtgtagcttaggaaatatcccatttcttctcctttctttcttccaaagccatttctaacgtcccaagcactttctccatcacccacagccaccattcgccaccgcaaaccatcgttgttctccgttgcaaccccatactgagaggaacccttcgaccgaagcggaatcttccaacttggctcgcgatntcgatagagaacganaccctaatctg

SEQ ID NO: 150785 - DNA, 385 bp, Glycine max
  unsure (1)..(385): unsure at all n locations
agatgataacaaaaaatgatgacaaaggtgatgacaaaaagctccaaggtcaatcaaagaagagatcaagatttcaagaatcaagataagtatgaaaaggttttctcaaaaattgagtagcacgttgaaattcaaattcaaaagtgaagagtcacatcctttcacataaaagctttgtgtaatcgattacattgatttggtaatcgattaccagtgattgtttctgaataaatcaaaagatgtaactcttcaaatggttttttgactttttcaaattggttttaagtttttctaaaagttataactcttctaaatggtcctcttggccagatatgaagagtctataaaagcaaggctttgttttngttttttaattcattcattc

SEQ ID NO: 150786 - DNA, 384 bp, Glycine max
  unsure (1)..(384): unsure at all n locations
gcttacttggtgttgaccctcttccacatttcctttttccaaaatttgtaattactctttttatgcggaagcggtttaccggaaagtgcctcggatcgccaagtaaataattaaaacggaatgatccgagtgtcaaacacagggaacttattcctttggcaaagctttgttcaacaatcatgcattttgttgacagaaaataataattgtgaattgaagtaaaagtatgatatatcctaattgaaaagcagtaaacgtgagcaaataagtgtgaaaacagtgatctaaaagcattgtgtcttcctattgaacaagttgatgcaattaaagatgtntctctaattaagaatgttttgtgttctatgttaaggctcatatactaaa

SEQ ID NO: 150787 - DNA, 423 bp, Glycine max
  unsure (1)..(423): unsure at all n locations
gcacctgggctgcagcttgagggctncccaccattttatattttatttctataatgtgtctaccatcacgatcatcgtctccctttccatcattgggggtaccacctgngccgccagatccctccaccttttgggcgtgttctttgaaagatctgtccccctttttgcaaatgttctgtagttgcatcctatccggaaccatatcaaaattgtactgatactgcctaacaaaggcaaccattaggtccttccaagaatggactcgggaagattccaagttagtgtaccangtaacagctaccccagtaagactttcttggaaggaatgtattagcaattcctcatctttngcgtattcccccatcttctgacaatacatctttagatggttcttgggacaagtagtccccttgtacttgtcaa

SEQ ID NO: 150788 - DNA, 357 bp, Glycine max
  unsure (1)..(357): unsure at all n locations
atccttgaatctgattcatcacctacatcaaagaaagatagatcaaccacattaaaggtagtacttatgttaccatattctcttggcaagtccaactagtaagcattgtcatttatcttctctagaacttgaagaagcccatctcctcttggttgcaactnggagtttcttttagcagtgaacctttccttcctcatatgaaccgaaacccaatctgctggtttaaaaataactntgatgcgaccctnatttgcttgttttgcatattgttcattcttcttctcagtgttggcataaactattgcatgcaactctttgatagaatctgccctattcttaccatccaaattagcatac

SEQ ID NO: 150789 - DNA, 375 bp, Glycine max
  unsure (1)..(375): unsure at all n locations
catcatattctcattngttattggaacataatctcaaattataaaagattcattcatgtctaagaagctccttcgaagtcttttatatgtttacaactcttagactttggtttccaaatgggatgtatgttataacttacatcaattccagatgagcttatcaagaatgccaagtacatagccacacctgggaagggcatcttggcagcagatgagagcactggcaccattgggaagcgcctatcgagcattaacgttgagaacattgaggccaaccgccaagctcttcgcgagcttctcttcaccgctccagatgccctccaatacctctctggtgtcatcctctttgaggaaactctttaccagaaaacctcc

SEQ ID NO: 150790 - DNA, 432 bp, Glycine max
  unsure (1)..(432): unsure at all n locations
agcttgatacctaaggagttctaggctagttttagtcaaaacgagagcttaggttgagatgtttgttcacaagaaactgaataggccactatggaagaaacagaggttgataagaaaatcgccatcacttttgatcatcctacactcgaaatgatcaaacacttgaagcctatatatgttagagcccagataaatggtaaaaccttgttgagagtgtttgtggatgaaggagccattttgaatatcatgcctttgaccatactaaagaaggtaggcagaaggaactaatacctacaaatatgaagatgaccaattttactagaggagccactccaacattatgagttntggtagccaaaatcacagttggacccaaaaccatgtatcatgccttcttcattgaagatgccaagccagcttattctgtgttgt

SEQ ID NO: 150791 - DNA, 421 bp, Glycine max
  unsure (1)..(421): unsure at all n locations
agctntattatgcaaggaataaccaatgatattttcttcatctgacttagcatcaaactttcctaagttttcttttctattgtttaatacaaagcatttgcatccaaaaacatgaaggtgtgaaatgttgggttttctaccattaaacagttcatatggagttttctttaaaatgggtcttattaaagccatattcatgatatagcatgcagtattaacggtttcagcccaaaaatattttggaagaggagtgtcatttaataaggttataactatttcttccaaagatctatttttcctttcaacaactccattttgttgaggggttctatgtgcaaaaaagttatgttcaatgtcatgcttatcacaaaataattcaaattctttattttcaaattcacctccatgatcactcctaata

SEQ ID NO: 150792 - DNA, 438 bp, Glycine max
  unsure (1)..(438): unsure at all n locations
agctntaacctcatcgtccctacagtctttttattgggagccaatccaatccttgtgttcggactctcagccacttatgatagccgccgatgatcccattactgcttcccctaagctctctgtcctttcttcacgccgcatcccatgccttgcgaactccttggagtaccctcgcgttgtggtcactaaaaccccgtgcgatgaaaggcgtgatgctttcgtctaatggcgctcctctcatggggtagccaagctgtcttatggtgagaacgggattataattaatacaaccccttgttcccatcaagggaacatttggacatccttcgcatggagatagaatcttgattcttccttccttctagcgagggaaccaattaacagacgcccncccatgctagccaagagttggtcccaattcgcctttcctttttcgac

SEQ ID NO: 150793 - DNA, 425 bp, Glycine max
agctgtatcactccctttctatttactattctgcgccaccgcacacctcagagaccccaccgtcggtcgtccaaccattcatgctgccgcaacaccaccaacccctccgaactgaagctagggtttccaagctagcgtatgaaacaacgatctctccctcgtgcttttcgattcccttcaatttttcatgtttccaactgaacaaaattagggtttagtttggtgtgtgtgatgaagattgaggaattggatgatggagagtgtagtagggacgaggaagagaagtgtcagaggcagattgtgagcattgatgcaaagagagcgttggttggagcaggtgcttggatcttgttctaccccacactcttgtataatgtgcttcgtaaccagattgaagatgagtttacgtggtgggatcatattga

SEQ ID NO: 150794 - DNA, 369 bp, Glycine max
ttttttagtatgaagtagatgcgtgataagatggataattgtttcaattttctggatgtaaggctgatacatggaatatgatagaatatgcctatggtagtaattttattatgtagagactgatttttgtacaaaatcttaacattgaaagacgatgaacgaaacctaaatttgacggaaatcgctcctaagatgggcgaatgagttttttcaccgtgggacccttgcccttctaatcagaatcgaaaatgtttaccatcgagatcaaggacaatgatgaaccgcttttgtcttctgcttttgtttggagtgtgttttctttgtggtaagatcgtttatcctgccactaagcgtgtcattaattatttt

SEQ ID NO: 150795 - DNA, 328 bp, Glycine max
  unsure (1)..(328): unsure at all n locations
agcttctatataagctgaaccatnttatcaataaactctttttgagttttattcagaaaattagagtttatctcttttatcttagtgagagtgattctcctaaattcttgagtgattcaagaacaccttggctgtatcaaaggactttcacaacctttgtgtgttgccctcgctggaaagagtgattctttccttccattttatgccataacttccattttccatcatcacccttgttctttcaaaccacaattccagaaaatccacctctgcccagaattatctcgtggccataacttccattttacgcactcaaattaagtgattc

SEQ ID NO: 150796 - DNA, 471 bp, Glycine max
  unsure (1)..(471): unsure at all n locations
tttcgagcgtctcgatatgttacgggactcttttcatctntncgagtaaaaggttattgtcgtttgaatntgctcaaagcttcaacattcaatttcgagcgtctcgatacgttacgggacttaatcagacatccgagtaaaaagttattgtcgtttgagttggctcagagcttcaacattcaatttcaagcgtctcgatatatgacgggactcaatcagacatccgagtaaaaagttattgtcgtttgaattggctcagagcttcaacattcaatttcgagcgtctcgatatgttacgggactcaatcagacatccgagtaaaaagttattgtcgtttgaattggctcagagcttcaacattcaacttcgagcgtctcgatatattacgggactctatcagacatccgagtaaaaagttattggtcgttgaattggctcagagcttcaacattcaatttcgagcgtgtcga

SEQ ID NO: 150797 - DNA, 366 bp, Glycine max
aatgcacttcttgcattgtatctttgttgaaaggaactacatgtattggcattgagttcctacagagttagcaaaatgtttgttggctacaacatggacttctcatatcagagtaagtgtaagtttagctttagtcaatcgccctgcctatggatgtccaactaatgacttggccaattcatgatgatgcactccacaaatcaacttcatcatccagtcttatcacccaaccactggcttgcaacgaagcttgaagggacacccacatttcctattctcaatggcacttctgataaatccttttttcctacacctatatgcgtcactactttcatagctaattaacacaaacgtagtccttcctct

SEQ ID NO: 150798 - DNA, 423 bp, Glycine max
  unsure (1)..(423): unsure at all n locations
ctccatcaagttgaacaccacaatgatggagaaagtgctgctctggactaaacgggaaagcacctttaatctgcagccatgacatagtgtcccaccagatgggttgtattntacagcaatggaaaaacaaatgggatgcgccctcctctgtaattctgcagaaaggacattgcatatctgtgagctgtcctgttgagaatatgccattaactagatctttactttctaacttgtttaggttcgaaacttttgacaccaacgcaccatcaggacttgngaagagagttcgaatttctgctaccagtatcttgaatgtaaatgtcagtgcagcaaatcttgaatcctttgtgggaagcattctttcgtggagacaacagttagatcttgaacagaaagcattgaagctaaatgccgtcaaattct

SEQ ID NO: 150799 - DNA, 321 bp, Glycine max
gaagcccataataggagattttctttttttacacaacaagcgacgaacaagacaatatagggtcgccacaacccaccatcaggtatacacaatatggctttcttaagaaacactctgccttacactctaatccccttggtcttaagaattaagagatatggccacacaaaaacaatcccaatatgtgtaggtaggcagagagacatgaaaagtaaccaaaaaaagctacaatgtttaggcacaagaatgaaaaaaatcagaattagaatcaagtacatcctatgcaccataataccttaagaatttttttaatcttaagct

SEQ ID NO: 150800 - DNA, 395 bp, Glycine max
agccctgcgttggataaacttataagaagaataaattcttttatatataaaaaaaacgttatttttatggcataacgtttttgttttagatattaaaatgtataatttatgaaaaggttactataactattttttatttatatttttaaaaacaatacgataataaaattaatttagtcattttagatgtacaatcactctagcatgatattagacgtgttacatacagaaaaatgaagggattattgcaaagacggatctcaaaccttataaaggaaaataaattttttctctttataattttaatggtactctataatatattttaaaattgctttttatattaaataaatatttatataatatatacctactgatctatataaaactactat

SEQ ID NO: 150801 - DNA, 342 bp, Glycine max
ctggagagaatcacgcaacatgtatctcaagaaaatcgtgaacaagtcaacgagttcaagaatcaagacgaattcgagactcacgaagatagcctacgaactagagtcgagattcaggatctcgagaatcaagagcacgatccaagactcaagagatccaggagctcaggaatcgagagcgaggatcaaatctcaagattcaagaatgaagaatagactcatcaagaaacagtttaaaaagttgttcaaaactttgaatacccatgagtctccacgaaaccttaccaaggagtttactctctggtatcgataccatacggatgtatcgataccagcgcaaat

SEQ ID NO: 150802 - DNA, 439 bp, Glycine max
ttaagtcacctgccgcatgcaagcttcttgcatggctggtattctgtaataatgtaactgcctttgcctcagcagaggtttaccaatatgattcttgcctcaacaggtgttaatttctacctagaaatcttgggattttgttacatatgataaattcatctttgtaatttagttaaatatggacctattgttccattcataatttgagaaacataatgacttgctccattctctattgcaattgcagctggagcagattgtcagacatgattgtggctcgttatgacttcgcttgtgctgaagtcgatggcttggtttatgctgtgggaggctatggggtgaatggtgacagtctctccagtgctgaggtgtatgatccagatactgacacgtggacactgatagagagccttcgccgcccgagatgggggttgtttgc

SEQ ID NO: 150803 - DNA, 448 bp, Glycine max
  unsure (1)..(448): unsure at all n locations
atccttaagtcacctgcggcatgcagcttaagcttacctctcattaatgcagttatctattactttctcactccataggaatgcactaaaattatntaattttagtgctagcaaaactaacaagtgacttgtttttaccaatatgaacccaatcgcaaaggttgggttaccatcacatgtttgtttcaagtggcttaagtctcattctcctcgatgttttgcatatcagtttcttccttaggggtctgttagaaggtctaccaaatttccttataatttcacatagtcaatgaaaattgttttatcctttagctattgctttatcatgttatgtctcaattgtatatgttttttccattaaaggttttgtttcttgcgatggctctcgctgattagttttcacaatgcattaacactaacataattggtttcataaccaaaggaatgt

SEQ ID NO: 150804 - DNA, 420 bp, Glycine max
agcttctggcggtttgaattgtgagttcaattattcttctggtttagccttggaacaactggaatcagcaataggctgtgcattgttaggctgagttaatccagccactgccttcattcatgtgattatcaatgtttactcctgctgcactcacttcctgaccttatggtttgtgattcttgacatcaagaaaaattaaatgcttgattttaatcagcatccctatcttccatttatttccataaattatcaagaaattcatctctctctattccttttaatacatgttaaaatcaaaagataaagactaaactagcccataagatttaaaagctaaattcactagaaattacccttacctttcgttaagttatcatgtattactcatgagagtgaacactaaagaaaaacgattgcaat

SEQ ID NO: 150805 - DNA, 404 bp, Glycine max
  unsure (1)..(404): unsure at all n locations
agctttaagctcatcgtgcctcacagtcttnatgatgggagccaatccaatccttgcgggcggactctcagccacttatgatagccgccgatgatcccattactgcgttccctaagctctctgtcctttcttcacgccgcatgccatgccttgcgaacaccttggagtaccctcgcgtggtggtgactaaaaccccgcgcgatgaaaggcgtgatgctttcgtctaatggcgctcctctcatggggtaaccaacctgtcttatggtgagaacgggattataattaatactcccccttgttcccatcaagggaacatatggacatcctccgcatggagatagagaactgattcttccttccttctagcgagggaaccaattaacagactgccccccatgctaacc

SEQ ID NO: 150806 - DNA, 361 bp, Glycine max
  unsure (1)..(361): unsure at all n locations
catatnctccatctaatacattaaaatatgcaatatttgagaacaaaaaaaatgcaatattttaatctatgttaacatagacaggttagttaatagcttttctatatatatatatatcacaagacatgatgataaatagttaacttctttaagttattgtcataatttaatttaattttttttggacgtaggcacgtagccatagcttaattttttttttctacgcagtcatagtctaatttctgagcatgtgaatgaagagaattttctttaaagacataaaatccacttatagtatctcattatctcgaaaagaanttgtgatgagatatctctagtgaaaagagttctacatacttaa

SEQ ID NO: 150807 - DNA, 453 bp, Glycine max
  unsure (1)..(453): unsure at all n locations
acctgcggcatgccaagctttctctttgaacaaaanagggaactcttttattctatatttcacattcatcaatgcatcaatatcacatctaaactacatcttacacttgtttggccatcatgtcccaccatttcattctcaagaaaaatattttgttcttgtcattacattttgttgggcctttgagccttttgcttgcaccacacatgtttcattcacatttctatatatcaaacatcacatcaatctcctacatgttttttttttgtcaaaatagagtagttgcacaacactgtcatttaagtccaatgactgcctagcaccaacatttaagtccaatacctgcctggcacttgcattaatgtctagtacctatctggaaccaacattaaagtcaagtacctttttgcaccaacatatcatgtattaacacccacaacataacatattggg

SEQ ID NO: 150808 - DNA, 416 bp, Glycine max
  unsure (1)..(416): unsure at all n locations
tctaatgcacttctttagcaaggtacacacttttctgcctctctcaagtcattaaaattccctcaggcctcggggcatccttaactgcaagacaagctaacaagataattcacactttcgcaagacttctttcatcacggaataaacacaacaacaaaagtcttatcccaatgggtgaagtcgatcacataaatcacacaatgccattgagcttaattaaagaccaaattcttaggaatattattcactgtgaaattccacttaacaatttgctatcatcttttcctcaattaatgtcacaccaatatttcctcacacacatcatggaataaacatattcaagaaaaacactaatcctctggcccctngagacattacaattcagatcacanaacacgcaccacaagtactacacc

SEQ ID NO: 150809 - DNA, 234 bp, Glycine max
  unsure (1)..(234): unsure at all n locations
agctntcttaagaaaacttccttgagaagcttcttttataaaacttccttgagaagctagagcttagctacacacacccatctaaaaactaagctcacctctttgagaagcttccttgagaagctagagcttagctacacacacccatctaaaaactaactacctccttgacaaaatacatgaaatcaaaaaaagcctctcaaacactcaaagttgatcaggtaaccttctctg

SEQ ID NO: 150810 - DNA, 461 bp, Glycine max
  unsure (1)..(461): unsure at all n locations
tatttatatgaattttttaaggtatgttatatattttttaaaaaaaaataaatacatactgggttatacgggtcaattagtgatccactgatttgaccattgacccagtgactcactgattttactaggtcgataatcgattcagtatttaaaactatgttgatgaagctntgaaagaaaataacgtaattttcacaaacaagcatgattagatgatatcaacatattttgtaaaaacactttttcaaaacaaaataaaattcaaactattggttaattaaaacaatacaaataggaatacaagacgcaaataattttatattggttcgtctctatcattagactacatccaattcttgacaatgagagntttataggcttgaaaaaataccatgttatgtggagtttcaattttaaatntttaattattgctacaactttttggctttgcatatccttct

SEQ ID NO: 150811 - DNA, 430 bp, Glycine max
agcttgaatcggacatccgtgtgaaaagttattaccttttgtttttctcaagagcttccgttgttcaatttcgatcctctcgacatattatgcacccgaatcggacatctgtgtgaaaagtcatgatcatttgaatttctcgagagtttccgatgtttaatttcgagcgtatcgatatattataaccctgaatcggacctcagtctgaaaagttatgaccatttgaatttgacgagagcttccgttgttcaatttcgaatatcactgtatgtgatgcgcctaaattggacattcgagttaaaagttatgaccatttgaatttctcaagagcttccgttgttcaattctgagcgtttcgatatgtgatttgcctgaatcggacatccgtgtgaaaagctatgaccatttgaatgtctcaagaggctccgtt

SEQ ID NO: 150812 - DNA, 379 bp, Glycine max
ctcgaaattaacattggaaacttcgtgatattcatatagtcataacttttcacacggatgttcgattcgggcgcataatatgtcgagaggctcgaaattgaacaacgcaaactcttgagatattaaactggtataacctttcacaccgaagctctcatgaaagccatatggtcataactttgcacactgatgaccgatagaggcttataatatatcgatacgctcgaaatctaacactcgaaactctctacaaatcccaatggtcataacgctgcacacagattgccgatgcaggctcatgatatgtccagaggctcgaaagtgaacaacggatgctctcgagagagtcaaatggtcataacttttcacacggatttcc

SEQ ID NO: 150813 - DNA, 389 bp, Glycine max
  unsure (1)..(389): unsure at all n locations
agctntgcttccacagtaaccaactgtggtggttttatctttttatatatatacaatcatcaaaatttctatacaagaggtctacccacccaaaaatcaaaagagtaaacctagcagtctgaattagatacacccacccacaaaagtatgtacgcttaatctaaggagccgtctgctatgatgaagagtcgtcactattcgctatccctccaaggacactctcttctgtagagtctgcctcagattctggcataatatcctctggagaatcaacatcagggagcgggtcctcatcatcctctggtaagtcaggggcatccatagcaggttcaagagataactcctctgggtcctcttcaagatcctcttcagaggatgacacctctatc

SEQ ID NO: 150814 - DNA, 476 bp, Glycine max
  unsure (1)..(476): unsure at all n locations
ctctcccctattntgctatanatatgggatgaagtgaagatgattattttctctcccttangcacttctctctctctcgaaattgctgaggaaaattatttccgtgaagaaaatccaagccgaggcgcttccgtaacgtttccgtgagaaattacgcgaagattctcgaccgttcttcaagattcatcgttcgttcttcgttttcttcagtcttcaatgggtaatacctcaaaccgagcttttcaattcattctatgtacctgtggtggtccacattttgtttcatgtatttttattctcgttttcatttacttttttatacccccttttgacgttcttaagccatttatttaagtcatttctcgcttaatctaaaaataaaataaatttccaccgatcgtttgaattgtatcatccgttaattttggttaaaatgaattccgacccgtcgatcatgccgtaaccacgttggaaat

SEQ ID NO: 150815 - DNA, 422 bp, Glycine max
ggatcttagcaccgcggctgcagctttactatgtggcaggcgggcttgcttactttcttgtctcaaccgcgagctttgaccgccggtcttccttaccgcgaagcttctctttacatcttcctgagtgggcttatagcctaaaccatacctcccacgatttcctttggcatttatcaagctagttatgccgccgctgtctttgcctaaacccattccgggttcgtaacacgttccccaacataactcgggcaatcattactgctgcatcggacaggcaagctcgcccagagaatgagttcacggaggaaatgcttaccacctcaaaagactggaaagcggattctaatgactcctttgcggcttccacataatggctaaatgaagggcagctcaccaagatgatctcctcgcctgatacgatg

SEQ ID NO: 150816 - DNA, 449 bp, Glycine max
  unsure (1)..(449): unsure at all n locations
agctngcatgccttgttatgtcaatatcttatatattatcagggttngatatactcttcatcnattttgaaaagtttggagcaaccaggtagtggtggaagaaagaactaagaatatctatcntttctcaaaatcttggaggggcaattagggcatttggttctggattttattcacgaatcctgacatgtatagtgtatcgtcgtttgagcctccaattataagttcaacaagttttgctgtaacattcattagaaaaatagatcagatgcttagagtaatttatgaagctgaaatgatgatgaaaagaaggtaaggcactaaaagggaaacaaataagtattaagctcacctgtgagaaatcctatgacaggaataggctccaaaactttctccgggctttcaattctctgcctaaaatgttattgatattttagagtcatattttc

SEQ ID NO: 150817 - DNA, 443 bp, Glycine max
  unsure (1)..(443): unsure at all n locations
ggaccttaagcacgccgctgcagctctctggctcgagccctttgtcttttgcctaanatcttttctacaactcccatatctttcatctcaaattcactactaagtagtgacttcagattttgaatttcaaacttgttttgaaatgctatgagcatgtcatccatatagagtagcaaatagatgcaggaaccatcctctaccttactatgatagacaaatgagtcatggggactttaattgtacccttgagaaataatgaactcatcgaatctcttgtgctgctactttagagattgcttcaacccctaaagagactttttcaacctataaacaaaatttttcttcccttgcaccttaaaaccttcaagttgttgcatcagaatgtcttcctccaatattccatggagaaagattggtttgacatcgagttgctttaactccat

SEQ ID NO: 150818 - DNA, 409 bp, Glycine max
  unsure (1)..(409): unsure at all n locations
agcttcaagctagttttatccacatattggatatttttctcaaaacaaacttgggagtttactcaataatcatccaaaaacactctttccaataatttagttttctcattgaatttcaatgcatctggttatatgaattaataaaggagaataaatgaaataagaaaaaaattattgtttgatttgtaaatgaaactgaaatgaaataaatgtttttaataagttttaatattgttataagcaaaagtgtgggcaacaaaaggatatactctttagaataaaaaatacatttttntaatttgtcagtatatctttatgagcatttaatatgcaatattntgttctctaaggatatctaagttatctctattacaaaaggatatctangttatttaatgaacatacctct

SEQ ID NO: 150819 - DNA, 273 bp, Glycine max
agcttagcgcatcaaccgcactaagtgcaattctattattttcaaaacaatgaaggattggtgcttatcgcatcctgttgctaggcccaattcatgaaagttcaattccagggaggaaattgagcttagcgcgcttagcgctgctacaataatttttcaacaaagaaggaattgcgcttagcgcatcatctccgctaagcccaaatcagtgaagttcaattctagagaagaacatgggcttaacgcagtgatgtgcgcttagctgaaccatct

SEQ ID NO: 150820 - DNA, 119 bp, Glycine max
  unsure (1)..(119): unsure at all n locations
aaaagaggaaancggcaggaaagaggcgagaagaaaaaaaagaaggaaacgcaacaaagagggagaagaaaaggaagaaagaaagcccaacaagaagggaaagaaaaagggaagaagaa

SEQ ID NO: 150821 - DNA, 348 bp, Glycine max
agagagaagggaggagcacgaaattgaaggaataaaagagggaaagaagtggaactttgaagtgtatctcataaaactttcattcatcaaagttacaacaagtgttacacatgcttctatttatagactaggtagcttccttgagaagctttcttgagaaaacttccttgagaagcttctttgagaaaacttccttgagaagctagaggttagctacacacacccctctcataactaagctcacctccttgagaagcttccttaagaagatacctaaagaagctagagcttagctacacatacctctctaatagctaagctcaccctcttgagatgagaaactagaac

SEQ ID NO: 150822 - DNA, 385 bp, Glycine max
  unsure (1)..(385): unsure at all n locations
agacgcncganattgaacaacggaagctctctagaaattgcaatggtcataacttctcactcggatgttctatccatgtgcatcacatatcgagacgctcgaaattgaacaaccggagctctcgagaaattcaaatggtcagaacttttcacacggaggtcatattcatgcgcatcacatatcgagacgctcgaaattgaacaacggaagctctgaagaaattaaaatgctaataacttttcactcggatgttccatataggcgcatcacatatcgagacgctcgaaattgaacaacggaagctctctataaattcaaatggtcataactctcttcactgatgtccgatatcggcgcttatatatcgagacgctcttatttgaac

SEQ ID NO: 150823 - DNA, 428 bp, Glycine max
  unsure (1)..(428): unsure at all n locations
agcttgtaattctttatataagttaatgatgtttatcgaaagagaagagaaaaataatcttttcctcatccattgagctagcttttggggttgagttagatctctcatattatccattctaagatggtatcagagccaattctagtccttgggaccacacttccactagtcctcgctttgtggtgacaagcacccaccatttgttgttcacgcatcaagcccaaaaagtgtttggcgtgagggggtgtgttggaaataatccaagtctcacatcggttaaaagtaatcccgcattataatatataagtgaggggcaaccctcaccccttgagctagcttttgnggttgagttatgcctctcacattatacattntaagaaaaatgagtccactcggtgctcataggaagagaggaaaaatattttgat

SEQ ID NO: 150824 - DNA, 428 bp, Glycine max
  unsure (1)..(428): unsure at all n locations
agcttatcagatntccaaagttgttaaactttcgcagtggcttgactctattggtgtaaagaatgtgtgcctttatgacatgaatggtatgaaaaggtttgaagaatcagtgatgttaaagtttcttttactcgggccatataatagtattttctttgaactcttcatcctaggagtattgaagaagtctaaggaaaccatgtttcaaaaattgaagaatgcaaaatccattgaggtaccatataattgtttcccagcagattgcttctttctttaatattaataaatntgtttcctggtttatgatttaaaacttcctgtgactggtgtgtctcgtatatttgccatattaaccagtttgggtatggccacctttgtcccattnntatttgactgatcctctatntggattttgggagatgatgtgt

SEQ ID NO: 150825 - DNA, 460 bp, Glycine max
gatccttaagtcacctgcggcatgcaagcttcagacccaagcaacacaaaatctaggtatccttatcccctcaatttaatgggatttcaagggttgataagtgaaattgagaatgaggtaaatttggagcaaactctcacctcacacaagtctataacatcaatttaaacttgctcaaactggatttacacctaaaattccaccgaatcaaaatttgactcctcaacacccaattttaccctagaaatggctcttgccttcactttggtcatttgtttttctctcttgcacaacccaagctttctcataagtcctaaatgacatttcaaactaggattaattcattttaacctctatttaccactgaatccagatttaactttccaactctcaaagcctcactctttttccactcataacaccatattcttcacttttaaccctacgttaactctaccct

SEQ ID NO: 150826 - DNA, 488 bp, Glycine max
  unsure (1)..(488): unsure at all n locations
tgatactcaagctgaaggatgcttaatggaggaaaagaaagagggagagaattttattgggggaacacgaaattgaaggaataaaagagggagagaagtganactttgaagtatgtctcacaagactctcattcatcaaagttacaacaagtgttacacatgcttctatttatagactaggtagcttccttgagaaaacttccttgagaatcttctttgagaaaacttccttgagaagctagagcttagttacacacacccctctcataactaagctcacctccttgagaagcttccttaagaagattcctaaagaagctagagcttagctacacatacctctctaatagctaagctcacctccttgagatgagaagctagagcttagctacacacccnctataatagctaagctcacccccatgataaaaaacatgaaaatacaatagaaaaagtccttactacatagactactcataatgccccga

SEQ ID NO: 150827 - DNA, 274 bp, Glycine max
  unsure (1)..(274): unsure at all n locations
agcttcttgcacgggattagtatattcattggcatatattaaatgatgaagatgttgtacgtgatatcttctggtgtcaccctgatgtagtgaagttatgcaatgcatgtaatttggtgtttttgatagatagtacctacaaaataaataggtacagactcccgttacttactttattgggtgacccaacgngatgaatctctgctggttgatattggagggaatggaaaaatgggatgggccaaaagttcaggctttctaacggaggctcctg

SEQ ID NO: 150828 - DNA, 458 bp, Glycine max
  unsure (1)..(458): unsure at all n locations
ctcaaaatctaagtatctaagacccctttttttatggtttctcanggttngagaagngaaattgagaatggggtaaatttggagcaaactctcacttcacacaagtctatatcatcaatctaaacttgctcaaactggttttacgatgaaaattctaccgaatcaaaatttgactcctcaacacccaattttaccctagaaatggctcttgccctcactttggtcatttgtttttctctctagcacagcccaagctttctcataagtcctaaaggacgtttcaagctaggattaacttactttaacctccaaataccactaaatccagatatggccttccaactctcaaagactcactctntttccactcataacaccatattctcaccttctaactctaggttaactctacccttcatctctaacagttttccataagcaatatcagcacataaaca

SEQ ID NO: 150829 - DNA, 436 bp, Glycine max
  unsure (1)..(436): unsure at all n locations
agcttcaacttacagagagtagttcaggcttatcgctttatgctcgctaagcgcacttccaagaattcagaacctgtaagagattggcacttagcgcttcttgtcccactaagcccagcttaaaaactcaagttacagaatggatctggggcttatcgcatgatactacgcttagcactgctacaataaaaattttccacagaagaagtggcgcttagcacatcatccacgcgctaagcccactggttaaggttcaattaccgtgaagatgtacggcttagcgaagtgatgtgcgcttagctgaactattcagccaaccaatcaggggtctatgcgcttattgtgagcaagctcggcttatcgcgtgaagactgagtgcttagcgcaaggtctgcgcctancggatagacaattgcaagaatattctaagtctttt

SEQ ID NO: 150830 - DNA, 258 bp, Glycine max
cgcggggagctattgcacaaatccaagcttgaccaatgccgacccaacccgggcatagtcagtcagtgagaacctgtgatagacctaagcaggcaagcttcctggaatcaactgcattagaggagaacaagaccacatagcaacgaggctcgtggtggctggccaactgtgaatatagtgtaatatgaggatagtggtctctagtcatcaactaccaaaggtgagtcatcgattacgaggctctaaattgatgacaag

SEQ ID NO: 150831 - DNA, 296 bp, Glycine max
tcttcgtgcataacactgcctcatataataataccactctggggcacaacacagtaacaaagagagaatcatatacatttaattacatagatcaatgcttgcttagttaacgctatgaagttgcgtgccaactactctatttagactgaatatctttattcttattctataaatatgcccccaccctatacccctcttaccccatcaacctccattggttgcattctttattcactttattcccttgtccaaccccaacacatgcatgtccctctctatgttctgccactgaaatg

SEQ ID NO: 150832 - DNA, 418 bp, Glycine max
  unsure (1)..(418): unsure at all n locations
agcttcaaggttagcctctctctaatacaatatctatcactnttcacaccataggagtggactaaaattaatttaactttagccttagcaaaactaacaagtgacttgttcttacccatatgaaccttcttcatgggatctgcaattacaaaggttgggttaccatcacttgtttgtttcaagtggtctaagtctcattcccctcaatgttttctatatcaatttcttccctaggggtttcatccaaggatctgccaaatttccttctaacttcacatagtcaatggaaattgctccatcctatagcatctgttttaccacattatgtctcaattgtttatgtctaatttttccattaaaggatttgtttttcactatggctatcgctaattggttataattatgcattgacactaat

SEQ ID NO: 150833 - DNA, 430 bp, Glycine max
agcttgatccaaacatctttgatgtttttcttcttaatgtacatcttctacatcatgcttagcaaacacatcagtagcatcttttcaatcaaagcaattaggtacaatactacaaaacaacataatcagacatatctttctccctcttttgtcatcacaaagccaaaaagtatgtatcaaatgagaataacaagtaaaagcaaaacacacaaggtaagaaataaaaatatatcatatatttcattcattagaaaaacaatacaatccatgagtaagaatatcacaagtaaaccatagaaacatagttgaaaacataaaaaaagctatgaagtacctgaaacacactagaagggggttgaatagtgtgatgaataaaaatttagtcttttgaaaactgttaaaaacttttctcaaatagatatgaatggac

SEQ ID NO: 150834 - DNA, 265 bp, Glycine max
agagagcacgacgagccaagggacggcgagagggccaccgaagaagccccggaaggagaaaccagaagagcccgataggaagaacacgaccaagacaagtcatgaggggcggtatagggcagcaacagggagcacaagctccgaagaggagaaaggaaacagcacgacgcaaaggcatgaaccggaaggacgagctaaaggcacgcccacgccgaaaagaaattagacgccaaagtaaagcgagacggaaaggcataagcgggcc

SEQ ID NO: 150835 - DNA, 405 bp, Glycine max
agcctttgagcaatacaaatggtcattacttttctctcagaggtccgagtcattcgcatactatatcgagacgttccatattgaacaacgaaagctctcgagaaatactaatggtcataacttttcactccgaggcccgattcaagcgcctaatatatcgatacgcttgaaattgaaccacggaagctctcgagaaattcaaatggtcattactttcaactcggaggtccaattcaggcgcataatatatctagatgctccacattgaacaatgaatgctcttgagccattcagatggtcattactttttcctccgaggtctgaatcacgcgcttaataaatccagacactcgatattgaacaacggaagctcttgagaaattcaatcggttataaccttctact

SEQ ID NO: 150836 - DNA, 191 bp, Glycine max
aagcgaactgcaaagagagagaagggcccaacgggctgtgaacctgtccatacacagtgactccccaagggatagaaaacaaggggagaggcatgccggccagctcgcccaggcgagcacaggtcgaccaagcgagcagggcagcaaccatcagaaacaaccgccatcgggaggaaaggacaggaagggcc

SEQ ID NO: 150837 - DNA, 432 bp, Glycine max
agctttagtcaaacagaatgatctggaaatgtgttttatttgtgtgttgaaaaagcataacaagactttctgtgattggtttaaagatacaatctttgcatatgagaatgcttcagaaacattaagaaagctagttgatgggcctaaaagaaatgttataacctggcaaggatacgacataaacatgtattcattttacacaaaagcacaagatgacaaaagtacaatgcagaacagcggggtcaccctaagggctgaatctcaacactttgcaagtgtcaatgacgccaatccctatgtagcttccatcccttactttgggttcattgatgaaatttgggagcttaattatgtgaaatttacaatatgtgttttcaaatgtaaatgggttgacagcaacaccgatgtgcgcaccgatgacataagaattac

SEQ ID NO: 150838 - DNA, 342 bp, Glycine max
aatagaagctccttgcaaattcaaacgacaataacttttgactcagatgtctgattgagtcccataatatattgagacgctcgaaattgaaaacagaagctctgagcaaattctaacgacaataacttttactcggatgcctgattgagtcccgtaatatatcgagaggctcgaaactgaaaatgaaggctcgtcgcaacttcaaacgacaataacttttaactcggacgtccaatggagtctcataatataaagagacgctcaaaattaaaaatagaagctctgagcaaatctaatgacaataacttattactctgatggccgattgagtccccgtatata

SEQ ID NO: 150839 - DNA, 421 bp, Glycine max
  unsure (1)..(421): unsure at all n locations
agnncttggaaatgctattatcaccttctctcttgccaatatgctggcttagcgagcatccactaagcacaacactcttgggctaagcgcgaggaagaatccagaagaagataagatgtacaagttcgctaagcgcaccgcttcatctctctaagcgcaccgcttcagttcatccgctaagcgagaaaggcacgctaagccaaaaatcactaacgtgcgctaagcgtacgagcacgaacaaggccatctatttaagagtttggactggattcagagctttgcatgtctagggtttctaaagagagaaaggtccaagttccaagagttttgagagatattgctgtgtgaagatctgcagagaccagagcttgaagcacgagccgatttgagagcttgagatgagtttgtgagtgattgtgag

SEQ ID NO: 150840 - DNA, 433 bp, Glycine max
  unsure (1)..(433): unsure at all n locations
gtcacctgcggcatgcaagctngcttgtggngcttctatggaggctgtatctnttatcttcaatgaggtcctttaatggtgattttccaccatggagatgcagctgaagacaaatgataaaaggtgataggaggcgccatccactatggaattagccatggaagaaggagcttcaccaccaaaatgagccttggataagaagcttggagaggatgcttcaatgaatgaaaagaaagatggagagaaagagggaggggggagcactaaattgaatgaagaaaaacggagataaagagggaggggggagcactaatttgtatgatgaaaaagggagagaagttgaactttgagttgtgtcttacaagactcttattcatcaaagttactacaagtgttacacatgcttttatttatagactaggtagctttcttg

SEQ ID NO: 150841 - DNA, 327 bp, Glycine max
  unsure (1)..(327): unsure at all n locations
atagatactaaagctctattatagccagtattatgtcttgtcactcctgattatacattantntntangtcactattgacatacccttagaatttccttaaatctaagacactcaagtattgtttaatattaaatcacttatgactttcacaaataaacaatgtttgaatgaatacaaaaattcaaatcactcaatagagtagataaacacttaagctaaaatacaaatgaatagtgttgctacgcaaatgacgagctaattaagcactgtaatgttggaaaaagatgatgaaactcacaaaccaagggggggggggggngaatttt

SEQ ID NO: 150842 - DNA, 447 bp, Glycine max
ccctaagcaccgcagctgcagcttaactcttcactgacaagctcttaatttttttagtatccttgtggaaccttcacccgacgaagacactgacaaaaacttatcttctcctttttggacaaagtatggcaggctaggggcaagtaaattttcttcccatcagaccttggatgcaactgtgatcgtatgcccatatcacctagatcttgatgggtattcaagccatccttcgtcttgccttgaatgttaaggagcgtcccaatcacactgtcacaaacatttttctccacatgcataacatcaatacaatgtttaacgtaaagatcagaccactacggaagatcaaagaaaatggacctcttcttcatatgcaactcttacttttatccttcttttgggtcttcccacatacaatattcaggtgttgaacccgctcatatacctgct

SEQ ID NO: 150843 - DNA, 215 bp, Glycine max
atgtgacgaaatgctatccatcaatacctatggtaagacacatgggtgctacgactttagtaatggttagtggtctgaggtgactacaagaaagacaatgtgtctatgaacagttccttgactgcgaaaaaatacctttgctaatgaaactctagtccaccgactattagtaccatgtgataaagcaaccgatatgggcatgatacagtctaaat

SEQ ID NO: 150844 - DNA, 377 bp, Glycine max
aattctaagagcataatcctagttgttattgggcctatcaggttatctgtatatagaaccacccacaaatattcagtcctgcagacttcacgctcaggatgtctattctttgacatgaagggggaggatctcacattgactaatgatatggccaaattagcatatataatgggcatccctcactccataaagtagctctttgatactgagttagagccaaaccgaaattctaaaaatcagagaacaaatcaacctaatatactgtacagtatttcacatttcactaattactgtagaatatttcaacaactttaaaactactagaatttgcaactaaaccactagtgcaggtataggtatcaagtaccattttggat

SEQ ID NO: 150845 - DNA, 370 bp, Glycine max
tcactcttcacatcaagcacctccacgatattttctacagtgcctcacgaacgcttccgataacccaaatggttgaattgtctaatgccattatcaatttcatctagtttttgttcgggtttgctgatcgcgatcggttctaggacctactgctcatgatgatgcgaaagctgatcgagacacttaatttcagccaggagactactgcttaggaggtgttcaagcttctcattgagcttgcggggaccgagctatgatttctatggcggtagttggtggatgttattggagctatgttgtagataactaaggcaaagttgcttgaggaatggactcgacatctggcgaatgttgttgtgattactcttga

SEQ ID NO: 150846 - DNA, 466 bp, Glycine max
  unsure (1)..(466): unsure at all n locations
ctctaacagcaagcccgcgagctcgcttgagaagattctatggaggctggatctnttagctttataagggcctttaattgtgagtctcagccatggagttgcagcggaagataaaggagaactggtgagaggaggttccatctattagggaataagccatggaaggaggagcttcaccaccaagagagtgtcttggataacaagcttagagaggaagcttcaatggaggaagagaatgagagagagaaagtggcatggaaaattaaaggaagaaaatgagagaagttgaactttgaagtgtgtctcacaagactctcattcatcnaagttatgacaagcgttacacatgtttctattcactctttgaatatcattttcatttcatgtgaatctaagaagaatattcaagaatatgcccaaggcatcttaacatatttcctttagatgccacaagaatgaaaagtgt

SEQ ID NO: 150847 - DNA, 374 bp, Glycine max
cactaagtgaggatgcttttctgactaggtcttgtagtcacccatattcattgataaaaaataaatgtgatgatttcaatatatgtgatgttagtatcacccttttttcaatgtttttttgttaaacttgtgttcttaggatttgttgtttgacttattatcattactagttgtgggtaatattattttcaatcgacttatggcttatatttttctctaagctgtggagcaatgacacataatgtaaagtcatgcacggagaggcctcgaaagatatgagcaaaatagacaaacatgcatattgctcctaatgagaagattgaaacatttgaacttgattattatgacaagcgagatcgatggaatggttatga

SEQ ID NO: 150848 - DNA, 328 bp, Glycine max
aacctgagtggtgaaacgtagcttgatttgttggaacgattgttgagagaaagaacacagagcaaaataaggcttctattttcttaatcaaacgttggtgtttgttgccaatgttgtgttaggcttatttatagtttctctgttagcttgtaaagcacgcaacaataagatgagatataggatttttattttttattttttaaaaaaaggacattatccgtcatataaggataaattaaggcttataaatagatagttattttctttcaaaaagaatatcatttctgaaatttaatattttgaagataggttgaatttacttatgaaa

SEQ ID NO: 150849 - DNA, 320 bp, Glycine max
  unsure (1)..(320): unsure at all n locations
actgaaatagtngtgaaagcatttaataaagtacacaatacttgtaatcaattaccagcaggtgatactatctataacaccaattaaaaagttgacgcgaatttcaagcctgaatcgatacacaagacttgaagcgaataccacgaggaattttcgacataactggaagagtcacattgttaagagtttattaatagtttcaaatgcctataaaaggtgacttgggacacgattccttaaagtattctgccatagagttcatcctctcaaaacaaattgtctatccttaaacattctggccaaacactgcaattcatagg

SEQ ID NO: 150850 - DNA, 428 bp, Glycine max
  unsure (1)..(428): unsure at all n locations
agctntctccactaagttgcctaatgcctgatatgtcttttctgatggcagtggtcctagatgcanggaagaatttctccaagaacaccctcttaaggtcatcccagttgaaaatggacctgngagcaaggtagtatagccaatcttttgccactccctccagagaatgaggaaaagcctttagaaagatatgatcttcttgaacatcagggggcttcatggtgtaacaaacaatatggaactccttaagatgcttataaggatcttcacctgcaagaccatgaaacttgggcagcaaatgtattagtccagccttgagaacataaggaacaccttcatcaggatattgaatgcacaagctttcataagtgaaatcaggtgcagccatctccctaagagtcctctcacgaggtggaggtagagccatg

SEQ ID NO: 150851 - DNA, 413 bp, Glycine max
  unsure (1)..(413): unsure at all n locations
gtgtggaatggtgagacttcctacttttattcgttgaccacagagtggtacctggagtatgtcgcgggggtcaggagaccttggggacgtcaggtggggtactattgcccaaaaccaagcttgaccaatcccgacccaacccgggcatagtcagtcagtgagaacctgtgatgtacctaaacaggcgagctcttggcagtcaaccgataaaagaacaaagaccacaaagcaaggaggcttgtgtggtggctggccagctatggatcttgagtgagattttgaatatggcctctggtaatcgattaccaagggtgggtaatcgattacaaggcttaaaagtgaagatagaaagctaagatggcctctggtaatcgattaccaagggagtgtaatcgattaccangcctaaaaat

SEQ ID NO: 150852 - DNA, 303 bp, Glycine max
  unsure (1)..(303): unsure at all n locations
catactaatccacgatttacttagagttattatcatgctaatttatgctcggcgttgtctgagccctaacccatccaaggctcataaccgttccccaacataacttcgggccatcattaacgccgtatcggacagacaaagtggcccagagagggagtacaccgaagaaatgctgaccacctcacaagactggatagacggttctaacgattcttctgtggcttccacatcaggcatggatgatgagcagcttaccaagatatcntactcgcctgacacgatgacaagtgcccctcactacaa

SEQ ID NO: 150853 - DNA, 429 bp, Glycine max
  unsure (1)..(429): unsure at all n locations
gtcaccgcggctgcagcttgggaggtgcttcatggaggaaattatagagggagagaaagagagagggggggcacgaaattgaaggaagaaaaagggagagaagttgaactttgagttatgtctcacaagactctcattcatcaaagttaccacaagtgttgcacatgcttctatttatagactaggtagcttccttgagaagctttcttgagaaaacttccttgacaagcttctttgagaaaacttccttgagaagcttctttgagaaaacttccttgagaagctagagcttagctacatacacccctctaataactaagctcacctccttgagaagcttccttgagaagaatcctanagaagctagagcttatctacacacacctctctaatagctaagctcacctccttgagttgagaagctagagc

SEQ ID NO: 150854 - DNA, 382 bp, Glycine max
  unsure (1)..(382): unsure at all n locations
agctntccatttcaaagagagaagccatggattatccatcttgtggctgtcacttgcatctctttggctgcaaaagttgaagaaactcaagtgcctcttctcttggaccttcaagtaggttcatcatcgcaaaactctgtccattcaagtgtgtttttttgttcattcatcttagatagatagatagatatcttatatcttataatgacgatgttgtgttttcaggtgcaagacacaaagtatttgtttgaggcaaagactattcatagaatggagcttctggtgctgtccacactcaaatggaagatgcaccccgtgacaccactctcgtgtctagatcacattataagaaagcttggattgagaactcatcttctctggg

SEQ ID NO: 150855 - DNA, 421 bp, Glycine max
  unsure (1)..(421): unsure at all n locations
agcttggatatatntgttgagtaatgctgtttattactctgcatctcgcgagcatcactcttaaatttttatgtcttgagctcttcttctccagggtcaataatctcttgttggtccttgttcctggatagtagtagttgaaatttgggtctattgagagggctctatggtacaaaggatcgagctgccaatagggtgcactgcaagtgccagtggcatgtgattaagtggtcattggtgaggccagatgcttgcatgaatgaatgaaccactgttggaccaacgtacctaaagcccctcctcaccatgtctttgcttatgctctctgattntgatgtcttcactgaaatcttgtggccaaacttgtattgagtggagagtggtttatgattcacaaacccccaaatgtacttgtcaaatg

SEQ ID NO: 150856 - DNA, 468 bp, Glycine max
  unsure (1)..(468): unsure at all n locations
agctctttcaactgcacaaggctcttaatattngaagagtatccttgtggaaccttcacccgatgaagacactgacaaaaacttatcttctccttnttggacaaagtatgacaagttgggggcaagtaaattttcttcccatcagaccttggatgcaactgtgatcgtatccacatctctgctagattttgacgagtattcaagccatccttcgtcttgccctaaatgttaaggagcgtcccaatcacactgtcacatacatttttctcgacatgcataacatcaatacaatgtctaacatctagatcagaccactacggaagatcaaagaaagttgacctcttcttccatatgcaagtctgacttttatccttcttttgggtctttccaaatacagtattcaggtgttgaacccgctggtatacctgctcactagtcaacggtgtcagcacaatattgtgctcttga

SEQ ID NO: 150857 - DNA, 433 bp, Glycine max
  unsure (1)..(433): unsure at all n locations
agcttcaagaaaaagatggcctcagcaaatttcttatttccagaagggaattctatcaatagacctccaatctttaatggagagggttaccactactggaaaacccgaatgcaaatttttatcgaggcaatagatctaaatatctgggaagccatagaaataaggccttatatacccaccacagtagaaagagtttcaatagatggtagttcatcaagtgaaagcataaccatagaaaaacctanagatagatggtctgaagaggatagaaaatgagtacaatacaacttaaaaaccaaaaacataataaaatctgccctaggaatggatgaatatttcagggtttcaaattgtaagagtgctaacgaaatgtgggacactcttcgattaacacatgaaggaactacagatgttaaaagatctacgataaatg

SEQ ID NO: 150858 - DNA, 476 bp, Glycine max
  unsure (1)..(476): unsure at all n locations
ttgaaagctattacggtggaaataagttnttctatttgatgttatctgcgagactagcaagattgtgtgttttgtaatccgtgtctttccaaagcagccaatggggacatcattatacatttagtacattacccacttttaattntaaattgggtccagatgtggataagaacaactaaactaagtcatttaatgtattgcttttatttaatgtatttaaattattagttattgatttgagaaaaaatattatatcttactaacaaatttaatgtggatagcatagactgccagtttaaaagtttttacattgtcaatgatcaattaaaaatattctttcgcatgactctcaaggtagttatcatcaaaacaaacaaacttatcatatatatatatatatatatntgngatttgatgactctataanacatatntacactactgttaatacatatataattntctcttagatctta

SEQ ID NO: 150859 - DNA, 421 bp, Glycine max
agctgttctatagatggtgatggatgtatatgttttgcttattaaaaaatgaaacaaaaagaaaaagaaagaaagacctcgaaggtcggcatattatggtcatgggaagcataaatattcgtagagagcaaacatatcttttggaaacaagagactgacgctaagagtttattttccagaataactgagataagaatggatggattcgttgaaccgatgaaagaacataatttggaaatattgggtctacttgtgtaaatcccaagccttagtatcacaatgccataaactggatgcttgagtacccacatagctgtagtcatgactaattttgcatgttgtttccaaatcatcattgttacgcgtgcctcgtggaaataatatggaaattcaacccgagaccgacaccttgacacacaaa

SEQ ID NO: 150860 - DNA, 457 bp, Glycine max
  unsure (1)..(457): unsure at all n locations
tcgattcattctatgtacccgtagtggtccacattgtgtttcgttgcattttattctcgtttgtttactttntataccccctgtngacgtgcttaagccattttactgaagtcatttctcgcttaacttaaaaataaaataaatttccaccgaacgtttgaattgtattatccattaacttcggttaaaataaattccgaccgttcggtcgtgccgtaaccacgttggaaatcaaaaagaggtaaaaaataatataataatcaaaaagacatcttttagtaaaataaagcggaaaatcaatcggacgttttctctttgggatttctcattcttaatcgaattgattaataactaaagtgaaactaaaggctaaaatcaattcgcctagtcaagctcgtccataaaaataggcttttgaagttggcatttcaattctcactaagaaaatggacatttt

SEQ ID NO: 150861 - DNA, 295 bp, Glycine max
accaaaagaaccccccccacctgcggaagaaccaacctcaccacaacacagatgggggaggagattcgtcactacagcacaccctacacacccacactcaatgggggatacacctgaccagatcaaaagtgaggggcgcaaagaagatggcactggaaagaggcatgtccgccagcaatgtgaatttcagcagcatgactcctgagccttggctccgcccgcgctcaatgcacaccccatacactcacaacactactgccaggaccatgccaaaccagggaaaccacggacatac

SEQ ID NO: 150862 - DNA, 430 bp, Glycine max
agctaggagatgatgcttcaatggaggaaaatattgagagaaggggggagcacgaaattgaaggaataaaatagggaaagaagtggaactttgaagtgtatctcataagactttcattcatcaaagttacaacaagtgttacacatgcttctatttatagactaggtagcttccttgagaagctttcttgagaaaacttccttgagaagcttctttgagaaaacttccttgagaagctagagcttagctacacacacccctctcataactaagctcacctccttgagaagcttccttaagaagattcctaaagaagctagagcttagctacacatacctctctaatagctgagctcacctccttgagatgagatgctagaacttagctacacaccccctataatagctaagctcacccccatgacaaaaa

SEQ ID NO: 150863 - DNA, 457 bp, Glycine max
atccttaagtcacctgcggcatgcaagcttctcggctcatgccgggaacgtctctatctcatcacccgtgcagcctaaggcacccacccagagggaagctccccaagttccaactccgaacgcgactcgaccagccggtaattccaacacgacaaggaacttccctccgaggccgatgccggaattcaccccgctcccaatgacgtacgaagatcttctaccatccctcatcgccaatcatttggccgtggtaactcccggaagggtcttctaaccccctttcccgaggtggtatgaccctaatgcaacttgcaagtaccatgggggtgccccggggcattccatcgaataatgcttggcccttaaatacaaggtccaacatctaatggatgccggatggctgactttccaagaggatcggcccaatgagacgaccaacccgctcgctcatcatgga

SEQ ID NO: 150864 - DNA, 264 bp, Glycine max
aactctaatgaagtgcttttttttggaggaatttggagattccaaaggaggttcccatttccttgcacttttatgggtattattgcaaatcattgtctccatgagaaagacgtatgcagattttacacaatatatagtcactatgctttcaaatgaaagtatcattagcttgagtattcatcaaagggatagtcctaataaattgcacatcatcttgattataataatgttccaccatatccattctccaacaattcatttcat

SEQ ID NO: 150865 - DNA, 191 bp, Glycine max
  unsure (1)..(191): unsure at all n locations
ctaatgagtatgggccactcaaatctatcatgctgccgacacgaaattgattagctccatgagagtctcctgggcgggcacggacacaacttcggcgcatgtgctattttgctttggctanacaagacagacgggagcgtctttgacattcctatttaagtgtcacagggcgaacactagtccatctcaca

SEQ ID NO: 150866 - DNA, 416 bp, Glycine max
acctgcggcatgcaagcttgcttaagatcgtatattgatttcttttatttgcacatcgtatgctcctttccttgaactgagaaccccattggttggtccatataaacatgctcctctaaatctccattcagaaaggaaatttctacattcatctaatgtagctttaagtcataatgggctactaatgccatgataatcctgaaagaatcctttgtggatcatgcattgtattgatgatgtcgaaaagaaatcacttgattgtcatcatccaaaagggggagaatgtgaatgcatggatacatgaattttgatgatgcctaaaaagaatcaaacattgcccgcttaaacgataaacatttgcttcaagatttattcaagatagattcatcaaacaaagccttgtttcacgattcact

SEQ ID NO: 150867 - DNA, 319 bp, Glycine max
acccccaccaaacagggatccacatttattgagactggattcagcaggataaaattcacaaaactaatgaaatcagatgaagaaatagtcaccaaggacatacccataacacactttgagaacactgccaaggtggaaactatatgtggctgctatgaaaaaaaaatgaacatgctcctctaaaaaattaaaatactataaaagagactatttaaaaaaattcacattacttactagatatgtaaaacttgggttattctagggtttatctgaagatcacataaatatatttcttctaaaagatgatgaaaagttcaaa

SEQ ID NO: 150868 - DNA, 461 bp, Glycine max
  unsure (1)..(461): unsure at all n locations
cttcattctgaattgtcttcatttgaacttatattattaactngtttattntcaacccacccttcttgtggtatttttgtcacttcactttatctacctttgaatcaatttagcaagttgatctttggtgttgaggataaaacactcacatccaagaggatgaaagaatgaaatattgggtcttccttggtgttgagtctttttaatcaaaggtttgatcaatattatgttttttaacatagcaacctgcatgtgtttatttctcctttccataagtgctcaaggagtggctnttcatagagcatggtcatatgcatttcttgtagagttatatttntcctttcaactaccccattttgttgaggtgttctcgatgaagaagagtagtggaaaatatcattcttttcacgtaatgatctaaactcaacattttcaaactcagtcacatggtcacttctgat

SEQ ID NO: 150869 - DNA, 300 bp, Glycine max
tcccgctgcatcaacatggtggtaaaccaccattaaaggacctcattgaagctcacagattcattctccatagaagccccacaagcaagcttacatcaagttgtatcagagcacaagagctacaagtaggagctccttagacctccattaatataactgctgtaccatctcttgcattgcagtggatgcattattatccatgtgatatcctcacatgtcttggtctaaatgttactaacatgatactttatagattccaccgattgaacttgctatagaagctagatttgatattctatg

SEQ ID NO: 150870 - DNA, 425 bp, Glycine max
ctgtcgctttcagacgggacatatatttattgcataaagctgcagctggaggaggagtaggtggtgtacaaacttcacggattgcatctgaagccaacagagaatatattttctcgtcttcttttactggtgataaacagtaagtgaccttattttcaattattttttgctatcgatgaataaattgctagtccttaatatatattagccttaaatatggttgggtgcttttcctgtgtattaatttttttttgaaaggcatttctatgtattaattaagaatgacgccttgtggaatttgaatgttgaacaacttcttgctcttttcattcctaaatatgtcagagaacttaccttcaccagcttagagaaaaataaagatacaccacagaaggtccagggagttcatccttcacagaacctta

SEQ ID NO: 150871 - DNA, 469 bp, Glycine max
  unsure (1)..(469): unsure at all n locations
taagctttccttggcttcaagattagccttaggttgttcaccatgttgttcatgttgttccccatatctctagcacagtgctcctagtccttacggtatttgtggatgcttctatcnttgctttttgggatataattggaaaatatgtggttaactctgttcttcaatttttnttatacaaagttggattttacctagattgaactccaatatgatagccttgattcctaagactcctagttctaatagaaatttaaaaatttggccaattgctntggctaattcaatttaaaattatttctaaagtccttgcagatagattggtagagatagcccacaaaattgttttcaagcaatagagaggtttcttgaaaggtatacaaatttcaaattgtatctgtatcactttggaggcattaaatatgttgaacaaataggtctctggtggaaattanctataagatttgat

SEQ ID NO: 150872 - DNA, 397 bp, Glycine max
  unsure (1)..(397): unsure at all n locations
tcaaataaataagagttacagaagaagtcattgccacgntcttcaatttcttgctttctgtgatgtgtgatgctattctcaaattttcgcacttaccgtgcgtctcgctgtttgtttcagtggggccgcctattggtagtgacttccctgtgttttatagattttgaatggagtgaaaatcatgatgcggtgaatcttttttaaattacgggtatntaatctttttttgggtgatttntaaaaacaacttactaaaaagaattgatcttcaaactatttacttgtggaaattttctgtcacatcagatgtgagtgacatgagttaaaataacatcatcagtgtatgttctgttatgaataatatcatcttaatttatatcattcttttcagtggact

SEQ ID NO: 150873 - DNA, 466 bp, Glycine max
ctcgacccggatccttaagtcacctgcggcattgcaagcttgcaagaaaaggttgagtgttttcttaaaaattatcgaaatttataatgggaagagataacttagaggcacttcttgcccaacaaaagtgcgttattgaaaaggctgggttgggatacaataacaataagaaacagaaagctgacaaaatctttttcaacgttacaaaagcttccagctcacccatcatagtatgctactactgtatgaataagggacattcttcttttaattgttgattaagtagtttggaattccaagtgggaaatacaaatgggttcctatgggaactaaaaaggttgctaaccaaaaaggacccgacataatttgggtacataaatctaccttctaaatatgttttgtacgtgtgcatagcaatggaatgacaattatggtacctagatagtggctactcaacgcatatgat

SEQ ID NO: 150874 - DNA, 377 bp, Glycine max
  unsure (1)..(377): unsure at all n locations
taatgactatagcatcatttttggcgctaaactgctgggagttggaagccatcttctcaattaaatttctggcttcagcaggagtcatgtctccaagggctccaccactggcagcatctatcatacttctctccatattactgagtccttcataaaaatattggagaagcagctgctctganatctgatggtgagggcaactggcacatagttttttaaatctctcctagtactcatacaggctctctccactgagttgtctaatacctgagatatccttcctgatggctgtggtcctagaagcagggaaaatgttttctaagaatactctcttaaggtcatcccaactcgtgatggaccgtggagcaaggtaatac

SEQ ID NO: 150875 - DNA, 270 bp, Glycine max
tacacatgcttctatttatagactaggtagcttccttgagaagctttcttgagaaaacttctttgagaagcttctttgagaaaacttccttgagaagctagagcttagctacacacactcctctaataactaagctcaccttcttgagaagagaagctagagcttaactacacacccttataatagctaagctcacccccctgacaaaatacttgataatacaaaagaaatccccgactacaaagactgctcaaaatgccctaaaataca

SEQ ID NO: 150876 - DNA, 360 bp, Glycine max
atggtttttaagttaaacacggtcgttgaatggtactatctaccctgatgtttacttaaaaactatctttgaatgagattattctaagacgatttttaactaaacatcgtggtagagggatatcattaattcaacaacaatgtttaacataaaaaccaactttgaatatttggattctaagacagtgataacaaaaatgttgtctttgaatggaagaattctaagataatttcaaagtaaacactgtcatagaatgcaatcatttaaagtcggttttatgataaacaccgtcatatacttgtatcattatacgatagtgtttagttaaaaattatcttagtatgattttattcacatacg

SEQ ID NO: 150877 - DNA, 325 bp, Glycine max
tgttgctctttttgggcctcgatcctgaatcctaagttgtattcgaacatcccagggcttcgaatagaccttgtcctaaggtgatgctgtgcttgggccttctcactcttccagacgtctcgtcgggtgaagccttgccattgcctataaccatgcgtgtgagcccatggtctgtctgcaccattttttgacccagaattgcataaggtgtctgaagtggttgggtatccatcgcccctgaatgaagtgtagccgctgtaccgaataagtgaaccacgaagggttcacaagtgaacaatggacaccgaagaatgcgagattctct

SEQ ID NO: 150878 - DNA, 416 bp, Glycine max
tgcagcttggattggaccagaatgactgagagatttttttttggaataaagatcctttgaaccgggagcgggctgacccagttcttgtataagctgcttgtttctcctgaaaaaccatgcaaaactcatttaagcattttgaaaatagagaaaacaaagatggcaatagctatattagttaataaattcaataactgcatgcactagcctacctatatagatcaaaattcttgtacaagtcagtaaaatcaacacccaaactaagttcttgtgctgaagttgtaacttccaacatccaagtagctggggtatatccgcctttgatattgcccaccccttcaatgctctggacagtggaaaatattcggacaatcttattatttgttctcaaaactataatcggtcacttaataata

SEQ ID NO: 150879 - DNA, 444 bp, Glycine max
  unsure (1)..(444): unsure at all n locations
gtcacctgcggcatgcaagctngccgctggagctgacccatcaactgttcttactctcttagactagtgatccctaggctcttgaccttgacttgatagaacctctttttaagtgaaggaatttgacttgatcccatgttttactaaattgaacaaaaatcggtgcgaattaaaactctgacatctatcatgggtggaatggatgaatgcatgaacaaatgcatataacacagaagaaatttatgaatacgggagcccgagaaattctctccttcttagatacaacttcttggggtagcaaagtgcttgacgtatgtatttaagaaggtggcatggaccctccgttggtttgacaacgagaggggatcacaacagaatccgtgcgtgatgcatatgcgaaaggcgcaacacgggaatgtacagtatgacaatattcacaaaata

SEQ ID NO: 150880 - DNA, 465 bp, Glycine max
  unsure (1)..(465): unsure at all n locations
cccggatccttaagtcacctgcggcatgcagctttaatttaatacaaggaagcatgtcttattcctaggaatctaagttttggttttgaatgaaaaaaggcatgaatattatgacatgtttgagaggttgttattagaatttaagtttggctgccccatgaggaataccttgcacctaggtagcatggaaaatacctttcaacggtatgtatatatgtgaatatatatagcatggaaatgccttgcaaaatgttgaataaaatgccttgcaaaaagttgaataaaatgccttgcaaaatatgaatatatatagcatggaaatgccttgcaaaatgttgaataaaatgccttgcagaaagttgaataaaatgccttgcaaaatatgaatatatatagcatggaaatgccttgcanaatatgaatatatatagcatgaaaatgccttgcataatatgaatatatata

SEQ ID NO: 150881 - DNA, 434 bp, Glycine max
  unsure (1)..(434): unsure at all n locations
ggatcttaagcaccgcggctgcagctttatctgccaaattaacttatgtgtttaaaagaacctaatgattcctaattatatgggccatcaaatctatcatgtgctgacagtaattgattaacccatggatctcctcgggggcagtacacacttcggccatggcttttgctttggctaacagacgcgggaggtcttgacttccatttaaggtcaaggcgaacctatccatccacatagtcgcttcttgatgcaacgcatcaatcaccctccctcttgcttctttntcggcatacacttgtgcaaaatcctccactagcttttgttcatgggccatggactggttcaattattgccctatgatagctaacatgctttgctccgtggcttccaagtggtgagccaaactccttttggacctcgcgcaagcaactaac

SEQ ID NO: 150882 - DNA, 435 bp, Glycine max
agcttcaagaataatggcctcatcaaatcttttatttccagaaggaaattcaatcaatagacctccaatctttaatggagagggttaccactactggaaaacccgaatgcaaatttttattgaggcaatagacttaaacatttgggaagccatagaaatagggccttatatacccaccacagtagaaagaaccacaatagatggaagcacaacaatagaaaaacctagagatagatggtctgaagaggataatagatgagtacaatataatttaaaagccaaaaacataattacatctgccctgagaatggatgaatattgcagggtttcaaattgtaagagggctaaggaaatgtgggacactctacaagtaacacatgaaggcacaacagatgttaaaagatctatgataaacacatcaactcatgaatatga

SEQ ID NO: 150883 - DNA, 396 bp, Glycine max
  unsure (1)..(396): unsure at all n locations
aagacattntncgaaagatttactgatccttgntttgtttttaactaatggagcaggttaaagagttccatagaagagttggttttgaggtagcaagtgctgacaagatggctaagtcatgcatggtttattntgaaatgcatctatccctaaagataataataattacaaaagcttttaattggagntatagtatctacaaagaaactttnagaaccaggtctattgcctttttgtttgagtaactaggcntgcnngnncaataattgnngnngaaataacaaaggacctgaaagaagaatgccgagcttcaattctgagtcacccaattcctattcatgggaaattttgtctttgcatagttcttggattaagctttgcatatgaggaaaaatc

SEQ ID NO: 150884 - DNA, 475 bp, Glycine max
  unsure (1)..(475): unsure at all n locations
tcggaggggtaatccatggccaccgcggagatgatggtgtccatgatctccacggtgggctccttctcgggatccagcgtgcacacgaagatgtcaagccccggcagcttctcatccctcggcagcttctccgtcatgacgctccgcgacaccggccgccaccggaaggcttggttgaagaaccagagcaccgagagaagaagctccgctacggtcatcagaagccatggcgctgttggaggttccagtaacaagtgagttatgcggtagtaacacagcgacaacactgccactaagtggatcagtatgtgaagtctgctcagtgccaaccatgattgaaccgtttcaacgtggtacgtgaacattgccatatcttatgttatcttctaattntctatatcatatgctcattcatntatatatacataagggagctctacaanaccaacactggactgtgtactgggcacaaatt

SEQ ID NO: 150885 - DNA, 445 bp, Glycine max
  unsure (1)..(445): unsure at all n locations
gcttaaagcatacaatcagaataatctattnactcattatcttaaactnncactataaaaagaaaatatctgaatctgttattagaaaatagaatggtcttgtacacaaacaaaccaataattgagcaaaaattgaaatgagataataatcacattactacaatagtttgacaagagtctggttcggagttattgcattggagcacctaattatttttttaagntaaacttttattataaaaagnaacattttatttatcattaataattaaagataacactaagaagnnnataacactcatcaaccctattctatcaaatggtttacaatagactnatntggntgaaatgaacatatattggagacatacaaagagttcgactaagagaatgaaccttaagatagctaagaataagacacctcgcatacatgcatatgatatgc

SEQ ID NO: 150886 - DNA, 440 bp, Glycine max
  unsure (1)..(440): unsure at all n locations
aatactcaagtctaacaattaccttattaaaaatcatgatttatttaagatgacataaaaatttataaaattatcatctagttaagaaaaataacaagaaaaatgaataaatatattaagaataaaagtgaaagaaaatataaaaaattaaaaattattatttaaaaaaactgttatttaatgttttaaaaaacaatagaagttacttaaaaaaacatatgtttaccgaactgttaaacaaatttttcaaataattaaaaaactaaaaattaattaaaatgttttattaaacataacctaataacactcattaataagacactaaatttaggcttttttttacgttaatggtgtaatttttttcaaaaattaccaaaattaataccttntgaattatntatgaaaggaataaattgtcattagaaacacgatttcaaata

SEQ ID NO: 150887 - DNA, 423 bp, Glycine max
  unsure (1)..(423): unsure at all n locations
atctaacaaacaatcttctttttctacaaaancaaggatgaatctttcatatttaaacaaaaatattagtaaatgtacaatatatataaacacatagatttaagggtagttnataagaaaactattacaataaaagaataagagcaaacagtttaatcccaaaaacaactgaaattaggcacttatcaactccccccaacctagaatcttgcttgtccttaagcaaagtaaagaaaaattacaaataacaatagtataagtatgcttcaaaaattatgaacatgcattagaaagaatcaatgcccaaactaatcagaacaacaattttcaaaatgcaacaatgagaaatgaaagcacaaagatggaattcacagaaccaaaaatgagattaagatcatttagnaggatattcaaaatgcaaca

SEQ ID NO: 150888 - DNA, 473 bp, Glycine max
gctgtataaggcgcatcagtagttgatgtttgtctatgatgtcgtagcttgtccataacctaatccccaatcttaaaattcacttccctcctatggttgtcagcaaaatgcttcatgctttcatgtgccttcataagtttgtttttcaaactggcaaacacagcttccttgttggccaaaaatcatcaactgcttcaatctttgatgtacccacaatatattgtggaatgctatgaggtttcttgtcaaaggtgacttcatatggagaaacacccatgctggagtgcctagaagtgttataagaccattcatcccatatcaagggtatgccccaagaagaaagttgattgtgcaaaaatgcttgcagatattgtcgataaggtgatgaacacttttgtctggccaccagattaaaactcatacgcaacttggtcccactcagtttgaataactccttccagaagtgactaatg

SEQ ID NO: 150889 - DNA, 295 bp, Glycine max
atggaatggcaaccatactcccagaaaagattcctgcacctacatgtgcttatcatggatgagttctggggcatcccattgaacactagctgaccctgaaacataagatgcgaagccttattaatgcctgctagctacaatgccacaaggactatagcttggaatcctgacagagtagaacgatactacacattatccttggagcaataggaaagtcgctgatagaagcctccacgactcatgatgatattaaagacctgccacttactatagactacagccacaacgctaatct

SEQ ID NO: 150890 - DNA, 361 bp, Glycine max
gatgcaatactgcagacctatctttccataaatgtgtgttcttcaataaaatgttgggctactgtcaaaattaatgtgttgacaacgtcagaaatctctttatcatcgtcattagtaatgactattccattgaaatctgctatgactgcgctatagataccatatttctcttcattagcgagattattatcccaccatcctttcaattgcccagaaaatcatgccactcagatatctataatggtctcttctgaacattcgcgggaggtctggtaagtcgtggctaccacggtcatgtgttggagtgtctacacgatgtcatactccgatcctgcatctatgtaccattcatagaagtagt

SEQ ID NO: 150891 - DNA, 304 bp, Glycine max
  unsure (1)..(304): unsure at all n locations
agcttctataacacaaagagagagatgctctttgtggtgctgttgncgcatagnctgatgatcttatccaaagtatgtgtttcataagtcaagctcccttggttgnattgnatgatncaagcgcgacacattggttcatttctcgcgtctgagatgattatatggctctgcctgtggctcctttgaaattaagacttaatcgaggagacacctactagtgaggtctgaataacttctgatgagtggctgcaatgccctatcttaatctctgaagatcattncttattgatttgagtgtaccgtt

SEQ ID NO: 150892 - DNA, 484 bp, Glycine max
  unsure (1)..(484): unsure at all n locations
agaccaaagcaactcanaatctaggtatctaaaacccctcaatttagtggattttcaaggtttgagaagtgaaaatgagaatggggtaaatttggagcaaactctcacctcacacaagtctataaccttaatctaaacttgctcaaactggttttacgcctaaaattccaccgaatcaaaatttgactcctcaacacccaatttaccctagaaatggctcttgccttcactttggtcattcatttttctcctttgcacagcccaagctttcccatagtcctaaatgacatttcaaactaggattaactccctttaacctccaattaccaccaaatccagatttaacctttcaaactctcaaagcatcactcttttccactcatagcactacattctcactntctaaccctaggttaactctaccattcatctctagcagttttccataagcaatttcagcacacaaacatcacaagcatcatca

SEQ ID NO: 150893 - DNA, 342 bp, Glycine max
  unsure (1)..(342): unsure at all n locations
agctnaacgcgatcccntgggtctaaccactatgttcgaaggagcacattaatctgcgggatatgtcatcgtgcagatagtcaggagactgtcatagtcacaaaacactctggtgccatactcttacgcagagacgacctcacttactgatttgacaatctcctaggagcctcctatattattaaatgtagcatagttcgaccactgtgacaaaagaagcacatctaccttacatgattaatctggcagacgagaataccgcacctaaatcaaacgacgagattctgaaaagtcccatatagagaaccagctagttagtcatcaataaagatgtaatcatag

SEQ ID NO: 150894 - DNA, 263 bp, Glycine max
ggaatgcaagagaaccgtaaggacattgagactgccaagacctactcttactctgatatgacgcagtatgtccataagcataatagcgcagcagaactagctgctaccagatagattacatcactaactgatcatgcctgatgattaggactaaaacaactgtatgctatcagtcgacatgacttttattctttgtataagagagcgtaaacatgagatctactagtagatgttagacagtgccaacagacacatcttcagca

SEQ ID NO: 150895 - DNA, 367 bp, Glycine max
  unsure (1)..(367): unsure at all n locations
agcatgcaagcttatgcgcatatttccctacgaacgttcacttgcacaagacatcctattaactaagaaaaatgcacccatatacaatcaaagtagcttcattacctagattatttacatgtacttccaaagagtatttgttatttacatcacacacgcctncttggctaaatttacatacatgcatactcaaagcatttcagggtaccaaaaattgcacatgcgctcatctatggatttctaatacctatacatataaaaacttcatgatgaatcttgactacctacgcaataaggtgctacatttcatgcttttttttttcaagtttttgctacctaaagccacatgaaaattcaagcatatttt

SEQ ID NO: 150896 - DNA, 501 bp, Glycine max
  unsure (1)..(501): unsure at all n locations
aaactcagcttatatatatcgaggcgctcgaaattgaacaacggaaggtcttgagatattcatatggtcataacttttaactcggatgtccaattcatgcgcatcacatatagagacgctcaaaaatgaacaacggaagctctccagaagttaaaatggtcataagttttcacaaagatgtccgattcaggcttgtattatatcgagacgctcaaaattaaacatcgaaagctctcgagaaattcaaatggtcataacttttcactcggatgtccgattcaggcgcatcacatatacagacgctcgagtatgaacaaaggaagctctggagaaattcaaatggtcataaacttntacactgaggtccgattcaggcttaatatatatcgagtcgctcgaaactaaacatcggaagctctcgagacattcaaatggtcataactcttcacacggatgtccgattccgggcataatatgtcgagacgctcgaaactgaacaac

SEQ ID NO: 150897 - DNA, 425 bp, Glycine max
  unsure (1)..(425): unsure at all n locations
ggatccttaagcacctgcagctgcagctagagcaaagncatatnattaatttcttgaatncnagcaaatccattaccttttttcccattttctgttcatacttccatatgctgaccttttagaatctatgatcatgattcatgaacaccttttgagcaacttgaactaatttttttatctctgaaaagtagaatatgtttatcaaatcgagattgataccaaaccctgaaatggcaaaaaaagacattccttatttttttttttcaaaaactttaaagagtgatcatagttttgcagacaggtgaagctaaacaaatggctaaaattgcctaacgcatctcaaacaactagagtagaacagagccacttttattctcactgagtagaggttgcgttgagtaacattgaaaacaaacatgtttttt

SEQ ID NO: 150898 - DNA, 442 bp, Glycine max
ctaatgaggtgagcttagttattagatgggtgtgtgttgcttagctctagcttctcaaggaggttttctcatagaagcttctcaaggaagttttctcaagaaagcttctcaaggaagctacctagtgtataaatagaaacatgtgtaacacttgttgtaactttgatgaatgagagtcttgtgagacatacttcaaagttccacttctctccctcttttattccttcaatttcgtgctcccccctctctctttctctccctctttcttttcctccattgaagcatccttccaagcttcttatccaaggctcattttggtggtgaagctccttcttccatggcttattccctaatggatggcgcctcctttcacctcttttcctttgtcttccgctgcatctccatggtggaagatcaccattaaaggaccctcattgagctc

SEQ ID NO: 150899 - DNA, 377 bp, Glycine max
  unsure (1)..(377): unsure at all n locations
agcttagctcttcctatgtttccagcatactcccttcaggatacctccccgaagctcgctctatctcgccagactctcttacctctcactctatctctcccccacccagagtttctctctctactcactctctctctacttatctctctcttcttggcttgcccaatgatggggattactattatgaggcaaaatgtcatattcatagactatgctttcccagtcatcacatcactagtcacaatgcaaatgccagtataaggagctataatagataaattataagatacacatgattctttgcttaccacagactaataattggnagagtatatgataatatccaatagnatctttatcatatcatagagcatttt

SEQ ID NO: 150900 - DNA, 487 bp, Glycine max
  unsure (1)..(487): unsure at all n locations
aaactcaagctaactaaagcctattcacagtgttacacgccaaatcttgttttgtttatctctctatttctctctcttaaaactttgttaattacaagttttgtttgagtgtgttccattcactaaacaagcatccattcacatccctatgtatgtaatcaaataaaaataacagtaattagagaagagtaaaatgctacaaagatggcaatatttgagatagcaagttagcaatctactatttctttatcaattcgagacaacaaataagttggtgtattgataatgtagtatatgaaatagtgcaaagatgaaattccactttctaatagttcttcacttttaaacatgtctatcattagaatgcttcctaataaaaaaatgacactaacaanggtgataaagaaaatatatgaaagttaaaaaacaccttactaagttgatgtagtctttgcagttctntacatggatgacttatgctaggttc

SEQ ID NO: 150901 - DNA, 379 bp, Glycine max
  unsure (1)..(379): unsure at all n locations
agctatgaaaagnagatatgatatctaactctccatatatgnnnatatgtnncccacagagaaaaatttaatgagcttttccaacatagaattggaaaatcagntaaaattaagaaacctaaagaaattgattcacgacgactcagtaaaaatgctttagtataacatcattttgatttttaaaacttaaaaatcaaccaaaggattttttattcttatattttaaagtagaattttggtattgctaattaacaataacaagctcacatttagacataaatattatgatatattagattggaactattatatgtattctgaatgttaagacttaacctataaaaatattcttttaatggtataaagnnataatattata

SEQ ID NO: 150902 - DNA, 403 bp, Glycine max
  unsure (1)..(403): unsure at all n locations
cttgcctaattcgtctaagagctcgtcaatggtgggtatcttaaaccgatcacgcaccgcgattgcatttaaagctctgtagtccatgcaaaagtgccatgaaccatcctgcttgcgaactaggagcacagacaagaagggtcctttctagagcattgattcaacctgcgattcaatctcatgtttctggtaatgtggataacgatagggccgtacgttgactggcgcancttgcggcangaggtggatgtggtggtctgtttcgcgggccggtggcagtgaagaagggggctgaaataatgcatgaaaatgatcaattaaagattggatacgtgggtggggagacataccaatctggggtgcgtcttcgagcactgtgatgtggaaatagaccctcgtatgt

SEQ ID NO: 150903 - DNA, 299 bp, Glycine max
  unsure (1)..(299): unsure at all n locations
attacctcctcccataaatacaaacatcaatgtaaatttagagcaagcttatgcgcatatttccttacgaacgttctcttgcacaagacattctattaactaagaaaaatgcacccatatacaatcaaagcagctncgntacctagattatttacacgtacttncaaagagtattagntacttacatcacacacatgtgcttggctaaatttacatacatgcatactgcaagcatttcggagaccaaaaattggacatgcgcacatcttagtatttnctatacctattcatacaccaac

SEQ ID NO: 150904 - DNA, 427 bp, Glycine max
  unsure (1)..(427): unsure at all n locations
agcatgcaagcttataagaacaaaatagcctctatcatttccaaatatgcatgagaatnaagaagcatcaataagaatcaagccaaagttatagagcaagcaatcaaaggggcaaaacacaccaaatgattatgatgatggatggctcaaattctcacaaagagaaactcatcactttccaatagagctttcaaaactatcatgacatgtagaagataatcaaagatttcaagtcacaaaatgtcaaaaacttttattttcaaaacaattacccatttcttgaacatatcctataattcaaagaaaaacatgcaaagtcctacatgcacacagaattgacccaaaatattaaactagaaatccgacgaaactaacaacattaacaaattaccacaactaacaaaataaaaaaaccgacaaaactagc

SEQ ID NO: 150905 - DNA, 294 bp, Glycine max
  unsure (1)..(294): unsure at all n locations
ctataaaactcagcttctaccaatggctacctttataattcttgattcncctttagccttgtttccccttccttgttttgaagctcactacaagccttaaatganaaaccatgatatcaccatatctttaaggaattttggagctttggaattgttntgggaataaatgtggggggggtttttttgtttcattggataactagttttggtggctatgcttcgagatgtattttgggccatactggatgtacatcgtatattggttaaatgttggacatgctgaatgaaatgttg

SEQ ID NO: 150906 - DNA, 348 bp, Glycine max
  unsure (1)..(348): unsure at all n locations
agctaggatttcctttcagtaaggaatctttcctttctttatgagagccaacccagcccccctcattaagaactagctcatttcttcctctattgcccttagttgaatacacctttgttaggttctctatttgggtcttaaccctctcatgcaacttctttacaaactctgacctagattccccttctttatgtataaaagaagtgtcnagtgggatgggaatgaagnctaaaggtgttaaaggatcgaacccatagacaaccctcaaaggggattagcttggggttctatgaacccccctattgnaggcaaattctacatgaagaagatactcatcccaagacttat

SEQ ID NO: 150907 - DNA, 480 bp, Glycine max
  unsure (1)..(480): unsure at all n locations
tatatactcgatacatagctctctttgagacaatgattgattncttattagtctctacantaatctattacttctctcttaaaatgtgcttcagaagtgatcacaacttttaataaaaatagaataaggtgtcgtaatgggtgcaagctatgtaattgattacatcaagaatctaatcgattacattgttcttgaaattgttccagttgttgggaagaacactctaattgattgaaatgataatataatcgattacttcttccaaataatcgattacattgtatatttaattgattacatgcggatataactgttttctctataaatagacaccttgtgttctgccttttaataacatctaacaacttctgaatgtgttagaattatgagctaacattagtaaaacaaagaagagaacaaacagtgcttataaatagtgtgactcacaatttttaatctttgattatgaagatcatattg

SEQ ID NO: 150908 - DNA, 419 bp, Glycine max
agctaggagatgatgcttcaatggaagattttattgattgtgagaaagggagatgggggagcatgaaattgaaagaagaaaaaaggagagaagttgaactttaagttgagtctcacaagactctcattcatcaaagttacaacaagtgttacacatgcttctatttatagactaagtagcttccttgagaagctttctaaagataacttccttgagaagcttcttagagaaaacttccttgagaagctagagcttagctacacacacccatctaaaaactaagctcacctccttgagaagcttccatgagaagttagctacacacaccatctaaaaactaagctcacctccttgaccaaatacatgagaatacaaaaaatatgccctactacagagatctactcaaatgccctgaaata

SEQ ID NO: 150909 - DNA, 412 bp, Glycine max
  unsure (1)..(412): unsure at all n locations
ctcagctnataagtgcgggtctgggagacgaaggtcaagtgttcgcgatatgtgatgatgatgttccaagtacttcggatttggtccgaccatgccctcctgatttccagctgggaaattggcgagtggaggaacgccccggcatttacgcaacaagcataatgtaaacctttacggttttaaaagctctatagttgggcctaggctttagagttttcgttttgttaaggctttgtgtcttttgtttttgaatntataatacaaggatctttcttcatctgttcctggtctctacccattctcattcatttgcatgtttacttctttttctgaaacggcagattcgatgacgagtcccccgaaggtactaatacctgngacccgtctatcaacttcgagcaagaaatgaacc

SEQ ID NO: 150910 - DNA, 365 bp, Glycine max
  unsure (1)..(365): unsure at all n locations
agattcattctatgtacccgagggggtccacattgagtngcgagtatctntatcctcattncattgactttttatacctccttttgacgagcttaagccattttagttaagtcatttgccgcttgacttagaaataaaataaatttccaccgaacgttagatattgcttatccgntaacttcggttaatatgaattccgaccgatcggtcgcgccgtaaccacgggggaaatcagaaaaagatgttaaaaataatataatagtcactgaacatcttttagtcaaataaagcggaaaatcaatcggacgttttctctctgggatttctcattcttaatcgaattgactaaataactaaagagaaac

SEQ ID NO: 150911 - DNA, 406 bp, Glycine max
  unsure (1)..(406): unsure at all n locations
tctanacacaccacgaggaagcttcttgaggaagcctcttaatgaaacttcttgaggaagctacatgagcttcttctgtaaaaacgtttcccagccttcgttaaccagtggatcttactgaaacttggtctgtagcttcacaagacacttgtacaccatctgaccgttgggatctttaagaagatgtctggagtgttctcgaaacttccgttcccgagagcatttcttatttaagcatttcagcctttgcttttgtgtagcttaagaaatatcccatttcttctcctttctttcttccaaagccatttctaacgtcccaagcactttcttcatcacccacagccaccattctccaccgcaaaccatacgtgttgtccgttgcaaccccatactgagaggaaccctt

SEQ ID NO: 150912 - DNA, 436 bp, Glycine max
  unsure (1)..(436): unsure at all n locations
agcttgtnctccacctgtggcccgacagatttcattcttataaagcgnncctcttcatgtggagagcctgcagcaagcaacgactattcatggtagccaccagtggtcgtgggtggaggaagaggattttctaaggtagttagggcggaattttgaaagtgagacgcgtgatatcgagtttttcatgctaaagaacgtatttataatctagagatctcgcttagcaagctcatctcactaatcgagttgcaattgcgcttagcgagcttgtctcactaagcgtgatatccaaaagtgtnatttagtaaatcctaatggtcaaagcgtgaagatgtgggttttgatcctacagcccaaatttgaaagcaatccaacagtttacgaattcaagattacagngttactaaaacaaatttagataaaacttgaaatccac

SEQ ID NO: 150913 - DNA, 498 bp, Glycine max
  unsure (1)..(498): unsure at all n locations
tacgtgacactataaatctcagcttcctaatatccaagcaaatcaattccaactatctgaaactaccctcaaccaagaaaacagagtagaggcagaaaaatctgcccataacacattcacatattacagctttccttactcaaataccccagtaacattctcttcgttccgactcgttcaccgttggatcgacttgaaaattatactggagtttcctagtacataattctacattttaaccgttgggatctgctacaaaatgtccagaacccaatatgtactacctttcccataaccagcaatgcacaagcattttctgcacatgttgaaaaattctgctgcacaaatatgacagctttttgctgcacaatntggcatatttcgaaatccatcttacccacatccaattttgctcacattggatcctacaagtcctaaatcatgtataaatcatgtttaaaccaaaaacaagtttcagaccaaggcaattcanaatct

SEQ ID NO: 150914 - DNA, 378 bp, Glycine max
  unsure (1)..(378): unsure at all n locations
agcatgcaagctttaaatnaagcaaacagacaaaaatatacttgttctttgcttgncatgaaagagaagataaaaaaaagatcaaagagagtgaaaagtntgactatctgaaaaagatgaaagagatatgaaatgagaaaatagaaaataatagcgtagtaaaatatttcgtttttaaaaatcatttgtacaatggcaatcttattcatgagaacttgnattaaataatattcaattttggtatatatatatatattccatttgattttgattttagtattttttaaaaaaatttaacaggcataattaattatggagagatagaatcgaatatcattagattttggntaccagcatattattcaattttatgtactt

SEQ ID NO: 150915 - DNA, 440 bp, Glycine max
  unsure (1)..(440): unsure at all n locations
catcactataacccttcagtttcaattcagagtctccataaatgaggaattggtctttagttcttcttaagtacttaagtatggtcttaaccactttccaatgttcctcaccagggtttgcttgatatcgactagttacacctagtatataagcgacatcaggacgtgtacaagtcatggtgtacatgatagctcccactgcactagcatatggtactctactcatgcgttctctttcttcaggacttgttggacaattctccctactaagagtaattccaacacctacaggcaaatagcctcatttggaattatccatgttatatctctttaagatagtatcaatgtacatagatngngagagtccaagcaaccttttagatctatctctataaatctntatacctagaatattgactgcttcntccanatccttcatg

SEQ ID NO: 150916 - DNA, 332 bp, Glycine max
  unsure (1)..(332): unsure at all n locations
agctntactaagctagagctcggcttgactaattatgtaaagctagagcttggctcattacctggcataagctnttntttaaagctcggcttgacttacataaaagnttggcttggcccacgagcttatttaaaagcttacttaaagatcgctttaattaattaattattntaaaacctagtgaaatattaactaaaaaaataaatntataaaattntgnataagnaatgtacaaatccaaaaataattgataaaaaaaatcaatttgaattcaagncgntaaagcacaaagnatatcaaaagaaaataaaaagggcataatattaaaaaat

SEQ ID NO: 150917 - DNA, 404 bp, Glycine max
  unsure (1)..(404): unsure at all n locations
tctcttaactattaacgtagctgtaacattttatcgcattcttctattacgtacaaagaagcctaaagagagcataagtttttcctcccttcttctttgttgttccttttgaatctatctgtgctcagctgcaactcaagacaagatgacctanaatcgacctctagtagttagagctatgtttagaaacccattgcttcctccctcaatgtatgttgaatccaaggtttaaaaaaatagtattgtgatttgttgagtttttttggactctctccttatataaagtaaaggctcaaatganaagacttattntgtctcatttatttaagtaaaaaggcccaaaaaagtctattttgagaaaaaaaaaactagttacaaattattaagagagatgagaaaaaata

SEQ ID NO: 150918 - DNA, 429 bp, Glycine max
  unsure (1)..(429): unsure at all n locations
ggatgtaggcgattcgcataaggaatgtcatccgcagtagagataggttagaacttaattgatccgcaataagacatagttgttccgcgataaaaatttacggatcaactcgatccacaagtagcatacggatcatgttaatgcctcccaaaggagcattacggattatccaatcataagggaaaccaagtaataccctcttctggatctttgtggaccttcatttctattgctccatctgtcaagccactagaccaagtctaatttgataactccactttctcaacacattacttattatatctatgacttgctctttctctcgtagttatcttcttccaatatctctcttgcgtcacctagattcaccatanaatggagtacagacgtaagtgctataatttacatatttcttcatttttttcactt

SEQ ID NO: 150919 - DNA, 361 bp, Glycine max
  unsure (1)..(361): unsure at all n locations
agcttctaatgcatnagattagatacatagtgattnatggggaccttatagaaatccttcttcttgaggagcttcatatttccttacaataggcgatgattgcgcatgtgcagnttgggttttttgttgattgataagaaagaagtatcaccggcactgataaatttttttctatggcggataggcaatataacaaaaaggttaaaagtgtgagaagtgataatggaacataattcagttgcatgaaaaaatattttcttgagcatgggatagttttgcaaaattcttgtacaagatcacctcaacaatacaacagggtcgaaagaaagcattgacatatcctcaatgtggcgcaagcttt

SEQ ID NO: 150920 - DNA, 423 bp, Glycine max
taaagtatgcccgagtcattcatccctatgagatgttgtcgaagtattggcgatcagaattgccattccttggattatagggttgaaccaagctcatgcttttacaaaaaggttcatcaagtcaagttgaaatatggaagtaaccgtcttgcaaaattggggcaaaagatgaattgagtcacatcactgcttcgtctactgccaaacatatttaggattattgatgtccttgttacttccagtttcaccttgacaaagatgtcatggaccatgttgaaaatctaaattgattcaaccccatatcttgcgtaaaaattcgcaatacttcaactgtacatcattcgcatgcatccatgcttttcattggttgcattgctcgttgcattctttcctttgaaaataaaataaaatgaacttaatcat

SEQ ID NO: 150921 - DNA, 330 bp, Glycine max
  unsure (1)..(330): unsure at all n locations
atcagatctgggacgacccaccttggagctatgatattactactttaaatcgcgtaaatttaaatttttaaatgaaaactccattaattttcttatgaaaaatgagattaaatttttcgcgatatacattcacgaaacaacgtacagntgagtgtgtgagtgtgtgtgtattaactcaatacacatcattcacataacggaaagtaaatnagnncatacatataattaaatatgtgatttacatcctcaactcaaaaagtattatagaaccaactacagaggagttgattaacaaaatacaactatagcccanaataatctcaatgtcat

SEQ ID NO: 150922 - DNA, 509 bp, Glycine max
  unsure (1)..(509): unsure at all n locations
cattcgtgacactttaaactcagcttacaagcaagcttccatcgcatgtcacgagatagacactgtcatcttccatttccattacctgtttactaaaaatagctaaaatttctattggtccaaattgtttccaatagttagactgtactaagaccttcagcacgtcatcgttagttttcagcttaataatttcaaatttgataactttgtctaaatactcaaaatgacctggttgtcaaaaaaacaatcgtcttaccatttgtgattcatgaataccatgagggggaatcccttgaggtgcaactttttttatcaaatccttcagttcatcgatggtacatcttgaagcnaatgtcaatttttttggattntttcctatgaatgcgtaacctacaaagttgttttggcgtgacatgttccacctcccattgtaataaagaaggacatcataagtangggtcatagtgcctttcacataagttaatatttcatctggtgttctaccaatg

SEQ ID NO: 150923 - DNA, 314 bp, Glycine max
  unsure (1)..(314): unsure at all n locations
atgctaacttaacataatncacatcatttttccaatcattgagtaacatcactagtcctaaagatttaatcacaaaatcatattctataccttcacattaatcacatgttcataacaaaacatctcaagtacaacacaacatctctcacacacaattcattacccacaatcacgtagcaagtcacaatgatcattacacagacgttatgcaacatatatactaagactcaatcctatattgaatgtgagatcttgncagagaaaaataacactaaggcacctaagagtacataataaaatacaccacacaatgg

SEQ ID NO: 150924 - DNA, 470 bp, Glycine max
  unsure (1)..(470): unsure at all n locations
ntctacttcaatgtgaactcatctntgttagatggatttttgtaatagtccatcatttcctgatgccataggtctactgatccaatttccattgtgcaatattcgttaatggttgattcaaatgccccatcttttagcttcttgtatctagaggcgtgttaggctagatgattagcctcatcattttcccctccagaaacatgttctatggttatatccacaaaacaattaagtaatcgtttagccgattatagaactctgctaaggcgattgggttagatttatagtctcccttcatatgttgaatcaccaattgggaatgcccataaatctgtgtgcatttcatatccttttgtaataatagctatacaccccatattaatgctntatactctgcttgatngttagaatattcaagatcaatnggcctagaatatctncatactcttctctgtggctaatggtggtac

SEQ ID NO: 150925 - DNA, 372 bp, Glycine max
  unsure (1)..(372): unsure at all n locations
agcttcttatccaaagctcatcttggaggtgtatctctntnntnncatggctnattccttaatggatggcgcctcctctcacctcttctcctttgtcttccgctgcatctccatggagaaaaatcaccattgaaagacctcattgaagctcaaagatccagcctccatagaagctccacaagcaagcttccatcaagaggtatcagagcacaagagcttcaagtaagagctccttaaacctccattaattttttttctttgccttctcttccattggtgnttcttaatttttctccatgtatctcctcacatgtcttggtctaaatgtagnaacatgattctttagagtttccaccgattaaacttgctata

SEQ ID NO: 150926 - DNA, 353 bp, Glycine max
  unsure (1)..(353): unsure at all n locations
tctatagaaagtgtgttcctattttctctacaatngcatcttctctcaatgagctggtgaagaagaatgtggcatttacctgaggtgaaaaacaagagcaagcctttgctttgctcaaataaaagcttactaaggcacttgttctagctcttcctgactnttctaaaacttttgagctanaatgtgatgcctctggagtaggagttggagctgtattgttacaaggtgagcaccctattgcttattttagtgaaaacttcatagtgccacccttcactaccccacctatgataaagagctttatgccttaataagagcccttccaaaattgggaacattttaccttgttccag

SEQ ID NO: 150927 - DNA, 352 bp, Glycine max
  unsure (1)..(352): unsure at all n locations
agctagcgcgatccatgaaattccgtaatgtggcggatattgaaaagatgagtttagcgcaatccgtaagtttccgtaacttcttcgaaacctaaaaaagagtaaatacataatccgtaaggattcgtaaccttgcggaaagaaaataagtatcgttacgaaattcgtaaagtttcgtaacgttacggaaaaagaattaccaaaaaaatagagagggggatgcatttagtaaaaaaaaaggggtgcaaatagcaaccaggcccacttgggccctccagaagattcctccagaaagctgnagcttctggaggaagcaaccttgctcgcctgagcgagctgggcggcaagcttc

SEQ ID NO: 150928 - DNA, 443 bp, Glycine max
  unsure (1)..(443): unsure at all n locations
cacccagctcgcccaggcgagcagggttgcttcctccagaagcaactgtcttctggaggaattatctggagggcccaagtgggcctggttgctatttgcacccccatttttactaagtacaccccctgcctttntttggtgattcctttttcgtaaagttacggaaacttacgaatttcgtaacgatacttgttttcttttcgtaatgttacggaaccttgcggattacataatcatccccttttttgacttacggaatgttacggaacctcactaattgtgcatcgatgcttccatttgatttccggtgtgtcacggaaccttacggattgtgcatcaatattttctgttgttttctggcatgtcctggaatatcacgaattgcctaatgatgggtgccaagcacctaacaaggaccaaacaaaagtcgcatgtcatcaagc

SEQ ID NO: 150929 - DNA, 378 bp, Glycine max
  unsure (1)..(378): unsure at all n locations
agcttccaagagtagaagatgcaggagactacatctccagagnnaattntgcccgaccctaagagaccattagaagagtattgcaatgcaagcgggcaaagctagaagagagtgttaatgcaagaaggaaaagtagtggcttatgcttcacgccaattgcatcctcatgaagttaactatccgacccatgactaggaactagcagcggaggtctttgctttaaagatttggaggcattatttatacggtacccgttttagaagttttcagagatcacaagagtctcaaatacttgttcgatcataaggaactcaatatgaggcaacgaagatggatggagttcctcaaagattataattttggtctttcctaccatcc

SEQ ID NO: 150930 - DNA, 503 bp, Glycine max
  unsure (1)..(503): unsure at all n locations
aagcttgagctaatcattgctgccncacatagctgctcggaatgtatctcggccttattcttccttgcgagccctcttggtttcttgttcaagggctttcacggtagccgcattttcctctcgtaactcagcacactctttccggatgcttgtagcggctaacttgaatttttctttagcgagtcttgcctttcctagctctgattttagagcttagacttcttcatcctcttccggagcttcgaagttctcctcgttaataattttcaacttggagagccaatctaaccctcgtgtatgaactcttagccattcatgataaccaccgatgcctgttagacaagtggtctcagatatcttaagaagggggggttgaattaagatattacaaactatttccccaataanattctatttactttctattcaattacaaattcccttaacaatgaagttcttatataatgattcanatagaacaatctcaatataaatataaaaca

SEQ ID NO: 150931 - DNA, 342 bp, Glycine max
  unsure (1)..(342): unsure at all n locations
catatnnagattgcccatgtagaccttctttctcctttaaaaagtcaccttggtgtaaaaataatcttagntagtgtgtaaatcaaattcaattagcatgaaagaaaaaacaaggaatatttttttaaaaaaattttattcttgctatcttaatgctttgtgttgccatataggcaactaagtcaagatccattgatttaccctgcaatacacaattaagcaaacatttaacgttctccaaatatcatccaatgtacatctaagatgtaccaactatttatttacttttacctttgtcttgttttgcagctagtgcattaattctagatcctccacctttat

SEQ ID NO: 150932 - DNA, 480 bp, Glycine max
  unsure (1)..(480): unsure at all n locations
gtctattacatgtaatcagcagtcaatgtttgcttgattgtatataaatactatatcttaagaaatacacatgtagatggcatccttaggacttcatgcagctgatgtttgtcgccagtttcatcatccaccacccttaccttctctggcttctcacgtttattgttgttaaacccatatttatgtcttcttcccttcatgtcttgttttatcacaactttagccgaatctcctatcttcatcatagttgaatctcctgtcttattctccaatgacacactttcatggcctgtatctctttttttcatatgttctagtgcttcagcttcagaatgcatagtgggtaactccactagcatttctgagtttaattcctggatttcagatatggctgtagaggaggttaggtctattgngagaaaattcacttagtgcagacctaatggtagtgtcatgagcaagcttgacagggttttctta

SEQ ID NO: 150933 - DNA, 304 bp, Glycine max
  unsure (1)..(304): unsure at all n locations
tgataaaatnaacttagaaagcacaaaaatatatcaggaatatttctttttataatgggttaatatcttaaaaacactacttaacattctttttctatatcaaattgaaatccatataataatactttaatcatgaacaaaggagatcagattataaaaataataatggaattaaaaaataattaagatatgatttcattagctaaatcgattaaattgttacatgggacaccaaaaaattaaatttaacttttaaaccattgccctagnagaatatggctgatattcaaatcacaccttgacc

SEQ ID NO: 150934 - DNA, 417 bp, Glycine max
  unsure (1)..(417): unsure at all n locations
tcaatctctttntgactctcanagcctgccaagaatgtatacatatccttttccagtggaaaaggcacatcaacctgtatatcataacatgcagatacagctggagaatgtccagaaagcttgatgttatgctccatatgtataggttgtggttgtgtcaaatgctgtgctaacttctgagaaaccatggtgaaatccatcttctcttccccaaacaccatttgtagagaaggatcacatatgaagaatgaagggtcatttgggatctgtagcttcctggacttcacgtagttagaaagagtagctattattcttgggcgagtctctacctcaatccctaaaagtntagacagtggtggtgaaaccataaacttgtcaggtgtataattcatttctattgcaatcactgcagtaaat

SEQ ID NO: 150935 - DNA, 314 bp, Glycine max
  unsure (1)..(314): unsure at all n locations
atgaagcatgcaagctagncgctagaactgacccatcaactgtcctttctctntcagaccggcgactcctaagctcttgaccttgacatgatagaacctctttntaagagaaagtgtctgactcaatcccatgttttactaaagagaaacaaatcccagagcgaatcaagactccgacatttatcatgggtggaatggatgaatgcatgaagaaatgcgtatggcacagattcattttacgaatacgagagcccgggagattagcctcttcttagatacgacattcgagcagcatggtgcccgatgtatgcatt

SEQ ID NO: 150936 - DNA, 443 bp, Glycine max
  unsure (1)..(443): unsure at all n locations
tcagatccctcttgttggactaggctcaatctttatagtcctcctaggcttagactaacttagactaagcttcgtccttagatccctcttgctggactagacttagcttggatagcttacgaaagtctagactgatttatcctaagctttgtgcttagatccctcttggcggactagacatacaccatacaacgttattgtcacaacatatttaaaaccaaaacttaatccgcactccctcatttaagactaagttggaattctgcttcattcaacttctgaggaaacaatacattgtccaatgctaaagtcacctaactaggcacacaaacggatgatcagaccaanaacgtactatatttaagcactgaacaaagcattgaacacaagaaacacacatcattcgatattacagtagtacatcagctgttcttagaaatccc

SEQ ID NO: 150937 - DNA, 481 bp, Glycine max
  unsure (1)..(481): unsure at all n locations
gacatcaacaatggggtctatggaatcatgaacgcaatgattatatcgagccaacattggcatgggccttcttgatttgcttgctcacgtcctcatggactatgtttaactgaaagattactattctacacaaaatgtaatgcatcaacatactcccagtaagacagatcatactttgttgatctttgatgtttggccatcgatttcttctgagcaccttgtttttaccttttctagaggagcacgcataaattttagattagggtaggcaattttccgaagtttactctttagagtaactttgccacaaacatcaagctcttcacaccaccttgatatgagtttcatctcttcagttatgctgaattcangcttagataacccttggtctgagaaactacatatggattacaccgagaggtatgataccaacaacatatatagcgtattctcatacacactgaagatcatgagtagttct

SEQ ID NO: 150938 - DNA, 235 bp, Glycine max
  unsure (1)..(235): unsure at all n locations
agctcaacanaattgaagtgcattgattgatttgacataaaagcnatagaaaaaaaaggtgtaaataaagctatgaatcatgaactcgtagcgggctgcacacatacatnaagactagcgggcaaacccttcaaacttgcttgttatgcnntcaatccatcaacccactttttataattatgtaagataaagactaatcactacaatgttgctcggttcaagagatggaaatccg

SEQ ID NO: 150939 - DNA, 490 bp, Glycine max
  unsure (1)..(490): unsure at all n locations
agacattctngcaaaggtttatgctgggtcanaaatgttgaagagagtcaacatgcataccttgaagcaacaattcgagctactacagatgaatgagaaagaaggtataacaaaatacctaaatcgtgtgctgggcctgtcaaatcagatgatggcttgtggtgaaaacatgaaggattaagatcttgtagaaaaggttataagaaccttgagctcaagatttgattatgtggttgctgcaatagaagaatctaaggatttcatagaaatgaaattgaatgagcttcaatgctctcttgaagcacatgagcaaagaatcatagaaaaggacacagataggtcatctgaacaggccttactcactcagagtggtagaagatacaaaattggctcatgcagtagtaaagggaaggtcaaatcgaatagccacatatcgaaaggaacaagagatgatggcactaatgattcaagtgttgatgaaaccaatcat

SEQ ID NO: 150940 - DNA, 303 bp, Glycine max
  unsure (1)..(303): unsure at all n locations
cattatgnnaatacatncatgggtaggantggaatactggggacgagaattatgatgcaatgttagaaggggaactttgattgagtattccttaagcacttcttgagcacattaatgatattattatcgctgacaaaaaaaacaaataagaggaaagaaaaattaatgtcttaatttattttcattttcttccctatgaaacaatgtaaaaatcatcttatattcttttttaatcaataagattaaagagtattgattaaagagccgtcagaaagaaaatggntatcaattaaaaaaataata

SEQ ID NO: 150941 - DNA, 473 bp, Glycine max
  unsure (1)..(473): unsure at all n locations
nggataggggtatagtggagagtggacttatctttgctgtgtttgtggtaatcaatcaacttcctaatataatctttgagttaattctagaattcttcctcttcattgatgctaaaagttggtatggtgctattttcaggtatttaattgtcccataagatcagattcagccactgttttagctgaattgaaagaatcctcgcacgacttagtaagtgcggctgtcaaattagcttctcttacaagaatacttaagtactttccttattgcaaaagaatttttcttagatctaatgaaaacatcagcatttatgagtaaatgagctgaatatagcttcattcattctactttaggagctaaatgtccaagagtatatatataaaggttgaaaanttgctatttattttcacgaatgtttaattaatatcataattatgtatgttcaagcactntggagctgagcataatggga

SEQ ID NO: 150942 - DNA, 141 bp, Glycine max
  unsure (1)..(141): unsure at all n locations
agctagaagcttctctaagaagctacatgtatctttctcggnnaaaatgcttcccagccttcgnttaccataggatcttctcaaaatttttgctgcagcttcacaagacaattttccataatctgaccgnagggatttttt

SEQ ID NO: 150943 - DNA, 269 bp, Glycine max
  unsure (1)..(269): unsure at all n locations
taacgaaagnncatgccatagagaattgatccaaaacttcaagtacttcactctatttgagaggtaaattattgaaattattatgcagcaattttttgcagaattttggagtattgtgagataaatattgaatcaaatggggctttaattnaaatcacatagancacattcttgaggccgaatttctcgagcttgaattacccggaggatgcatcttaatataataagggcatatgcatacatgtggtccatatatagataacattatg

SEQ ID NO: 150944 - DNA, 374 bp, Glycine max
tcatacaaaaaaccaccaagggtcttccagaagaaaagcatacaggcatcaaagggaaaaaccaaacctaaaaatcccaaagctacattcccagactacattgagaaatcacttgacttacttggaaaaaacatcaataaccactgataggtaaccaatgattcccacacttttttttccttttaattgaataaaatatcattccggaacctcacatgaactccaaaaaatccctattgaccaggttttttttttttttctttaacgattaaaacctaaattaaacacttttcaattggcagtgaacaagaacaaatcgacccggcctgcctaatacaatcgaaaaaaaatagtttcaattaaaaacattgaaa

SEQ ID NO: 150945 - DNA, 374 bp, Glycine max
  unsure (1)..(374): unsure at all n locations
agcttctctctaaatntaaaacatgcaacaaacattgccatgaaggtacaagttgatgattcatggctatggcatcgaagatttggccacttcaacacacatgccttgaagttgntacacgagaagaacatgatgatagatcttccaagcataaatgagaacaatgaagtgtgtgaaggatgtctccttgagaaacaacatcgatttcctttctcaacaagcggagcatggagagcgaaagatctattggagctgatacatacagacgtttgaggaccaatgatgacgccatcacatgagaacaacagggacttcatactcttcattgatgacttctctagaatgacatgggtatattttctaaaaaaaaaaat

SEQ ID NO: 150946 - DNA, 276 bp, Glycine max
  unsure (1)..(276): unsure at all n locations
tggagaggatgcttatatggaggataagaaagagagaggtgggagcacganattgaaggaggaaaaagggagaagaagtgaactttgagttgtgtctcacaagactctcattcctcaaagttacaacaagtgttacacatgcttctatttatagactaggtagcttccttgagaagctntcttgagaaaacttccttgtgaagcttctttgagaaaacttccttgagaaagctagagctagctacacacacccatctanaaactaagctcacctcc

SEQ ID NO: 150947 - DNA, 305 bp, Glycine max
  unsure (1)..(305): unsure at all n locations
agcatgcaagctagagctataatagnnttattcttggtttgagctaagacattaatcnccaaagatgttaaaatttaatgtgtnaacataaatgaacacatgagcatgtaccagacattgagatgcaatcctccctaagaaaggaccaatcactaaatccataagcaagatgctccaagaagatagagctagagctgctaaagaaagccctaagattctcatgaacctcaaggtagatttctgagcccatgggccaacgntggatccaattatctttagacatattagactaagatgtcattata

SEQ ID NO: 150948 - DNA, 236 bp, Glycine max
  unsure (1)..(236): unsure at all n locations
tctggaaaaattgatatntaaattatatcaatggtgagtgtatcaacctgtggcgtctgtggtatcatgtnttgtataatagccataaaagctataacctactangtaggccatccatgtacatagcaagtatcattttctgttttctcttttacttacatatacataataaaataagattgaaaaataaaacaggtagtcacctggttagcaattcgaacatgagaaatacattc

SEQ ID NO: 150949 - DNA, 461 bp, Glycine max
  unsure (1)..(461): unsure at all n locations
ttaatcacctgaagctgcagcttattcagacaaagatattaagtattctatttgatgatcaagacagnctctagagtcttagaaaaggtatattaaataagaaaggaattccaattgaagtagtaaaatgtcttgccaagaattttaagttaaaaagtctttttcaacaaatttactctctgagaatcgattaccagaagatgtaatcgattaccagaggccaaaactgatttacagcagctattaatatttgaattcaaagtttgcactttgtaatcgattacacatatatgagaatcgattaccagcagtttctgaaagttttaattcaaattttaaagcttgtaatcgattacacacatatttgaatcgattactagaagagtttttcagaanacattctcaacagncacatctttntgagtggctcttgaatggctatcataagcctatatatatgt

SEQ ID NO: 150950 - DNA, 495 bp, Glycine max
  unsure (1)..(495): unsure at all n locations
tccttgttgcaaccagtttgctgaaacaaatgaacaaaatatgatttattaacattctaaacatgaaaaggaaaaatatgaaaaaaggtgaaacaaataacaatatacttaaaagttataccttaagaagttccaatattagtagtctcaatacttgcagttccaatacttacagtcccaatgttagccttaaagacaaaccgaacaactctaaaagttttgatcggtattgataagtttagttcacttttgatcggatctataaatttaaacctgtgatccaacctgtacataaatagttttgatcggttcgattcaattttgagccaaatacataaatgacccaactcatactttctagatcgatttgggttaacttaggttcgtgggtgacccgtaccggtgaatgtaacatcccattcttcgtaaataaattnaagatgtttattaanaataacagagtctagaaaaaaatcgttttataataaataaata

SEQ ID NO: 150951 - DNA, 411 bp, Glycine max
  unsure (1)..(411): unsure at all n locations
agctntcttaagataacttccttgagaagcttctttgagacaactnncttgagaagctagagcttagctacacacacccatctaaaaactaagctcacctctttgagaagcttccttgagaagctagagcttagctacacacacccatctaaaaactaagctcacctccttgacaaaatacatgaaaatacaaaaaaaaaagtccctactacaaagactactcaaaatgctctgaaatacaaggctaaaaccctatactacttgaatggcaaaaatacaaggcccaaaagaaagaaaaacctattctaatatttacaaagaagagaggatccaaccttgacccatgggctcaaaaatctaccctaaagttcatgagaaccctaaagccttctttagtagctctagcccaag

SEQ ID NO: 150952 - DNA, 501 bp, Glycine max
  unsure (1)..(501): unsure at all n locations
nggggaattatattaatattntatatgaattttttaaggtagggtataatttttttaaaaaaaaataaatacatactgggttatacgggtcaattagtgatccactgatttgaccattgacccagtgactcactgattttactaggtcgataatcgattcagtatttaaaactatgttgatgaagctttgaaagaaaataacgtaattttcacaaacaagcatgattagatgatatcaacatattttgtaaaaacactttttcaaaacaaaataaaattcaaactattggttaattaaaacaatacaaataggaatacaagaacgcaaataatttatattggttcgtctctatcattagactacatccaattcttgacaatgagagttttataggcttgaaaaaatacatgttatgtggaagtttcaattttaaattnttaattattggctacaacttttggctntgcatatncttcttcttctcatcccacacaaaataa

SEQ ID NO: 150953 - DNA, 411 bp, Glycine max
  unsure (1)..(411): unsure at all n locations
tngattgtgagttgattntagccttagtttcactttgattattagtcaattcattcaaggaaactttcaaagaaaaacgtccgattgattctttttttattattttatccaaagatattttgattattttattattattntgccctttttggattaaaacatggttacgacttgaatgatattattttaacaaagattaaatgatattacaactcacatgatcggtggaaatttatcttattatttattaggcgagaaaacggcttaaataaatggttaaagcatgtcaaaagggggtacggaaaacaaacgaagataaaataaaagtgcgcgaaacaagtggggaccactaatggcacatataatgaattgaaagatccgatgtcgagaacttactggttgaagatcaaa

SEQ ID NO: 150954 - DNA, 402 bp, Glycine max
  unsure (1)..(402): unsure at all n locations
agcttcgnctctntctctctgtctaacaactatgtttctcactaacagagacttagatgntaagagaaaactcttcaagaattcctatagacattattctccccctctatgtctctaactctctcttttcttttctttgcaatcaccttttaaatcttccttcacaactgggttagttatttagtttctaaaccttattcctcttcaattcttcccttccttgtgcattttgaccaattcataaggtttttgctttctcttgtatgtttcagagagtagacatttgccgatgaagataatttggagcattacgctaagtatctcaaccaatcgctcatcacatttggnttcccagcttcgctcgatctcttcacaaatcaccccatgagaattgaactatcc

SEQ ID NO: 150955 - DNA, 488 bp, Glycine max
  unsure (1)..(488): unsure at all n locations
tgtcacgatcagcaccgacattntcgtgttgtttcttcgaagacgctcgtttagaagaagaagaagaagcagtgcacgaactcacgagtttaagctttctctccttcgtttgtttgatttctgttctagtcgcaaggagtgaggagatttatgagcattcaaatttcggtgtaatgtaaaagaacagaanaagaaaactcgatcaattntagggtcattctacttttaaattactttcttccctgtttaaaaaatattacatttctgcctaaaaaaaattaaaagtacaaaaagagcatggtacagttatttcggaaacaaaaaggagaaaaaaggggtcattctacttttaaattactttcttccctgnttaagagcttcacaaattttgttgagaggggacaaaataattagtgatattcatatattcaaaattacatataantggattattnntatactcgatattattggtggcattaatataa

SEQ ID NO: 150956 - DNA, 186 bp, Glycine max
  unsure (1)..(186): unsure at all n locations
cctgaagcntgcaagcttgacacgcgccgaaggcgcaatttttgncccccatcgaaggggaaggcgcgctggcgcatttggaggtagaaacagaaggcatctatggggtgggagcaacggatgtaggcggtgtagtcgacagagtccttgagcgagtggaggattcggtctaacagctagccggcg

SEQ ID NO: 150957 - DNA, 356 bp, Glycine max
  unsure (1)..(356): unsure at all n locations
catgcttanttttcaataacttatcagtttgttcaaagggaataacgcccactctgacaacaaaaaagagagagaattttgttataaaactgacaaaataaatattaagttactaaatttgaagagccgacagacaagtactggttttaaaacatgaggtgagaagaaccacttatcggaagtgtatataaagaaatgtgtttgacgggatgatgttaatatttctcttataatttaatagtaaaataattttataaattaatgttaatgccatggttaatttatgatactttcttttaacaataaaattatatttattatctttatgaattaatttatcatcatatctatatttt

SEQ ID NO: 150958 - DNA, 395 bp, Glycine max
  unsure (1)..(395): unsure at all n locations
agctttgcataccccaaagatccattaagttattactagagaaagatgagcctgatggtgggctcatgggccactttgggatagacacgacccttgncttactcaaagaaaagttntattggccccatatgaagaaagatgtccataagcattgcactaagtgtgtggctagtttacaagccaagtctaaggagatgcctcatgggctatacacactcttacccatcccatctgcaccttgggtagacattagtatggactttagccttgggcttcctagaacccaaagaggagtagactctatctttagggaggaggataggtttagcaagatggcacactttataccatgccacaaagaggatgatgcttcccacatctcataactctttttc

SEQ ID NO: 150959 - DNA, 395 bp, Glycine max
  unsure (1)..(395): unsure at all n locations
tgagatngatcaacggagagtctcgagttatacaaatgtgtcataattttcactcacaagtctgattcgggcgccaaacatatcgagacgcttataattgaacaacggaagctatcgagaaattcaaatggccatacacattcactcggatgtctgattaagtcacataatatatcgagacgcttgaaattgaacaacggaagctgtcaagaaattgaaatgctcataacttttcactcggatgtgcgattcaggcgcataatatgtctagacgctcgaaattgatcaacggaagctctagagaattcaagagggcataattttttacacggatgtctgactcaaggacataatatatcgagatgcttgaaatttatcaaccgacgctcttgaga

SEQ ID NO: 150960 - DNA, 452 bp, Glycine max
  unsure (1)..(452): unsure at all n locations
cttagattcgacctgaagcatgcgagctnnnatatagtgcatctgaagatcattatttataacnaacatgaatagctncagccaatgccatgccacaagctanttacactatttcaagatatcatcacaaatatttaacttagatggatcttaatctatacgatcaccaagatgataaatttaaaatgatagcagatgactataggatatctagctgctgatagcctgatactaatacatnatggttagaaataatggagaagcatagtaagcataattngacaaggatctaccatgtattacactctatacctgagattagacttatatgcaatgcagcatagataatcagcaaagaatattcattctgactgggtagctgatctattagcaaaacaactacaatctttatctcacatgatccagtgngtaactatagctgagcttaaacc

SEQ ID NO: 150961 - DNA, 452 bp, Glycine max
taactatttatatctataaattaggggtggcttattcctttactctcatatttgttcttgtagcgccctaaaggatgaagttttttttattccgttgtattgtgaaataataatgataacggatgcgtaacactgatattaatattctattaagtgagctatgaatagtcacgatatcaaggaggagcttaagtgttctgttagacaaattttatgttattaattattttgaacataagaatttgtaattggtttatcagatatttttataacttgactaattaatagatggtcaatggtattgtatactaaaaagttatctttatatgtcttaaatctaaataaaaatatttataaaacttaaaagtctcacatcttatataaagaccaagtatttaaatatgagctaagatagaactttggcttcttatatatatgatttaaggtctaat

SEQ ID NO: 150962 - DNA, 333 bp, Glycine max
  unsure (1)..(333): unsure at all n locations
agctaggctccacagctatctaggtctgtttcttgnnnccgcttatnntactaatacttgtggaaacagaatcaaaagatgagtatagcaacttctttgacagaatagnctttcctgaaaatcctatttcatggtggagacagaaagtagataacaaaagaaagtgaacaagatccaaagccaacacagcagccaaaattctgaagctgatgatcttcatgagaaattgagaatggnttcagcaagaagcagaggaagatgcaagagtactaataattttgaagagntggatcaaggttatatatgaaaatgcatgagcatgctttatgcacg

SEQ ID NO: 150963 - DNA, 467 bp, Glycine max
  unsure (1)..(467): unsure at all n locations
ctgtggttatttctntaagcccttatatttggcttttattgcttcatacattggttatggttgtcttggatgtttaccattttgttttgctgtgtgtttggttattttagactttgttntggatgattaagacttgcttggtttattctatggatttaatcaatttatggatgaattgtgctatgattttgaagttgccttagttcctttctctaggcatttttggctttttgatgttgccaaagggggagagaacaagggtagaatttatcatgaacttaggcataaattccaatcttaagggggagtaagggttgtgagcacgcattatcaaattgtatatcgtttatcttgatttcagattattgtcatcatcgaacagggggagaatgtagaagcatatatgatatgaagttntgatgatgccaaagatgagcgcgattcanatcaagaatctagaaattcaa

SEQ ID NO: 150964 - DNA, 294 bp, Glycine max
  unsure (1)..(294): unsure at all n locations
gttcagttgacattatttctcagtaactgctgataactttacgaagtattgtagagtggagatgacctcctgatacctcattaaagctcggtagttgagagagaaaagagagagaatgaatatgactgataaccaatattattgagatgagattattgatctatggaagagaactgatacatgagtgataacaacagtggacnatggtagctacatgttataactgactatctgaactggtggagatagttagatgactagtactactggccgaaactatcttctatggtactc

SEQ ID NO: 150965 - DNA, 425 bp, Glycine max
  unsure (1)..(425): unsure at all n locations
atgaagcatgcaagcnagcacaacaagtcactaaatttgcctttgctttataagaagnaactaactaactaactaactccactaatatatatagggactaatcagacggaaaagatgggcctagtttaagcccatataatatacctaattaagctaattacacaaagcaaatcccaattttgcagcccaattattcaagtgcagagattctgaatatcaagcccaatatgaccctcaaaatggtacaatagacccaagtgtatttctaacacaaatgaatcactttntcttagctttctaaggactactcacatgctccatttggagtcctgnagtgtcctataagccctgcacaaagcagatagagtaagntagcgcaaaatccgatatccgaatattacaacaattattaattaagctcatca

SEQ ID NO: 150966 - DNA, 462 bp, Glycine max
  unsure (1)..(462): unsure at all n locations
ggctccatataaatatatatatatatatatagaggtatattatatattgaggagaaagataattcaaggaaacaattccaatgatgagataagtagattatgattatgatgatggcaagttcaagagaaggtcgtcaagcaaagcaagagggtgacaccactaatattgacaagttctcccaggcatcgtccacttcaagacaatggtcagctttcagaaatccaagaattgtgagagtgtcacgttcttttggagggaaagataagcatagcaaggtttgcaccataagagggttgagggacagaacgattatgctctcagttcccacagcaattcagctatatgatcttcaagacaaacttggactaagccaaccaagcacagtgatagattggttgcttgaagccaccaaattngacattgacaagctcccttcactccaattccctcacggtttggtc

SEQ ID NO: 150967 - DNA, 417 bp, Glycine max
  unsure (1)..(417): unsure at all n locations
agcttcagtctctcaatgatgcaaagaccatttcctgtnagaagcatagntggaaccaggaagaggagaggacacatgtgctggtggagctagtgagctcttctatggntcaatgtctatgctcagntgcacaccatgaagagcttgaaagaaatgacatgatttccactcgggtccttcttattattaaaatgaataaaaaacaaactaagcatgtgttagtataatttagtaaaaagccagaagattgaagnagaatttttctttcttttttattctaaaaaatagaacttaggtatcaatgggtttacaactagggacttaaatgagttaagntattatgaaactatagagctcgacttgtaaataaattaaataaacaaactaaagctttggatttgactcaattatttaaat

SEQ ID NO: 150968 - DNA, 158 bp, Glycine max
gaagacccagatatgacttcacaccttatccaacttttactttactcttttgcatctttttttttttttcatttttcatatctacttcttttcttttcttgttctcaatcttatcttgacatatttgtctcttctctgatacttaactctacttattt

SEQ ID NO: 150969 - DNA, 322 bp, Glycine max
  unsure (1)..(322): unsure at all n locations
nagctagaataagatccttatatgtcttactcagaaactctncacccttcctctctatcaacttccaaacattagtcaaagcagcactttccctaatgacacagcaaacaaggtttaaaaaaaaatcactaacctttcatttcatgactaaaactaatacacacatacttcaatcaatcatcaattcacataattgaagaaataaagcacacaaactaatacacacatacttcaatcactcatcaaaaactaataactaacacacgttgataaaaaaaaacacagacacacatgtctttgtaagtaacatacaggtcgggta

SEQ ID NO: 150970 - DNA, 300 bp, Glycine max
  unsure (1)..(300): unsure at all n locations
tatntaagaggagaattatgcatggtcgtaaacttgtaatttattgtaattgtaatttgttctataangtgtaagcttttggagtagcaaagttgttgaagtcatgggtggtaatagaaggaggaggcaccacttcagcagaatccatgcattctcttgtggaaaagcttcattcaaaggggagcattcactcataggaggtcctggattctcaaggatagtgtactgcaacgaagcggaacgaggtgaggggagtctcgtgagttatggtgacaactatgtgagtactactaaatatac

SEQ ID NO: 150971 - DNA, 466 bp, Glycine max
  unsure (1)..(466): unsure at all n locations
agatccttaattcacctgaagctgcagctaaaacccctaggtcattactaaacaagctgataatnnaatcacaatcacaagcaagatgctctaacatgtagaagaaaacaaattcaaatgaaatgcaataaaaagtagagaaaggaaagaaatgctaagctgcctcccagtaagcgctcttttaacgtcattagctagacgcctcttcctgttatccaagatcaaacaaggttcctacttcaagcaccttcttctcaagtctcctttcctccatcccatgcacttttagacagacatttaggctaagtggatctttagcctcatggaacaaatcaaagctgatcttctgatcttctatgcccatttgcagcattttctttcccatgtctacgacgcagctcgcagtagacatgaatcggcatccaagaatgagaggaatgtcaacatcctcttccatatttatgac

SEQ ID NO: 150972 - DNA, 409 bp, Glycine max
  unsure (1)..(409): unsure at all n locations
agcttcacanagcanacaaaatattataagtgtgtattccacanaaaanaaaaaaatattataagagctaatgcttaagcaaatcaagagaaatgtaaatagagcaccaagaatataataccatatgcgagctgaattccttggtagatagtatgttcaccaacaaccattagttctgcacagaagcagcatcttttgcctgcatccaaacaacaaatattagtcacaaccaaggttatcaaactcgagagtttacgcaaactcgagagagtttcatgaactcgactcgtaaactcaactcgcagatctcgaagagtttacttcatataaaaataatatccaaatatctataaataacatactaattaaacattgcaacaatataataaagcaaagcagnatcacaaag

SEQ ID NO: 150973 - DNA, 486 bp, Glycine max
  unsure (1)..(486): unsure at all n locations
aatctnttctctttttctctcgactattcttcattcttctccttcttttcacttttgttcttcctttttcttgcacaaattatgtggctcttccactggtgatgatcatggaaggctaaacactcaatcaatccaaggttccactccaagcaaagcctaatttgagttttggtttagtatttctaatatgtgtgaatgctcatctttttcttcaatcctattttcgattntcatgattatgaatatacttaggattgaaaatgaaatagtttagggattcctttcctaatttcgactntaatcacagattgttttagatgatattccaacctaatttgtgatctcaatgaatttatggattaatttgattgaaacaactctaatgacattgattgaactttcacaacttgatcattctctgtagaattgtgataatgatntgtatcggtttggtgaaatggattgatgaatntgaatctgttttac

SEQ ID NO: 150974 - DNA, 338 bp, Glycine max
  unsure (1)..(338): unsure at all n locations
agctntctgaggcccaacttcttcatggggatgaaaaactccttccttcactcatagaccctacaatttcttctccgccaccctcttctttagccatatcaatcaaaattatggtttcccttttgtcctcctaggaatagtacttagaagagaaagtgtgtttttgagagccttccaagtcaaacgaatcaagtaacttgaaaagaaacaatgattgaccactcactcacatgttcctacaaagaggcacatgtccatcatatatgtatgattatgtacatgaaaatttcaagtttttgagagcattttggcttccaaatcatcaaatcaattagatg

SEQ ID NO: 150975 - DNA, 489 bp, Glycine max
  unsure (1)..(489): unsure at all n locations
cgtcttgatgatatggtcttcaccaacaaaaggatcaaagtgggactaanaagaggcaaatatgatcattatgctntgataaatgccaaaaaaatagggcaaatgaagagggtgagaatgagggagaagcccatgctgtgactgccattcctatacagccaagtttcccaccaacccaacaatgtcattactcagccaataacaaaccttctccttacccaccgctcagttatccacaaaaggcaatccctaaatcaaccacaaagtctatctaccacacttccaatgacgaacaccacctttagcacaaaccaagaacaccaaccaagaaatgaattttgcagcgagaaagcctgtagaattcaccccaattccagtgtcctatgctgacttgctcccatatctacttgataattcaatggtagccataaccctagccaaggttcatcaacctccatttctccgagaatatgactcgaacgcaacgtg

SEQ ID NO: 150976 - DNA, 481 bp, Glycine max
ttcatactcagcttatgttacttagtgcatgttggattcacgaggattatctaaattatgtgcaaatactagatcatatgatttcaagtaaatgctcatatatgtgtggtttcactttaagaaattgattccgaagtgatcttgagttgaaacaattttaggtagatttctgtgttgaataaaaaaggtgtatattaagttatatctctaacttgctttttgaaataaaaatcatccaaacataagtgatttcacttcaaaatcaattttgcagatgtttgtcccaacatggttattgtttgtttggacgagcgttgactaaattgattataaattgaattgattttcaaaattgattattgactttatattgaattgattttgccaaattgattttagctaacattgagctttgatttgatatgaattatgcctgtggtttattataaattaattaagaataaacccactattaattttg

SEQ ID NO: 150977 - DNA, 380 bp, Glycine max
  unsure (1)..(380): unsure at all n locations
atgcttnantaattacttgccatcatgtctttgtttgtttatgagcatgaatncaaatggcaatgatataatgagattaccttttgcttttcatgaagctttatctaaactagagaaatgtcaattcttgttacattaggagagtttttgaaaaacatgaacaatttcttcaaaacaaatggggaatttaagatttngaattaatcttctttttacttccttcttatttatttattnagctcatacattgaggtgcaaacttattcagaatcttcaatgcttgattgtgtatttcactaattcatggctttatctctcccttctctacaagnnaactatcaattctggtatttctaaatctcttttgaaacttgaaagct

SEQ ID NO: 150978 - DNA, 465 bp, Glycine max
  unsure (1)..(465): unsure at all n locations
gaaagatatgtatggatatattaaaactctcctaatcaaagtatctcaatgcgctaaatgatattatgttgcatgtaatgtaactcagagtgaaatagatatgtcaatcttttccataacaataaaatacaaatttacattatattttttgtgcagaatgtaccttaataaatagttattgtgtgtacatacatatataggtaatccttcaaataagtagcatattttgatattgctcggaagttggaatgcattataaaagacctagcttcgagatatattgtttaaatataaatctaaccattctataaaggaaaataaaatgaaatatctcaccaatcttaatagctattatttcacaacctatagatattgctgtcgtgttgatgcattantcacattcaaaacaaataaatcaattatccatacacgagtgcaataattttttgcacatcacaacataaa

SEQ ID NO: 150979 - DNA, 443 bp, Glycine max
  unsure (1)..(443): unsure at all n locations
tctcgagcaagcgtgcagcagtgcggttattgctaacaacttcgtatatcangtgatgaggaatgcaagagaacgtaaaggacagtgatactgccaagacctacttttactcagatatgaagcttgtatcctcatagcataaatgcgctgcagaactaactgctaccagattgattacatctctaacagctcatgcctgatgattgggacttaaacaactctatcctatctgtcggcatgacttttattctttgactaagatagcggaaacaatggatctactatatgtagttagacagtgacaacagacacatcttcagcactccgccttgactatggaatggcagactacaagcttgtgtctcaggtgttcatagcctgctataggaattgcctcgggtacaatgtcggctctatgagtctctcttatgtagtacagtaac

SEQ ID NO: 150980 - DNA, 382 bp, Glycine max
  unsure (1)..(382): unsure at all n locations
agctnagaaaatataacatctagatttcttaattacccatnnnnctctccccctttggcaacatcaaaaaggccaaagtgcgtaaaacatacataattnaaaacatacacaaagcatattttagaaatgaaacataaaagtttctaaaccattcatgaagcaaaacataaaccaaattaaaatcaaaccacatagtcatatatcacaatccataaatattcagncatactaagcaaatattaaaaatactaaatgttcaaatgtcataagcatatagccaaatacaaagctttagaaacaaaacataataataataataaagnggaaactaatagaggaggagaagtaaatcaaagaagtcacaaatgatggggacatcttc

SEQ ID NO: 150981 - DNA, 510 bp, Glycine max
  unsure (1)..(510): unsure at all n locations
acactattaatactcagcttgatataatgaanatactagatcatggcaacttanaattataaggatgcactattgtaaggcttatatgtgtcccactaacgacaggagaattgttttatttaaggatgatgcttactgcctgcaaagaagctacttcatttgaggatattagaattgttacaaatattcaataccctacatatagagaagcatgctttgccgtggggtttttacaagatgatagagaattcattgaagcaatcaaagaggcaaaggactagggcacaactaattatttgaggaaattatntgtgttgatgctnttaacaggtaccatcaataaacctgaagaaagttggaatcaaacatggcattggctagctgatgacattgcatatcattatagcanatcaacaataaatacaggttagttntgattaattcttacattcaatcccatgaacaatnaatcataattgactgctaacgtctaatngtgtagaatacaca

SEQ ID NO: 150982 - DNA, 302 bp, Glycine max
  unsure (1)..(302): unsure at all n locations
agcttacaaatctattttaagtccaatccctaaaagaaataaaataaaatctggacaagataagataagattggatgaaataaaatctggacgaaataaaatctagatgaaataaaatctggataagataagattngataaaataaaattgtttgctctcttcaagtccaagcccaattcggaattcaagcctaattgcttataattctcctgaaattaaattaaaaacacaaaattagtcaagtaggcccaaatgataaaactgcataattaatttgacaattaaggctaattagnaattt

SEQ ID NO: 150983 - DNA, 473 bp, Glycine max
  unsure (1)..(473): unsure at all n locations
ctttctttgtggattgatgaactctgtcgtgcaaaatgacatgatcgcaggctggcatattcttaattagctcagttgcctctntagggctcttcagctntattttccccctgctgaagcatctagcagttgcttggtttgtggtctcagtccatctataaacatattcaattgaattggctaagagaacccatgggtgggagtctttctcaataaacctttaaacctctccaacgcttcactcaaggactcgtcagggaactgatgaaatgaagagattgcagctttcccttccgcagtctttgactctgggaaatatttcttcagaaacttttcaacaacttcttcccaggttttcagactgttacccttaaatgagtggatccacctttttgcgttcttttgccagganaatgaaaatagactgagtctaatggcttcatctggcacgcctgcaatcnttacaggtgtac

SEQ ID NO: 150984 - DNA, 228 bp, Glycine max
  unsure (1)..(228): unsure at all n locations
accagaagcatgcaagctagcatagacgaccgncgagctcttttcttcatccccaacgnagatngcaaaagnagngattncaaaaggatgctaaaggggagagatagaggctcttaaactcagataacacaaatcaatcacaaatctaacaaaataaatgttggatttatcattgtcttttgttcacaattctcagcacaaatttccacacctagtagattgcaaaaa

SEQ ID NO: 150985 - DNA, 481 bp, Glycine max
  unsure (1)..(481): unsure at all n locations
ngttaaagaacttcngaaaaattaagaacaagcttgttctcacatcgtttgcgtgtatgacatccactccacaaggtttgaagtagaggagaccttcaatcctattacgcaacgtggcggacaaaagtgggcagttaacttgaatggtcattattgtcaatgcggaaggtattctgcgcttcactatccatgttcacatattattgcagcttgtggttacgtgagcctgaactactaccaatatatagatgttgtttatacaaatgagcacatcgtaaaagcttactccgcacaatggtggcctcttgggaatgaagcggttattcctccttctaatgacgcatggacacttatccctgatccaacaacaattcgtgcgataggtcggccanaatcaacaaggataaggaatgagatggattgggtcgaaccctctgagcatctacaaaaatacagtatatgtggagctgaagggcataac

SEQ ID NO: 150986 - DNA, 427 bp, Glycine max
  unsure (1)..(427): unsure at all n locations
ngccgtccagctcgcccaggcgagccatgttgcttcctctataagcaacaaccttctggaggaatcttctggagggcccaagtgggcctggttgctatttgcacccccctgtttactaaatgcacccccctttctatttttttgtaattctttttccgtaacattacaaaactttacgaatttcgtaatgatacttattttccttccgcaaggttacgaatccttacggattatgtatttactctttttttaactttcgaagaagttacggattatgtatttactctttttttaactttcgaagaagttacggaaactcacggattgcgcaaaaacacctctttttgatttccgccacattacggaatttcacggatcgcgcaagcctgcttccttttgatttctgagatgtctcgggacttcattt

SEQ ID NO: 150987 - DNA, 313 bp, Glycine max
  unsure (1)..(313): unsure at all n locations
agctntacatatgaatctactatatttatttgtntncnngaatgggatacggncacacctttaatgaaaaaagagagatnttcatgcacaaaataacctttttgagtatcacaaagntattaattagatggacaaaagtnagatgtatgcaagtcgcatgatccatgtgtatgaagaaagcattgaacaattattggtatttccctccgaaagaagncgatcagatgaagatgtcatatttttatccttgataaactagtcgaatcgaagacaacaagtactagatgacatacgagaacatcttttgtgtgat

SEQ ID NO: 150988 - DNA, 222 bp, Glycine max
  unsure (1)..(222): unsure at all n locations
ctgaatgaggctgaagaagctgctgctcatgttcaacattatccggtggagattaatntatctcagcctcatttgtcacaagatagtgacatggagttgatggtaaatatttgtcacaacaaagtagttttatctcaacctaatttgtgcagcactccatctttatatattacaaatattcatgtttggcagttacatgtaagtccctgcaactactggttc

SEQ ID NO: 150989 - DNA, 391 bp, Glycine max
  unsure (1)..(391): unsure at all n locations
agctncatgatgatgaacaacaattntgattatgctcttagcccaaatcatagattcaagattgattcaagacttcaagatcaagcatcaagaatctaatccaagattcaagattcaagagaagaaatcaagaagcaataagtcaagacttcatataggataagnattaaaagattttttcaaaaaccaaatagcacagntttgttttacaaaagagttttctcaaattttctaaggtaccagagtttttactttctgggaatcaattaccagntggcaataatcaattaccagagaccagntagggtttcaaaatattttcaaatgatttgcaacgntccaaaatgattttcaaatagtggaatcgattacacaatattatgaatcgatt

SEQ ID NO: 150990 - DNA, 223 bp, Glycine max
cgcatgtgaagagagagaggtgcccaaattggatatatattacacaactatagtgacatctccatgtggcaaattgatctaacacggccacttttacaaacaatttatcaaataatggctcttactatactatttaagaacggggtctatttttacatacattgcgtcacttgtcgttgcgatatatataagtaatcactggtaggatctacatatcagctca

SEQ ID NO: 150991 - DNA, 358 bp, Glycine max
  unsure (1)..(358): unsure at all n locations
acctgcaagctgcagctatgaagcttgcttctcaagttctcttgttgttttagncaatncaattaagacaaatcccaaaaaaaagcgcccgatagatttttntaattattntattcaaagatatttagattattccattattattcagnctcttttgattttaaacgtggntacggcgtgaaagatcgataggattttattttaacagagattaaacgatattacaactctaatgattaggggaaattcattttattacttgattaagagatataacgacttaaataatggntaaagcacgtcaaaaaagggtacggaaaacaaacgatatgtatatttaagcacgtgattctagtgg

SEQ ID NO: 150992 - DNA, 477 bp, Glycine max
  unsure (1)..(477): unsure at all n locations
tcagcttaccccagctgatttaaacccagtattctntgtcctaacaagccactgttggctctagaaaaatcaacaagatntgttgttgaagatttctcgatgactaaaagatcatcatcttatagacgaacatcacactcaactctttagtctattctctcaagatatacatagtgttttgagagttttttaatctatacaaaaatttagagaaagctttatagaataaagaatgaatggaatttgtgcgtaaaagtttggtgtcttattcttcaaagattcttctattcatagccttcaccttcaagtatttttttgtctgtcaatggattaattcttcacttgagttcttcgtctgatgaattttggttgttgaggcaattaatgcttgcattaaatgtgtcataccctaatttcatccggggacgatcattnagccaacattggattctggccggccgaatngagctacttaat

SEQ ID NO: 150993 - DNA, 413 bp, Glycine max
  unsure (1)..(413): unsure at all n locations
gactcacgagtggtaagtngaggtctaagnggattggttctttgttgttactaangcnnntctcttatggtacagctgagatcaaaagcgactccacaaacaagagncttgaggtcaatggacaccgacttaagccattcctcacaaacccttctttagtggacgtagtggtggaagagacttccttactccaccctactcttcctccaccatgacttanggagtttttcttttcctatctccttctttacttttattacatatttctgattctatatgatgatatacttgcctttaatcttttaattgtgctacattgaggacaatgtgttgtttaagtatggtgggagtgtgtgctatggtcttggctttgctaactgtgttaaatctgataggcttgttgggtttctagt

SEQ ID NO: 150994 - DNA, 395 bp, Glycine max
  unsure (1)..(395): unsure at all n locations
tacctgcaagcatgcaagcttagcagatnaggtcttcactcagcgatttgatctattcttgatctgaaaagatgaaaatncaatcatcctgcttggacgaatgagataactggggcaaataaagatggtgacgatgttggagatacccatgctgtgactgccattcctgtacggccaagtttctcaccaacccaacaatgtcattactcaacccttctccttacctaccgcccatttatccacaaaggccatccctaaatcaaccacaaaggctgtctaccgcacttccaatgacgaacaccacctttagcacaagaccaaacacaccaaccaataaaagaattttgcagcgagaaagcctggagatttcaccccaattccagtagcctatgctg

SEQ ID NO: 150995 - DNA, 472 bp, Glycine max
attgtatgggttgaatggtgaattcttgttgttcctggtgcggagatgatggtacagagggtgaaccaggagcggaagtttcttttggtgaggtagccatggaaaagcagagcgtttggaatgattttgtaaatctcagaaaactattgggaaatgctggagaaaacacgaatgccaagcagatataaatttgaatgaagaatgtagaggggcgtgtgaagcaacggtcgaattcgttttggcttaatagtgaacgtgctattaatgttgagtgattcgtttgggcacgttcagattgctgtagttgctataattcctctagcaaacaaatgcccagcttgcccctcagtttttcaaactggattgcatccaaagcctttgtgaaaatatctgctattttgtcctcagtgtcaacatgcttcagtgtgatcactttatcatcaacaagatctctgatatagtgatgtctaat

SEQ ID NO: 150996 - DNA, 322 bp, Glycine max
  unsure (1)..(322): unsure at all n locations
agctaggagcatatgatcatatgctcatctatataggagaggngaatatccttgnagnncagccatttgtagcaacttagttggtagctttttcagatggcaacagagcattgncactgncatagcctgtctctctctcttctctccctatcttttgtactctatatatatgtactatttagaattcaatataagaaggaaaaaggctcccttctggtctccttcaactattatcatcattagtacacaactagatgcttctcagnctaatgattnactagcccataagctcattgatattatccttggaagtcacatctta

SEQ ID NO: 150997 - DNA, 483 bp, Glycine max
ctcaagcttacattgtcgtaacagagcaatcggttctttcaccattgttgctcccattattatatatgcatataaatatttgaaagatatgcagtgaaaaacatatttaaaagatatataaacatagttaaaagtattaatatatatcttatattgctttgatttatataaatatttattttcaaaatactatctttataaatatatttgtatttgtataaaatctatattagatttagatacataaaaattttaaaaataaattttaataataaaaaatactttatattttataattactattcaaaaaatgtcttattagagatatacgaataaataatataaaacagtctttacttttttgtgtggggtatcgctatttgccgtgctccttcaagcaatgacaacgagtatgaagataattacttgtaaacctaacaaaattcctcaagagtcataaccatagtcaccaaaattacacct

SEQ ID NO: 150998 - DNA, 389 bp, Glycine max
  unsure (1)..(389): unsure at all n locations
agcttcttagttntagatgatgcatatgatttcttagccacctcatgtactcctctaatgactatagcatcatttctggcgctaaactgctgggagttggaagccatcttctcaattaaatttatggcttcagcaagagtcatgtctccaaaggctccaccactggcagcatctatcatacttctctccatattactgagtccttcataaaaatattggagaataagctgctccgaaatctgatggtgaaggcaactggcacatagntttttaaatatctcccactacttcgataggctctctccactaagntgnctaatacttgagatatccttcctganagttgagagcctggaagcaaggaacattntttctaagaatactctctt

SEQ ID NO: 150999 - DNA, 380 bp, Glycine max
  unsure (1)..(380): unsure at all n locations
agcttcaagctgctcaatagctccttgttgctgcatggaaaggcaaaagtctgtatggaggncagcagaagagcacaaaccacaaacccttgcgacaagtacagatttctgattcaaagccagctgggttaccaagttaaccaatgtatccagttttccttcaagcttcttagtctcagatgattcagctgagtttgtagctacctcatgcactcctctaatgactatagcatcatttatggcgctaaactgctgggagttagataccatcttctcaattaaattcctggcttcagcaagagtcatgtctccaaaggctccaccactggcagcatctatcatacttctctccatattactagagccttcataaaaatatt

SEQ ID NO: 151000 - DNA, 445 bp, Glycine max
gtacaccttagtattatatatgtgtctcaacctcatcaatgtatttctattcatgccttccatgaccatgttgtcaatgttgaaatcttagttattttccagctttgttgatagtattttgttttcttttggccaatgcttgtcatgttatagaaataggttaaatgtatcagattacgcattcctgcaactatcatcattactaagtgactctttctttgaattcttttgctttgatgcccctttgattcagttccattaattaatcaccttttttcttcttaatttttttcccccttccttcgtgtagcgggtgaagcttttgttattgctgagaatgtgttagctcaaccatcttctatcgtggactagtctaggtattgactgaatcaactacttgctatgactactattacttccggtgtgctgcctgtctggctagctc

SEQ ID NO: 151001 - DNA, 374 bp, Glycine max
  unsure (1)..(374): unsure at all n locations
agcttcgncgncctgaagatgcttttntcttaagaaacgaaagcacatgtaatggaggcattcttccacattataggggatttggagtagaatcacgaagaacaacctcaaaaattcctgatcctttagctatagaacaaggtaacccaacaaaaattaaaaatggatatgaagagaaatggntgctcaacatcatggtcattgatacacgtggtgcacaagataagaaagctagcactcaatagtagatgtgaccagatgaatctcccgaaagactttnataatgtcacaaaggatatacataaccaaaaatagactacaaatcataaaagaggtctattttagtggcaagacaacttacaatgcaagccaat

SEQ ID NO: 151002 - DNA, 480 bp, Glycine max
  unsure (1)..(480): unsure at all n locations
ntctcatntccagcctctgttcctgtcctatantttggtgttgatgtacataaagtccttccatcctaaatggtaggagaacataatatttagagttgaagatgcattgctatatatgaccttttacaatgatatggaattagaaaatttattgaacaaaaattcattcacaaaaagtttcacaagattaatacgtagctaataacaaatggtttataagaatggcgaaaaatattgttcatcacctgtccatataaagttgcatttacaacacctgaatgcatatgagcagtgccataaattagataacctcctttttccattgggatgttttctttttggacatgaggagaatcaccaccaccaccagttgctggaatggtatactctgcctgaaggaattagatttactnttgtcactcactctaataagattgaaaagtatattggtttatcataaagtactgtcttgaagactta

SEQ ID NO: 151003 - DNA, 475 bp, Glycine max
  unsure (1)..(475): unsure at all n locations
tcattgactnttcatatagtatntgtgtatataaataagtatcgtttagaaaactttttaatttccccccacaagcaacatgtttcaatgctctgtcatattttttaatatttctctacgtagttatatttaaaacagtattctatagaaacaataaggagatttttttaaaaaaaaagttatatatattggaataaatgcatgtgcatttttttaatatgtattcacacatatgaaaacaactaaaggcgatataataaaaaaaaaaagtagtaagtaaagattaaaaaaacaagataattttatagcatgactccggataaatgaaatgagtctcgctagggttatgaattggattattaattattaaaagagaatcgcaatttacaagttataaaaaaagaatagaattgtaatatgggaatacattatacatatacattctctttctatcacatatattatctatacatat

SEQ ID NO: 151004 - DNA, 365 bp, Glycine max
  unsure (1)..(365): unsure at all n locations
cccggatccttaatncacctgcagctgcagcttcgaccctaggaaaatccttcttattgggagctatagaagcagaagatgggtcctgaaaatatatgccatcacattgttcaagttctaaagatttaagttgnctactcttacgtaaaatgtacattttggttagaaaatatccatttactagtatggntactttgagcaagagcttttaagatccccagacagcatagttttgccagntgaagaaaatgttgaagccatatgtcagnttttcaatacttattggaagcagctagatgaaagtcttaaatcgcagcgtataaatgatcgttactttagccgatagaaagaattaagctcaaacc

SEQ ID NO: 151005 - DNA, 489 bp, Glycine max
  unsure (1)..(489): unsure at all n locations
tccttggggccatttcctgcgagaaaattcttttagatgttagttntacaagataatgcttatcttaacgcanaaaaaaacgtcatgctaatccccccggtttagaacgaactcatgcacacgtttaaagtaacacatttatgcacatgcgtatgtgtagaatatcctactatttatcaacatagaggccatccaacacattctagttgtcatacatatatatgcatttgaaaagaacacacactctcacgctcaaggcattgcgtcaaaatttacacttaactatgtcctaaacatttgctatcacaaactacctacatatgtntgaaatatatatcatacaaatattattgtttcactcacatttattcatattggcaagctatttacattatgcacatactttgcattcaaagggaatccgtgctatcatacattcatttanggaagcacctcaatattcattcacccttttgcaaagatttcatg

SEQ ID NO: 151006 - DNA, 345 bp, Glycine max
  unsure (1)..(345): unsure at all n locations
agctagctagaggagcttctatggaagctgtatctnngagcatcaatgaagtcctttaatggagatnttccaccatggagattgctcgaaagacaaaagagaagaggtgagaggagacgccatccactaaagaataagccatggaagaaagagcttcaccaccaagatgagcctatgataagatactaggagaagatgcttcnntggaggaatagaaagatggagagatagagagaggggggagcccgacattgaaagaagatcaatggagagaagttgaactctgagttgagtctcacaagactctcattcatcaaagntacaacaagngttacacatgcttct

SEQ ID NO: 151007 - DNA, 190 bp, Glycine max
tgtgcacgacatcaccaacaatgtccaagaatccctccataacaatgatgctcaataccaacacgctctatcccaccttctctctgtctctcaggtatattagcaattcatgcatattgatatgctcatatgcgaaaactagattcgaatattattcttgcgtatggggtgtcggcattatatgcatagc

SEQ ID NO: 151008 - DNA, 254 bp, Glycine max
  unsure (1)..(254): unsure at all n locations
agcaaatagaagacataacgcatgatatcggncgatccttgggccttctgcttgnagccagccttgaagagtccacggatttcagataaaagattggtacattgcaaagacaattgatgaatgtgagatttgatggcagnttaagtctagcttcaagtccaaaatcagagttttccaccagagacatgaagctgaccggagaaatagaagaggaaatagntaatgtctctatcgatgatgttgntttgcaactt

SEQ ID NO: 151009 - DNA, 487 bp, Glycine max
  unsure (1)..(487): unsure at all n locations
gacctatgaaactcaagctgtatattccctgtctaatgcaaattttccagcagttacagagcangaaacctgaatgtgggtttagtcatttgtgtggcatttattttccatcttgtgcaaagatgcatgaatatgatcgtacatgataacttaggacataactttttgtagaaacttttcactagctactttttattttaactttcaagaatatcattcaaatattatttcacttcttttaaaatatttatctaattatttaattcttttaaaatatttatctaattatttaattcttttaaacatgcttttttacataaagtaattcttgagaaaaagcataaataagatttagattatttatatttttctacaatttgaaattgtttctatcctttatatgatcatatctaataattggtttttcttaaataaataatntcaggatacgatgagtgcaataagcagtggatgaaatacaatagta

SEQ ID NO: 151010 - DNA, 441 bp, Glycine max
  unsure (1)..(441): unsure at all n locations
agctaganaagatgcttcaatgcaagatttgtttattttgataaagagagaggggggagcatgaaattgaaagaataaaagatggagagaagtggaactttgaagtatgtctcacaagactctcattcatcaaagttacaacaagtgttacacatgcttctatttatagactaagtagcttccttgagaagctttcttgagaaaacttccttgagaagcttctttgagaaaacttccttgaaaagctagagcttagctacacacacccctctaataactaagctcacctccttgagaagcttccttgagaagattcctaaagaagctagagcttatctacacacaccccatataatagctaagttgaccccatgccaaaatacatgataatataaaaaaatagnccctattacaaagactacttataatgccctgaaatac

SEQ ID NO: 151011 - DNA, 458 bp, Glycine max
  unsure (1)..(458): unsure at all n locations
taagctctntcaactgcacaaggctcttaatattngaagagtatccttgtggaaccttcacccgatgaagacactgacaaaaacttatcttctcctttntggacaaagtatgacaagttgggggcaagtaaattttcttcccatcagaccttggatgcaactgtgatcgtatccacatctctgctagattttgacgagtattcaagccatccttcgtcttgccctaaatgttaaggagcgtcccaatcacactgtcacatacatttttctcgacatgcataacatcaatacaatgtctaacatctagatcagaccactacggaagatcaaagaaagttgacctcttcttccatatgcaagtctgacttttatccttcttttgggtctttccaaatacagtattcaggtgttgaacccgctggtatacctgctcactagtcaacggtgtcagcacaata

SEQ ID NO: 151012 - DNA, 432 bp, Glycine max
  unsure (1)..(432): unsure at all n locations
cacctgagctgcactatactaaagagctagaactttaatcttttgatnaatgaaagnnnaggaacatgaagcataaaaatagtactcacacaaagggtagcttaccctacgtagtagtaacagtggactaaaattccaaatatcgaacccaaaagaccagtagagttcccaaacaattatttttgttaaactaagcatttatggttaacttaaatgaaagatagtagggtcaattgttcaattttgtaaataagaattaacgatagaaaagttgatgggaaaacagttataacaagcaacctaagattgagatttcacactttctccaatttttcccaattctaactctaactaatccccaaataatgtcaattacaaatatgcccaaatncaattatatatctttgatcatcatttaataatgctcttagc

SEQ ID NO: 151013 - DNA, 396 bp, Glycine max
taactggtggcgctaaactgtcgccaccaagttgccacttttgtctcatagcaatatatttgtacgcccataatatctatctctgcacacaatgcttagaacccttgttgatctctaaccggagctgaaattcatgtctttcacaggacgggactccctatctattgcacgatataagtgtgaaaattcaggaagatatctaatagctgggccgctctccactgagcgcgtacttaacaccagtacctagactcatcgttctgttctctaggatccatcaaaaaaactacttgtgcgaccgcctgctcaggtgtctaatgatacatcacatgcactctcggacagacatttaggcaaagaggatctatgtgctcatggaacatagatgaggtgatc

SEQ ID NO: 151014 - DNA, 379 bp, Glycine max
  unsure (1)..(379): unsure at all n locations
acctgaagctgcagctncnctccttcaccgagtagaacctagttcctcttcttctatgacctgaatacaccacanaaataacaaccaagaaacctactccagaaaatgcccacaagaatatcacccaaaacctgaaagatctaagcatctcgtctttccgagcattcgctgattcctccgattgatttgtagagatattattgcttactgaatcatcatttgcatctatgctgtagactctagagactccattttcctctttttaggcctcttttgatgtagacaaggaattatnactagaacaccttttctgatggagcagatntagagcttcattcaacgncttagcacattcaatgctgagcaagtctcgctgaaa

SEQ ID NO: 151015 - DNA, 435 bp, Glycine max
  unsure (1)..(435): unsure at all n locations
tataataagagaacaatgacaattgaagaatcgattcatgtttcctttgatgagtcttatgctatntctccaagaaaggatattttagatgatattgcagaatctttagaacaaatgcacattcatggaaaagattctaaaggaaaaggaaaaggaagcaatgaagattctccagtagaagtcaaagcaaataatgatctttcaagagaatggaaagctgtagaagcaagatantttgatgttttgatgatgccaaagaatcaagtgcttctcaagttttattcaagacaagaatccaagaatatcaagatatatgatcaagttgatctctagaatcttangaagaagttccaaattgaaaaagcaaaaggtttggccaaagaaatttatctaaatcattttaaattgagaattactatctgggtatcgattacc

SEQ ID NO: 151016 - DNA, 339 bp, Glycine max
  unsure (1)..(339): unsure at all n locations
gagctnagactcgagccatcaagatgatgatatacacttgtccgtggcatgagncctaatcgggcatcaatcatcaatcaataatcaatgatctatcatctatcatctatcatctatcatctatctttcaatctatctttctatatcttcttttatctctttcaacagatctttctgagttatttctgttcatctttctaaaagtgttagctcaacactttctctcccaagatgagttctttgatcaaaaactagagctattcatctttatcatcctcttcttcctttgccaaaagaacaaaagactatccgcctgaagtctttagagtctctctccct

SEQ ID NO: 151017 - DNA, 473 bp, Glycine max
  unsure (1)..(473): unsure at all n locations
agtgctcaatcccacattttcgcanaacaacgtgaccctgattgatctttctatgantttacctagcgagagtgacctaacttactagtgtgcggtcaatcttgtcatgtactcttgggtacccgatgaggtttttcattgacatggtaccatattgaatctaggattgagtcttagtatacctgttacataatgcttgtgtattgatcattatttatttgtttagtgatattatgttttgatccttgactacgtgaatgatgtgaaaatgtgtgagacgtgttgtgttgagacgtgatgttatacgttaagtggtggaatgaggtgagttgtgtttaagtgagtcgtatttcatttatatgatatgtatatctacatattgtgtcatttctctctattagctangaatgcgataagtcaactcctatgtgttgtttgtgttggatcctgtgatgatcttgaaccttgtgttc

SEQ ID NO: 151018 - DNA, 335 bp, Glycine max
  unsure (1)..(335): unsure at all n locations
tctccccctttggcaacatcaaaaaagccaaagagcgtaaaacatacataatttaaaacatacacaaagcatanttttgaaagnaaacataaaagtttctaaaccattcatgaagcaaaacataaaccaaattaaaatcaaaccacatagtcatatatcacaatccataaatattcagncatactaagcaaatattaaaaatactaaatgttcaaatgtcataagcatatagccaaatacaaagctttagaaacaaaacataataataataataaagcggaaactaatagaggaggagatgaaatcaaagaagcacaaatgatggtgaatcttct

SEQ ID NO: 151019 - DNA, 474 bp, Glycine max
  unsure (1)..(474): unsure at all n locations
tgtatataatgaacatactagatcatggttacttanatatatatgatgcactattggaaggcttatatgtgtcccactaacgacaggagaattgttttatttaacgatgatgcttactgcctgcaaagaagctacttcatttgaggatattagaattgttacaaatattcaataccctacatatagagaagcatgctttgccgtggggtttttacaagatgatagagaattcattgaagcaatcaaagaggcaaaggactatggcacaactaattatttgaggaaattatttgtgttgatgcttttaacaggtaccatcaataaacctgaagaagtttggaatcaaacatggcattggctagctgatgacattgcatatcattatagcaaatcaacacataatacaggttagttttgattaattcttacattcaatcccatgaacaataatcataatttgactgctaacgtcta

SEQ ID NO: 151020 - DNA, 371 bp, Glycine max
  unsure (1)..(371): unsure at all n locations
agctnttcacctagttgcattcacattctgcagtatcaactnctgcaatatcaatgtaaacgtttccagcagatagctatcataaggacacaaacagttcattcatgggttctttattaggccataaaccaacgaatagtcatcccacagatgaaaatggacataaatcatgacttatgacagatgaagaaaccaacatgtttagccctcagttcagcttacaaaaaatatagcccaaagccaagagcctgaagatgccattgtctcccataatcccattggcaaaaataatagatataaaaaaagagatagacacttgtttgacatagncatatcgagcccaagctgaattgaagatattaaatagtaca

SEQ ID NO: 151021 - DNA, 457 bp, Glycine max
  unsure (1)..(457): unsure at all n locations
tcttcactgcaattgagatgccgccttcaaaatcagttttgtagactgtaccaattgatccaccacctatcaaagactctntgtcaagcaatgctttggtacctgcctcccaatcttcatattttgatggtaagcttttgctgaagagaaccagctttccaattataacatttgattctgttgatccaagaggtgtgctctcaacaatcataatctgatcatcatcttttcttcttctaccacgtgccctcatattcatgatggtcaccaaacaaaccccagtgagaattacagctgcagcaacaattgcaacaattactgaggtgcttagaactttagctttcccaggagctgaagacgatctagctccgttgcaaggggtgtccaaaggaggaccacagagaaaaggattattggaaaatgaagatgcaccaaaatgctgtatgggtgccacatc

SEQ ID NO: 151022 - DNA, 448 bp, Glycine max
  unsure (1)..(448): unsure at all n locations
agctagaatcagccatgaaggaacctacttgttttagactcaagatcatacatgagaagctntagagaagacacaagatcatttagatcaaacatgcactggttcttcacccagatagattntaaagatccttaattatgatagaaataaaaaaaatccttaattatgatagattttaaagacaatatgatattacacttttagagcataattatttttctcgaagtaaattaataataataatcttaaaaaataggacttattcaaaaatgtttttttagtttttagttatgaaaaaaagaccaaattcaaattaaaaaaaattgaaaaaattgaatatataattaaacttaaaggttataataacaaacagtagtatatatcttatattttccctctcgccttaccaatcttatagatatattttagatattntntttatcatatc

SEQ ID NO: 151023 - DNA, 485 bp, Glycine max
  unsure (1)..(485): unsure at all n locations
ctcataggtgaaatcaagtgcaaccatttcccttanagttctctcacaagggggagggtgtgccatgttctcagaatgttcaaaatcagaatgttcaaaactataatgctcaaaatcaggatgttcaaaattaccaaccacaaaatgttcagactcaccaataacagaatgctcaggatgctcaaaaggtacaaaatgatgcctaactaatctatgaaatgtcctatctatctcaggatcaaagggttgtaagtcagatggattgcctctagtcatacactacattcagcatgcacaactagttgccttcttatgcaagtaacagtgtaggtttgaactacaactaccctcaaatgatatccaaatgacttgaaattttgtgagcaacaccctataatcatgaaaagatggaacaaaaactctatggcaaaattcaaagtctaactatggaaactaccctaggaaagtttagaaaaataaacaat

SEQ ID NO: 151024 - DNA, 279 bp, Glycine max
  unsure (1)..(279): unsure at all n locations
actatggtttgtcncatgcnacacctattggatgtcggatgatggagtattgaaccatctcactaggagtccttccttatctcacaattattattccccaagacactatatcataccattctcgctaacaaccaatggctttaaagatcatcttagcgagaaatctgaggggataaacaccgagagatattcacaccagagggttactagactaagtgatgctaacatcacaccttaatccaaaagcgtaaagataaagttcatgggccctatccttac

SEQ ID NO: 151025 - DNA, 371 bp, Glycine max
  unsure (1)..(371): unsure at all n locations
cttggtgatctgtgagaatttcgaaatggtgacctangatgtactgtcgccacttcttgatggcgttcgtgattgcggcaagctcgcgtacgtatgccgacgatcgtgtaagcttatgacagaattgttngctgaaaaaggctattgggtgccccccctgcgataataccgcccccatgccggagcctaatgcatccgtctcgacgacgaatggtttagagaagtccggtaacgccaagaccggagcattcgtgactgcgtttttaagattctggaagagtgctgatgctttatgtgaccacgtgaatccttcctttgttagaaggctcgagagaggatctgccatagcagcatatcccttgatgaatctg

SEQ ID NO: 151026 - DNA, 325 bp, Glycine max
  unsure (1)..(325): unsure at all n locations
gaaagagagaaagagnnagaaagctaagattttaacaggttgtaaacgaaaacgtnaactatttataatcgacgttatagcaacatcacaagttctggaaaatcaaccagtcaacaaagcctttccagctttaaatataagaaaaaaattaaaataatgggacacaagnaattaatatattaaacttaactttgaacgttcggataatgataaattgaagagttaagataaaaaatataaacaaagaaaatcatatatgatgatctaaattataagccaattntaatatataaataaaactgagncaactataattaatgatctt

SEQ ID NO: 151027 - DNA, 462 bp, Glycine max
  unsure (1)..(462): unsure at all n locations
gacacttaaaactaagcttgatctgacttaaaaaaatttttgtaaagcttaaactatcatttcatcttgcaagttcaagttgaactatcttgcaagttatatgcacatctagaattatagcctattaaagtaagaaaggtcaaattaatttcacgctcctaaaataagatataaacatggtaaagtcaaatttatacaaattaagcctataatgattcgtgattggtttgagaaaaaagaaatgattcaatctgcgattggaatttaaagtctaacctaaaatttcattcaagccatgtctaagcttgacccattttgtcacatttattaaaaattgaaaggaaaatgagaaggctaagtggaacggatataaaagtgacgatgattcttaaggacatgcacttctaaactanactatacaatgatttaaattgtttgaaatcattatctatttatcaacaa

SEQ ID NO: 151028 - DNA, 348 bp, Glycine max
  unsure (1)..(348): unsure at all n locations
agcttccatcanaactggnatctttaacgtatgcacaaagaatcccttaggcattctttactgganactctcaaaatcaaccatcatctacttcttctgagaaagnacaaggaaaacccctccccagaaaatccattcccatctttacctccaaatggacaagatatgactatgagcacacactatctgaagcttacaaggctctctccttagatgttataggtcatctcgagtctccttaatggacacataagatttttccaatagaattaagatgcaaccacactggatggctactggaacacaatagtgcgtacgtccatcaatagaagtatcacctgaaaactc

SEQ ID NO: 151029 - DNA, 226 bp, Glycine max
  unsure (1)..(226): unsure at all n locations
cgctgcctcanagagatccaggaattacaaagtggctgaatgtttcanttccgctctcgaatatgacaaccatcgttttatgagcgttgagcaccagcagcgcttcgaggccatcaaaggatggtcattcctccgagagagacgcgtccagctcagggatgacgagtatactgacttccaggaagagatagttcgccggcggggggcatcgctggttacccctatg

SEQ ID NO: 151030 - DNA, 399 bp, Glycine max
  unsure (1)..(399): unsure at all n locations
agcttctatggaaagttagttcctaatnttctacactagcctcacctctcaatgagctggtgataaagaatgtgacattcacttaaggagaaagacaagagcaagcctttgcttttctcaaagaaaagctcaccaaagcacttgttctagctcttcctgatttttctaaaacttttgagctagaatgtgatgcctctggagagggagaaggatctgtattgttgcaaagagggcaccctattgcttgttttagaggaaaacttcatggagccaccctcaactaccccacctatgataaagagctttatgccttaataagatccctncaaactttggaagattatcttgnttccaaagaatttgncatttatagagatcatgaatcacttaaatacatta

SEQ ID NO: 151031 - DNA, 457 bp, Glycine max
  unsure (1)..(457): unsure at all n locations
tgtaatcgattacacacatactgtaatcgattaccagaggagagtttcagaaaatattctcaacagtcacatctntttgtgtggttcttgaatggctatcaaaggcctatatatatatgtgacttgagacacgaatttgataagagttnttcagaacaaaaaaggtcttatcctcttagaaagaaaaataattttatcctcttacatattccttagccaaaactcttgtgattaaataaggaattatttgagtgctccaattgttcaatctatctctttatagagagatttcttcttctcttcttcttcattctgaaaagggattaagagactgagggtctcttgttgtgaaagaattctaaacacaaaggaaggattgcccttgtgtgtctagaacttgtaaaaggaatntacaagatagtggaactctcaagcggattgctttgggactggacgt

SEQ ID NO: 151032 - DNA, 365 bp, Glycine max
  unsure (1)..(365): unsure at all n locations
agcttgcttctatagagtaagagccagctgatgtttctgtntctccatcntcttctcagnancactctcacccacatgagatagccttctacttctagtcatcacagctttacactcctccttgggatttttctctgtattagntataaaactgcttgatgatctatccgccaattgctttgcaagctatcccacttggacctccagattttttatggcaaactctatgctcttctggntggacataaaaacctgcatgaattaagctagaggctcttccagcttcgntgagcgatcatatagactaagcctttattggtgaggccttgaggatgagccaccttgatctctattaaatagatttc

SEQ ID NO: 151033 - DNA, 479 bp, Glycine max
  unsure (1)..(479): unsure at all n locations
cacctcttcattctgaattgtctncatttgaacttatattagaatcttgtttattttcaacccacccttcttgtggtatttctgtcacttcactttatctacctttgaatcaatttagcaagttgatctttggtgttgaggataaaacactcacatccaagaggatgaaagaatgaaatattgggtcttccttggtgttgagtctttctaatcaaaggtttgatcaatattatgttttttaacatagcaacctgcatgtgtttatttctcctttccataagtgctcaaggagtggcttttcatagagcatggtcatatgcatttcttgtagagttatatttttcctttcaactaccccattctgttgaggtgttctcgatgaagaatagtagtggaacatatgcattcttttacgtaatgatctagactcaacattttcaaactcagtcacatggtgacttctgatagaagagatacat

SEQ ID NO: 151034 - DNA, 394 bp, Glycine max
  unsure (1)..(394): unsure at all n locations
aacattgcagatcatgaactgagtccaccgacatatagatcaatatcagaaactgtgaaaaggtcatagcccccttcccccttttgacagcatggagtaccagaacaagagataattggntcaaagcaacattaacctacactaccatataacgatgaaggcaataagaacctaccatgataaagttgccgatattctgttctgagccaatccatggctggatagcaaatgagtttctcagctttacactcttgggaggaaatatacacaacgaatctacagtacaacatgtatcaagagcaaaacccaattatgttacattacagaaagcaacattatgatatactccctacccctaaatgattcaaatgtttgcatagatcaagatcatatg

SEQ ID NO: 151035 - DNA, 443 bp, Glycine max
gcttgtcattaacctgtcaaaccatggcaagtcagtcatgcactcaccaaatctccattgcgcaattttgatatgtttgttattgttgtttgatacaacctgttttgcacccaaatcatgtcgacaaacaccatgaaaacaataatagcttatttttcataatgaggctttgttgttgttatgctcctgttaagaaacctatatttggttttctcgccaacaacattgctgtcgtgtaagcttgtgacattgacaaggggacacaactgtcgtcaaagttgacgacacacattatttttctcattctatgtccctaaaggtgttcattcttgacaaaagaatttggtggtggaaaacatgcttgccgtataggatgtcatattagtgacgatggtagtggccaaaatcatgactatcaacgcgatgttgatgagaatgttgtt

SEQ ID NO: 151036 - DNA, 229 bp, Glycine max
aagcatgcaagcttaagataaagaggattagagagttattgacactatgattgcgaagataggattctcaagaaaatgggtaaggaggatctttatgagccttagagagggagagactcgatctctattaacgtagacaaagtaaggctagagaatcatggtatagggatgcctaccccctatatgtttattatcagagtagaaagatcgccattacttattaagaaaa

SEQ ID NO: 151037 - DNA, 401 bp, Glycine max
  unsure (1)..(401): unsure at all n locations
gctaatatatgaagcttgctgacaatgactaccataatcaattttgaatccatttgacgagcaagcagttaatttagattgaatgctatataacaaaatgaatatgtgtcctttatgtggtatataagataaaccaatggaaaaaaagttccaagcataaagccacattgaacaccaattactgataaaattctctatgatataaaatagagtaacaaacctgacacttcttgcttggttcattgaagctgtcttgtcataaaaatcactatgtgggggaggcagaagaccagtngctggccccttggatattgaatagtgttaaattgcaacacctgtaaccttctgccgcaatgattcattcacgaacctggcactttcaacaatatagaagtctggac

SEQ ID NO: 151038 - DNA, 328 bp, Glycine max
  unsure (1)..(328): unsure at all n locations
cctgcaagcgtgcgagctnagagcaaaaccaagtgacagggactatcttctctgatgagcganagagtcccgtagtatattgagacgctcgaaagtcagataagaagttttgagcagattctaacgacaacaactttttactcggaagtccgatcacctctcgttgtatatcgagacgctcacaattgataacaaaagctgtatgccaattcaaacgacaatagcttcttactcagacagccgagtgagtgccatagtttatcgagacactcgacattcagaatagaagctgtaatgctaatcaatcaacgataacattatactgtgc

SEQ ID NO: 151039 - DNA, 449 bp, Glycine max
  unsure (1)..(449): unsure at all n locations
gtcccatatgaaccatatgatcccgaaatattgtggctagcaaacttntattggaccattggttatgtgtctatatactcaatagagattaactgttctttaatgtttactttatgtcaatatgcttgcctcagctttcacctttattcttcttctgaaagaatacttagcttgaaattctttattggccttcaatgaaattgacaactttaagaccaaaaaactttatgcctatgaataatttcataacattcaataaattctttccttaaagtagttcttaagagtatcacatactcccacttattttctcaaaattcaccttcacttattaaagaattgtcactcccactaactcttggaatgtgagtatagggtaataaaatataaactctttcatgataatataatatcaatgctatgataatacttaacttgtnaatttaaac

SEQ ID NO: 151040 - DNA, 310 bp, Glycine max
  unsure (1)..(310): unsure at all n locations
caaagaaacacaagtatattcaccaggaaaacattggtgaggaaagaaatagtagagctgagattcaaaagatccttccacccaagcataaagaccctaagagagaaccattccttgntcaataacagaagtcactgagggaaaagctcttattgatctgggagccattattaacttaatgccactctccatatgcagaaagttgggagagttggagatcatacccactaggatgactntacaacttggagaccgctccattaccaaaccatatggagttattgaagatttattaggcagagtaaaacat

SEQ ID NO: 151041 - DNA, 448 bp, Glycine max
  unsure (1)..(448): unsure at all n locations
ngngacacaatttaaagaatattattgagcttangggaagtagcaacgtgtcatcggtggctataannngnggnngaaggctaggacgcaagggataacttggctcccaaagctaaaaggtccaagtgggaaggaagttgaagtccctgaggaaagagaagaagtgcaagccttgaaagcagagcttggaagaacgagagtggtcaaggaaaagctaaagacgacagtcactatggtcaggaaagagtgtgacgagctaagggatgtcaacatgactactgtcataccctaatttcgtccggggattattacttgataatatgcaacctttgatcggccgctctgagatacttggcatcctttgtttcacaatatgggaagtcccgagacatgccggaaatcntaaggaagcatgcttacacgatccgtgaaattccgtaatgtggtg

SEQ ID NO: 151042 - DNA, 383 bp, Glycine max
  unsure (1)..(383): unsure at all n locations
atattaatacaagactgagatgacttccatctgcatgatttagntctgatggaaaactatctgacactcggcttgaagaagtctgagagcttattcctatcttttcagagacctgactcatgttgnagntatggctatgactgcttggaataaccaaggagagagccaaaggaattcctgatgattggcttgaagagttctgggattgagatgacagaagagagagagcacaacaagagtctgaaatccccgacaatccttgaacagntgatgaggtatcaaaaacattgaagntctcatttcctacatgagcctggaatagtggtctcaacccagtattttgggccccaaaggcagatggataggggctatagctctcacag

SEQ ID NO: 151043 - DNA, 462 bp, Glycine max
  unsure (1)..(462): unsure at all n locations
ntaagcttctatgatgagtgngtgtgcataattaatntttattgcatgctcgatcactaacttgtttgcgaactgtgcagtatgaattttaagaattagaaaatttagtactcttaataaaccatcactgctattgggaatcaaactttgaggtgttnttataagatcttgtccatttttatatttaacgggaaagtaagtattgccatgtgtccaaatttgagtgtctactttgtaagaattgattaattagtatactcccaaccaaagataagttgtgtgtatatatatccgaacagagaaagaagaaagataaagatgtatggatatcgtaactccaagctgtctcattgtatctttgcatcatagtgtanatgctcgccatgattgtcggagggctaaagaatcgcttcattaataaattgatattcgtttgttaattaaaagtgatcaaataattat

SEQ ID NO: 151044 - DNA, 392 bp, Glycine max
  unsure (1)..(392): unsure at all n locations
agctntggactggatacataacataacaatcttcagcaaaagatcatagagatacaattttatgaaggatagaaaacaacagagagcaacttctgatatgagacttaaatatataacagcatgatccagcaacaataaacttccatgagttntacttataaatcttggaaaatcccaaaagtaagcaacaagccccaaagttttcagagacaaggaattcacaattaacagagaatataatctaagcttggaaataggcaaaaacatttcaataaacagnataatataatgaaaaaataatgggaattaatcattcatggagacatatataatgacaataactggatgaataccttctctttgcttncagcacttccaaccacataacaacc

SEQ ID NO: 151045 - DNA, 421 bp, Glycine max
gctgcaagaggactagctcataatacaattattgagctatgacgctaatccatatgtagatagattccgtacacgtgacaagggcatccctctagctcatttgaactcttagacacgtatagaaacgtgatattatattatatctgcacgcgcgctaatcgtagcccgagcatgagcatcaagatgttatgctcacagccaagtgcttgtatttgatagagctcaaccaagtgtctttttcagaataacaaccaagcgttcgagcatattacaagtagtgtttcgtctatcattcatagtcaaatcatacacgtcgccctccttgataaagaatatagatgcaatgtgctagactataattatagcattaccttcgctaacatgaattagccatatcaagaataacttctatgatacatct

SEQ ID NO: 151046 - DNA, 418 bp, Glycine max
  unsure (1)..(418): unsure at all n locations
agcttcagcaccgntaaaggtaaagactcttccagaggccttcgggtgtccagtttgaccatttaagcccccaccattttgctccttcttggggagaggacaatctctttgaatatgtcctttttgtccacaattaaaacatgttatgcctttatcgggacaatttgaggaaatgtgccctggcatactacatttctaacaaatgatatgagaggggaaagtactgggtttgctaccactagcacccataaatcccatagcaaaagtcctctgattgttgggacggntaccatattgcttatgaagggtcaagtatgggtctccccgatgttgagggtcattctttttagtcctcattggacctatactcctataatagggcgccctctctcaggagtcttcatcccaaattcagcac

SEQ ID NO: 151047 - DNA, 422 bp, Glycine max
  unsure (1)..(422): unsure at all n locations
ctannaattgaattanaacgttcagaaactgctggtaaatgattaccatatatgtgtaatcgattacacagggcgaaatttgaattncaaatttaatagctgttgtaaatcagttttggccactggtaatcgattaccagagagtaaatttcttgtaaaagactttttaatttaattttcttggccaaaccttttgctacttcaattggaattcccttcctatttaatataccctttctaagactctatagactgtcttgatcatctatcttgaatatctttaattgctttgtcttgaataaagcttttagacgcatgtgatctttgggcatcatcaaaacattggcttgatcctttgtctacaccttgtacaagaattaagctctgctaccacttgttgaacaagtggccttaataactta

SEQ ID NO: 151048 - DNA, 410 bp, Glycine max
  unsure (1)..(410): unsure at all n locations
atgctaataagctagataaaaaagagacttgcttatctcagagaaaaggcacaatgaagaacaagttcaagcaccagacacgtaaaaatctaaaattgagtggagtgagcacgcaatgtggagaatcttaatattgcgagagagagagagagaattaagaaaaacaatttatcaaagaaaataaaacacaaaagagagacaagcagccactggtcccacccacaattgataatagcatatttagtcactgaattttgtatttgctggcaaactactaattatatttttttaatgaaaaattnaatttataaatgtataaaatattgagaaaaatatttagattgctttttctataagaattagnnnaatcagtaaccatacaaacaatattagattcttaaaatatgata

SEQ ID NO: 151049 - DNA, 434 bp, Glycine max
  unsure (1)..(434): unsure at all n locations
tataggtgcgggtttcagacatgaatgccaagtcgccgttatatgcgaggatgattccncgaggagatcggatttggtacggccatgtcctcctggtttccgactaggaaattggcgagtggaggaacgcccagacgtttacgcgataagcataatgtaaccctttgtagctttaaaactctacggttgggcctaggctttagagtttccttttgttaaggcattatgtcttttgttcttgaagttataatataaagatctttcttcatctattcctgcacctctacccattctcattcatttgcatgtttatttctttacgcataaaacgccagatccaatgacgagtccctcgaaggtactaatactctggacccggccgtcaatttcgtgcaagatacgggtcggatggagagtgaagaggacgatgatgt

SEQ ID NO: 151050 - DNA, 347 bp, Glycine max
  unsure (1)..(347): unsure at all n locations
agcttagctcactgagagagttatcgcnactatgatgaccctgatcttctacaattccacaaacgctccaccgagcatctaatttctcttccaaaggatttcaacaagttcaagtccatgcacatgtatgacatagncgncaagaacaagatctacttcgaagntaaggacatttaataaagggagagagaaaaaaaactatccatgacccaaattgggcaagagaaccctacaaaattgaattcttgggagagattcatatctacaagtaatgctggntagatgattttggatttctggccttagagggagagagnctgagtctacatgatggggacattaatttg

SEQ ID NO: 151051 - DNA, 81 bp, Glycine max
tattaccctttaaactctattgcccgcacacgtctcctctgctttgaattcagaatctggagcatttaatagaaactgatc

SEQ ID NO: 151052 - DNA, 233 bp, Glycine max
  unsure (1)..(233): unsure at all n locations
gagcttagctacaccacacctcctaatacctagctcaccttcttgagatgagaagctaaagcttacaaaaaatgtccctacaacaaagactactcataatgccctgaaatacaaggctaatatcctatactactagaatnggccaaaacacgtgcccataagaagggaaaacctattctgattttacaaaaaagagtggatccaccttgacccatgggcttcaaaatctacct

SEQ ID NO: 151053 - DNA, 94 bp, Glycine max
ttatctcagcttctgctatggcgacctgaataactccttgtgcccttttatccttgttccctttccttgtggtgcagctcactacaagccttat

SEQ ID NO: 151054 - DNA, 351 bp, Glycine max
  unsure (1)..(351): unsure at all n locations
catctctgttcaatagtggaaaaagggtgactctgaaggaatactttcntttttgctattactatatcacaatctagataacatcattataaaactaaaaccttaagtttctgaatatatctatgtctacaaacatgcagactgacaataataataatgtggtagttttgagtacacttgcatactattatcttttgagtaatcattacttgtagttggttgtttcagaacttattaatgtttggtgacgtttttccaatctatggtccgacaagttggagaaggagtcgatgaagatggatttgatgcacgaaggataggaactatggagttgatgaggagggatttgat

SEQ ID NO: 151055 - DNA, 508 bp, Glycine max
  unsure (1)..(508): unsure at all n locations
agcttatcaatggtgtactggtaatacattnctgatcgctccttatattatgctaggtaggggggggataaaaaaaattaaaattcaaagtaatatataatagatggaaatntaattattttagctaatttattttatatattatttgaataaaataatttaaatttgttttttaaaatattttgatgatgtgtaaaataaaattaacattttttaaaaaattgggtggattaattaggtggtcaactcatcaattcacctctaaatgaagtcggttatattntcaacctacttcttgctgtatcctccttaaggctggttgaaaatacacggacagattgactcactttaccattgctagtaagagagagaaagaagagggaaaaatagaagaanagtgttgataaaatggacaaaaagaaaagtattctacatagttagatagctaaagtatacactanatatatatttaagataagagacttcacantgatactataatttcatt

SEQ ID NO: 151056 - DNA, 442 bp, Glycine max
  unsure (1)..(442): unsure at all n locations
gctatatgcgttaatattggataatcatatgcatatattatttatttacttatgaagttntgtgtatatgattntatgattctatacatgtgaagctatcttgaatatttttatgcaatgttattcaatttgtttacattatttagaatattatgtaaatgtttagctcttattaataattaatgttaagcgattaatatgatttaattaattaaagaatagccacaacatctttaattgatttggtttatatattaagtataaaaaaaattggttgtgattaatcatacttaatgtgataaaatatacccacaggaattnttgtatgtgtgtatgattaattacgataaaatatcatgttatatttcttaatttacccacagaaattgagaaaaagaagcataatttgaatagtntatcataagtatgaatctaattaagt

SEQ ID NO: 151057 - DNA, 291 bp, Glycine max
cagggatgggatcctttaagcgatggtcaaataccgctctacatcccagattgagatgaaccaaggtaagtggtaacatggccacgttgtactacgcaatggcctttcctattttcatgttcttgaggacaggtatgagtagacgctaggcctgcaatcagcatgttgtcgccccgcgtccagctccggatgatcaagatgcactactgggaggccgccaagtatcctttaaattctacctattatcatggttatttctctagggtgatgatctgatatgcataacttatc

SEQ ID NO: 151058 - DNA, 455 bp, Glycine max
  unsure (1)..(455): unsure at all n locations
tgggattttaaccatggagtngcagnggaagataaaggagaagaggtgagaggaggtgccatccattacagaataagccatggatagagaagcttcaccaccaagagagtgtcttggataaaaagcatatggaggaagcttcaatggatgaagagaatgatagagagaaagagatagagtggcatggaaattgaaagagaatagggagagaagttgaactttgaagtgtgtctcacaagcttcttattcatcanagttatgacaagtggtacacatgtttctatctatagcctagcacatgggaagcttccttgagatacaaggaaggtagctttcttgngaagctagaggaagaaagcttccttgagaagctagaggngggctactcacactcctgcaatagctaagttcacctctatgccaaaatacatgaaaatacaatgagaagaatcctg

SEQ ID NO: 151059 - DNA, 322 bp, Glycine max
aaagagcttacagtgagctgggtgggtccggttcatcctcttcttcgacgccatagcgttaagaacaattgatcatatacactacatatagcgagaataaatatatacgaggaccggaatggaatatatgcacagcatagcatagtgtgaaacccttcaatgattaagagagatatcttacgaatggtggagcggaagaaagaataatactttcaatgataagatagaaatggtcttgaccgtacctgacattagtagagatgaagacgagggtagggtagccgctgcttacgtatctgtctcgcaaacaagaaccacaact

SEQ ID NO: 151060 - DNA, 486 bp, Glycine max
  unsure (1)..(486): unsure at all n locations
agcttctnccattagctaaagttcgcttacacgtatttattatctttngngaaagaagcttatttcaattttacttcttatttttctttctccataaagtgcttatggaganagtcatccaaacatgatctatgcctaataatatttttgtaaggatgctttggggataaattccaaatatgattagtatatattcgtttttgttgacactatgttattcaacttaaattatcctagggtggtttcttttgaacaatgtgttaatgcaggtgcatttgaaatttatgcctaaaataatttttcccctaagtaaatgatgatcatggtgatatgtttccacaagtcttgtagaattggttgagattctgagatcatttgtatgtcagaanatgcagatctttttgagagtacagctgaagaaacgcanggaaaatttgggcaagatggtgaccgaggtgctatctatgattntctttatcctgataa

SEQ ID NO: 151061 - DNA, 322 bp, Glycine max
ctcataaattctgattgcatgaatagatcctcacatatcttattgtggatttagttgtcaattagttgaaggattttgcccatgtcatgtcaatatgacaatatttatagtaattttggtcctaattagaaaaacaaatgaatgtaaggatcatattgatttttttcaaagacctgattaaaaattaccaaacttaagtttcctacgcaacaatttaactaatacataactataagtccacaagtgtattttaattaaattaaataaaaaaaaatccttgatcggtataagcaggctactctacgctgtgggttgccctatg

SEQ ID NO: 151062 - DNA, 287 bp, Glycine max
gcgaaaatggagaccttattggagaggcttgcttatcttgaagctagtagatttaatcctccgcaagcacagtctgaggtgtctttgttttctggatcaagatcacttgcagcgccgcattcgatgaaactagatgtgccaaggtttgacggctcaaacgccgccggattgatttttaagatcacgcaagttttcgagtatcacacaactccagatcatgaaaggctcaccatcacatcattctatatggaaggacaagcattagctttggtccaatggatgcaccg

SEQ ID NO: 151063 - DNA, 514 bp, Glycine max
  unsure (1)..(514): unsure at all n locations
acacattaatactaagcttgagccaaatcctgactaccatanaccttaccctnggaagttttattatgaaagaaggaaaggaaatttccaatcaatgagaaagcataataggaaggaaaggaaattcccaatcaaagagtgggagaaagagaaaaatataaacgaaaggaaattcccaatcaaagagtgggagaaagaaaaaagaaaagaaagaaaattcccaaccaaagaatgggagatagtaaaaaagaatgaaaccatgacctataagtggtcttctccctttgattaccaaccaaaatcctgtgcgctagcgactnttcgccccgcactatacaaaaacagaaaaggaaaaaagccaaccataaatcaaaagccaataacacacaaaagccaacaaataatccatcataagaacccattcccaanggatnatctattgatccatgatcacgcatgtatatttgattgataggaataatttgaaagtcattcatactatctatggtcggat

SEQ ID NO: 151064 - DNA, 372 bp, Glycine max
  unsure (1)..(372): unsure at all n locations
agcttgatgtgaganagcgtggttgagttagtctttctacttttgtttgnngaccacagagtggtacctggagatatgtcgcgggggtcaggagaccttggggacgtcaggtggggtgctattgcccaaaaccaagcttgactaatcccgacccaacccgggcatagtcagtcagtgagaacctgtgatgtacctaaaaaggcgagctcatggcagtcaaccaataaaagaacaaagtccacgaagcaaggaggcttgtgtggcggctggccaactatgtatcttgggtggtatctggaaattagcctctggtaatcgattacagggcttaaaaatggagataggatgttatatggcctctggtaatcgata

SEQ ID NO: 151065 - DNA, 420 bp, Glycine max
  unsure (1)..(420): unsure at all n locations
acttgtagtcctcgcccttgtagatgggccaggctactctccttcctttctaaggtgaccctcctcttgtcggcatatgaaggtttgtaacccaacccgaaccttccacgattctcagcaaactccaccaagcttgttgtgccatccccatttcgacctaaacccatttcgggttcatatctgtctcttaacataacccgagccaccatcaaagtggaaccagataagcgtggctccactggaggagattccacataagcattgctcacaatttctagtgcttggaatgacatttccaacgactcctctgcaacctcaacatatggcgtagaagacgagaanattaccagtatgtcttccttccctaacactatgaccagctgcccttccaccacaaactaatttcttgatgcagcgtga

SEQ ID NO: 151066 - DNA, 412 bp, Glycine max
  unsure (1)..(412): unsure at all n locations
gatcttaagtcaccgcggctgcaagctgaagacataaaaaactttttttatatactatgaatgcgatgtttacttttaattcattaattgacttaataacttctgttatacctttaccatttgcaaggttaatcctnancataatataaattgtaccacactctaatatagatgtataaactctgaggtcatcatatcttaatttattattattaaaaaaacaagtaaaaaatatgaaggcatatcaatgggaaggagatacttacttatccctttcccctttctttatatgaccaaccattttttgtattggtggatgggaatcataccatgatttataaaagtggactttacattgattaattcaagttaatcattgatcatactattatgaataatacactattaaata

SEQ ID NO: 151067 - DNA, 472 bp, Glycine max
  unsure (1)..(472): unsure at all n locations
tcanaatcgtaatatatagctgtatatgtgtcacatatttcaatatataatgaagaaatgggagaagaaaaattagtatattattaaagaaccctggccctgcatctattttcattgttaaaaattacttaaaagttcaagataaatctaatctctttatttatttcttaagtatatatatatgtataattgtgattccacaagtttttaactaattaagtcctttcacttttaaaattaggtaaatntattaacgttnttatcatattttccacaaaaattctcagattctcatttttattaaaaattctaaaaaaatgtatttgattaaacacatatatacaaacgtgtatcaaacatgtgtcatagtgtgtcatatcttacacatgtccaacacaacaccagaacagtatatccatgcataatagcttgcatcatangtgcttccataagtgattcgcgagtgaagtca

SEQ ID NO: 151068 - DNA, 470 bp, Glycine max
  unsure (1)..(470): unsure at all n locations
agcttcagaccaaagttactataatctttgttctttnaccccnncaattagggatttcaaggtttgagaagtgaaaatgagaatggggtaaatttagagtaaactctcacctcacacaagtctataacattgatttaaacttgctcaaacttgatttacgcctcaaattccaccgaatcaaaattngactcctcaacacccaattntaccctaggaatggctcttgccttcactttggtcatnttgttttctctcttgcacagtccaagctttctcataagtcctaaatgacatttcaaactaggatttactcactntaacctccatttaccactgaatcccgttttagccttccaactctcaaagcctcactctttttctactcataacactacattctcactttctaaccctangttactctacccttcatcctacaatttccatcacaatttcacacataacataca

SEQ ID NO: 151069 - DNA, 406 bp, Glycine max
  unsure (1)..(406): unsure at all n locations
ttgagccttgnttccctttccttggtntgaagctcactacaacccttaaatgaaaaaccatgatatcaccatatccttaaagatatttggagctttggaattgttttgggaattagtgtgggggttttttgtttcattggataacttgtttttgtcggctatgcttcatgatgtattttgggccatacttgatgtacattgtatattggttaaatgttggacatgctgaatgaaatattgtntctcanaggttatagagtaaaanaaaatcataattaataataaaaaatgagtaaaaaataacatttaacaaataattcgaaaaaagaaatagaaaagcaataaagttgagtgaataagatcttaaatggcacaagaatgatgaaactctngttctactcttatg

SEQ ID NO: 151070 - DNA, 407 bp, Glycine max
  unsure (1)..(407): unsure at all n locations
tctgtctagagaacaaagaactacaattaggtaatatattcttttactctctttcacttaaaatatttgctttatcttcaaacatgaaaatgtctctactaaaaactaaattactaaattcaatttgatggcaatccatgatataacgaanaccaacaaaaattccaaggtttaggtttaaacacgatcctaaatctgaaggagattgcagactgaaataagaaaaagtcctacaagacccatcaaccaaccaagatgttgtgtntgactatgaaaacaaacaaacaaagaaacagggaatacctcgtcgttgccattgggtggttctgaaaccaatgatgtcagacctgcgtnagagacaaaaaaatctatatagtttattttgacaaaaaataatagatggtaga

SEQ ID NO: 151071 - DNA, 409 bp, Glycine max
  unsure (1)..(409): unsure at all n locations
tttgtgactctctcacttccttctaatcacacccccttacttnctaaactcacccacttcattcctattactcaaggcccactcatctcggcctagccactctatgacttattattcacacctaanacaagggtntcccatacataatcataatcatatatacaaacatcacacaacatcaaatcaaaattaattaagtaattaactatagtacttcaattaaatttagttactcttgtaatctaattaaaacacttaatcaagcattatagaaattatagtggtgcagtgcttgccttcatctgatatgctntacagngtaatatatcactgtgaacgacatatggntngggcatgtatgattgtaataaatggaggagaaagtattaaactatagtgtgatcaagta

SEQ ID NO: 151072 - DNA, 503 bp, Glycine max
  unsure (1)..(503): unsure at all n locations
actcaagcttcgactgcagatccctcttgtaagactaggcttaacttanacagttttatcatcacttcatattcagaaaaccacaaccccacaattcatccctggtaatgtagatatttagtcttgcttctatcaagttctaaggcaacggtacatttcccattgctaatgtcacctaatattacacataaatgggtgattagaccaagagcatgtggtaattaagcattgaaagaagcattgaacacacaaaacacaattaatcagatattaaaagtgactacatcaactgttccttataaatccccaactagggtgttaaccagccatacaaggaacccttatgcaaatgagacagaaagtatagagcaattgttgcttacacaagaaaggggatccctcctcctcttcttggacctacaatcactcaacacttttaatctctaaagtgatgaacttacttccttgttactactgctcttgctgctcagactctatctcaa

SEQ ID NO: 151073 - DNA, 318 bp, Glycine max
gttattaccagcaaaaccgatggttatatagacataataatcaaagttgtctgcatatattaacattggttgtggtaaaaatcgatgttgatatgcagatatattacatttttatatataaatgcttaatatataacatcagctaattaaataaccgaccgtgtaatattatattaacatccgtgttggaaaaccaatgttaacggtattactttctacatcgattaataacatatgtggaaagccttaataacaatgttgaaccctattttttagtagtggtgcatgaaaatagtacagggtgataattcatcctct

SEQ ID NO: 151074 - DNA, 388 bp, Glycine max
  unsure (1)..(388): unsure at all n locations
agctntaacctcatcgtccctcacagtctttagagttgggagccaatccaatcctttgtttcggactctcagccacttatgatagccgccgatgatcccattactgcttcccctaagctctctgtcctttcttcacgccgcattccatgccttgcgaactccttggagtaccctcgcgttgtggtcactaaaaccccgtgcgatgaaaggcgtgatgctttcgtctaatggcgctcctctcatggggtagccaagctgtcttatggtgagaacgggattataattaatacaacccctttgtcccatcaagggaacatttggacatccttcgcatgaagatagaatcctgattcttcctttcttctagcgagggaaccaaataacagac

SEQ ID NO: 151075 - DNA, 430 bp, Glycine max
  unsure (1)..(430): unsure at all n locations
ttctgtttaccagccacactactctaacatattttatgtattgttgtggttngnttcttcttctcttcaaagagttttgtatttataggtagtcttcataaagtgtccattatctcctaatgacttctttgtctttgttgagagcttgcttcccaagatatgtctgtttgtacattaaatgtgagtaataaatgtgcttcctcttcatgctgaaacatcactctttttagctgtcttgaatcacacttcaccaaaagtcaatgggctttctcacagaacagttatgattattgatatcagggtgtgtcttttaagatgaacaaatatgttgttattttaagacttgattattctcatacttccttggctttcaaaaatccttggaagaaatttcagacattcccttctagacaaatttagacatagagtt

SEQ ID NO: 151076 - DNA, 373 bp, Glycine max
  unsure (1)..(373): unsure at all n locations
aattcaaatcacaatttaccttttctggatctgcttttggattttcataggttttcttttgaatgggtttatttatttactttactggatttaattggttaattttttatgaacaacacctttcagaagcggataccattntaaggaaaataatattctaaaacgcgtaaataactaactattaataatgtaaaatttagagcaacgtcttcttaatttcaaatggcctttntatatgctataaattattgtaaaaagtgatttctgtagatacaaaactttatatggttgaattaaacaatattatattatattaaaatttatatttatttttattagaaatatattgactcgttaatttctatctattaca

SEQ ID NO: 151077 - DNA, 416 bp, Glycine max
  unsure (1)..(416): unsure at all n locations
ttccaagcattgaaacaaacaaccttaagggttaaaatcccactcctgtacatgatgattgcttcactgtcctattgtcaatttttccactaccatccctggtcctgctttagagcagccatcagtaccttgagcaaaggctctgacagatcagtaaaaaaaataatttctaaaagatnttgaggattaatggatggagaaccattgaatggcaatggaaacttatgatggtgtcatgatgtgcacatatagaggaatgtagatctcaagatgctcaagactgtacattgaaaaaatgtgatctttaacgactatggtaagtgagaccacanatttatagagagacagatcanagactaannatttntatcacaagttntggcaagaacaatagtgtgtcactcagaacaacctac

SEQ ID NO: 151078 - DNA, 438 bp, Glycine max
  unsure (1)..(438): unsure at all n locations
tttgtcatctttgagtaactnttcaatttgagcctcattaaaaggatccctatacagttgtatgagcatgaaatcataggagaagttgtacaagatgttggtcttgttttgcaagggttctcgtgagcaaaccaatttgagaaggagtgtcccacagaggttatagaagcctataaaaaatattgctttgtggttcccattcttagagtggtggtcattgaaggatgatacatcccgtcccttctccaacccccttttctgttcgcataccacccttataaattgacaatcaccatactcatgttgtgttgtgattgcgccatctccccgatcgcctttttgtttgcaaatgagttcatctctcatggaatctacaaaaattccatttgccttgaaacccctatcctttcttaaacaagaatanaataacttacccct

SEQ ID NO: 151079 - DNA, 445 bp, Glycine max
  unsure (1)..(445): unsure at all n locations
caccgcggctgcagcttacatgaactacatctcttcaatgaagtgtttatatcattngctataagatggaaagatgaactagagcctacgtgacatctgctacactctagtggcaacatgaactttgtcacatataaccaagatttggtaagctcagctctatttgttggatggaccaaacttagagagttctatgggctcactagaaatcattaggtcgccttgacccactatggatagagtgttttcctcctcaccatcttcaaaagcagctttgaaccaaaagtttttcctaaatggcctncttgtaccaccaagttcctaactcagtcacttttaaagtcctactcactgagtacaaagtgacttgcatcagtttggtgagaaataaacactcctatttgtatgcaaattttatatcatataatatctaaataaattcttt

SEQ ID NO: 151080 - DNA, 314 bp, Glycine max
tctatggaaggtggatctgtgagcttcactaatgtccttcaatgttgattttcagccatggagtcacagcagaagataaaggagaagaggagagaggaggtgccatccactatggaataagccatggaaggagaagcttcaccaccaagagagtgccttggataagaagcttatagagggaaacttaatggaggaagataatgagagagagaaagtggcatgaaaaatcgaaggaagaaagggagagatggtgaactttgaagtgtgtctcacaagactcttattcatcaaagttgtgacaagtgttacacatg

SEQ ID NO: 151081 - DNA, 350 bp, Glycine max
  unsure (1)..(350): unsure at all n locations
agcttgcttgtggagcttctatggaggctggatcttgattcttaatggggtcctttaatggtgattttccaccatggagatgcagcggaagacaaaagaaaggaggtgagaggaggcgccatccattaaggaataagccatggaagaaggagcttcaccaccaagatgagccttggataagaagcttggagaggatgcttcaatggaggaaaagaaagagggagagaaagagagaggggcgagcatgaaattgaaggaataaaagagggagagaagtggaactttgaagtatgtctcataagactctcattcattcaaagtacaacangtgttacacatgcttctattta

SEQ ID NO: 151082 - DNA, 370 bp, Glycine max
agcttatggtaaaatctgggacctagccatgatagaagtcactacagaggccattgcctccctcacccagtattatgaccagccgttgaggtgcttcacctttggggacttccagctatcacccatggtggaagaatttgaagagatcctatgatgccctctaggggggaagaaaccatacctcttcacagggttctatccctcattagctagaatttccaagatagtccaaatctcggcacaggaattataccacaggaagcaagtcgaaaatggtgtggtcgggataccgagaaaatatttggaggtaaaagcaagaatcttggcagataaaggcgagtggatcctgttcatagatattctcacactg

SEQ ID NO: 151083 - DNA, 433 bp, Glycine max
  unsure (1)..(433): unsure at all n locations
tactaagcttgaaggtaatggaactgccatgcagttctatttattgtatcattttgttggcgcgcttagcttgccaacatgatgtttgagtttaacgcccatgcgcttaatgccacctcttgcgctaagcccaattcaataatttcaaattccagagaggtatttatgcttagcgcgaggacacgcacttagcgttgtctgcaactctgattggtcctgcatttttcgcttagcctgagatgtcaagcttagcgctaaaacaagctctacttacagtgatggttccaggcttaacgcagcgcttgcgctaagcgcaatttcaagtatttcaaaatagtgaatgatcggcacttattgcatcctatcgctaagcccaattcatgagaagtcaattctatagaggacattgagcttagcgcangacagcgtgctt

SEQ ID NO: 151084 - DNA, 401 bp, Glycine max
  unsure (1)..(401): unsure at all n locations
caatggntgcagncgcatattttggaagattgcgttagctctgcacagaactgggcgcaattgccatttctggataaaaatcaatattttgctttctcaattgcacttgaatcgggcgattaccatttctgatntccatttcgaaatttggatcttttttcttatttctttatttaatctatgttttatcatttaaagtgtaaacctgtttggttgtgcatacacaccctctctcccctgcctccttcatcaattggtgtctttttaaaggaaaaggatttgtttttcgtatgcaattatggtcttgtaaaactttgttatatttttaaacccacctctctactctgtcaatgactcaactatcagattcagtttatgcactaacactccctatcaattac

SEQ ID NO: 151085 - DNA, 501 bp, Glycine max
  unsure (1)..(501): unsure at all n locations
tctgggtgtcttctctgatccctggtatttatttgttattagatatggaccncactgaaagctggtgcttgttnntttggtacactctaaacaagaatctactctccccacctagaggaagacaaaagctcagggagtttttggtttctgctcaagaattagaaagcaattgctgccatataccaatattggaatgaagctgatcttctttggccttatataaatatatataatgctcatatgaaaacaactagtaagtaaatgctcctaacttcttgggtattattgtaatatatcttacacaacaatgttttactctctcttgttcatttaattaaaattcttagctcacgtatattcatttatatgtaatatntgaatatttgtgtcatgcattaatgttagaaacacagcttctaacacaataacttatcgatatanntaatttttntataaagctaaaaatatggtcccatgtatatgaagttgatcacatgattc

SEQ ID NO: 151086 - DNA, 385 bp, Glycine max
  unsure (1)..(385): unsure at all n locations
gaatttaatgagactttttattatgtgtgtggtggacaagttaactaacccttgggtggaaagaatgcaatgaatgagagaggtactttgtttttatttaatgactcaatggttttgtttgtattctgtgaaagaattttgggaagtgctgttggcaaaatgacaatggacacaatgcatggtggtggaaggtggtgtatatttaccccaagaaaatattttatttatttatttatggtgggttcagatgaatactgttccactttccacgcaagaggtcaaccaacttgaggaaaggaaaatggtattgtctgaagtatgatccatatttacccatcacanatncaaagcaacatgatttggaaatgactttattgggtctcac

SEQ ID NO: 151087 - DNA, 477 bp, Glycine max
  unsure (1)..(477): unsure at all n locations
tcttgaaattcatgacaacactctgatttctgttgtttttgggataaaaatggtcattgaccagtcccttttccatgacttaaccaaattaaccggtgacggtgtaccatttgaaggtacactaaatgacgactagaaatttgatttctctgcacatgatgcccgccagttggtttgtaccaacaatgcggatatgaccggacgtcttcttgtcgggtcattggcttttgaaagccgcatccttcactatttaattgtgcgtattctgcttccacggtcttccaaccttgcccaggtttctgaggaagatctaattatcatgtgggcctttcataccgaccgtcaacttgactgggcacatcttgtaagatatcgcatgcatcangcattgcgattaaatgcacctttgccgtatccacaacttgtcactctcttttttctgccatttcaaattcctcttgattctgaaccttatgt

SEQ ID NO: 151088 - DNA, 308 bp, Glycine max
catgtggtactatgtggcggttttgctatggtgcacaacaagctttccacatccacaatgcgcgcataaacccaccatcccctggtgcccaccttcaactgagctcacgtactcccacgtagcccatatcctcgtttctctcaacaccgggtccccatcaatcctctcaagcttccacaacatccaagcaaaacaacattcaaacagcgcaagctatcacagccaagcaaaacagagcaaaggcagaaaactctgctcaacacatcaaccaaaatcacagtttttcccactcaaagaccccggtaaca

SEQ ID NO: 151089 - DNA, 315 bp, Glycine max
tgcataggctgctgaattgatttcattaagtgatcaaaatgtctagccacaatatctgtgaaataatacgtgcttaccatggaaactttggactctgctagagcacaaataaatcctttttatatagctttcagaatgatctagaggacatctattattaacatttcttactatatcttcctccatcccatgtactctgaattcaccctgaatcataacttcacaggagcatttatcattgtgactgaacttctgcaagcaaacttgtgcgaatttcagaagttcaagcatgaatctggaggggaagaaatattt

SEQ ID NO: 151090 - DNA, 489 bp, Glycine max
gcttagcgcattgatctcacgcttagtgcacaaccttgatattgatgctcttccagattcttttggcgcactgaagctacgcttagcggtggatgcgcacttagcccaactgatgagctaagcttaactgtcacttttagcacttcatgacttagtgatgtgtcatcattttgttctattccttaaccctttttgtcaccatttcaggcattagacaactcagtggagagagcttatatgattactgggagaggttcaagaaattatgtgccagctgccctcaccaccagatttctgagcagcttctcctccaatatttttatgaaggactcagtaacatggagagaagtatgatagatgctgccagtggtggagcccttggagacatgacccctgctgaagccaaaacttaattagaagatggctccaactcccacaattagtgccgaaatgatgtattgcatagagagtgatgaagacccaaatcat

SEQ ID NO: 151091 - DNA, 508 bp, Glycine max
  unsure (1)..(508): unsure at all n locations
cctcagctgtctaggccatnnatggattgtgagcctgcaacaagatctttatcaactgttgtgtacccntttggaagttccatataaacttcctcaaatatatcaccattcaagaagacattatccacatcaagttgtaagattggcccatttttagcagctgcaacagccaaaaggactttaactgatgtaagtttatcaactggagagaaagtatcagaanaatcaataccagcttggtgtgtgtaacccttagctaccaatctagctttgtggcgatccatagtgccatcagggcttaaattcactttgtacacccacctgcagccaatgcattgtttaccaattggaagaggaaccaaagtccatngtgttattggattccaaagcttgatctcaactgtcatggcttggcgccactctgganaaggaacagcttgatgataaaattgtggctcatagatggtggaaacctgagcaatgaagtccttataaggagagttgagat

SEQ ID NO: 151092 - DNA, 426 bp, Glycine max
  unsure (1)..(426): unsure at all n locations
ggatcttaagcacctgcgctgcaagcttctgggtggcaagttctataaagggttgtcctaatntctctacacttccttcaccacttaatgagttggtgaaaaagaatgttgcattcacatatggtgagagacaagggcaaacctttgctttgctcaaagaaaagctcaccaaggcacccgttctagctctccctaacttttctaaaacttttgagctaaaatgtgatgccctttggtgtatggtgtgggaagttgtgttgctgtacggtgggcaccctatngcttactttagtgagaaaattcatggtgtcactctcaattaccctatataggataaggagctntatgccttagttagagcccttcacacttgggaacgttacctctgttccaaggagtttgttattcatagtgatcatgaatcac

SEQ ID NO: 151093 - DNA, 291 bp, Glycine max
  unsure (1)..(291): unsure at all n locations
ctctgaatggaggctctggtctcttactaaaactgcatgttctgcatagtcatttgcctcacaagttctttgagggaaggttgtggaggggtctcaactgttggctgtttctggggcttgtgttgttgctggattggtggaagaatgtatggtctgcttggccatcaacattttggaaggaaagagcangttgctgttgttgggtgctttgagggctaaaccatctgagattagggtgattcctccatccagggttgtatctgttgctcgagaggtcatatatagtctgct

SEQ ID NO: 151094 - DNA, 362 bp, Glycine max
tattaaacaatatgttgttaagactgaatcatgcaaatttttttggaaagaaaatttgcctttgaaatctccatgcctattcattatattcgggtagataactaaaccatgttgatactaactacgtgtatctaaaaaaaaccctgtgaaaactactacttgtttaaatatatcattgttgctggttgaaaattgttcaagttaactgacttaagtaaataattttggtgatcaactctgttctgatttacaataatttttcaataaacattacgtaactacttgttaaataattattaactatttatatggtgacaacggttgtgactgcagagcggtggtatcattgacttttttacttt

SEQ ID NO: 151095 - DNA, 110 bp, Glycine max
  unsure (1)..(110): unsure at all n locations
aacctcagcttgatttggtgttgacttngtaaaaatgagncctatcctgtattatgagaatttctcaataacaaggncgcatgaaattttcctatatatatatatggttc

SEQ ID NO: 151096 - DNA, 337 bp, Glycine max
  unsure (1)..(337): unsure at all n locations
catgcaagcttatcncagtccatcttgttatagctatcttctttctccctgaatgtaaattgaacaaaacaacttatggatagttctctaggtgttgttggcaatgcttaccgatctgaagtgaagtatcatctcaataatctatattgattattgacatttaataaggtcaaactttaattgttaatggaaaataacaccaaaacacatacaaatatggtgttctttgtttgctcagcctcaacaattaatctagctatttcttcatcatgaaagttgacaaagccgatcggaatatttgaaaagcaaatctcataaggcatgttaactattcatg

SEQ ID NO: 151097 - DNA, 338 bp, Glycine max
acacacccactgtcagagctctcgttggcactcgtgtaagccacacacgaacaatccctcaagcatctgtctgtgcactctctcatcccaatcgatgctggcacgcgcgccttcgacgtgtcgggtaccttcacacgtgtgaactccactaaacccttccagctccgacacgtggacacattactcttgctcacgcacccacccgacccgtgtttaaggaaccattccctgtcgaattatgggttcgaagcgggcaaacactcacactcgaacttgtccgcgtggatggatctcaactcgctgtcgacccgcaccgtcggaagttggccactcctcct

SEQ ID NO: 151098 - DNA, 394 bp, Glycine max
  unsure (1)..(394): unsure at all n locations
agcttctagagaaagctacatgtatctgcctcngtttttatgcttcccagccttcgntaaccggtggatcttctcgaaatttggtctacaacttcacaagacacttgtccatgatctgaccgttgggatctttgagaagatgtctggagtgtgctaaaagcctcttaatgaagcttctggaggaagccttctaatgaagcttctagagaaagctacatgaagctacctctggtaaaacgcttcccagacttcgttaaccgttggatcttctcgaaatttggtttgcaacttcacaagaaacttgtccatgatctgaccgtanggatctttgagacaatgtctggagtgtgctagaangcttcattaccgagagcatctcttatttaagcatttc

SEQ ID NO: 151099 - DNA, 459 bp, Glycine max
  unsure (1)..(459): unsure at all n locations
agttatttgaatcgattatgaaattaatcattaatgaagggtttaatcacattggcatacctaggacgtgagttaatggagactaattatacaaattaaaatcaaggattaaaatatataaatataaatatagtacaaaaattataaggaaaaaatttactttgtgaatntttaaaattgagaggaccagtggagaccttatggtaggtcaatcaataaacttaattacacttaaaattctttgtgtcatctcaactaaattgattaaaaatttatgatagatcatttactataattaagtgtgttaattatcaactgaattacacttattaagttattcactaaaaaggacattatctaactattntcattttttctgaanaataaatanngaaaaaagtaatttgtatatatgtaacccagctcgataattccctttanggttactaacgtcaatct

SEQ ID NO: 151100 - DNA, 471 bp, Glycine max
  unsure (1)..(471): unsure at all n locations
tgcttctggaagctgaatactatnggattactttgctggatattcatatgtgctaacgcatgggctgctctatataaaataggaatactgactaatctgcacaatattgatctaagtggaatagctaatgaatttattcagaaatgtgaagaaagaaagataaaatatcttaaatcttcatactaccttcatagntagttgtcaacgaactggtggatggactaaagattagagaatttgaaaaaaaaatcttgtgatttctaaaattcttaggtggccgctcacantgattatgttntatattntataaatagattgaaatatttgctgataattgtgaaatttgagttaatttgataatcaattctggttaagaatgattgaaatttctttactttactattggttntaatgaaataataaagaaattaatatctttgcagttntttggtagcaaaagtaaaagaagaa

SEQ ID NO: 151101 - DNA, 320 bp, Glycine max
  unsure (1)..(320): unsure at all n locations
gcttgatgctgctacattgctacttatcatctctgtattccaaccatcaacaatcaagtacaaatattaagtttattctctccaatttaaggcttcaaatagctgcagacaactgagacaagaaaggaagacaaagagatatttgaaaaatcaagttcctttgtaataattagatctgccacaatcatgagtggcacattgtcaaggtttaattctgtcaaagcacaaaaatttcctaccaaacatgatattccagaaattccattntaacaaatttttgcattanggccaatggagtacagaataatggtgggttttat

SEQ ID NO: 151102 - DNA, 426 bp, Glycine max
  unsure (1)..(426): unsure at all n locations
gacattgagagattaaggagctctcttgctagtgcaagacacctttacatgctagtaccgttttaaaaaatcgcataggggtggaactggatcttgaagatgctttacatagagattaacattttcaagtggatttacaattntttcttttaaatatgttaatagttaaccttgttccccttgttttagtgttactggggagaagattaaactaactatagttntggcttcttggatacacaagtttgcttcattntcttaacaatgcatgaagaatatgttctattccatttgttgatngcacgttattattctgagtcatgcgtaagggtccctggtcaatctagtccaggaaagtttggttacatctttcatagttgcactttttgtaaattggaagagcaagtgggttagaaactagaatgt

SEQ ID NO: 151103 - DNA, 377 bp, Glycine max
  unsure (1)..(377): unsure at all n locations
agcttatggcatataaagnactggatccattgatcttanntttcttttaccaatcatatctgctcggcttagattctcctggatttaactctgatccattagatgtggatttttgtgcaccaattagagatgatgttgattgattaaggagttctccaagataccaggttagaatggttctctttggactgcaatcttataagtaatgttacatttggtggaccacagtgcttgaaaatttatagatagccttcattttttagttatttgagaatacgacattctgttggattcatactggtgttcctctatatgctaaatttttggttggtcacttcgattttatttaaaagaataatttcttccccattacatgg

SEQ ID NO: 151104 - DNA, 299 bp, Glycine max
  unsure (1)..(299): unsure at all n locations
actcagcttggtatctncttcttactacatcaagaatctaccgggtgagtcttctcttgtggctgcccgcaggnctagctccatcctctaacactattcgatgtatacatgcggatggtctaataccaggaatgttcgccaggttcagcctatatccttcttatgcttcttgagaacagacaaaaacttctcctcttgctcatcaacaagggaggcagatataatcactgcaaaactattcctatcatccaagtaagcgtatgttaaacttgatggcagaggcttcaattctggtgtgg

SEQ ID NO: 151105 - DNA, 444 bp, Glycine max
  unsure (1)..(444): unsure at all n locations
agcttatgcgcatatttccttattatactgttacttgcacaagacatcctatcaactaagaaaaatgcacccatatacaatcaaggtagcttcattacctagattatttacatgtacttccaaggtgtatttattatttacatcacacacgcctccttggctgaatttacatacatgcatactcaaagcattttggggtaccaaaaactgcacatgcgctcatcttggtatttctaatacccatacatatacaaacttcacgatgaatcttgactacctacacaataaggtgctacatttcatgctttttttcaagttttgctacctaaagccacatgcaaattcaagcatatnttcctttgctgactaaaatgtattcaaatagaaggatatatnntttgtatatgtttctcacatacatgcacatattatgtatatattttt

SEQ ID NO: 151106 - DNA, 411 bp, Glycine max
  unsure (1)..(411): unsure at all n locations
cttgcagatntggtcttcgccagagaaaggatctatgtgggtctttttaatgcacattngatcatcctactaggacgactgagaaaactggggcaaataaagagggtgaggatgagggagaaacccatgctgtgactgccattcctgtacggccaaatttcccaccaacccaacaatatctttactcagccaataacaaaccaccttcttacccaccacccaattatccacaaaggccatccctaaatcaaccacaaagcctgtctaccgcacttcctatgacgaagaccacctttatcacaaaccacaaaaaaacaccaaccaagagatgaattttgcagcgaaaagcctatatgattcaccccaaattccggtgtcatatgctaactcgctcccatatctacttgataa

SEQ ID NO: 151107 - DNA, 414 bp, Glycine max
  unsure (1)..(414): unsure at all n locations
gcttctcaacgaagctacctagtctattaatagaagtatgtgtnacactcgttgtaactttgatgaatgagagtcttgtgagacatacttcaaagntccacttctctacctcttttattcctttaatttaatgctcccccctctctctttctctccctctttcttttcctccatagaagcatcctctccaagcttcttatccaaggctcatcttggtggtgaagctccttcttccatggctaattccatagtggatggcgcctcctctcacctattctcctttgtcttccgctgcatctncatggtggaaaatcaccattaaaggacctcattgaagctcanagatccagcctccatagaagcnccacatgcaagtttccatcaagtggtaatcagagcacaagagcttcaact

SEQ ID NO: 151108 - DNA, 429 bp, Glycine max
  unsure (1)..(429): unsure at all n locations
gcagacaattaccctttgaataagtgctaactctgtcttgtgtttctctcttattaaacttaaagaaacaatgaagcatgaaataaaagtacactggacaggccacctcaagatagaaacatctgcaattgcaataaagtaacactacaataatcaccatagctggattatcgcaagaatgaagagtgctaacagtcttcatatcatccgtgggatgatgctactgtggattttatgacaagtggaggttataatattgctcctttgatgggaaaggtatgtatatgaagccttccaagttgctgatgagtgttgtatttattatgttattcttatggcatttggaccagagaaatcctntacaacatatgaatactttgaaatgtgaatcctcatcataacttctgattttccatgagaaccatgact

SEQ ID NO: 151109 - DNA, 458 bp, Glycine max
  unsure (1)..(458): unsure at all n locations
agcttgtgcncctctctctcatgcgagctttatttattcatatacttggttaactttcctcatttatattcttacttgaacgtcgaagtcatttattttgcaagttcccttgtcaaaggtactaaaagccgacgtatgaagtttgggatccactgtccaccctgacatgtcacggtttcatgttttggtaaaaacattaaataaatataatactattaacttatagcactaaaaactaaagcanaagcatcatttcatcggttnttaacattttaagttaacataaaatcaaatatatcataatatttacgtttatgatttaatacgatacaacactgtcatttacaattaacatattgagtaaaaatccagatgagagattaatacttttctcttatattattagaaattaagatataaaatctaaattaatttaagttctacatatatgtttataa

SEQ ID NO: 151110 - DNA, 308 bp, Glycine max
  unsure (1)..(308): unsure at all n locations
ctcagctagccatggacctgngtgttcccagtttcatcgtatcttccgtaatactcaccacctctatcaaatctaataattntcacgtttctatctaattgtctttctacttcattcaagtaaatntctaaggcatccactgcctgagatttctcatgtagtaagtatacataaccataatgtgaatagtcatcaataaagggtgataaagtatctttcctttccaaaataattaacatcaaaaggtccacaaatatcagtatgcataatttcaagaagctgagtgcttcttataactccttcctttg

SEQ ID NO: 151111 - DNA, 404 bp, Glycine max
  unsure (1)..(404): unsure at all n locations
ctatcatggctagggcctagattttaccataagtttngccaaaagcttgtcgctggagctgacccatcaactggcctaacttcttaaggctggtgacatctaggcccttaatcttgacatgatagaatctttttccgatttgaattgtccccatcatttacctaanaaggagtgaatcaaggctctgatatgaatgatgcaatgcacatgcatgaaacgaaaagaanaacaagtggttatttacatatacgagaccgaacaagatccatctttntaatactatgttctaggcattgccgnccccaacgtatgcattataaagtgacgcttacttctaagagacacaatatcactagatatacagcacaactataatttatgtgctatccgcagaagaatgcatg

SEQ ID NO: 151112 - DNA, 397 bp, Glycine max
  unsure (1)..(397): unsure at all n locations
tctcagcttctgatgaatcaagattgattcaaagatgtgttgatgataactaatatgatgacaattggtgattacaaanagctcaaaggtcaatcaaagaatgagttcaagatgctcaagatagaatccagaacacttaaagattaaggagaaaagttgaagaacacttcaagattcaagaggaaagttgatttcaagaatcaagattcaaggatcaagctttcaagaatcaagatcaagattcaagaatccagagaaggcttaatcaagataagtatgaaaaggttntttcaaaaactgagtagcacatggatttttctcataacatgnttaccaaagagtntttactctggtgatcgaataccagattattgtaatcgattactagtagccaaat

SEQ ID NO: 151113 - DNA, 334 bp, Glycine max
  unsure (1)..(334): unsure at all n locations
cagtctacagattaaaggaaccaagaccacaaagcaaggaggcttgtgtgatatatgggttatggcctcttgtaatcgaataccaagggtgggtaatcgattacaaggcttaaaaatgaagataggaggctaagatggtctctggtaatcgattaccaaggggtgtaatcgattaccaggcttgaaaacgcggtcaggaagctaggagagcttctggtaatcgattaccaaggggtgtaatcgattaccaggcttaaaaagggaactggaagatgtggangctctggaatcgttaccatctgtgtaatcgatacacaaggaatgggcatggaat

SEQ ID NO: 151114 - DNA, 265 bp, Glycine max
  unsure (1)..(265): unsure at all n locations
ctattaaattcacagtttccctgctcacatacaccagaaacagcaattcgttccgattcgttaaccatgggatcgccttgaaacgcttactggatggtactagtacataaatctacatnttgaccgttgggatctgctagaaaatatctagaacactagatgtactacctttaccgtgactagcaatgcagaaccatatttttgcaacatcttgaaaaatctgctgcacaattcaacatcatttttctgcttaatatggaagatt

SEQ ID NO: 151115 - DNA, 493 bp, Glycine max
  unsure (1)..(493): unsure at all n locations
agcttcgacgtcccagaatttcttttggattattcaatggctctgatcttcccaatgatgccatgcccctttgctttgttcgcacgccactgggccactgctgtgcctcagcatagacatgtgtcccccaagtttttccaattacttttaagattaaatatttttttagtatacctaaaaataaacaaaacttgatttcactttttataattttcctttttaaaaattataacgaatagaaggagtgtcttatgtgtttatcagttagatatacttagatgcattntgaaacgtgtagccacaaattggatgaaaatttaaaaatccacaaaattattgtntttagacattattaagtaaaaaaaatatttttttctcaaaatataagcagaactcaattanttttatcttatctaattgaactatgttaaaatatcattctntaataagagattatacttaatatcanatcaanataatttaagaaaatatt

SEQ ID NO: 151116 - DNA, 422 bp, Glycine max
  unsure (1)..(422): unsure at all n locations
attgatgaatttactagaaaaatgtggatctatctcattaaacatcaaagtgaagtgcttaacatctttaaaaagtttaagttgttgagtgaaaaacagagtgataaggtaatcatagtgcttagaacagatgaaggtggtgaacatgaatctcaagtatcttgtgacgaagaggaaataattcatgaagtgacatcttcctatacacctcagcataatggtgtctgattacttctgaggagaggcaacttctactgctttgtatattctgaacagatgtcccactaatagattgtanggatacacacctgaaaaagcatggtcagaaaagaaacctagtgtgagtcatttcagaagtattggttcactggtgtttaagcatatgtttgagcatatcanaaagagacttgatgacaatgttg

SEQ ID NO: 151117 - DNA, 416 bp, Glycine max
  unsure (1)..(416): unsure at all n locations
agcttcatataaagaaccacgctctaaactntggattgttgatgctctattttatctatctcaaccaacattccaccataaaattcaatcataataaaagtttccattatttgcatccaccaatttgaaactaaatacatattaataaaaagactccacaccaccaccactgtgctttaacagtgaacacaatgcttgtttaaatagttcggaaaaaaaaggaagatcaatctatgagtaaagtatgaaaaactactcgatcatcttgtaagttcatttaaaactagttcgtgtaaaagatttccacataagcagcgtgacgcactaatcacgccccgtacccacatacaccttcattattcacagttcaaaacatatatcaaagccgatactgagaaacaataagctaattctga

SEQ ID NO: 151118 - DNA, 348 bp, Glycine max
  unsure (1)..(348): unsure at all n locations
agcatacctcgaacccaaatagtgacaatggcagtgagatctaacaaaatggcactatacttgaagctttcctcgtacctcatacagcaatactacaactgaagacgtattattattattatcatcaataaaacatgaacacccacggaaacttagcatacacgaagttgacctacgtacctcgcggagaaagctttgagctttgagcacccacaagtgtttcagcaccctagtaccaagagtgtatgtagggttctcttcgatccacacttccaagagcagtgtangggggtttgtgggttcgagcgaggggtttctggcaatattgaaaacaatgtgggacaatgt

SEQ ID NO: 151119 - DNA, 376 bp, Glycine max
  unsure (1)..(376): unsure at all n locations
gctgctctanattacattgatgtttgtatntatgggaggaggttatatgccattttcgctntaagagtaatgtcccactggtaaaactaactttccaaatgtttgccttcgcaggaatggccccgaggaagcttgcctcaaagaggtccaggaaggacaaggcggccgaaggaactaattccgccccggagtacgacagtcaccgctttatgagcgttgtacaccaacagcgcttcgaagccatcaagggatggtcgtttcttctggagcgacgcgtccagctcanggacgacgagtatactgatttccaggaggaaatatggcgccggcggtgggcaccactggttacttccatggccaagtttgatccagaaat

SEQ ID NO: 151120 - DNA, 415 bp, Glycine max
  unsure (1)..(415): unsure at all n locations
agcttgtagcatgccctaaatgtgtaattgggattattactccatctccctaaattctttatttttattatgaaaagacaattattccgtatgataaataaatatattaatctaacactttttatttttattgttattttcttgattcagtgtcaacctttggagctgtgctggacatggtaacagacaggttattctctgctctctctttatgcatgcagaccaaagaaaatgtgatgattgatgctgttatagctcctttatgttcaattcttgtgtgctttgaattgatgtggcttccttaataccagaattagcactgcttgtctacttgtagtcctttcccaactgtacaagtaagatattntccctttcaagttgtantcagtcgctgtaatttcagcatgtcacctga

SEQ ID NO: 151121 - DNA, 357 bp, Glycine max
  unsure (1)..(357): unsure at all n locations
gcttctaaactttatacaagaatgaagctctgattcttcttgttagacaagnggcctcagatatcttaagaaaggggggttgaattaagatattccaaactacttccccaattaaaatctatttcactttcttttcaagttataaattcccttaacaatgaacttcttaaatattaattcaaataaaacaatttgaatatgaatataaagcaataataaacaaaggagattaagggaagagaaagtgcaaactcagatttatactggttcggccacacccttgtgcctacgtccagtccccaagcaacccgcttgagagtccactatcttgtaattccttttacaagttctaatcac

SEQ ID NO: 151122 - DNA, 470 bp, Glycine max
  unsure (1)..(470): unsure at all n locations
gctaaagagganaccaattgaatggggtacagaatagcagctaccatataatgtatcgtttaatgaaaagtcaatggacgcagaagctttgggtgaaaggtttcctcanataatcaaagcagactctagtccttttgattgtgattctgaaaaatccctttatgaggaagaagaagcccccaagtctggtcaacacgtggagtttacctcccacggttcacacacccctccttatggatattcagaagcccacaatcatattgggccttccactattaacaccccagaagcccagttgaacgaaactcatcagcagcatcaggagatatccaagggtctacaggtgtatacaaganagaagtggtacaaaaagaaagaagcccaacangactctttaacagagttaaactctgctctattagaaaaagaaaaagaagctatcactgagagacagcgtgaactactatatc

SEQ ID NO: 151123 - DNA, 461 bp, Glycine max
  unsure (1)..(461): unsure at all n locations
agctntatcaaatggatgtaaaaagcggatttctaattggcttaatccaagaggaagtttatgttgaacaacctctaggatttgaaagtgaagcccttcctcaacatatttttaagctcaacaaagccttatatggacttaagcaagctcctagagtttggtatgaaaaacaaagttcatttttcttgaaaaatggctntgagcgagaaaaggttgacataacactctgtcgcaaaacctatgattctcagtttttattagtgcaagtatatgtggatgatatcattttcgatgctactaatgaaacactntgtgaatatttttctaagttgatgcagacataatttgaaatgagcatgatgggagaactagaattctttctagaatacaaataaaacaaacacncaaagtcatctacattcatcanacaaagtatgtgaaagaaatactgaagaaaatca

SEQ ID NO: 151124 - DNA, 385 bp, Glycine max
  unsure (1)..(385): unsure at all n locations
tgacaaacctaaggtgtcccatatgagtacctaagtctgtattgaaactaaaaataagagcaaacctacctaatgagtccctatgtacacaaatcatgaagatgttgggtgtacgagtgattttccaaaagagtgttgcactactcaaaacattcatcataccacctattttagggaagcctaataatacttattntgggcaccaacaaagcacaaggatttaagctcttgcgaaccaaaccatcatccaacaactcctttacttgaggaataaactcaagcctaagaggtgtgacaatgctaacaagtgtctttntataaaggagaaaatgtggagggtgtctaagaggggaaatttctttaatatntcgtattatttcaaaat

SEQ ID NO: 151125 - DNA, 418 bp, Glycine max
  unsure (1)..(418): unsure at all n locations
agcttctcaccaagaaacatgcctaagatcctctccccaagtcttcttgacttcctttcccttgctctcagccctgtcacaccattcaatgatgacccttttgacaagtcctctccttcattagggaactcatcaaaggaggataaagccatagttgtaaagggcttctacttgcatccctctcccatgaccactccaagagactcagaaccacaattgttgtctctattcccagttacctcagctagagtctcattagaatcaccttcttgaggagattggagaatagattgtgttcctgtgtttgggatgatttacatagagagacagcggntggctggtaattacatcatcggtgtttatttatttattcgaatgggttatggggtcctccatcaacaaagttcanaagctttgg

SEQ ID NO: 151126 - DNA, 448 bp, Glycine max
  unsure (1)..(448): unsure at all n locations
aagctagagcttagctacactctcnnctcttataactgagctcacctacttgagaagcttccttaagaagattcctaaagaagctagagcttagctacacatacctctctaatagctaagctcacctccttgagatgagaagctagaacttagctacacaccccctataataactaagctcacccccatgacaaataacatgaaaatagaaaaaaaagagtccttactacaaagactactcaaaatgccccgaaatacaaggcttaaaccctatactactagaatggccaaaatacaaggcccaaacgaaggagaaacctattctaatatttacaaagataagcgggcttatacttagcccatgggctcgagatctaccctaaggctcaagagaacnctagggccatccttggattctagccaatctactggagtctttacccatgcc

SEQ ID NO: 151127 - DNA, 340 bp, Glycine max
  unsure (1)..(340): unsure at all n locations
agcttaacaagatatattttatatagttggggattgtcctttatatctaaaaaagctttntaaaaagcttgaacttgacctttatagtaaacaagtcgagccgagccttacataggccgagccaaaggtccttgacaagttgttcggctcatttccacccctagtcgcttgcaacgtgggtcatgacgggatgacaataaaaaaatatagagaaatgtcttccacaaagggaaaattggacgagtcgctatcaacgtttatttaagaaaaatgttgagacaacaaaaaataataaggaatgatctacggtctgagaaaatagattctagagtcgtttacg

SEQ ID NO: 151128 - DNA, 503 bp, Glycine max
  unsure (1)..(503): unsure at all n locations
tgagacttctcctctggtatatgttccactccttctgttnntgtttatatgtntaaanaagggttaccttctgttntgtctatatttttatggtctaaaaaaaagattagtccacaaaaatatttgttttcaattctatttttataaaaaactattatttatttttgtatttatatttaataaatgatgtgattgtagttcttcgttaattaccatattttatggttcttaagagactaaaagtactcattttattaaatgttgagaaaaaattaaacaattcttataggaattatatgacaaacattgtaatattntttttggaagctttaaatatattgttagtccatgtaataaatgttttttttattttagttctttaaacatagcttgctaatatataatctctgtaatattcaatcttatttagctctagtcccacttgctacttggttatcataaactgatgttatatttcaaccagttatgtgactgcttccaac

SEQ ID NO: 151129 - DNA, 342 bp, Glycine max
  unsure (1)..(342): unsure at all n locations
ctgcagctgggggaagatgcatccaatatacgtctctataaangaagacctatacttacatttacaaagaatggtggacccagaccttgcccatgtgatggaagcttgctatgtgagcctctatggatgcaggatcttagagcttcaatgaggtcctttaatggtgattttccacctggagatgctgcggaagacaaatgagaacatgtaagacgcggcgtcatccactaaggaataagccatggaagaaagagcttcaccaccaacatgagccttgtataacaagcttggcaaggatgcttcaatggaggaaaacactgaggtggagaaagagagaggggg

SEQ ID NO: 151130 - DNA, 427 bp, Glycine max
  unsure (1)..(427): unsure at all n locations
ataaaaataaaatttaaagaaaaaataaatatagacaaaaataaaatttcaagaataaaaaaacaaaggattcaataagatgtaataaagtaaaagaaatcataatttatggttgcttcccagttttcatccatgattgggatgggtgctccaagaagtacaactttttctacaagttcagctgtcaataataagcaggacagatattaaaagtatggtaacctctcattcaacggataaacatganaagagtatgcagggacattaaattatatgcatccatcactacaggttaaaacataanagaacaggatanataaacaaaagagggatatgaacatcattcacagcactacttagaanataataacttcgctttatcagaaagttatagcctaaatcaattacttgaagtaagccaatcttg

SEQ ID NO: 151131 - DNA, 260 bp, Glycine max
cttaagtcaccgcggctgcagcttctaaagtgccgatgctaaagataattctatctaacaatgctcatgtgttcctatggtgtctcctaagatgctaaaccccaattcttcatgatagtttagcctaatcctgatcaagcatacgcctcagattccttttgttggactaatctcaactaggaaaacattaagacaaacatactacaactataatatcacaccccgattcctcgtgatagtgcgacaacttagccctgtcc

SEQ ID NO: 151132 - DNA, 435 bp, Glycine max
  unsure (1)..(435): unsure at all n locations
tttatgataacaaaagatgatgacaaaggtgatgacaaaaagctcaaagatcaatcaaagaacaactcaagtgaatcaagaacaattcaagagttcaagataagaatcaagataaattcaagactcaagaagaaagtttagagtcaagaatcaagattcaaggttcaagatctcaagaatcaagatcaagattcaagactcaagattcaagaatcaagagaaggcttaatcaagataagtatgaaaaggtttttctcaaaaattgaatagcacatggtttttctcanaacatgtttaccaaagagtttttactctctggtaatcgattaccatattgggtgtaattgataccagtagcaaaatggatntgaaaagttttaaattgaattacaacgtccaataattcaaaagctgtatcattacatgtttggaatc

SEQ ID NO: 151133 - DNA, 445 bp, Glycine max
  unsure (1)..(445): unsure at all n locations
tgcagcttacacaatntatttttctaaacttgagtttgagaatatgttggccttcccacacaggtcctttttctgaaatttacaaacacttatatcaaaggggaacgccaagtatttaaaattaaaatggaatgatccgagtatctaacacaaggaacttggttatttggcaaagctttgttcaataatcaggcattttgttgacagaaaataataattgtgaattgaagtaaaagtatgatatatcctaatgtgaaaaacaataaatgcaagcaattaaaagtgacatcagtggtttaaaagagttgggtctttctaataaacaagttgatgcatataaagatatttctctaattataaatgttcttatgttctatgttgaagactaaagtactaaacctcgatcccttgtaagttagactatattaaaccaagcttcgtcctc

SEQ ID NO: 151134 - DNA, 437 bp, Glycine max
  unsure (1)..(437): unsure at all n locations
atatttaacctatataaaccttggggatatatgaagtagaattttaattttttagaataaaaaaaactttcataaattgatgactttacaaaaaaaagtcatttgttttaattttcactatcattntacactaatattaactaattacagtgaataatattttataaagccagcgattaatttaggaattttaaaatttttaactcataatttcgaaaattaatgtggagttgtactcattgccaatgcttgatttaatcaacttcacgaattataaatgcgttaaatgtctacatcaaattatgacatgttaagagacaagatgaggttcataagatcgtagtggtttggtgaaggggagatatctgcatgacgtttagagtgtgtttggtggagaaattaaaattttagaaattttaatttaagaattcaaatac

SEQ ID NO: 151135 - DNA, 261 bp, Glycine max
  unsure (1)..(261): unsure at all n locations
aagctaccattagtcattcgtgattangtatgccctcatagtcaaagaactggaatattttaaatatcttgcccatggggtcctggccatcgaagccgggtacctccagcttcatgtgaaagcatgatagtgtgggaaaggtgggtgtttgttgagattttgattaagagagggtaactggctaagcaggtaatcatttcagaatggaatcaatcttgttgtcatggncatttgtgcttgggtgagaacggcgtggttcta

SEQ ID NO: 151136 - DNA, 441 bp, Glycine max
  unsure (1)..(441): unsure at all n locations
gcaagcttgttccgaanaacccatttggcttgtgaggtgcatgtataaggacataattctctcacttgnncctttngaatggattcaattcatcatgcaaaactaacaaccaatgttcatcatgcaatgcnttatctatgtttctaggttcaatttgagaaacaaaagccatgttattgcataaatttctaagtctagagcgagtggatactcccttagatatttcacctatgatattgtccaacgatatatctctttgggaggtgtggcagtgatttacttgctttgctcaagatccttaaccttggattcatacttcagtgcggtgtacttaatttgaaaacctacatcctcatcttctcaagcattttcttgaatgagagttaatttcttacaaaccacattgtcagatttntcacacacaatgtttcctactaacac

SEQ ID NO: 151137 - DNA, 381 bp, Glycine max
aagaatggacctgtggcttatcgtctgaactgccggagcaagctcccttatctgtcttcactgctccttctgagccatttcgtggcaattcaacctctccagagactagtgaagtcactcaattgcctatccaattcttctagaatcaccgcctcatatttccattgagcatcttgagtcacataaagcaatcttcgacggggtcatgggaagtcttggtgcaatgggaatggctttctcctgatgagacttcatgggaagactggaactccctaaggcaagaatatcaccttgatgacaaggtgattctgcaagggccaccgatgatagctgggaacacagagattgaattaacgaagctgagaggaactaagtcacagc

SEQ ID NO: 151138 - DNA, 250 bp, Glycine max
taacgcgtcatgtgatgatagctctatcgagcttttcttcgtgggttggtgggttctgtctcgtaaaatggaatgatcactggctgacatattctcaattagctttgttgcttcttctggggtctttagttttatctttccccctgaagaagcatctaacaattgtttggtttgtggtctaagcccatctataaaaatattcaattggattggctcagaaaacccacgagtgggagttcaacaacttctt

SEQ ID NO: 151139 - DNA, 406 bp, Glycine max
gaacaaaagttgagagaggaaatgctgatacaactcttttcattaaaaagtcctctcattacattttacttgtgcaagtttatatggatgacatcatttttggctccactaacaaatctctttgtgaagatttgtgcacaagatgtagggggagtttgaaatgttaatgatgtgggagttaaattactttcttggtctcccagggaaactagtggaccatggaacatttctctatgaagtaaaatactacaaggaacgttttcaaaaggttgagatggacacaagcaaggaggcttcaacttatatagctacctattgctaccttaatgcggatgaaaaagaaagccattgatcaacacagatataagtgcattgttccctaattacttgctacagtagacaaaca

SEQ ID NO: 151140 - DNA, 375 bp, Glycine max
  unsure (1)..(375): unsure at all n locations
aagcacctgcngcatgcaagcttatggatggtgcgtccgacatccaattattgagattctagactcttttctttgtacaaccaaatcaagatgcaccttccagatgaagaanaaatcattntaataactgaagacgccaatttttgttacagggtcatgcctttcggattgaagaacgaaagagccacataccaaagactcataggctggtcttcaaacgacatataggttggaatgtcaaagtctacatggacgatatagtcttcaagtctcacagcgtggcccaacatgtggtagatttggaggaggtgtttagaaagattcacaagtatgacatgcgcatcaatcccaaaaagtgcacctgagccattctta

SEQ ID NO: 151141 - DNA, 407 bp, Glycine max
  unsure (1)..(407): unsure at all n locations
cttttcacttcttctctaacttatttgcatgattcatctcccatctttctcttcttctattatatcggnttggctcagagacagatggggagcttgtgacagataatgatgggtgaattccttgcatagcagatggctaccaagtgaacaggcccaagttcccatgtatgacatcaactatgtgtctgtgctcatggctggtgaggcccttgctaatatgcatacactacctgtgtttgagtctgagctgcagcttgacgatctctttaataggctntatacctctgtcaaaagtgttgttgcatggatctacatctgaagtttcgtccaggcttgcttggtatgcaattacggctcgaattagagacccttcgtctatgcttattaactaagtggtaccatccact

SEQ ID NO: 151142 - DNA, 473 bp, Glycine max
  unsure (1)..(473): unsure at all n locations
agcttgttcctatgataattatgattattttactcttatgacaataattaattntgatataataattaatatatttacatatatgaatttttatgaaatttatcgtttttatttaaaatttatatagataaaaaatactttattatatccaaatcaattataataagatcaaaaaatacattagtagatttatgttaataaacatataatttttatttattatctatatatataaatatattaattattatatcaaaattaattatttaaatttacatacctattaaatttatattaaaaggtctaatattatatataataatattaattattttataataccaataccgcgaanattacaaatttaactctttgttgactattaatttaactaatctgtgacaatttacgagtgtcgtacaacccccatgataaacagtatcaccagctcatgtcagatgaatgattagata

SEQ ID NO: 151143 - DNA, 283 bp, Glycine max
  unsure (1)..(283): unsure at all n locations
atgtacgtgcgatgctgagaagtatacgttaaatattggtcagtttttgctgtcggagaagaagagatacgctaaatacatacnaattgttgtatgggtcatacgaatccatangatttttaatttatgttatttctcaaaaatattatctacgatttaatttaaaattaatgatacacgaagagatcgtccaacttgagtctctgacaatgatatataaacaccccaacccagctgagttaattgacacattatgttataaacaaatagtgtcgctatatat

SEQ ID NO: 151144 - DNA, 327 bp, Glycine max
  unsure (1)..(327): unsure at all n locations
ataacaaacattngggaagttagntctacaagaatatgcttatcttaacataaaaatgacatgctaatccctctgattntagaacgaactcatgtaatctatttatgcacacgcgtatgtgtagaatatcctactatttatgccaacatacaaggacatccgacacattctaattgtcacacatacatatgcattttgaaaagaacatacacctttatgctcaggcatngcgtcaaaattacacttaatacattctaacattgctttacaactacctacacatattgaaatattatcatacaactttatggtcctcacactatgcta

SEQ ID NO: 151145 - DNA, 472 bp, Glycine max
  unsure (1)..(472): unsure at all n locations
actaagcttctaagggaattttctcaagaaagcttctcattgaagctacctattctatatatagaaacgtgtaacacnttgtgtaactntgatgaatgagagtcttgtgagacacaactcanagttcaacttctctccctttgtattccttcaattccgtgctcccccctctctctttctctccctctgtctttttctccattgaagcatccttccaagcttcttatccaaggctcatcttggtggtgaagctccttcttccatgacttattccctagtggatggcgccttctctcaactcttctcctttgtcttccactgcatctccatggtggaaaaatcaccataaaggacctcattgaagctcaaagatccagccttcatagaaagcccccaagcaagcttccatcatgactactagcaacaatatgttatcaaagagaaaaactctagatgataggtcactgtaatc

SEQ ID NO: 151146 - DNA, 434 bp, Glycine max
  unsure (1)..(434): unsure at all n locations
agcttctaacttatgaccctgataaggtaaataanttacttcgcttgacttaatttagtaaatagtaattggtttcagtgtttattaagaatatgagttattatcattaatatacacggccgatcacaggagaagaagctctaaaccatgagtggtttcgtgaagttccccttccgaagtctaacgaatttatgcctacattccctgctcaacatgctcaagacaggtgaccaaataagaatttgcctatggtaaattgttttttaattttacttgttcatttgactcatatatatgctttataattatgtaaataggcaaatgaggagaatattaaagagtccagatccattattagagcaacactggaaggagatgtagcanggtgaatcagggattggtggtatttttgtcacaataatattctaacatgc

SEQ ID NO: 151147 - DNA, 404 bp, Glycine max
gatctagatgaaataatatctagatgagatcaaatctgaataatatctagaataggatagataagatctaatttgtagaataaattagtttgccctcttcaagtccaagcccaattctggattcaagcccaagcccaattctagattcaagcccaatgcttcattaatttctgagattatattaaaaacatcaaattagttgaatgggcccaaataataaaactgcctcataagattgacaattaagactaatcagtatttaaaaggtgcaaaaagggttagaaatatgaaaaataatgcacatcaaaggtgcgcccttagatgcctgccttggcttttttggaatgagtgaagcctagatttgaagtacttcctttagttgtgtctacctattctaatctagt

SEQ ID NO: 151148 - DNA, 230 bp, Glycine max
gtgaacgataaatcatcacgcgttccgctcaagatgttaaagaagcgctactaggagggagcctattaccttttaaaattctgcttggtatttggtcatctttgtttcttaagtcataggtggacacacctagttctcataatccttgcaatttaaataaaccagcacaaactgggaaggtagccaatacctcacaaaaaatatatatatgtttaggtagcaaaaatact

SEQ ID NO: 151149 - DNA, 418 bp, Glycine max
  unsure (1)..(418): unsure at all n locations
tataaaactaagcttctcgggccattcctgcgaaggcaacatttgaaagttattttaccagngggacactactcttaaaacaaaaatggcatacaacctcctcccataaatacaaacatcaatgtaaatttagagcaagcttatgcgcatatttccttatgaacgttcacttgcacaagacatcctattaactaagaaaaatgcacccatatacaatcaaggcagcttccttacctagattatttacatgtacttccaaggtgtatttgttatttacatcacacacgtctccttggctaaatttacatacatgcatactcaaagcactntggggtaccaaaaattgcacatgtgcacatcttggtatttctaatacctatacatacacanacttcatgatgaatcttgactatctaca

SEQ ID NO: 151150 - DNA, 382 bp, Glycine max
  unsure (1)..(382): unsure at all n locations
agcttaaccataactctcatactattcatcanaacaataaagtacacaacgcaaataanaaattacattattgaacagtgtcattcatgtatcaagaaatagttcagatggggcaagacgaaaattgtatccaaccacttgtgcattnttataattataataataacccttaatcagtgtgaagaatataactagtacagtgacgtcgattccttttgtcatttgaatccaacaggttatgcatatctaatgatggaggaanataatccanaccacanatgcatatgtaataaatccaacaagctatgctcanagtgcaccaatgtagatacaataaacgcgaacccaaacaaccagaacataaacttcttagtactctgac

SEQ ID NO: 151151 - DNA, 487 bp, Glycine max
  unsure (1)..(487): unsure at all n locations
taatcttgttcatccgatcccaagccactccttaataagaaaatattcctattattttccttatatagtatatatgaaattggcctttgtttccttttcatatattgtaaaagatacaccatatttaactgtgttagctcttcattctctttggccaattaatgtcttaaatcaatgtgtgacaaacaatatatagctaactataattaacggttacaaactatatctgaagtaactcttttgtatcagcaaaatagatatattgatgcatggtggtacaagggtaccacaattccatgattaaatagcaactaaccaaaaccagaattacaatatgcagtaagagtcagtaagtgccactgatatgatcccgacaaaagttccaattattttatatatgtaatggataaaagtattggagagtatattcncctcgtgcatttcattccactgaaggtgattatntacctaaacaacatatactttt

SEQ ID NO: 151152 - DNA, 246 bp, Glycine max
ttacttgtgaagctattatggaggctggatctttaagtgcaatgatgattttacaccatggagatgcctcgccatgcctaggacaaaacgagacgggacgctctattcatcatggaataagacatggaagacagagctccaccaccaataatgtgccttgcataataagcttgctaacccatggaagcttctaatatctaccacacttttagatgcgggccatccttggatggccttgagtttctc

SEQ ID NO: 151153 - DNA, 210 bp, Glycine max
atctgttggcttagcgagcgtccgctaagcgcaacactcctgggctaagtgcgaggaagaatcccaaagaagatgagatgaacaggttcgctaacacactgcttcatctcactaagtgcaccacttcagttcatcctctaagcgagaaagctgcgataagccacaaatcactaatgtgcgctaagcggttcatacgtgcgctaagcgcac

SEQ ID NO: 151154 - DNA, 425 bp, Glycine max
  unsure (1)..(425): unsure at all n locations
gtagtttaccaaggaatgctactcttaaaacaaaaatggcatacaacctcctccaatanacacaaacatcaatgtaaatttagagcanacttatgcacatacttctttacgaacgttcacttgcacaagacattcttataactaagaaaaatgcacccatgtacaatcaaggcaccttcgttacctagattatttatatgtacttccaaggtgtatttgctacctatatcacatgcatttccttggctaaatttacatacatgcatactcaaagcatttggggaccaaaaattgacatgtgcacattccggattttaatactatgatatacaactttggataatctggtattacacaaaagtgctcattcatgcttattcaagtgtttgtacctaagccgatgctatcaagtatatttctttgtg

SEQ ID NO: 151155 - DNA, 283 bp, Glycine max
gatggggcctatgcaagttgaaagccttggaggaaagaggtatgcctatgttggtgtggatgaattcttcagatttacctgggtcaactttatcagagagaaatcagacacctttgaagtattcaaggagttaagtctaagacttcaaagagaaaaagactgtgtcatcaagagaatcaggagtgaccatggtagagagtttgaaaacagcaagtttactgaattctgcacatctgaaggcatcactcatgagttctctgcagccattacaccacaacaaaat

SEQ ID NO: 151156 - DNA, 381 bp, Glycine max
  unsure (1)..(381): unsure at all n locations
ataccccctgttgacgtgcttaagccattttacttaagtcatttctcgcttaacttaaaaataaaataaatttccaccgaacatttgaattgcattatcccgtaacttcggttaaaatcaattccgaccgttcggtcatgccgtaaccacgttggaaatcaaaaagagggtaaaaataatataataatcaaaaagacatcttttagtaaaataaagcggaacatcaatcggacgttntctctttgggaattctcattcttaagccgaattgataataactaaagtgaaactaaggctaaaatcaactcgcctagtcaagctcgtccacaaaaataggcttttgaagttcgtcattcatttctcactaagtnaaatggatca

SEQ ID NO: 151157 - DNA, 426 bp, Glycine max
ctgaaggaacctctggctttgattttttttatcaacctaggaaagcatattcggaatcaagttatatatcatggtttaattacatttatcaaattccccaggttaataaaactaaaacatacttacaattttagattcttttttgtgcaactcctccagagctctctcaagaaaatcacatttctctaacaatgagatctgggcaataatatttactgtagagaaacaccacagggaaaaataataacagcagtcaaaccatattaaaatttcatattcttgcccattcaacagtagcattgacagcaaaaagaattgattcaacacatgtaatttgaccatatatcaaactataaaagtgacaaaaaaaaatccaattgatttgtaagccatagtagataccagttatctattactcgatgaata

SEQ ID NO: 151158 - DNA, 369 bp, Glycine max
  unsure (1)..(369): unsure at all n locations
gcttctaaactttatacaagcatgaagctntcatactacttgtagacatttggtctcagatatcttaagaaggggggttgaattaagatattgcaaactatttcccaaattaaaattctatttcactttctatgcaagttacaaattctcttaaaaatgaactcttaaataatgattcaaatagaacaatctaactataaatataaaacaataataaataaaagagtctaacggaagagaaaatgcaaactcggatgtatacttggtcggccacacccttgtgcctacgttcagtccccaagcaacttgcttgagagttccactatcttgtaaaatccttttacaagttctgaacacacaaagacaatt

SEQ ID NO: 151159 - DNA, 206 bp, Glycine max
gttctactccgacctatatgacctcgaggacatggccccgaagtactgtaaggtgcgaggacatgtcatcctattcaacgccgagaccattaatgacttcctcgacacccctgtcatcctgtctgatggagaggactatcttggcgtacttccagtacctccatacgtacctagaccattctaccatcattgtatccttgtgcaca

SEQ ID NO: 151160 - DNA, 249 bp, Glycine max
aaacaaaaccgattaagcggtgccgcacagagatgaatgtgaagaagagatataaggattctgactctgcattctcatctgctggtagaaagtctcaatgaacctctctgccttctcgtcaactgaatcatacaaatcctctgcttctatgaacccatcttcaatttcgaagttcccacttggcagagcctcttcacttccctctactttgaagagaacacaaatctcggtgccctctattcttaaact

SEQ ID NO: 151161 - DNA, 314 bp, Glycine max
  unsure (1)..(314): unsure at all n locations
gcttaagatggaaacggacatgagaccatatcatatcccactatattatttacaacttcctagtgatctgagaaaagtaaaaataatcactcgctgcctataaatgatatatttgntgcctttggttttttattattattagacattacctctttgagatttcctgtgtcattcactcattctcgtcttgttatatacagtggtgtctgagtgattccaagttccttgacaagtttaaagttatgtttgaatctacatcccttgacaaggttcaagttatcactgattttatagtccatgacgagtgtggattc

SEQ ID NO: 151162 - DNA, 265 bp, Glycine max
  unsure (1)..(265): unsure at all n locations
acttctcagaagaacattctnttctatactaagaattgaatgccaatattctataaatggcaaaacttaataattcaactgttagattaaaagctcttatgaaataaatccatataatgtacatttaactgtgatggatacttcatccacagaattataactaatatacaatatatctttagttcacaatatatatatatatatatatatacatatatatattaaaaagatacttatactcatcaacacttactttatacctaac

SEQ ID NO: 151163 - DNA, 330 bp, Glycine max
  unsure (1)..(330): unsure at all n locations
ttcatgtccactgagactgactctgcccctgaaaaaatcaccccaaaacatttcaatttgtgtaccatttggttttttaaccttgattaattagctaagcataaaaaacatgtatataattaacatgacaattgacaaagattattggatgctgagattccatacctgaaataccagatactggcttcatggcctttntcttgattttgtcatcatggagttccacctttagcaccactttctgtcggacaaatattattgaactgttaggatctatagtaataatcatttctaagcattgaaagtccaaaacttgatctcttgaacagt

SEQ ID NO: 151164 - DNA, 314 bp, Glycine max
tcatccagagaacagaagcagggaaacttcctctggaagaccaaagaaggcttgaattctttatgggatgcattgtgagttctgtggacactaagagtcatgcagaattggttcactcaagaaggtgactaatgatgaactgagaagaaaagaaatgagaaagaaagtcttgaaactctgcagcatcagactttggaacaatggaaagtgtgcttgcaaatgtgatccctctttgggctgtaaatggaggggcaactgaagtctaagccagcttaaacacctgatggtctgttacgaaacatgacaccgcatga

SEQ ID NO: 151165 - DNA, 398 bp, Glycine max
  unsure (1)..(398): unsure at all n locations
cagcttctaaaacgcacttgtatatctttatgccccgcgaatgcatttcaatcccctttccctctcacgtacctttcaagggtcaaagctacccctcgatgttctacgcatgtgcgtgctggaataaataatgatgttggctaaaatttattttggcttaggtctttcaactttcatcagttaattcactgatcttggtttctatacttttaaaacaatgattttaggtcttgcatgtatttttttaatatatgaatttgatttatgtgccctgtcaatctaaaagacatatttggttgtattcccgtttaccttccttcanggatcaaaaactttaatgtttctgtaaccacagcaacccctgtgcatatttatatattatatcattcgctgataaa

SEQ ID NO: 151166 - DNA, 388 bp, Glycine max
ctcgcatgggcgtcacctgaaaatatttaaaagaagaaagctctagaagattatttatgtttgatttattaatatgtgtgcagtatttaaaaaaaataaaatacaagtgatgacatagttattgatgaaaatatcaatgtttattggtctaagtagtaataagggagtttgctttcatatagtaaggcttgaattgaatattaatttgtgttgttgtggcactaaaaatatttgacagctaaattaaataatgcatttctagacgactgatacgagcctagctagagtaggtcaatagcgacccaataacaatccatgtctgaaggaagctaattaagctgcagcaaatatcactttaacattttttctctacgagaacacatacaaa

SEQ ID NO: 151167 - DNA, 424 bp, Glycine max
  unsure (1)..(424): unsure at all n locations
aaagtgctattatatctctttttcaacgggaaaaaacagaaaagctaataacccagaattaaaggacacttcttcatataaaagaaaacacacacacaaacttgaaacttaccctgattctgttggacggaattcgagccaaatgaggcggccacgaccatcgatggtggtgcctccgaggtccttggtggcgccggagacatcgtcgctggtgatgggggacttccatgatccataangagcagtggttacggtggctgttgagaatgccatttcctttttgcagtgcaatacaaaaagctagtgactttgagttctgaaggaacacacacgtgcttaaatgggtgaatgtgtgagtgagtaaccaataatgatngaataggactacgcgctatgttccaagcctacattatcttaatatacg

SEQ ID NO: 151168 - DNA, 437 bp, Glycine max
  unsure (1)..(437): unsure at all n locations
atgagattggctacacattcaatttgtntgaaacaatggcaacttataaaaaattactctggagttggcttgaaggggaaggcaataaattaaatggctcttttctaattgtgtatacatgttatcattcaatttgtattatattgattgtatagctctataaaatctaatttaaaagttagacatcatcatgttcatgagcaacttccaactagtttaaagatgctttttacaaattataaatgaagcattgaacaatatttgagaatgtctangatagttaaacttgtgttttagcatagctttaggtggaatntacattgtaatatgccaaatgtggaattacattntatnggttttattagtatttatgaaggaatgccttagattgatataatttgatataatatatctatttgtacaaattgctcagtttt

SEQ ID NO: 151169 - DNA, 208 bp, Glycine max
  unsure (1)..(208): unsure at all n locations
agaggtctttcatgccagcacgcgcttaacgcgtatgccgctcgctaagcgaggcgaatgtctcttttgcgctaaacgcaagattggcgctaagacaaatatcacttacccgtgctaagcgcgagaatggcactaagcatgccttcgaggtcagaaagccctttctaagcctgattngcacagaataaaaatgagagagcatgactac

SEQ ID NO: 151170 - DNA, 354 bp, Glycine max
taacattacctacactttgtgcggtgggccattcttggatggccacgaatatctcaagggccacttggacaccatttctaccaactacaaatcctaagaaaaatatattatctacacagaaagtacacttctctatattggaatagagagagtttctcttaagaactaaaagaactcgccttagatgtcctaagcgaatctatgctcctactgcacactataatataatcaaaataaacaactacaaatctacctatgaaatcccttaagacatgatgcataaacctcataaaggagctgggtgcattagtgagcccaaaagacatcactagccattcatacaaaccaaacttg

SEQ ID NO: 151171 - DNA, 286 bp, Glycine max
aaactcctgtgtgtcataaacagacacactgaagtgcgactcaggcgctatatacatcgtgacgctcccaattgaacaacgaatgctctcacgataattagatgatcataaactgttcaacggtgagctgatccactctcataatatatcgagactctctaaattaaacaacgaatggtctcaacaaactccaatgtgcatatatggtcacactgaagtcctattcacgcgcataatgcatcccgacgctcgagattgaacagcgatgcgttcgagagatgaaatg

SEQ ID NO: 151172 - DNA, 402 bp, Glycine max
  unsure (1)..(402): unsure at all n locations
tctatataagctgaaccattntatcaataaacacaagttgagttttattcttataattagagcttatctcttttatcttagtgagagtgattctcctaaattcttgagtgattcaagaacaccctggctgtatcaaaggactttcacaaccttcgtgtgttgccctcgctggaaagagtgattctttccttcctatcatcttcacccttgttctttcaaaccacaattccagaaaatccacctctgcccaaaattatctcgtgaccataactcccattttacacactcaaattaagtgattcttgagcctaaattgaatttcaaaacgagacctttcacctcgttgtggaatcacctcatttggagccctgtagcttccgttattgccatttctatatttct

SEQ ID NO: 151173 - DNA, 274 bp, Glycine max
tgggcatcttcttccttcctttttgcccctggtgccccgattcttttggcattcgcatttgtggaggaaacgtaatcaaacttttctcttttcaatcctacctcaattctttcccgcgcaacactagatctgaaagctggacggcatgtaacctactagcttctcatagtagaacactggcagagtgtctaccatcatggtgatcatctctctctcaaccatgggaggagctacttgtgccgccaaatctctccatcgctggcgcatattctta

SEQ ID NO: 151174 - DNA, 411 bp, Glycine max
  unsure (1)..(411): unsure at all n locations
ccttctcgtccattggtgtgtcttcatttttctccatgtatctactcacatgtcttgcgctaaatttcattaacatgattctttagagtttccaccgattaaacttgctatagaagctagatttgatttttctatggttgaaatttcttgttcttggtcttgaaccatgaattgtattgagtttaggttcctttgagtttgttcttgatattttctgtggctgaaacctaaaccataaaattcttacaaaaatattaaagtataagaaaacctcaataatctagagtgacttgttcacctattgtagttntgtcatagaagtcatgtctagtcatgaaactngtcacataagaatttctatggtgggcttaattctatttttcttggttcttttgctaacctcattttcat

SEQ ID NO: 151175 - DNA, 358 bp, Glycine max
  unsure (1)..(358): unsure at all n locations
acgccttaaacggtctttttttttttttactttntaaactgttaaaatgaacctatagaagtctaaaatcaatcctatgcgtaattttctttctttaaagaactacgtaggtctgagttcctcatcgcaattgaggatacgtaggagcgagagccccgctcttgtcgaccccaaanagataaaaaacaacataaaaaagggaaaataaactaagaattgaagtcatgattttgcacatttggttaaagactgtcgtcccttgtgatggacgtgtggggtgctaatatcttccccgtacgtaaagaactcctgaacctttatttcttaagatttgagaccatttattggttttctaaca

SEQ ID NO: 151176 - DNA, 429 bp, Glycine max
  unsure (1)..(429): unsure at all n locations
gatctaaaaataccggcaaaggtggcaacttttcatgtggagattgatcctaaataggttgccatcgcgagataaacttcttcagcacaacatcatcactaatgtaactgatgttttgtggagcaaaataggagaaacaagaaacacaaaaatcaatctaaacacatgaactcgtgagagagaaagattggagggaaattttttttattctattgtatgtattctgttacacataatgatatgtctatatatagactaactcaactaactaaccaccataattactaacaaactagtaactgttntttgaattatccttaacacccccctttgattcaaaacagtgaatcaacaacaagaacattacaacaacatttactgaacaaaacttcttaatcctccaaactctgaactcctattttccttctc

SEQ ID NO: 151177 - DNA, 425 bp, Glycine max
  unsure (1)..(425): unsure at all n locations
tatggaagggagtagaagaatgtaaagactcttagaatgtgtggagcattctagagaattaatctccaccctaggatacaagtaatctccaccattcattgtgtaggtagagtattataaataagggtagaagccttcattcctaaccatccaagacaagagtgaatccacttcttaaagtgagaaagctagaaagttagagagcctctttgagacagaagataaatagcttgggaagtctctatcctcaaacttgagtgaaccaccatagagtgagtcaattttgtaaacacatccttgtaaccctactatcatcttgtatagtggaagaatctccatattgngagaatataatcgtgtgctcccattactacctttaantactaagtgcctatcttaacttcacgaagtaggaaagtccgagt

SEQ ID NO: 151178 - DNA, 244 bp, Glycine max
  unsure (1)..(244): unsure at all n locations
atattatatcccatatagatatngtgatgacatattatatatggtatgccatatatggttagtacaaaaataagtntgaattacaaacaatatatgtaaaggtttgtatgtttgataaggggatagatgtgcatngatatttctccaaaagtgagcattttggaacctgtaaaatgttgacaaaggtaaaatatagtacattataanttgttgaaatggatattaatatgctgggaaaaaaagt

SEQ ID NO: 151179 - DNA, 428 bp, Glycine max
aagaagaatcctgaagatgctagagctatattacacacacctttctattatctgagcttacctccttgagatgagatgctataacttagctacacaccccctataataactaagcgcactcctatgccaaaaaaagaacatgaaaatacataaaaagtccttactacgaagactactcagaatgcccgcgaaaacaacgctcaaaccttacgctactagaatggccaaatacaggcctaaacgaagggaaaccgattcaatattacaaagaaagcgggctatacttacccatggcacgaaactatcctaggctatgagaacctaggcctttcttggacttggccatctacttgaacttatatcatgccttgcgggaggatgctattcctccactgaaagatgacccaatctgagtatttttctggctc

SEQ ID NO: 151180 - DNA, 180 bp, Glycine max
caagaagggagaaaaaaagggaagacgtccaacccctaacacccaaaaaatagaaaaagcaggaccactcaccactacaacacaagacagaacatctcccggagcacccacaccagtaaaactcggggcataatgaactcgacttgcctactgacctgaaccggagaacccaacagaaga

SEQ ID NO: 151181 - DNA, 437 bp, Glycine max
  unsure (1)..(437): unsure at all n locations
agcaccgcngctgcagctgcaatgtgcaatagaatggacaagttgatttgtgtattttgtattaacgtttaaaatggctttattacactgttttgtttgtacgaaggtcgttactgttgtcattacaatttgattactctctctcccgcctctattatcacttcccttgctgcatatttatatgtgtttctcttaaaatttaattagaacttgtaacacttccattttttaatataaataataaaaatctctgggtttttcttaatataagcaacatttaattaacaaagtcttatttaataagattatcctcaanatatccttcaataaaaaaatggttgatatcaaagttcaattagatatatatatatanttttttaagatagcatttttagactgagtaactcactntacataataatatgctcaccataata

SEQ ID NO: 151182 - DNA, 345 bp, Glycine max
  unsure (1)..(345): unsure at all n locations
atcacgnggatgacacagctgacgtagtctcttgtgtaagataactttaaaaatatgttcaaccacatgtgtacttgtctcanaagatgcaattaatttagtgtgttggactatgatcatgttgttcataactttccaaacactacataagtcatcaaggttattctataataatcgttttaanaccaaatgagcatattcaaccctgcaaatacatgcaaaaaatataanaatacaagtatttttatccattaagtcctaaaccctaataaaacatatcattttcatatcaggttgttgttgtgtttctagtacatcaccttttcgttcatgctttacanattt

SEQ ID NO: 151183 - DNA, 421 bp, Glycine max
  unsure (1)..(421): unsure at all n locations
ctgcagctgcattggaatgcgaaagcccactcatctaatgtatagtacctgacatctcaaacaaacaaatcaaacgtaacaaaacaattatagttgctgtttgaatacctcacccactcaagtgtatcacacaattatggcttttctctaatgaaacactcttgccttttaccactctaattccccttgagttcttaggcaattcaagagattatggtcacaacaaagaacaattcaccaatatgtgtaagggaaggctagagagacaaggaaaaggttaaccaagacaaaggctaacaatggttttaggcacaaatgaaggaaataaaattcagaaattaggaattcaagtaacaatccttcatgcaaccaatatattaccttaaagagatatanntttttttaaagttcttcaagcatg

SEQ ID NO: 151184 - DNA, 324 bp, Glycine max
ttgtgctcctctgctgaccaccatacagacctttgcccttccatgcagcaacctagagcaatcgagcagcctgaagcttatgctgcaaatatttacaatagaccttctcaacctcagcaaataaatcaaccacatgcgaacaattatgacctctccagcaacaaatacaaccctggatggaggaatcaccctaacctcagatggtccagccctcagcaacaacaacagcaagctgctccttccttccaaaatgttgctggcccaagcagaccatacattccttcaccaatcctacaacagcaacaaccgcagatacaaccaaca

SEQ ID NO: 151185 - DNA, 153 bp, Glycine max
ataaaagaagcacccgatctcaacttcctaaatacacgtgtgctgactgaaccttaagcccatatgtactttaatccatggagtggcatcactgtatctgacacttgagttcatccctaatttcaaaaaaaactaatgattactctcttgtaa

SEQ ID NO: 151186 - DNA, 241 bp, Glycine max
gatattcccattcagataggcccccacacttgcattgtggtgttcaagtatggatataaatcccgcctatagctgcctcttgggaagaccttggattcatgcgctgggagtggtcccttcaacgcttcaccagaaattgaagttcgcagtgggtggacttttagtgatagtatcgggtgaagaggatatgttagtgagctgcccttcctccgcaccgtacgtagaagcggcggaagaatca

SEQ ID NO: 151187 - DNA, 371 bp, Glycine max
  unsure (1)..(371): unsure at all n locations
ctctttcagtatgatgatcagccgctaaggtgcttcacggttggggactntcaggtagtaccaaccgcagaagaatttgaagagatcttgtgatgccagctaggaggaaggaagccatatctcttttctgggttatacccctccatggctaggataaccaaagtggtcaaaatcttggcgcatgagttggaccgagtaatacaaaatagaaatggggtagtcggaataccaagaaagtatttggaggataaggcaaatgcattggtggatcaaggtgaataggcttttgtcattgatgtcttggcgctattggtatttggagtcgtcctctctcaaatatggatggactagtggacctagcagcgatcgat

SEQ ID NO: 151188 - DNA, 427 bp, Glycine max
  unsure (1)..(427): unsure at all n locations
agctngtgtattcaaaagacatgtgtgtgtgagtgttttattnggatttaatgtctatcgtagttttcaccacattntagaagttatcaatcaatatcagatagaaccaaagcatttaataacccaaagacaataccagacatagaaatatgttgatggttgtgcgaaaatacaaggttaaattgtagaaaattccaccttattctgatggctaagattgtggattgttaaaaaatataattctgagtaattactgtactcttgaaatattaagtcataccaaaactataaaaatgaaagaataagcatatctgccaaaagaaatacagattngcatgggccaacnatttattatgtgattttacaaaatacatatggagctgtgttcacatacagctatttattatgttatgggttgacttcagca

SEQ ID NO: 151189 - DNA, 458 bp, Glycine max
  unsure (1)..(458): unsure at all n locations
ctaagcttattaactggtatacatatgcaccagcgttatatctactctattcatatgcnccactctgacctaggtctcaaaaagcctccatatgcattacatgaacatgtgttaaactctcgttagcaaaaagagtgcaaccaaccaagtggaagagataagcacgagttgctacaatccaccgtcgggcctcgtatctcctctgatagatatcccgaagccacgacaggcgtacatatgccccatgcgcccgtaccgtctcagctctagcctcctcaccggagacctcaagcaactccatcaacaacacgactgcctcgtccacaggtagaggctcaaagttgtggaaggagtctgtgatcggtagatggaggagtgatgccacattacccagtgtgatggtcagctctcctactaaaaggtggaaggtgctagtcttcctgtgccacctctcaaca

SEQ ID NO: 151190 - DNA, 354 bp, Glycine max
  unsure (1)..(354): unsure at all n locations
taatgttatgcagtagcaagctttcattgtatacaagcttactatgtgaacattattggaggtattagaatacatattctatccaacatctattggttgtgaaagctaggagtgacttcgtgacaaataatacttggctcttattctcaagaggagagtaagggtagtgccagaagtggcctatagagtacttgttgtagccagaagtggcataagaatacttgttgcaatcaaagttctgattagtgaactcttcaagttctgaagagaatggacgtacccagagttcggtgactanatcaacctctggtttcttaatggttatatactagtacttctatattactttacgta

SEQ ID NO: 151191 - DNA, 428 bp, Glycine max
  unsure (1)..(428): unsure at all n locations
attataatattggacatcttgacaatnaagntgacaaaggactaacttattataaaattaacaaatatataacatgcgaattttcaaaatcnaatcaacatatgataatatactatcatgtttaagaataaatgattatcttgctacttttatctggatatgacactataactggatagtggaattatttatgctggggcgaattattaataagtaagcacttaccatttgattggctgtgttaaacgcataaaataatgtctggaaacttctcaaacatgcagtgcatatttactggaagggacgtttcattaggattcaatatgcttgtcttgcttggcataataatatcaacatggacatctatccctatcacaagtttgaacatcttattacctggaactcaagaacttctctatctcactctt

SEQ ID NO: 151192 - DNA, 83 bp, Glycine max
gataacaacctcatcatgatacaacctaccccgattctagccatgcgatggaaaaaatgagacaactggacaactgcctcaat

SEQ ID NO: 151193 - DNA, 206 bp, Glycine max
  unsure (1)..(206): unsure at all n locations
tgtcgattcttcntaggcttcttcctctttttgggtttcctttttttttntntaaaattggactgtggngatgtgcgtgtangccatcactgtccccaatacntncccacaaaatgaagccattgccccgtcttggtcaaccatacccaataagtcatgatgtcccctggccattccttggtcgtaccttgtccatccccttccct

SEQ ID NO: 151194 - DNA, 322 bp, Glycine max
  unsure (1)..(322): unsure at all n locations
ctgtccatgtggggctcaactcatattgaatgagacaaggagcttaactaacagagcaagccaaagaggaggaggtggtgaatcgagaggagctttgaacttgttaggcatgggactgagttctgggttgtcacctangttcctctctggattatttaccaaagaaaagccagagaagactagggagcataaagacgaannatattatttgatgggttccttaccaagtacctctttatgatcacaacctgtaccgtctatatcttaaagtgatcagctataccatccatattacatcttaggatgtttcttcaataatcac

SEQ ID NO: 151195 - DNA, 474 bp, Glycine max
  unsure (1)..(474): unsure at all n locations
agttagtcactctacttgcaaattagagagttctagctntctaggaacttagacgttgatgaacctttgttaagataaattgaanagtattcctagaagctatcttatgaaagatagacactccaaggtactttccaagatccttagtccaagcaatacccatttctccacttagttgatccttgacttgagtctccacatttttggaaaagaacattcaagatttctccaagctaattntctgcttagaactcttgcaaaataaattcaaaatattcttgatagaatggacctgctccactaaagccttcataaataaaataaggtcgtatgcaaaggctaagtgagatataagtggaccatgtctaaaaagacgaatatggcaccacactctttggtccacaacaacagagatcaattganacaaatgttcanagcataaaacatataaataggagaaatatgatctccttt

SEQ ID NO: 151196 - DNA, 345 bp, Glycine max
  unsure (1)..(345): unsure at all n locations
tggtggtggtggtgaagagtagaatctatcatttggggtaagcttccttggtgaataataagactttctgagatggattggtgtgggtgctttggatttgatgctttttgggttgacgctggtgaaggttgctttttcttcctggaatgagttgttggggtttgctttcttgcttttcccatgtccttgagtttgtaaaaccacgcattggggatcatatctgataatctgaacctgtagttacccataccctctntggatctatagtactcttctctctctttttctctatgcgaagggagtgtgacggaaatatcttctagctctctctatgatgaatgaggg

SEQ ID NO: 151197 - DNA, 461 bp, Glycine max
atggtggctggaaataccacaatagagaaactcttatattagtggtctgaagaagaaagaagattagtgcagtacaatttaaaggctaaaaaaatcattacttctgccttaggaatggatgaatattttacggtttcaaattgtaagaatgctaaggatatgtgggacactctacaagttacacatgagggaacaactaatgtcaaaagatctaggataaatactttaactcatgagtatgaattatttaggatgaagacaaatgaaagtatacaagatatgccgaaaagattcacacatatagttaatcatcttgcatcattaggaagaacttttcaaaatgaggatctcataaataaagtgttaagatgtttaagtagagagtggcaaccaaaggtaatagccatcacagaatctagagatttgtctattatgtctcttgctactctattttggaaata

SEQ ID NO: 151198 - DNA, 229 bp, Glycine max
  unsure (1)..(229): unsure at all n locations
acagatagcaaaaaggttatacggataaccactcgggtatttccgcccgtcagcgtgactcaaaagtcagtatgacagatcttgtgagtgcggaagatgatgtaaatcttcgcatgtcaaccggcttgtcngacgcgattgacgaaggtcgcanaagacgacgttagtctctgcgtcttatcanggctttcgtcttacagacatcanaaagttatacggataaccactc

SEQ ID NO: 151199 - DNA, 345 bp, Glycine max
  unsure (1)..(345): unsure at all n locations
gctngcttatggagcttctatggaggctggatctttgagcttcaatgatgtccttcaatggtggntnttcaccatggagatgcagcggaaggcaaaggagaagagaagaggggaggcaccatccactagggaataagccaaggaagaaggagcttcaccaccaagaattgccttggataagaagcttgaagaggatgctttaatggagaaaaagaaagagagaaggggggagcacgaaattgaaggaataaaagagggaaagaagtggaactttgaagtgtatctcataagactttcattcatcanagttacaacaagtgttacacatgcttctatntatagact

SEQ ID NO: 151200 - DNA, 336 bp, Glycine max
  unsure (1)..(336): unsure at all n locations
cagcggctcttcctctgtctccgccaggttgccgccgntatcgccgccaagaagcgccgcaaggccggtaaacgccgcatgtgccangtacaaaacctatcatcactccttttctttttgcaaaatggtttctttttagttaatttttcattttggtgatttagtttcgctctcttgtttgatctcttgtgctgtcactttgtattattctccgtgcagaatgttagttagctctgtttgggtaagtttttcaataagcatntatatggaggaataagtatgcggactgttnggcanatgtgagactcaactcttctggtttctccagatggaatg

SEQ ID NO: 151201 - DNA, 353 bp, Glycine max
  unsure (1)..(353): unsure at all n locations
agcttttgaaggtcgtgacgaaccccaggaggtttatctacgagtccctatattagngggcgtaattccccgcggtgggcacagggaagattcctatttgatgcatcccgacgagctacataacatggaaacatgtttagcagtggaggacttgttgcaacagatgatagaccgaggccggctggaagtcgacgatgaggggagtgaagagcagcatatatgtatgcagtccgcagatgagggaagttntggaaagcttaagcctttagtgatatatttcaccagagatgtagctccccaaacgccctgatacccctcggtagttaaatntattccatttccataccaaaaca

SEQ ID NO: 151202 - DNA, 330 bp, Glycine max
tctatacctgttgcaagggtctgtggtttgtgctcctttgctgaccaccatacagacctttgcccttccatgcagcaacctggagcaattgagcagcctgaagcttatgctgctaatatttacaatagacctcctcaacctcagcagcaaaatcaaccacagcagaacaattatgacctcttcagcaacagatacaaccctggatggaggaatcaccctaatctcagatggtctagccctcagcaacaacaacaacagccttgctctttcttccaaaatgctgctggcccaagcagaccatacatttcttcaccaatccaacaacaacaa

SEQ ID NO: 151203 - DNA, 305 bp, Glycine max
  unsure (1)..(305): unsure at all n locations
agctntagtccgcttatctaaaattatgcaatntatgtacagagaagctggtgctgagcggtcaatagcatcgcttagcgcatatactaccgcaagcgattgagcttagcaaccatgagtggcgttaagctgcagtgaatccagtttaaaccacaagaatatccgcttagccagcgaattacgcgctcagccccatggccctcaattctgaccgcaatgaatcgcgcttggcgacataaggtctcgcttagccaaggtgaagccatcgctcagcgatcagtctgtcgcttagaggaattcaactc

SEQ ID NO: 151204 - DNA, 376 bp, Glycine max
  unsure (1)..(376): unsure at all n locations
ctatggagaccaggaagaatgaaataaaagaatatcatataacatttataactaacttntgtgtcatggatatagaggagaactaccaaattccaatcattctaggaagatccttcataagaaccactcatgcaaccatcaatgttcgtaaatgagtctacacagatagagagggcaagatacacatgttctaccacattcataccattgaagaattttccaacgaattagctcaccaacaacaccatcatataacaactcggcaatgcatatgtcatacgtcaagctattgatgttaaagaagcacttattaggaggcaacccagctttcaaactcttacattgtacgtgacattcatttaggatagtttctaac

SEQ ID NO: 151205 - DNA, 441 bp, Glycine max
  unsure (1)..(441): unsure at all n locations
cgttctaatattnttaaatctagcttccacatcggttntcaatacaaaatcgatgttaaccaagctatgtaaacgttaacatcggttntattccgatgttaacatttgataagttaacatcagtttgtcataaaatcgatgtaacgaactttcattaagatcggttttataaaaatcgatgtttatgaagtcatgttaacatcggtttttaaaaaccgatgttaacgtaagttcgttaacattgatttttccccaaatcgatgcaactaatgcacattatttacaatttatgtcaccgtgttatgttaatatntagtttgttaaaaaccgatgttaaactaacgatgttaaatctacattttctagtagtgtaagcaatggtgtagctnggcggtaatgccttcacctatatgctggtatatgtagtactctcatcttgat

SEQ ID NO: 151206 - DNA, 409 bp, Glycine max
  unsure (1)..(409): unsure at all n locations
atagcgcgggttcgggagacaaaggtcattctttctctatatgcgaagatgatattccgagtactttggatttggtacgaccatgccctcctgatttccagctgggaaattggcgagtggaggaacgccccggcatttacgcaacaagcataatgtaaacctttacggttttaaaagctctatagttgggcctaggctttagagtttttccttttgttaaggctttgtgtcttttgtttttgaatntataatacaaggatctttcttcatctggtcctggtctctacccattctcattcatttgcatgtttacttctttttctgaaacgacagatccgatgacgagtcccccgaaggtactaatacctgggacccgtctatcgacttcgagcaagaaatgaatcaaacg

SEQ ID NO: 151207 - DNA, 309 bp, Glycine max
  unsure (1)..(309): unsure at all n locations
acataagatcgcccagtgagggtaaagcgtccagctaatgacattaaaagaagcactttctgtgatggcaacccagctttaattctataatttttgttntcatgcattaaatcattgngaactngctacataatctgtacatangagtatatccacctatctttgaatgttagatataaagggtntcaatttgttgaggaagggactgaaaaataactcagaaaatattttcttaaaaatcagtcctttagctaagcgcaagcctcgcgctaagctcatatttgttcatgcactatgccgtgagtctca

SEQ ID NO: 151208 - DNA, 366 bp, Glycine max
  unsure (1)..(366): unsure at all n locations
agaaaacattctcaacagtcacatctttttgtgtggttcttgaatggctatcatacgcctatatatatgtgacttgagacacgaatntggtaagagtttttcaaaacaaaaaggtcttatcctcttaaaaagggaaaatcgtttatcctcttacaaattccttggccaaattacttgtgattcaataaggaattatttgagtgctcaaattgttcaatctatctctttcaagagagatttcttcttctcttcttcttcattctgaaaagggattaagagaccaagggtttcttgttgtgaaaaattttaacacacaagaagattgccttgtgtgttaaacttgaaaggaattacagatagggactc

SEQ ID NO: 151209 - DNA, 381 bp, Glycine max
atattctagaatgtgatattgacgcatgcatggattatattatatcttaagagaaataatctaatttccactacaataataatattattagaatctaatgactatcgatgatagataaaaaataattacaccatcaatcaattaaagattacaagattatatttgtataacttttaaagtaatcttaaaagttaataaacttattctatataattattttttatcgaataatattataaaattattttaccctatttgttcatataataatagtataaaattttacatggtgacaacataatattataagaagaaatggacataataaaatatcacacattggtatataattattattcttagaatatctttataaaatat

SEQ ID NO: 151210 - DNA, 311 bp, Glycine max
agcttatcatggatggtattttctagtacttaatctattattatagctagttaattaagatttatttagtttgaataaatgtttatttttgttcttttactaataattataaaagcatcactataaaatgttatggaaatagataaaataaatagacgattgtgacttgtgataaagcctttttaaacaaatgagctaggacacgccagggtggacgtggccaaggtgagctcctagacttcacatgtcagcttggaaaggcacttttgttaagaggacaagagaggggatctacaaacaaaagactctga

SEQ ID NO: 151211 - DNA, 439 bp, Glycine max
  unsure (1)..(439): unsure at all n locations
ggaccttgaatctcagctgaaggaacccatgtcgtgtgaacatggatccattggtaaaatatacctaatgtggagttcacaactgtctgactgcttgtccctcccaagaatgccatagttntttgtaagagttgggttacgactgaaacttgtggtttnttacagtgttaggttgtgtcatatatatagatgagttttaatatcagtgctgcatgttttatagattaataatatgcatgcacatgctttctgtatgtgtngtcaactacaccaatgacatgacatggtttagcttgcatcaaatctgcatgtgtagtcacgctgtgcaagggcctttcacgcgctttatgttaatgcagacaacaatttatcatacacattttttcataatggtgtgcaactcagacacgatatatcatacatgttttttagaataagt

SEQ ID NO: 151212 - DNA, 404 bp, Glycine max
  unsure (1)..(404): unsure at all n locations
agcttagctatacccccctataatagctaagctcacccccatgacaaaatacatgaaaataaaaaaaaaagtccttactacaaagactactcaaaatgccctgaaatacaaggctaaaaccctatactactagaatggccaaaatacaaggcccaaaagaaggaaaaaacctattctaatatttacaaagaagagtggatccaaccttggcccatgggctaaaaaatctaccctaaggttcatgagaaccctagggccttctttagtagctctagcccaagcctcttggagtcttctatccaataccctnngggggtaggattgcatcatcccctccaccttggaaaggatntgacctcanatcccgangttcttcatactcnntggctcttccctcaacacct

SEQ ID NO: 151213 - DNA, 365 bp, Glycine max
  unsure (1)..(365): unsure at all n locations
ccctgcatacctgcaaaactatttccatttcttttctatcttcactgaatgtggtcttttttgtgcaaatagcagcttacacttatgtacccttccataagtaattgttacgtgtagttcattgatcttcttttgacaaaaaatgcagcacaatctttatgcatgttttgcagaatttgaaagtagacaaaacaaatacacatcaaaatggttgttgtgaaagttagtacagtatatgaaaatgcataaagttaaggaagtngacctacaatcttgctagtggtagctgaatctttagtcaaagtttgtctgaattctatcatctaagcaaacaccaaatttttgaactaaactcaaattcacta

SEQ ID NO: 151214 - DNA, 395 bp, Glycine max
  unsure (1)..(395): unsure at all n locations
gcttggagtacgtgatctttacccttttttttntttcaaacttggtacctagaaaatattntttgtgttctatttatttattctactcctgataattaaattattttttttagttttaaatattctaaatttgtatgctatatttgttttaggtaatattattctgtttaggtttctaagtttgtatgcttttaattgtgttacatatatatagtacattattaaaatatatattatgttatttatttaaatttgtgactgcatgtattttaagttattcatagaaaatatctcataatttcctacttaaagttattattataaataattaatcataaaaataataactccaacattaaagaaattcattacagaaactagtgcactggaactta

SEQ ID NO: 151215 - DNA, 425 bp, Glycine max
  unsure (1)..(425): unsure at all n locations
agtattattacaatcaacagaagaaacaagttttatacaagctggagaagacacagcagagcataactgaagaatgggaaactggtacaagccatcagatccaacatctccttgaagaaggattcttttggaatcctgatatttaacaaagcaacgattagcatgaaactcanagaaaacatgaatatctttggcaaatttgcttacactaattagattcttagtgatttgaggaacaagaagcatgtttttaagaataagttggccattatgactgaaaggagaaacaaaattggaattaccacgggctgagatattcagaccttgtccgttaccaatttngatctgatctggaccctcaaatggacaagtttgctggatgttctgcgagttattagttacatggaaggatgctccagaatctg

SEQ ID NO: 151216 - DNA, 232 bp, Glycine max
acatcaatatcaatcacgaattaaagtttacaaaagccaatcatgatcctcattgaatgaaatggtatgaatctgtcatctgacattgcatccatccataatatatatattcatgacaacgcacacttgtttgatctgtataccaacacaatattatgttacgtactctcaccgaaaccaaaccatcttgatgtaatatttccgtcttccgtattatgtttcccgtttcaaa

SEQ ID NO: 151217 - DNA, 392 bp, Glycine max
tactcagctgagtgtttcagttaccaattatgtttccgcactctgcattctctctttctatgcgtgtctgtattgtatgtgagaatgtgctaggaaaaatagaagatggatgaagtgtaaaatgcatgatgttgttgatgcagatactgaatcatagggcaattgaggcatccgagaagcataggcctactccagacattatgactggggatattgtcgaaatcaaattggtatatgtttttttttagtattaaaagaagagtgctgaagtgagatgaattttctggtgatatatatttgtccttcttgcggatggtcttgaaacaagcgtaagttgtcatttacaaatggattgtcatctcaaagcaaaatgctggtattacacaactatt

SEQ ID NO: 151218 - DNA, 385 bp, Glycine max
agcctctcccctaaattgctataaatattgggaggaatgaagaaggaaagggttcaaccttcttggcacttcgtattctctttaaattgctgaagaaaattgtttccgtgaagaaaatccaagccgaggtgcttccgtaacgtttccgtgagtaattacgcgaaggttttcaaccgttcttcgacattcatcgttcgttctttgttttcttcggtcttcaactagtaagtaccccaaaccgaacttttcaattcattctatgtacccgtggtggtccccattttgtttcatgtatttttatccttgttttcatttactttccgtacccccttttgacatgcttcagtcatttattcaagtcatttctcgcctaatcaaaaaataa

SEQ ID NO: 151219 - DNA, 385 bp, Glycine max
gcttggcatgcccaatttgactgttttgctcaatcaatccttgtcttatcaaatattggcattcttgtctggctgcctatagatctgaaggtggcatccctggatgggttgcctttgctggattgatatcttcatttgatctaaatggtagatcaacaaagtattccttatttttccataaaggatatggatgcttgaaattttcatgactatcggcacatagggaggaaatcttttgtttaaactctctaacatctgataggacttctgctagagagaaaagcctcgtaatttctaaagaaggcttgaaatctcttttgaatttgatcccggtagaatgtatttggagtttactggcagcagtatacacatccattcctatgag

SEQ ID NO: 151220 - DNA, 376 bp, Glycine max
agcttgtccgcaaaaaatcactaaaattgattttaaggttcgatacctcagtttttctcaccaagtaaaaatgggtcattttaaggtccaacgccttaaaaggacctccttccaagtaaaaagaatcgtcggattttccctttagaaagaactacgtaggactgattttctcttcgatggagggtacgtaggagcaagagccccgcttttgtcgacctcaaaaattaaaaaataaaagtttaaatacataatttcacacaattctaatttaaggctgttatcctttgggataaacgtgagaggtgctaataccttcctaaaacgtaaatacaactctcgaatctagaatattcttcatgaccggtttccttcggtt

SEQ ID NO: 151221 - DNA, 378 bp, Glycine max
agcttgtaagatttctaagatcatttttcttgacaactctttgaaaaagattgccatcaatatgaagagatgacaatttagagatattcatgagatgacaatttagagagtgatcaaagactttcaaatcgatttccactgaatttatcaatagacagatcaagatatcttaatgttgaaagttttccaaatcatctagaaatggcaccaccaattgagttgttgtaaaaatctagcatgtcaatatttttaaaaactccaatttaatccgtcaaattgggttattttatcatctagggataaattttttctgtttttttttttctcatgtgggtacttttcaaatcatgccccaaaagtgaataagtcttattataa

SEQ ID NO: 151222 - DNA, 337 bp, Glycine max
caccgcagcatgcagccctgaaggcagaccacttttttctttatttattgctttcgcactaaacaagacactttgttttctttataatccaaattaattggtaactaacattctctctatacaaactcttcttatccttgatggggataagttttgaaactcgaactaaggtgggagagccagagatatctccctcataggaaagttttttaacaggcagaattattaactctatcatcagaggggtatgcttatctttctttggatcatacccgactactccctgagcatccacatttatttcggcgatggtaaagaaaccgatacaaaatgagtg

SEQ ID NO: 151223 - DNA, 383 bp, Glycine max
  unsure (1)..(383): unsure at all n locations
agctttaagctctgcaatntattttattaacagagttccctcaagtgtgttaaactttaagagacctcttgatgccctttctcatcatttcacccttaattttgtcagtcatttaccaccccatatttttggttgtgtcatatatgtgcatttcactattagaaaatatactttcaacattagttatgtacgacattctacatcgattttaaaaccgatattgaaagtaccgatgttgaatgtattattgttaacatcggttttttaaataaccgatgttatatataaagaactacaacaaaataagtgtatacatgatgaacgttgactaataaattaacatcggttttttatgtataaccaatgtgaacgtccatcatcta

SEQ ID NO: 151224 - DNA, 374 bp, Glycine max
agcttctccctcttttccctatgatatagggggaggagggaagaacataaacgttcaaccctcctggttgttgaggatcacttgaaattagtgaaaaaaatcatttccgtaaagaaaatccaagccgaggtgcttccgtaacgcgtccgaaacgtttccgtgggtgatttcgtgaagattttccaccgtctttcgttcgttctttgtcgttcttcggtcttcaaccggtaatttcccgaaatcaaacttttcaattcattctatgtacccttggtggtccccatttgtttcgcgtacttttattttcatttcatttactttccgtacccccttgtgacgtgcttcagtcatttattaagtcactttctcgccta

SEQ ID NO: 151225 - DNA, 375 bp, Glycine max
  unsure (1)..(375): unsure at all n locations
agcntttaaattgcattcgcaattgtgtttttggtttcgtcaatgaatcttgatattgcaggaaattgcagactaatgcaattgtggtcatggtgacctaaaaaacctttgatcctgcaaacgaagtcacccttgcggaccgtttttaaaactcttgcccgcaatatcaaggaacaccacgaaaccgcaaccgcaatttaaaaccttgccattcacttaacaactcggcatgcagcctctaattttctcaagaaattacattcaaactcaatagtgaaagctaaatatcactccagaacagtaacatcagtaataatcgttcgaaaaaatgaacaaaagtaaaaaaaaaataaatatgagtacggtatgaagctg

SEQ ID NO: 151226 - DNA, 382 bp, Glycine max
agcttcagttcaggtctcaataatgttttcttgggatattttgtaatgtccttcattaaaacaacaccccatactaaaaagaatataaaatcacaaaattatattagtctgaaaatacctcacgtataataaataaagtcaaataagtaagtttgtacttaaataaaaatattattctcaaatatgggcgtctaaaaataatcgacgctaaaagtataacgtaattagccacatttgacatattaacaaagctaaaaatgtatctaaaggtaactaagtcttcaagtctcctcaattccgacagtttcttcctcgtgttttgaaaacacttttaatgagatgattatcttagtaaataaaacaataatagagtatttgtaaa

SEQ ID NO: 151227 - DNA, 409 bp, Glycine max
ctcgccccggatccttgagcacctccgctgcagctttaacaattcatgattattttgcaattgtaatgacataaaaggtagaatacctaagttctgaaaggcttgaatgcaatcaaaggtttcagcagaaaagaattccggattaataaacttagggtcgataatggaatgagatgagaaaagattggagtaccgtttctgctgttcgttggaagaaaacattggggaagaggacaatgagggtggaattggtgctgtggatgcgctagtggctccagaacgatgagctcttgaagccgaagcggaggcggaagaaccctttcgtttctttgacgattctgccatttgagggagtttttgtagattttaatcggtgaaatcaaaagaaaaatgaaaaagaagatgattg

SEQ ID NO: 151228 - DNA, 356 bp, Glycine max
agcttggatatctagactttgttttttatttatctccttggagaaggtatggcaattacttcttttctttgtgcaatgagctccttgacttcacctagacctctttggtactgtattccatgggaagaatcctcctccgattgggaatctctcaaatttggtgtatcttgacctgagatctgtggttgccaacggaacagcaccctctcatatcggcaatctttctaagcttcgatatcttgacttgagcggcaatgaattccttggagaaagagttgcaattccctcttttctttgtgcaataaccttcttgactcacctcgacctctctcttactggactcatggggaagattc

SEQ ID NO: 151229 - DNA, 390 bp, Glycine max
agcttctttaggaaatcttctcaaggtttgttatcttagttattagaggggtgtgtgtagctaagctctagcttctcaaagaagttttctcaaagaagcttctcaaggaagttttctcaagaaagcttctcaaggaagctacctagtctataaatagaaacatgtgtaacacttgttgtaactttgatgaatgaaagtcttatgagacacacttcaaagttccacttctctccctcttttattcctttaatttcgtgctccccccttctctctttcttttcctccattaaagcatcctctttaagcttcttatccaaggcacgttcttggtggtgaagcttcttcttccatggcttattccctagtggatggtgcctcccctctcctctt

SEQ ID NO: 151230 - DNA, 350 bp, Glycine max
aaatataaccaaaaagcttaagagaaatgttccagacatgaggaataaagtgaaattgggataacattcgcaaagaagtttattaggcaattacacacatatacgttcgatttatgaggaaaataatagtcatgacatcatcagcctacaaatgtcatgcatagtaaaacacaaagctcgagccacttttagaatgtggtgattttttctttctaccacattattctattgtggtgtgtatgtacatgtttggtggagagaaatccaaaatctaggaaatgaaatatacaatcaatctgaaaataaatatattgattttaattcactaattcctaactaaactaggaaac

SEQ ID NO: 151231 - DNA, 399 bp, Glycine max
tcttacctggcctgcggaacagcttgggtactctgtatttatggttacaaggttaactgaatctcttgtatcggcactgctatatttagttcgagctatctccattgccaaagactccttcagttcagtcactatcacacttatgattggccttcggtcgggatttggagacacacaaaccgttgctatttccactgctttccaaactgagttactatcaaaatctccatctaactttgagtcaacaatggccttgatatctcctttcgccatcaaggagttaacccattgacttatatgaatcttttcttgattcctcgctatcactggttgacttgtgattatctccaaaagaacaacaccaaagctatagacatcactcttgtctgttaatctatc

SEQ ID NO: 151232 - DNA, 399 bp, Glycine max
ttaagtcgactgccgcatgcaagcttgcttgagaagcttctatggatgttttatctttgaacttcaataagctctttcaatggtgggtttcaagacatggagtttcaatgaaagataaaggaaaatatgtgagaggaggcgccatccactaaagaataagccatggaagtcgaagcttcaccaccaagtgagtgccttggataagacagttatacatgacgcttccatggaggaagataatgatatagagagaaggggcgctgcttgggattttgatgcaaatatgtgaactaggaccgctttgaagtgtgtctcacaagtttcttattcatcaaagatatgaccagtgttacacatgtttatatacatagcctactctagagtatcttgctctaacat

SEQ ID NO: 151233 - DNA, 395 bp, Glycine max
cgctcatctctcacttgtctttgtagggtagcttcttggttgaattaaaataattagcggaagtagaaatttgagatgcatagtctacgcattatgtaatatgctggtgatatagagtttacgtggatagaaggaatataacaataatttaatagacttttagcaatatgatatttagattgatagatataatacaattcttaacctaatggtcctatttttatactaataattagatcgaatcgaacactagcacttaaagaggttgagagaatttgatagagaagaagagattgagattgaagaagagagatattattcaacccaactaataactgattacagattgaaatatatagcagttacagttgtttaactgctaactaaccagagtt

SEQ ID NO: 151234 - DNA, 361 bp, Glycine max
agcttgtgctccatggactgcacattgtatttattatgagaacagacctcgagaggaaacgcctcgctgccaacacactgacaaaaacatagatccggcgtcctggacaaatcatggaacgctggaggcaagccaaatttcttgccaggagacctagggagcaactgagatcatatacccatatgaggtgaatcacgatgggcatgcatcaatacctcgtcttgcctagaatgctatgaccgggcaatcacactgtacaaactatggtcatcacaactaacatcgatactgagcaaccgttaaagcacaccaatacgaagcacaactaaaacggcctcgctttcatgtcaactgcgactgt

SEQ ID NO: 151235 - DNA, 384 bp, Glycine max
  unsure (1)..(384): unsure at all n locations
nttcatcaagccagatacagacattatcctgtgatttatcaagccgctgcagactctacacatatcatgacagacgttgtccttgagttcgctgactaactcttcaacgagttatgtaggaacgtacgcacttacaggtgtatatcagtttctaatgctccacagttgaatggtgtgctttatagaatgacttagacctttatggaaagattgatgtgcatgcatttaaattgagaaatggcaaagacctttccgtgagaagctgcatactcatcttcatatgtctttaataaatgccgttcatcggcctcatgttgatagacacgagcgcaagcctggagagtgggaccacctgataattcaggactatgaggtgtatgcatc

SEQ ID NO: 151236 - DNA, 384 bp, Glycine max
  unsure (1)..(384): unsure at all n locations
agctntgaaagaatcaatagctggttcttttcgttattttagtaaaaggaataaaataattctgatacccttgtttctattgtaaaggccattctgtgataaaaaaaaaaaaaaaaaatagttctaggtttacctctgcgttgaggctgccaaatgcaacaacttagaacattacatcagtctaactttgccctgacgagttcatgtttggtagaagtttgacccacccaaacggaaaatcggagactcattaaacttgattttgtttcatgcaagtttatgtcatgtttggatgaaatttaagaatgaaataaataatatcatactcaaactgaagaacgtctcccttgaggttaataggttattggtgaaccagtgagttat

SEQ ID NO: 151237 - DNA, 396 bp, Glycine max
tggatagtcatcttgtgggagtcgcccactttatcaatccccaattggcaccatagagccccgacgcctatagaggacgttatcgaagagcagtacttcaggacatcgtccttcacccattcgtaaccaacaatgaaggaatgagatgagggcgttccggcattatggctacgcttgttatggggcgaaaccctaacgtcaccatcatcactctttcccgttgccaccaaaagggaagaaggaagaattatagtgacaaggataggttttttgtctagaggagcagtagaaggccttaccctctcacaaggtcgagagctaccctcgtcggcatggcacaggtccatcaacctctcgaaggaggaagacccactgttggaagcttcatggcgtacc

SEQ ID NO: 151238 - DNA, 372 bp, Glycine max
agcttcaattgagcctcagaagttttctttttcaacacaagcagcatcacagaaatctcctcattcaataacatcatctcaatggctaaagaatgagacctttctaactccatctggaggtcttccactgcttcaattttagtttccaaatcagactgacatctattcaggttttctgtcaactgttttatcttaaagttccattcagcttctttagtctttaaagtagaggcacactctttatgagtttgttccaaatttctgagcttggaccgcaactttgactgcgaatatgaagttcctgcttcttgaatttgagcttcctggagttctttgagggacatccgcagctcttgattttcttgctctagc

SEQ ID NO: 151239 - DNA, 389 bp, Glycine max
  unsure (1)..(389): unsure at all n locations
tctcccctantttgctataaataggggaagattggaataataaaagggttcagccccttaggcacttctctctctttcgaatctgctgaggaaaattatttccgtgaagaaaatccaagccgaggcgcttccgtaacgtttccgtgagtaattactcgaagattctcgagcgttcttcaagatccatcgttcgttcttcgttttcttcagtcttcaacgggtaagtacctcaaaccaagcttttcaattcattatatgtacccgtggcggtccacattgtgtctcatgtatattcattctcatttcatttactttttatccccccttttgacgtgcttaagccatttatttaagtcgtttctcgcctaagctaatatgtaaactaattt

SEQ ID NO: 151240 - DNA, 374 bp, Glycine max
agcttctatatataagcacttatattattataaaattaaaaaaaaaaaaaaaaactcttccgtaaactaaaatcaacttatgcatgaattttaattaaatttttttggataaattaaaatttaactaattctttttgccttcaaaagatctctgaatcaaatttatggtaattctttggtcatgtttgaaatatatgattgatggtgctttaatggaaacagggctgtgatgggtcaatactacttgatgacactccaaccttccagggggagaaaactgcagctgctaacaacaattcagtgagaggctttgaagtaattgatgctatcaagtctgaggtcaagaaaatatgccctggtgtggtctcatgtgc

SEQ ID NO: 151241 - DNA, 394 bp, Glycine max
tgttgttattggtggaggagaagctctatttctctatcttgtatatggatattctatttacattcaggaagtttaccaagtttatctttatcataattatatttagttccaggcaataatgcccctagtgtttcctgagtaagcctaacatgggaaacagatttgtagctagtcactcttctcgattcatcgaaagatgagttgagaaatcattgcatcagccttaagatagatttatttgttcaaagcttatctctgtctgatcttaagttgtgttggaagctgttgtgcatggaagctcatttccaaaagacaggctgttaaaacagggagtctctgtggttttgtgtctcactcactaattggcaagataagcaggttaacaaaagattgg

SEQ ID NO: 151242 - DNA, 383 bp, Glycine max
  unsure (1)..(383): unsure at all n locations
agcttgacaacaaaggagattttcgcttgaggaaacaaattattttctttacattaaattattctcatgcgtcatgtatgagctatgggtaccagtccaaactcctagctagcaattaaattcggtcttcaactgtcctgggagagaggttttctggacctcgtttgtgagtcggattacttggctgcagactgaagtgcaagtgaagcangatggagattagtggcggatccagaaaatttatttaataggggaaaaaataattcagaatattttcatagaaaaatattataaatttttgtaaaatacataattttatatatatgacaaaaaaaattaaaatgcctgtctcaatttctataaattataattacattctacac

SEQ ID NO: 151243 - DNA, 393 bp, Glycine max
  unsure (1)..(393): unsure at all n locations
ntattctacccttcctcaatctgctgctgatgttgtctttaaatccatgctggtgctaaaccttccggatttctggatctgtggagccttgtgtttcacgcacttattcagattgtggggctagctggagttagatttggaagcttaaactccctgtgaacaaaaatatcacctatcatatttacatttttttctctttttttcctaggtgttaaataacacttgaagtgtccaaatatatttatccgtacaaaaaacatctactgggagatcgcaacttataaggaacattattattcaaaaggccttgatcatgatggacctcttgcttcttgcctcctaggaattaggatgtgaatcaaatcaaatataaataaatagattggtgcactc

SEQ ID NO: 151244 - DNA, 377 bp, Glycine max
tgcttattacatagtctgtcttgtttgacctttataagctggaaaacagaaactttaggccctggcgaaagatcaagaggagttagtgggttaaaaccataaacaggagaacaattcttggtgctatgaacagctctattgtaagcaaatccaacatggggtaaataagcttcccaagtttttaagttcttcctcaaaactgtcctaagcaaagttcccaaagacctattaacaacttttgtttgcccatcggattgtgggtgacaagtggttgaaaataacaatttactgcccaacttgctccacaaagtcctccaaaaatggcttaagaacttatagtccctatcactaacaatgctccttggcaaaccatggag

SEQ ID NO: 151245 - DNA, 394 bp, Glycine max
tataagaacaaaattgcctcaatcattttcaaatatgcatgtgaattacgacgcatcaacaagaatcaagccaaggctattgtgcaagcaatcaatggggcaaaacacaccaaatgattatgatgatggatggctcaaattcttacaaaggtaaactcatcactttcaaattgagctttcaaaactatcatgacatgtagagaagaatcaaggatttcaagtcacaaaatgtcaagaacttttattttcaaaacaattacccatttcttgaacatatcctataattcaaagaaaaacatgcaaagtcgtacgtgcacacaaaattgacccaaaatattaaactaaaaatccgacgaaactaacaacattaacaaattaacacatctaacaaatt

SEQ ID NO: 151246 - DNA, 372 bp, Glycine max
agcttgtaaatcttttgatcaggttttcccccaatgcataattggatgcatcgcacatcagttcaaatggggctgttcaatcaggtgcctgaatgataggggtggtagtcaacacacgcttgaggtaatcaaaagcctctttgcactggtcatcaaaatcaaactccacctcctttttgcagtagattggatagtggaagggccactttgctaaaatccttgataaaatgcctataaaaccctgcatggccaagaaaagaacgaacctctcgcacgcaagaagggtaaggaaattgtgaaataacagctatctttgtagggtctacctctatgcccctactggaaatgatatgccctaaaactataccttgg

SEQ ID NO: 151247 - DNA, 391 bp, Glycine max
  unsure (1)..(391): unsure at all n locations
tgctctaaatntacattgatgtttgtatttatgggaggaggttgtatgtcatttttgttttaagaatagtatcccactggtaaaactaactttccaaatgtttgccttcgcaggaaatggccccgaggaagcttgcctcaaagaggtccaggaaggacaaggcagcagaaggaactagttccgctccggagtatgatagtcaccgctttaggagcgcggtacaccagcagcgcttcgaagccatcaaggggtggtcgtttctccgggagcgacgcgtccagctcagggacgacgagtatactgatttccaggaggaaatatggcgccggcggtgggcaccactggttactcccatggccaagtttgatccagaaatagtccttgagtttta

SEQ ID NO: 151248 - DNA, 388 bp, Glycine max
agcttatgctgctaatatttacaatatatctcctcaacctcagcagcaaaatcaaccacagcagaacaattatgacctctccagcaacagatacaaccctggatggaggaatcaccctgtcgcaacctacccttcggcgggagggcgacgcgagactcgcgggatgcgtgttccacgaaaggaatacgcgcggagtcgccaccaacgtttatttgaggaaaacgtcggaaaaaccgaaaaagacgcgatctacgaacttttaagtgaaaggttcgggagttgtatttacgcacggggaaggtattagcaccccacacgtccgtcccaagggacgacagcctttaatcgaatgtgcaaacatgactttgatttttacgttcccttttat

SEQ ID NO: 151249 - DNA, 401 bp, Glycine max
tgcttgtggagcttctatggaggctggatctttgatcttcaatgagatcctttaatggtgattttccaccatggagatgcagcggaagacaaaggagaagaggtaaaaggcggcgccattcactatggaataagccatggaagaaggagcttcaccaccaagatgagccttggataagaagcttggagaggatgcttcaatggaggaaaagaaagagggagagaaagagagaggggggagcatgaaattgaaggaagaaaaagggagagaagttgaactttgacttgtgtctcacaagactgtcattcatcaaagttacaacaagtgttacacatgcttctatttatagactaggtagcttccttgagaaactttcttgagaaagcttccttgagaagcta

SEQ ID NO: 151250 - DNA, 398 bp, Glycine max
  unsure (1)..(398): unsure at all n locations
nggttttcttcttctcttcaagtttgttgtgaacaatgaggtccatcttctcatcaacttttgttgtagggtcattcgaatcatgctttagattcggaaatcgctctgttggatcgagtgacctcagaataattaagaagggggggttgaattaattattcctaaaactttactaattaaaaattactcttttaaggcttttacttttgttgttaagagaatatggagtagaagagaaacttaacagaaagtaaaagcgaaaattaaatgcacagcggaaagtaaaaaagtagggaagaaggaaacaaacacacaagagtttttatactggttcgacaacaacccgtgcctacctccagtccctaagcgacctgcggtccttgagatttctttcaacc

SEQ ID NO: 151251 - DNA, 362 bp, Glycine max
agctttaggattaaaaaatggatttttttattgattcatttcctaattttgaaatttaatcacagattgtttggatgattatccaacctaatttgggatctcaaacaatttagggattgattcgattaaactatctctaatgcatttgactaaacttttacactctgaatatcattcatagtaactatgataattttatttgcattagtttggtgaattggattgatgatattaaacttgattcgtattttgtttttttctgttctatttcttcatctttgtttttgcgttttttcattcctttacattcgcctacaaactattcaatgaaattccccttgctatttacaagtgaattgaag

SEQ ID NO: 151252 - DNA, 396 bp, Glycine max
tggttcgaggtacttacccgttgaagatcgaagatctatgaagaacgaatgaagaacgtcgaagaacggttgaaacctttgtgaaattcttcacggaaaacgttacggaaacgtttcggaagcgcctcggcttagattttcttcacggaaacaatttttctaagcaaattcgaaagagagagaagtgccaaaggggctcaacccttttcttcttcacttcctcccctatttatagcaaaataggggaggtggttgccgcccagctcgcccaggcgagctcagctcgcccaggcgagccaggttgcttcctccagaagcaacagccttctggaggaatattctggagggcccaagtgggcctgggtgctatttgcacccccatttttactaagtaca

SEQ ID NO: 151253 - DNA, 375 bp, Glycine max
agcttgcctgtgcgagctgggcggtattcacctccctcatttttgctataaaaaggtgtgaggggctgaagaaaaaaagttcaacatctttggcactcaggattcactaaaaataagtgaggaaaagaagaaagaaggaaaaaatccaagctgagacgcttccataatgattccatgacatttttgtgatcaattacgctaatgttcttcaccattctttgcctttcttcgttcgttcttcatcgttcatcgatcttcaaccggttagttttcgatttcgaagctttgaattcattatatgcacccttaggggtccattcttgctttgtatgttttcatcttcatctcgtttactttcggtattcttttcttcgt

SEQ ID NO: 151254 - DNA, 397 bp, Glycine max
cttgtgtgtgcatttatttgaactgtgtaaaatgtaaataactgttatctatttcgcattctttacattgcattctaagcacccacgggtttgagtaaaaaaggggccctatacccgggttcatgggaatttaaggagtggaggtgaatctatcatcatgctaggtctccgacttgcttgataatagtgaaacctcgtctagagctttctctctttataatgtgttgtcgctggtattccataccgccataatattattatcttgagtgatgatacctctagaaaacagctgtgttagttataaattgttgggaagtagttattagagacccctagatattatcctataggttcccaaataggggcaaagagcaaacacgctcctgtgccattcttt

SEQ ID NO: 151255 - DNA, 361 bp, Glycine max
agcttcattatcaatttggagcttttctatgtattacacgactcaatcggacatcctttgataatggtattgccgtctgaatatgctaccagcttccgctttcaatttggagcatctagatatatttcgggacacaaccagacattctggtataaagacattgtcgtttcaatttgcttaaagcttcgattctaaattttgagcgtttcgatatattacgggactctatcggacatccgagtaaaaagttattgtcgtatgaattttctgcgagcttacgttataaattggagcgtcttgaattttcacgactcaaccggcatttgtgtataagaattggatttcatttgctcaagcttta

SEQ ID NO: 151256 - DNA, 395 bp, Glycine max
tctggtttcaatttcaaccatctcgatatattaccggactcatcctgaaatccgcgtagaaagtttttgtcaattcaattttctcagagcttcggatctaaattttgagcgtctcgatatattacgggactcaatcagacatccgagtaaaaagttattgtcgtttgaatttgatacgagcttccgttttcaatttggagcatccctcgataaatgacgacactctgtcgggcatccgagtaaaaagttattgtcgtttgaattttctaagagtttccgtttcaatttagaacgtgttgatatatttcgggactcaacccgacatccgtgtataaaggtattgtgctttcaatttggtcaaagcttgtagtctcaatattgagcgtcttaatata

SEQ ID NO: 151257 - DNA, 385 bp, Glycine max
agcttgcctgattaacctgatatttatagaaaatgattattaaacacacaaaatggaagtactaagtatttattacctatacttaatagaaaatacttataacactacaaaataatcataaattggaagagtttgatacaatttacacaagttttatacacaaaagttagtcgtattcaccgactaacatgtattacaaagaatggactctcttaagctcaatgtatttctcaactaatgtttttattttctctcatttcttgattcatgactcttgtttttctgcacttgtccatcactattcttcaattcttgatgtcgtatttataggtagagagacacttgtaattgtggagagtatcttcaaaattgaataatatgaccg

SEQ ID NO: 151258 - DNA, 398 bp, Glycine max
ttaagaactttttgatgtacattaccaaacactgatttattttaataaataagctccactttcaacaattttagtttctgacgaagcacaaacataggacaacccaaaatgggttttccctaaacttccttgaccaaccacaaaaaatccttatgcccagtccatattttatgaaatttaaacatggaaggaaaagactttacttaatcaaacaccgaaaaaggagaggatggtgatccaaatagttacgagttaaagtgcaataggataacttcttccaagaggatagccagatatcattacatatcattctaccaagacgaatattaatactatcccgagtagccctaccattacaccaagtataccgagttccttgagtatctaaatgtataagt

SEQ ID NO: 151259 - DNA, 381 bp, Glycine max
agcttccatcaagtggtaatcatttttccttagcttcaagtaggtgctccttaaacctccattaattttttttctttaccttctcttccattgttgtttcttcatttttctccatgtatctcctcacatgtcttgttctaaatgttgttaacatgattctttagagtttccaccgattaaacttgctatagaagttagatttgattttctatggttcaaatttcttgttcttgttcttgaaccatgaattgtattgagtttaggttcctttgagttttgtcttgttattttttgtggctgaaacctaaatcataaaattcttacaaaaatattaaagtagaagaaaacctcataaatctagagtgacttgttcacctattg

SEQ ID NO: 151260 - DNA, 398 bp, Glycine max
tgtaggattatggggtacccatcacatgtggtactatgtggcggtcgggcgatggtgcacaacaagttttccacatccacaatgcgcgcataaacccaccatcccctgttgcccacctccaaaagagctcacgtactcccacgtagcccatatcctcgtttctctcaacaccgggtccccatcaatcctcccaagcttccacaacatccaagcaaaacaacattcaaacaacacagctatcacagccaagcaaaacagagcaaaggcagaaacctctgccaaaacaccaaccaaatcacagcttttctcacttaaagaccccagtaacaattccttcgatccaattcgttaaccgttggatcgactccaaaattttactggaagtctatagtacataa

SEQ ID NO: 151261 - DNA, 371 bp, Glycine max
agcttatgatgagaaacttttttatgattcttaatgaaactagcaaaatagaacttatgggaaagccataagctacttttaccgcttcacaaccaacatatacttctctatctctcattcctatttaacagatgtataactagttcccctccatttttagtcatttccagcccaagagaatatagggccttaactattcttgggccttctaatgtaaacctgaagagatttaggggtcctaagggttatgggctttgtagtcctatcacattcagtcaactaggctcattttcacattcatttgtcttaagtagtaaataaatgataggtctcatgtgaccaatatgattccacaagttaagtaccaaatg

SEQ ID NO: 151262 - DNA, 393 bp, Glycine max
tgtaagtggttcatgatgaaccaactatatcatttgttggattcatctaatttatatggttccaatttacaccactcacactagatttattgcttccctcctagcaaccttctgatcaccatttgccgttgtcggaggcaatttctggcaacggcattttttttaatcctttcctcaccacctttgttcctttctctccccatcaatcccttgtcttcgactgcaattgtctttcacaaaatactggtacccctaaaatgtgaaattaaggccattccaagattgaaaagtgaaacgcaacataaacatcaaaagtgatgcatatgaccgaaagtgcattcaacatactaatcttcaacacaacaacaaacaaatgaaaaagtaaaaaaaaat

SEQ ID NO: 151263 - DNA, 376 bp, Glycine max
agcttggccccaggcagcatttatctcatcccattcaacctaaacatttcataaaagtgaacatcataatcaaagcttaaatattcaaactaggaagaaaaattattcaattcaagattaagaaaattctctaggataaaaatcattttatgaagggacatatcaaagcaaaacatgagtgcatgtaccacaaagttgaaagaattgacaccatagatttagttatccatattccacaataagttgcctggttcaaaaagcacttcaagacacaattagccaaagaaatttaatattttgttgcaagataatttttttaaataaaagtagctacagtacaagtttatgaacatctatcacaacttataccaagaaa

SEQ ID NO: 151264 - DNA, 393 bp, Glycine max
tgcttctacatttataacggttccaagatatatttttaagacgtgatgccctccctggagttattgtgactgacagagacctagcattgatgaatgcattgaaaactgtatttcctgagtgtacaaatttgttgtgcagctttcacataaacaagaatgtcaaggccaaatgtaaatcattaattggtcaaaaaaatgcttgggagtatgtcatggatgcctgggaaagtttggttgattgtccttcagagtagcagttcgatgaatgcctgaagaagtttgaaatgacttgttcaccttggccaatgtttgttgactatgtcaacgaaacatggataatcccgcacaaggaaaaatttgttactacttggacgaataaggtgatgcacttat

SEQ ID NO: 151265 - DNA, 380 bp, Glycine max
  unsure (1)..(380): unsure at all n locations
agcttgagctaaattaggctaatcnttcgtaagctacttgagctgagtctagtcttaaatgagggatctgcgaacgaaactcagtttaagttagtctaaacctaagagggctttctaaataagggatctacggatgaaggttggattaattcggcctgacaagggatcaaaggtttagtaatttaggctacaacatagaacacaagagcacgattgattagagaaatatatttctatgcatcaacttgtttgttagaaagacccaacatttctacctactgctgtcattntatttaccttgcattttatagtttttagcataaaagtttagtttaaattttgtttgaaattatcactcatacatgttctctcaataatgc

SEQ ID NO: 151266 - DNA, 393 bp, Glycine max
ttatagaaattcaaatggtcataacttttcactttgatgtccgattcggggacataatatactgagacgctcaatattgaacaacgaaaactctcgagaaattcaaattgtcataacttttcacacggatgtccgattcggggacctaatataccgagacgctcgtaattaaacagcataagctctcgagaaattcaatcggtcataacttttaactcggatgtccgattcggtgatataatatatacaaacgctcgaaattgaacaatagaagctctcaagaaatttaaagcgtcataacttttcactcgaatgtccgattaagttgcataatatatctagatgctctaaattgaacaaggaagctctcgagaaattcaaaatggtcataaa

SEQ ID NO: 151267 - DNA, 380 bp, Glycine max
agcttgtaggattatggggtacccttcatatgtggtactaggtggcgatcgggcgatggtgcaaatcaactctcccacatccacaaatcaaacatgaacccaccatccccagttgcccaccatcaactgagctcacgtacccccatgtatcccttatcctcgttcctctcagtaccgggtccccatcaacccctccaagcttccacaatatccaagcaattcaatattcaaacatcatgaactaccctaaaccaagaaaacagggcagaggcagaaaactctgcccaaaacacattccaataccacaactttccctactcaaataccccagtaacattctcttcgtttcgatttgctaaccgttggatcgactcgaaaat

SEQ ID NO: 151268 - DNA, 395 bp, Glycine max
  unsure (1)..(395): unsure at all n locations
ttgggacccaattaaagaaagagaaattctcttatctaatgaacttaaaaaaacttgttacccaagtatcaacaccaataatacacatcgaatgaaatcaaaagttttaactccaaattcgaagatttagatttgaataaatcttcaactcaagatttaaattcataaacccaaccactaagaaatttaattgtgttgtataaccaaacctaaccttaatcgtgaaagattttcactgcaaatgatgattgctctaccaataatcttgaccaacttctcatttcctccaccatcttcttaggtctgttcatcggtagggtcttctgtaataccccgatcgaatcacaccagaatgcaagggatccagaggctntgcaaatatgagactatacaac

SEQ ID NO: 151269 - DNA, 368 bp, Glycine max
agcttgttgagaaaaatgttctctattatttagtttgggtgtgtgtgtgtgtgtgttatatatgaatttttgacaaataagctgtacaattatgtctatgctgagagatggctcagagcgaggttggcattctcttcgtttgtgcataggcagggtagatatccatcatgtgaatgtgattgtttgattttgctcttggacttgattggtagttagataaatttaatatgtagtggtggtggttactgatttatatgaattaatgtcactacctagcataaatcttgtaggcaatctcatggattgtcacactggtgctaattaggacagacaggaatgctcttgtaggcaatctcatggattgtcac

SEQ ID NO: 151270 - DNA, 391 bp, Glycine max
ttaaagacatggtttacaaacctacgtgcttacattcaattcattttgtgaaaagtgctttgtataatcttgtgaagctctcaaagcaccttgaacaccttcatagaaaagactaagtgcttagatcatatattcatctttaagacgataagagttagtctgtgagcaaatcaaacaacaaatcttttgatttggataaagccagcagtggcttagtaggacaaaaaatactgggttatttatttcaagcttggtgtagagcttgcgatgtagagttaaaagtggtagtgacaaaaacttgtaactttgtgaagttagtggaacttgatgcttagctaagaattgaacgtaatctctctgatagagacaaattgatacaaatcttgtgtct

SEQ ID NO: 151271 - DNA, 386 bp, Glycine max
  unsure (1)..(386): unsure at all n locations
agcttaatactcaatggtatttaatctttttctgatgagtatcatagnttatatactggtttccccttctctcatagttttcatagcagcagaaacttcatccattacactatcccagtccctcagttacggaaaaaccctagtttccccaagtggaatctttgaactcggtttctgcaatcttggaaatccgaacaaaatctaccttgggatttggtacaagaatattccacttcaaaacatagtttgggttgcaaacggtggcaacccaatcaaggattctttttccatcttgaaactagacagttctggcaatttggtccttacacacaacaacacggttgtttggagcacaagttctccagaaaaggcacagaatccggtgg

SEQ ID NO: 151272 - DNA, 400 bp, Glycine max
tgtattagaatatgaatatataaacgcttattttatttatacttatttaattagatctttacttatttaaaatattcaattaggtctttttatttttaaaattttcaatcaaatcctttattttttttaaaatgtctcaatgtgattcttttcaaagaatttgcaacttaacgttgtggtcagtctcaattggacaaaaaaaaatcacattcagacatttaaaaaaagagacttgattgaaactttcagaaataaaatgacctaattaaatattctaaataaataaaaggagcatatttgataattaaatcttttatttaaacttaaacttttacagaaagtactagcaatataagagagactgagaaaaacatagatgaaatttgtctaaaagtactat

SEQ ID NO: 151273 - DNA, 132 bp, Glycine max
cgaactgcgaaatgaacggtaccggaggtgaatttacccattgggcacgttatatgtctcgaaaattccgtccctcgggaataaaatgattccaaacaagctcaaacgtgacggagatggcgacgttgcctt

SEQ ID NO: 151274 - DNA, 404 bp, Glycine max
acacaaaaactcagctgcatagagcacaaaggaagcgaaatgctattttccaatacagacaatacaagagatttgactctaaaccatgaatatgaaacccatcaaaaaggaggattttgaacaaaccccaatcaataaaataacacatggtgaaaaaatgttagaaaacgaggtattaacaggtcccgaaccaactaaaatatacgagagtgcccatcaaaacctaagggtacgaaacggactattaataggacaaaacacatataaaaaatcaataacctacttaatgcatgcagcgtgaactataactcaagaagacttggtattataggtgaaaaaagaaagaattaacttatacatgacttggcatcataggctcgctaagaaaaataaagttcctaata

SEQ ID NO: 151275 - DNA, 377 bp, Glycine max
agcttccaatttatttacagactgtttttttaaatacttacattgttcccaccacacgtgtgctgacatgagtcatgtatgatggaataagctttgcaagaccaaaatctgaaattttgggtgtaaggtttttgtcaaggagaatattgcttgcttttatatctctgtgaacaatatgtggtcttacttcttcatgaagataagcaagcccacgtgcaatcccaatgcaaatcctagatcgtgttttccaatcaaaaatgatattactgtgacctgaacctgcaagtgaagacaaaataactaattaaaaaagaattactgtaaggaaattaaattaaaataacaacttcatattttctaaatgatacaatagatgt

SEQ ID NO: 151276 - DNA, 397 bp, Glycine max
  unsure (1)..(397): unsure at all n locations
ntaatctaatagagactgttgaagcaaaaattgtttatttgtcacacagagattaggctcaagtttctctcattggaatgcttcaacttgtctttaagatgctcttccaacgtgtcttaaagctccaaagaataccgttgaagtgagctccactcaactaacagacttttggagtaagtagacaaacttgacagctgccatgaaacgacagcttgcagaaccattctaaggtagacattctgaggaacctttatgatgagcattttgaagcattatcagaatagttatttctgaagttcaaatgatatgcctttatgaagtaacacaacttcatcaatcttaaaacatcttcatagcataaatcattttgaagaagattgcttcatagatactgagt

SEQ ID NO: 151277 - DNA, 376 bp, Glycine max
agcttcttagtctcagctgatgaatattatttcgtggctacttcatgccctcctctaatgacaatagcatcatttctggcactaaattgctgggagtttgaagccatcttctcaattaaatttctggcttcagcaagggtcatgtctccaagggctccaccactggcagcaccaatcatacttctctccatgttactgagtccttcataaaaatattggagaagaagctgctcagaaatctggtggtgagggcaactggcacatagttttttaaatctctcccagtattcatataggctctctcactgagttgcctaatgcctgaaatatcctttctgatggtcgtggtcctggaagcagggaaatttttttctaa

SEQ ID NO: 151278 - DNA, 394 bp, Glycine max
tcatgcttaactatgtattaaaatccaagccgatgctcttctgtaacgtttcagtaacggttccatgggtgatttcgcaaagattttcaactgttcttcgacgctcttcgtcgttcttcggtcttcaaccggtaagttcccgaaatcgaacttttcaattcattctatgtacccttagtggtcctcatttgttttcatgtgcttttattttcatttcacttactttccgtacccccttttgacgtgctttagtcattttacttaagtcattttctcgcctaataaaaaaataaaataaatttccaccgatcatttgatttgcaatatccgttaatttatgttaaaatgaaatccgaccattcgatcatgccgtaaccacgttgggaaccataaa

SEQ ID NO: 151279 - DNA, 341 bp, Glycine max
  unsure (1)..(341): unsure at all n locations
ggacttgtaggaattgatttgggccagaatggatgagggaaagtgtgattttcgaaatctgcacttatgccaaattttgctgtcaaaataggtgcagcaagattttggctttgtgcaaaaaaatgtttgggtgtgggtggctgtggaaagagtagtgcaaaatgagttctgaatgtttgctagtagatcccaacggtcaaaatgtaggcttatgtactatagactcccagtagaattttggagtcgatccaaccgttaacgaattggatcgaaggaattgttactggggtctttaagtgagaaaagctgtgattntggtggtgttttggcagaattttctg

SEQ ID NO: 151280 - DNA, 395 bp, Glycine max
tctaaactttatacaagaatgaagctctgataccacttgttatacaagtggcctcacatatcttaagaaggggggggagttgaattaaaatattccaaactacttccccaattaaaatctatttcactttcttttcaagttataaattcccttaataatgaacttcttaaatattaattcaattaaaacaatttgaatatgaatattaagcaataataaacaaaggagattaagggaagagaaagtgcaaactcagatttatactggttcggccacacccttgtgcctacgttcagtccccaagcaacccgcttgagaagtccactatcttgtaaattccttttacaagttctaaacacacaaggacaatccttcctttgtgtttagaattcctt

SEQ ID NO: 151281 - DNA, 379 bp, Glycine max
agcttgagtgctactgctgcttttttttttgtagcctttaagatgtttgaaacaattaaaaggaagccagaaattgatgcttatgacactactggtcggcagcttgatgacatccgtggagatatacaacttagggaggtttgctttagttatcctactagacctgatgaactgatattcaatggattttctctttcaataccaagcggtactacaacagctttggtaggagaaagtgggagtgggaaatccacagttgttggtttgatagagagattttatgatccacaggcaggtgaagtttttattgacagtatcaacctcaaagaattcaaactgaaatggatcacacagaatataggcctagtttgccaggaac

SEQ ID NO: 151282 - DNA, 393 bp, Glycine max
ttgtgaaaactaaaatagtacaacgaaggtaatttcatttcacatattggacacgcatgaaattatatgtagtgaatggttcattactacatttcatcttccttagtgccacaccatggtcctcaaggaaaccttctgtgctacatgcacatggaagattgttacatttgtctagaagaattacatgaacatatatctgcaagaatgcctagcttaagtggctttaatgtggtactttctagctagtctcattagcctttttactcactgttgctttggttacatgccttcacgttcacaattcataatattctgcaagagaatgatattcaatactaaagtataaacttaaaaagagaatgaaatcaatcattatcaaagtagatgaatatt

SEQ ID NO: 151283 - DNA, 378 bp, Glycine max
  unsure (1)..(378): unsure at all n locations
agctatgatctaccaccaccacctgtcctcatcatcttagccgcccaacaagccnaatattattaggactttgatttctaaccgtgtatttggctatattattatgacatttgaacaatttagtatttcttttatatgcatagtatgattgaacaattatgaattatgttatatgactatgtggcttttatatatttgatctattcatgtttcttgcttcatgattggtttagattttttcaatgaatgtcttgtgaatgattagtaatgtatgtatgttttatattagttgcgcactctggctttttgttgatgccaaagcgggagagaaataggaatcaaatcaagaactcacattatgaattaacttaatttcaa

SEQ ID NO: 151284 - DNA, 394 bp, Glycine max
  unsure (1)..(394): unsure at all n locations
tctcacgttntctctctgcttctggatgtccctttctacttcaaagacatgactatttatagaaaagagccaagaggtgcaggccaattcacctaggcaaattgttacttagtgatgaagacacagactcacctaggcgagtgtgttgcttatggctgaagaaatctgattagcccaggcgagctagttgctagactgggtgaatgaatgcctgaaatcttgaaaaaatgatcattttgcccttccttttgactctgtttctgaatctaacaaacaaccatcaaaacctacaaaaccatctttattttacttgtaaaaatgagagaaactgagggatatttggagaaatagattgaaaactgtgtgtctaagagaccctatggagcttgataat

SEQ ID NO: 151285 - DNA, 374 bp, Glycine max
agcttaaaggaagctaatcctatttttataaactcatcctccaagttacttgtaaactgcaaaacactgaaggagctgaagcagttgcattgtgacatgatgaagaaagggttgttgtgtcacaagcctgctagtaacctcaacaagcttattgcttcttctgttcaaataggtacccttgagagcttggactatgctcgaaatgcttttggggatgatgatggaaacatggcctccttgttcatgtataactgtcttattagaggttatgcttcagcagggttgggtgaccaagcaatcttgctttacgttcagatgctggtgatgggcattgtgcctgacaagtacactttcccttttttgctgagtgcgtg

SEQ ID NO: 151286 - DNA, 394 bp, Glycine max
tcttcactttctatgacaatggcaaggtaccgaacctttcccgaatgaagagacttgtatttctttaaagagatgaaatagctttcaaacaaattacccacgactgatatgaaataccatgcgctgacaattatttgcagaaagtaccatggcagctgaagcccaagatttccaacctgtacaagccttaaaacccacaatgaatgaacttttaaattttaggttgaacggaaaagtatattttcagttgcatagactaatcgtttaagttaaatctcgatgtgttcaacaatatataggtaatttattgatttaaattaccagttacacgcttttagatatagattgccagtttatttaagtgtcaagatagttgtctttttactctcgtctt

SEQ ID NO: 151287 - DNA, 372 bp, Glycine max
  unsure (1)..(372): unsure at all n locations
agcttcttatatatgatgctgagtttcttctggacttgctcttctctctactgattctagctttcactgcccattctgtncaaatgaaatctgaatcatcttgtttcctggcactataagatgattgcacttccacagtggaggccatgaatgagtttaaaacttggaattgttcaacagttgttcaaggtgtgtactagaatttgcacaggttgttaaaagtggatgatgcagctatatgacatgaccataaaagaacttgaagagttcagaagatgaagctttttgtgtaggtgtgcatgtggcatttggtacttgatctgtcttttccacagatttctctttcaccttttgaatctccaagctacaact

SEQ ID NO: 151288 - DNA, 393 bp, Glycine max
tcggacgagagtcaactaccacaacacgaaactgtcttcccaactcatgtgcatgcaatagtatcatttcaacagcagatgaagacccaaaagttagaagaacatcaccatctcttattttggtgacagcatgcttcactatcaccttgttggcaagtataatcttttcacttataaaacactcaatatctgactcgagagaagcttttgcttctgattcagacaaggtcaaaggtagcttggctatccgacttttgagaaatctaattgcatttcccatgctgattgacagaggtcgacactcaataagaaatgatacataactaccaatttttgctgtcaagtctctcacaagagtcttctcaggtggaaccttgtagtctttgatggcct

SEQ ID NO: 151289 - DNA, 376 bp, Glycine max
  unsure (1)..(376): unsure at all n locations
agcttgaagagaatgctttaatgtttgtttcgaaagagagaagaggggagcaccaaattgaaggaattaaagagggatagaagtggaactttgaagtgtgtctcataaaactttcatccatcaaagttacaacaagtgttacacatgcttctatttatagactaggtagctttcttgagaagctttcttgagaaaacttccttgagaagcttctttgagaaaacttccttgagaagctagagcttagctacacacactcctctaataactaagctcacctccttgagaagcttccttgagaagattcctaaagaagctagagcttagctacacacacctctctaatagctaangtcacctccttgagatgagaagc

SEQ ID NO: 151290 - DNA, 392 bp, Glycine max
  unsure (1)..(392): unsure at all n locations
tccactccatttcccattcaagtacctaactgttgttattntcaaatgttaaaaaccagaatacacaatacccttaagctaaccgacaaataatttttggatgaaatttactatcgacaacctttcacatatgcaggtaatcaatttcggtttcaatgtatgcaactgaaaaatgatgttgatgtttacacaatgttaatgtgtaatcaattttcatttgttggttcgattgagttattatgtaccattgctagaacaccagatgatattttaaacttacttcaagccactatgacccctattcatgatgccctgctatattacaatgggaggtggaacatgtcacgccaaaatgagtttgttggttactcgttcataggaaaaaatcccaa

SEQ ID NO: 151291 - DNA, 378 bp, Glycine max
  unsure (1)..(378): unsure at all n locations
agacttgacaggaaacaagccgaatcattttagatnncgaaaatccataaaagtataacagaggttagtgaaaaacttgatgctatcaataggaggatagattgttgatctaattctaagacaatatgagaacctgcatttgcttccctccaaaatagagatagagacagcttagtatagaaacatgataagctctacaactgtagaaagctaactagaacccgaataagtaaacaattaaaaggtgaagccttctaaagaatctcatgcctaatatctcttttcttgactagatgcattccgtgaaaattacaaccaaaataaaccatagtccttcaaaaagctacaactaattatgccacactcaccctccaggaa

SEQ ID NO: 151292 - DNA, 392 bp, Glycine max
tcttattcctatatatatatatccttccatctattattcatgcactacatacttattattgttagtgtacggcatatatgggtactcatactctgatcatactttatactcccaagcgcatatattagctttcttttttgattgctatacttttgcaactttaattttatactacacctttttttattgattcaaacaaaacttcagaagaactcttcaaaaattggatatggattctctatataattgaaaagcaaaaaaggaagaataagtgaatatattgtactttctgaaaaaaagtgagtcaaatgttctcttcttttctctatatgacatgcttgcaatttacatccaaacctttaaatcttgatcatctatatatgtttatatat

SEQ ID NO: 151293 - DNA, 372 bp, Glycine max
agctttgatagctaagtctttggtcagtggatcatgccattttaagtctgaaaagttgtaaagtccataatgaaatccacatgcatctaagtgttcacaatagcctaataacaagactgaccacatataggctaaattaacaaaggctcttgctatatttgacattcaattaatctaatattcacaaaataagtgactatgtacacccaaagacaattaagaaatcggttaattttctacttaagtgacataggcacctaggttaaataaaacgatactctagatttatgtgatcacaaaatgtcaataatgagcaagcaattagataattggtctaaacataaagtttataagtacttcaaaggtgcaaaa

SEQ ID NO: 151294 - DNA, 390 bp, Glycine max
gtgcttccacattcccagtttgagaaccactaaaagaaaggaagatgaggcaccagaggaagacgaagaagtgcaggcccttagggcgaaactcgggcaagcccaaacagttaaagaaaggttcaaatcagcagctctgaaaatccgaaaagagaataccaaactgagagatgtaaatgtggctaccaccaaagccttggaacgagaaaccaagagggcttgtagggaagaacacgaccggaacaagttccgaggggcccagtggggtagcaacagcgagcttaaactccgaagagaggaaatggaccaatcacgagtagatagtttgatcttgaaagatgaattgaaggcttgctcgaggtccaaaagaagtttgtctcatcggttatg

SEQ ID NO: 151295 - DNA, 383 bp, Glycine max
  unsure (1)..(383): unsure at all n locations
agcctgattggacagtgcacttatattttttattgtgttgaggtngaatttggaaattagtgtttgttggtgattggaatgcataaatcatatgctttgaatgagcatgcagtcattagaagagaaagaacatggaattaggatcatgactgaaaatgttagttggtttgtcaggttgattgtgaaggaacacgttagccacaacccggtgagagtgtgatctttaattgtgagagaatgactagcagtaagtaatggtttttgcatgaatctcagaatttggaatgaatgcatgagtttgaagatgatgaaggccatgttttaattgaaagtagccacttagccaaaaagcttaccttgtgtatgaatgatttatcccttgc

SEQ ID NO: 151296 - DNA, 394 bp, Glycine max
  unsure (1)..(394): unsure at all n locations
ntacatgaaagaatgaaagaatattttctccaagttattttttatgttgttccttcaaagcttcttctatatatagcctaaatcttcaagtgtttgatgtctctcaacgaatggattcttcactctagttctttgtttgatgaattatggatgttggggaatttaatgcttgcattaaacacacgtcccttgttcatgttgataggttagcatgacaaacacttgaatagaaagtcacttcttccatcagtgaaggtttgaacaacagagcgtgccttttgatgaagataagcactttcagaccgtggactttatttattcttcataggactttgatggatcctaggagaatgttttctacaaaatagaatctgggacatagagtattaaatga

SEQ ID NO: 151297 - DNA, 349 bp, Glycine max
  unsure (1)..(349): unsure at all n locations
tcctacttttattcgttgaccacagagtggtacctggagatatgtcgcgggggtcaagagaccttggggacgtcagggggggtgctatttcccaaaactaagctngaccaatcccgacccaacccgggcatagtcagtcagtgagaacctgtgacgtacctaaacaggcgagctcttggcagtcaaccgataaaagaacaaagaccacaaagcaaggaggcttgtgtggtggctggccaactatggatcttgagtgatatttggaatatgaccactggtaatcaattaccaagggtgtgtaatcaattacaaggcttaaaaatgaagacaggaagttaagatggtctcc

SEQ ID NO: 151298 - DNA, 396 bp, Glycine max
  unsure (1)..(396): unsure at all n locations
tctagtccttgtggatcttcttccctctactgcttttactgcacttgnaggtttagcttgaacttcacctgtaacatcatcaggttctggttcacttaatatttctgcattgatatgcatcattggcttcttgcttggatcatgcttgtccttcatccatgtgttcagcttatcaaattggacatccttactaaaaactatttgattcgttcttggatttaagagtttgtatgaccctatgggattgtagccaacaaagatcatgtgttcactcttgtcatccaatttcgcccttgtttgatcaggaatatgtctgtaacatgttgaaccaaaaactctcatatgcttcacagatggtgttttccctgaccatacagcttctggtacttgattttt

SEQ ID NO: 151299 - DNA, 379 bp, Glycine max
  unsure (1)..(379): unsure at all n locations
agcctgaagagatccctccanaatttgttcttgaatatgggaatcgccggccacacactatagctcctggggaaaccatgaagtttacagatggtatcaaggaacagagaaaccaccttaaacgacggaaattgggggggcatggcacccagatatacgccctcaaaaaattgatcgacgataaccagaatgacggtgtaaccttatgagctggggaggtgcgtgatgaaatccaatgataaaatcctcccggataccacttggaattggaagtggttgcaatagctctgctggtatgcgggcgatgagtttgaattgctggcaagcctgcacctctcgaggaatgacttcacatcatgttgtatatggccccaagtaa

SEQ ID NO: 151300 - DNA, 387 bp, Glycine max
tgaagacctgccaccagcattacgctctactagtttttcattgatgattcacgttcatatctgaatgtgttgactattccagttcctgcaacagatatttctgttgaagacaatctttttctagggttgatgttaaaatttttggagttttcagatcttggggatgctggacataaaattgtaaatactgtactgtctgcaatctcttcttacatttccagtgacatatgtgaatcaatcggtgggagatatcagatgcggaagagatctgagaatttggaacagttgcacattgttgttgatgaggcaagaaaagagcttctcgaggtttataaagttcttcataaaaaatttaggagtgaatcttctgagtgttcatcacatgcc

SEQ ID NO: 151301 - DNA, 372 bp, Glycine max
gcttaaccaaggggatatggttttttttgtgcttgaaagaatcaatgacaatgcttacaaagttgagctgcccggtgagtataatattagttccaccttcaatgtctctgatttatctctttttgatgcagatggagaatccgatttgaggacaaatccttctcaagagggagagaatgatgaggacatgaccaagagcaagggcaaggatccacttgaaggacttggaggacctatgacaagggctagagcaaggaaagccaaggaagctcttcaacaagtgttgtccatactatttgaatacaagcccaagtttcaaggagaaaagtccaaggttgtgagttgtatcatggcccaaatggaggaggacta

SEQ ID NO: 151302 - DNA, 383 bp, Glycine max
ttgagcaaattcaaacgacaataactgtttactcttttttctgattgagccccgtaatatatcgacacgctcgaaattgaatgcttatgctctgagcaaattcaaacgacaataactttttactcggatgtctgattaagtcccgtaatatatcgagaccctcgaaattgaatgttgaagctttgagaaaattcaaacaacaataactttttacacggatgtctgattgagtcctgtaatatatcgagacgctcgaaattgaatacgaaagctctgagcaaattcaaacgacaataactttttactcggatgtctgatcgaatcccataatatatcgacacgctcgaaatagaatcttgatgctctgagcaaattcaaacgac

SEQ ID NO: 151303 - DNA, 375 bp, Glycine max
ctgcagctgaagacgaaaattgtcttttttgcctccccttggacttttgccacgtttgaaggagctttcaattgaagggtttgatgggattgtgagtattaatgctgattttttcgggagtcgctcttcttcatttgcatccttggaaacactggagttctgccagatgaaggaatgggaagaatgggaatgtaaaggtgtgacaggtgcttttccacgtcttcaacgtctttttatagtgcgttgtcccaagctgaaaggtttgcctgcccttggacttttgccatttctgaaggagctttcaatttaagggctttgtgggattgtgagtattaatgctgattttttcgggagtacctcttgtcatttacctcc

SEQ ID NO: 151304 - DNA, 393 bp, Glycine max
  unsure (1)..(393): unsure at all n locations
ntggaatgaagttgatggatcacataatcaagctcttttccacaatggagaccaactgttatcactggcctcccaaccaacgactacctaactatggcaccaattgggactcaattatttctcttggcaggtttcagggtaagtaatgatcaaaggggtagggaagaacaatataatgtcccttgtccacattttttgacacatcagcgacaacaaatgcgtggaagagccttgagccaatgaaattaattaattgtacggtgagaatgaacttaatttattggtagcctttgctaacacctgagcgtgtagatcaattgtgtaggattattccaatttaatcacgaggtttctagtttaagttgctatgagagaatgtattgttgcttatat

SEQ ID NO: 151305 - DNA, 378 bp, Glycine max
agctttgatgcctgtcgtatggttttcattgctcaggcggatatgaccggcagactgcttgtcgggtcattgacatttgattatcacatcttgcactatatcattgtaagaattttgatgcctcgttcttctaatctagctcaagcctctgaggaggatttgattctgatgtgggatttcttgaccgttcgtcaaatcgactgggcccatttgattcgttaccgcatgcataaggcattgcggtctagtgcacctttaccctatcctcagttaatcactttatttctgcgtcatttcaatgtacctcttgcttcttagcctttcattcaagttaaatgatccttctctattggtgttggagcggtcacctcttttggc

SEQ ID NO: 151306 - DNA, 399 bp, Glycine max
ctgcttcatgatgatgaatcgagtgtattcaccaagtttttattatgacaaagatattgacgcaaagcccatataatgacttcaagattaaatctagaacaaattccagaatcaaggagaagtttgatttcaagattcgagagaagatgaagacttcacaagggaagtattgcaaagatttttcaaaaaacacacatagcacagttttgtgtttccaaagagttctcacaaaattttctaagctaccagagtttttactctgtgggaaccgattaccacgcccgtgtattcgattacccgcggccaagcctgagtcccaaagtttctaactgaatacacagcgggccccttggttactgaatggtgcaatcgattaccagagattggtagtctattact

SEQ ID NO: 151307 - DNA, 278 bp, Glycine max
agcacgagacagaagccccacgagcgggtaacaccacgaccaagagcaaattacaccgacaacgccgcggggcttccgaaatacacactgagacccgcgccattaagcgggcaacaaccccacacaaatgttggaaaaacataaccatgatatccctggaactccagaaaacacagaaactctgcacacatgtaaaggagactcacactggaaagctaaaacgcaaaaaggaaaaagtgccgcgcgacttccgaagaagccacaagggacgagagcaa

SEQ ID NO: 151308 - DNA, 311 bp, Glycine max
gagcatcccactaagcgataaccagagcgtatctcaaccaaaattcaactaaaaaaacgagaacctgcacaaatcgacccgcaacaaactgacgggccgttattaatatatatacactctccatcaggtaaaataggcgaattaccgaatcccaactaagaattatcttaaaccacactcagattatcaacgtatcccaactaaaaaaaaaatgtcaagataaccaaactaaacaccaggtggtccaaatagaaacactgtgtataaaaaaaaacaaaaacacaaactctgaggtaaaaagcaaaaatcaa

SEQ ID NO: 151309 - DNA, 375 bp, Glycine max
agcttctcccccaattttctatatttattgggagaagtgaagtggaaaagggttcagccccttaggcacttctctctctttcgaatttgcttagaaaaattgtttccgtgaagaaaatccaagccgaggtgcttccgtaacgtttccgtaacgtttccgtgcgtgattttgcgaaggttttcgaccgttctttgatgttcttcattcgttcttcatcgttcttcggtctttaatgggtaagtacctcgaaccaagcttttcgattcattctatgtacccgtggtggtccacattgtgtttcgtgtattttccttctcgttttcatttactttccgtaccccttttgacgtgcttaagccattttatttaagtcat

SEQ ID NO: 151310 - DNA, 390 bp, Glycine max
tattaaggatcaactagaaccgtaaatgtttatttttattttaaaaaatgtataatttatgaaaaatggttttattagtgtttagggttagttttgaggattttaggctacagtagagtacagttgaatttggaaaatgctatttggtttggttttgaggcttgttttagttgttttgtttgtaattgatacaatattccatgtggcgccttttctatgtttttttcttctccaaatattgtttcatctttacttgaagttgcaagggattaagtccctcattctatttgtagtggagtccttttcatctttaatataatgttatttccctaagctttgagtgaacccattgccttctattttactgcacatctttgatatttgagcatt

SEQ ID NO: 151311 - DNA, 343 bp, Glycine max
tgcaagcttttaaatagagaacccctttttttctctttatcccaagaaaacagacaatacagaatgaataccaaaagctatccataccgatactaaataacggaaaggaaattgcccctgattctctccctctctctcctctaaccaactgcctctgattctctcctcactctctcctctaacaaactgccccctagtttattccttttctacccttcttttctttctacaggaatacactaacaattcccttgagcctttcttcatctcatgagcttgaggctccaaaggcccattgagagtttggttcccctcacaacatcagaacaactctattaagaaa

SEQ ID NO: 151312 - DNA, 394 bp, Glycine max
tttgttgccttctggagctaatgtgaaatgtgtttcttatgctggttattttgtcaatgtgtatgctcctctaatttgttttcacttaactttttttttatttcttatagttccttagaccattgaaggatttaatttgttattgtacaatagagaggatatttcaggagcacattccattcaagagttctacagtgaagttgtttcaatacatgtactacttgcatgtcttttctcttttgattattttctaatggtcaaaactttcattaaataaagactgatttttttaaaaaactattttagggttcagcaaagaatttacccacatcttgcacttcaaaactcaacccagcactggtaagtttcaagattgtcacttgtaatttttact

SEQ ID NO: 151313 - DNA, 374 bp, Glycine max
agcttgtaaggtttgttgtctgcttttttgaaagattcaatgaactccacattttccttgaatatctcttagcagtataacagctttcgataagaagttagttatgaaggatttagttagttggttgggttagttagcttttcgattataacagaattcatgttgcagatgtatataagcttccatcattaatgaataaagagcatgagctgtagctgatcattttactcgttgttgtaaacttccctcgtatgctatcttatttcattaatatggtatcagagctcttctaacgaagagttctgctgcgcatacgttccttcttcttttctcaatcatccaccatgaacgaagcttcaatcaataacacagag

SEQ ID NO: 151314 - DNA, 389 bp, Glycine max
  unsure (1)..(389): unsure at all n locations
tntaactggaaattacccatatgttgagactaaatatggtcccaccaaggtatatatgatcatcacactaatcttgagttgcctagttaattntgttaaattgttatgtaaatgtttaattaagtagttcaattctaatctcaattgtatagcaatctgaaatgtcacttgatcttgattatcatgaaataaaatgtttgatgctatattattagattgtcatggaagttgtggagggtaagctacgacctaagcttccgtgtgatgatgttggccaacttggaaccagagagattgaaggcgctttgcatccaatgggcaaaatactatttgatagttaaaaatgaaacttaggatgtttagacaattttgtaattatagtttatatt

SEQ ID NO: 151315 - DNA, 369 bp, Glycine max
agcttttaagtggtttttttattgtgcctcctgcaaaaatacaaaagaccatcatgaagtgccatcttagatggtgcctcctcctacctacatggaaagagaaacccttgcaagtaaatagtttttttcctacacttgtctattttctaaataatgcttgttttgttaaaaagccaaaacatttttttttgttgttcaatggataattatattttggagctctatattgaaagccactattacttaatttcaatgaaaatcaatgtgctttcagagacacatggggggcataaacgaagatatagtaaagtatgaatttagattgaagtttagatataaaacaagaaggcatgtaatcaggatttgaga

SEQ ID NO: 151316 - DNA, 390 bp, Glycine max
tgggcctcttcacgtctggaatatgaatgtatcttatttatccaaagacccttatgtgctttgctgatggcttcttcccgttccaagcttcaattggagtcctgtcttttacagacttagttggacatctgttgagtatgtaaacagcagtgtagactgcttcagcccagaatgtgttaggtagtcccttctccttgagcatcgatctagccatctccatagctgtgcgattctttctctcggacactccattttgttgaggagaatatgcgactgtaagttgtctctcaatgccttcatcctcacaaaatctttcagactcgcgagaggtgttctctttgccgcgatcacttcttagtacttttatccgttttccactttgattttcac

SEQ ID NO: 151317 - DNA, 372 bp, Glycine max
gcttgggtcaggcaaaacattttttatccccaaagaatactacaaataaaaaattggtcttttattattcagggaaatagacaagtaaaacaccttatctaagagtcaagaaagggtaatgaacttcattacccatatccacaagatatatgttatttggaacgcattctgcaagtgtaagaaaatcaattagttgctaacttttaataattgataaaataaaataattagtgttacacaaagaattatacatttgccttaaaggttgcattgaacttcaaatctcagtaattatatattgtctattccgaacctaaaacatttatcctagtgacatatggcacacataaaatttctaaatttctccttgag

SEQ ID NO: 151318 - DNA, 394 bp, Glycine max
  unsure (1)..(394): unsure at all n locations
tgtaatcgattacacacatactgtaatcgacttttttatgagtagntcacaaaacattctcaacagtcacatcttgtacttggttcttgaatggttatcaaaggcttatatatatgtgacttgagacacaaatttgccaatagtttttgaagaacaaaaaagtcttatcctcttaacaagaaaaattgttttatcctactacaaattccctggcctaaacacttgtgattcaataaggaataattttagtgctcaaattgttcaatctatctctttcaagagagattacttctactcatcttctttattctgaagagggataaagagaccgaaggtctcttgttgcgacaggattctaaacacataggaaggattttccttgtgtgattaaaac

SEQ ID NO: 151319 - DNA, 384 bp, Glycine max
ggctgcagcttgggggcctggatcttctttatttatggagtcctttgcttcttgaagatcatggcagcataatagagaaggaacaaagatgattggagacgccacttcaaggagaagatgagtgaagaagaagctcaccaccataggaagccatggaaaagaacttgaaggtaagagaaaatgagtggagggagagggagagaaggggcacgaaattttgtgcctcaaatgaggtctgaactttgaagtgtgattctcaaatgatcaaagttgaaaaatgcacacacatggcctctatttatagcctaagtgtcacacgaaattggagggaaatttgaatttctattcaaatttcacttgaatttgaaattgaatttatggagc

SEQ ID NO: 151320 - DNA, 395 bp, Glycine max
tcttcaccaatattttctaagcctttgcaggttgtatccaagtattctttcaaaaagcctctccatgcttccaaaccaaaaagtagcatttgctatttgactcacacaacaccctattgtactcattcacacaaacttcaaaagtagcaatcccttgtctgctctcctgaggtttcttatcctaaatggattctttttaggacaagtacctaatagaccttttaggggaaactcattgtggttatgtaatgttgtaggttttgatgattccaaaaagaaaatgacagaaagtcaaaagcaaaataacatgaagaatcttgaacacgaacaagccaaacaactagaagattcaaggttaaattgttaaaaggtttttctgataagtagcatatttg

SEQ ID NO: 151321 - DNA, 375 bp, Glycine max
agcttgtgtgccctatatactctttatttttttcaagcttcacattgagcagatcatgggtatcagcaatcctaactatggcagttatctgggacacatccctctttgacatactaccgtacacacccttggatttaccagccaacacaagcaccggacccccacgttgcaggatcactgtgtcgagaacatgttgtgacgctccttgaacaatctgccggatctgatgcatggatgtatcacaaggagtatgcccaacgacatacagaacctgccccttcttcagatacaaccgtccccctttggaatcccggataatcaccctaacacgaatgtgacttgtaagccaggaaaccttcctatgatccaccactg

SEQ ID NO: 151322 - DNA, 376 bp, Glycine max
agcttctagccaaatggacttaccttgttttaattcctttgatagcccttttgagccttgtttccctttccttgttttgaagctcactacaagccttaaatgaaaaaccatgatatcaccatatccttaaggaattttggagctttggaattgttttgggaataagtgtggggttttttttttgtttcattggataacttgttttgttggctatgcttcatgatgtattttgggccatacttgatgtacattgtatattggttaaatgttggacatgctgaatgaaatgttgtttctcaaaggctatagagtaaaaaaaaatcgaaaaaaaaaaagaaaagcaataaagttgaataagatcttaaatggcacaaga

SEQ ID NO: 151323 - DNA, 398 bp, Glycine max
ttgaatgctctattcaatggagttgacaagaatatcttctgactgatcaacacatgcacagtggccaaagatgcatgggagatcctgaaaaccactcatgaaggaacctccaaagtgaagatgtccagattgcaactattggctacaaaattcgaaaatctgaagatgaaggaggaagagtgtattcatgacttccacatgaacattcttgaaattgccaatgcttgcactgccttgggagagaggataacagatgaaaagctggtgagaaagatcctcagatccttgcctaagagatttgacatgaaagtcactgcaatagaggaggcccaagacatttgcaacatgagagtggatgaactcattggttcccttcaaacctttgagctaggactctt

SEQ ID NO: 151324 - DNA, 401 bp, Glycine max
ccgggatcttaatcaccgcggctgcagcttgccatgaaaagaatttttgttttcacataattttatatggagtatcatattcctttatcatatttggcttgatatctatctaaaaataaattctaactcatagaggagaaagtagaacttgaacaacaggaaacaagaagattaaggaaagagcttgagagcgaaaaggtagatatgagaatctcatgtcattgaatacaattttttttatacaaaggtgtttttataggaatgttgtctgctttacatccaggtgccatgctaatgttattttgacaagactgcagaataagttattgatatgacaaatgtcatgactttaactgactaatgctcttggtccaaagaatgaagaataacttatagtttat

SEQ ID NO: 151325 - DNA, 387 bp, Glycine max
ttccacttttaaaatcattaatgctgagctttttttcttaattattaacatggcaataccattttgaactaaatggataatgctctcatgagaatggttttatttatttttttggcttactttataatgatttttaactaattaccagctcatttatgcaaacatgagttggttgtttcccacttttcgttcctatttattgactatggttcgtcatctaactcgattacctatatttagtatcattctttttctattttaattgaacttttgtatgaggatgaagattcattcctaatttcctatgcgtgaacttggactgtgcactgcagagactgaattatttgcttctgcatattctatgccataccttagtccaataatttg

SEQ ID NO: 151326 - DNA, 376 bp, Glycine max
agcttaaagagttaagtctcgtattggtttaatcgattacggtagtattttaatcgattacactgttgtttgagacaatgactgtttttttaggagtctctactttagtcgatttccagatggattaatcgattacttctctctcatttaagttgttcagaggtgaacaaagaacactttaatcaattacttaggctatctaatcgattacatagttcttgagttgttttccagatattggatgaacactttaattgattacttggataatttgattgattacttcattgaaatatacaattaccttatagatttaatcaattacaggcggttataactattttttctataaataaccaacttgtgttcacatcta

SEQ ID NO: 151327 - DNA, 396 bp, Glycine max
tgaaacatatataaataaatcaaatttgtacgagtggaattcgatcacaataaatttaggaaaaacagaatttattttttttaaaaaaagaaacaacccaaaataatccagaattgatcctctagggatccctatacatgttccttctaatccccaagcgtgagtaattcattccttacctcgatgtagtcgctcaagcattctttgggttaaaagttctagtgagggaactgatgacttaattttatttatttatttatttaaatgaaaaatccaaaaggcacaactgatccactcaaaattactattctttgatgaatagtcatcttctaagagcaatcaaattatttaaacggccaagattggaaacccaaattaatttgcaagcaaaaaata

SEQ ID NO: 151328 - DNA, 375 bp, Glycine max
agcttgagatgaggaagtgttgtagtgttaaacttcctgcttttattgttgaccacagagtggtacctgtagatatgtcgcgggggtcaggagaccttggggacgtcaggtggggtgctattgcccaaaaccaagcttgaccaatcccgacccaacccgggcatagtcggtcagtgagaacctgtgatgtacctaaacaggcgagctcctggcagtcaacagataaaaggaaaacaagaccacaaagcaaggaggcttgtggtggctggccagctgtgaattttgtgtaatatgtggatggtggcctctggtaatcgattaccaagggtgggtaatcgattacaaggcttaaaattgaggacaggaggctaagat

SEQ ID NO: 151329 - DNA, 393 bp, Glycine max
gtttgagaacccattcattgtattatatgttttgttttaacaatatagacattgtgtgctactctttttttcttcctttctctgaacttatctttctcagtcttaaacctaacaaattggtatcagagcttcaattcaaatcatcatttcgcatttgttcatggttggtctagaataacaaagatcaatcattatgtttctattcatgttgagtcttcaagattagataaaaaagatgttcaacacaatcaagattaagaaattcacaggaaagaatagtttcaccctttagtgaatcaagatgtgtgccttgttgaaagaacaaggaatctaggcacctttctttggccaaccgacgaagattaataaattcattcttgagaaacaagaaga

SEQ ID NO: 151330 - DNA, 377 bp, Glycine max
agcttggaatcagagaagactgttctattaattcttcaaacaattttcattttcatcttctcaatcgttattataaaaaaaattaaaagaagtgagaagacaaatagtgataaaatacatctaaaaaattcaaaaatatttttaaaaaacaagaaaaataaaacaaaacagcaaaaagggaggcatttttcaacaaaataatcatttgttggtaggagcgttaacaagtcaagttagattaggtttcactaaattccttcctcaacccaatcaaacatatacgaattatattgggttgaatttgttcaatttttttgacaaaattcaaattgaaccaatccgattgaatacatgtttgtttcatagtagatcaattg

SEQ ID NO: 151331 - DNA, 408 bp, Glycine max
  unsure (1)..(408): unsure at all n locations
caggaccttaaatctcagcttgttggagctaataataaagtaggtttatctctgtcttctcctgcatgtatgattctttaaggagaggttggttagcacctggctcaagtattgagcatgacaaagtgtgtagaaatttcttctcttaaaactacctgattgccacgcagcagtttgcatggtcacatcacatgtgtatatgaattattattttttatttttttgctaacatatgaaattttgatgtgatatgccgaaaacacaagcaaaaaaaaacaagaaagcgtcactcagcagattgttgtagttgttctagacaactaaagttcaagatgttttgttttacttatttgcatcttcaaatgattgaaatgcagcacaccccanaatactccgtgaaataacaat

SEQ ID NO: 151332 - DNA, 386 bp, Glycine max
agctttttagtaaaacttgttttatttatagatgtttttttctttctgggaatcgattactataggatgtaatcgattactagtagctaaatgtttttttttaaaaaaaatagtttacaaattttgaattcgaattttaaactgtgtaatcgattacacaatgaatgtaattgattaccagaagttaaaactatttttaacagcttttagaaatataaatttaaattttaaaagcctataatcaattataacagttgtgtaatcgattaccagacacgaaaatttcaaatttcaagtctgaagagtcataactcttcaaaaactatgtaattgattaccacattatgcaatcaattaccaataaggaaattttaaaaataactccc

SEQ ID NO: 151333 - DNA, 395 bp, Glycine max
ccatgatgaatcaagagtgagtcaaggagttttgtttataacaaagatgatgacaaaaagctcaaaagtccagatcacttcatgataacaaagatgacaacattcaagaatgagcgcaagattgagtcaagaacacttcaaggatcaagagcaaatttgatttcaagaatcaagattcaagattcaagaatcaagaataatcaagatcaagattcaagactcaagaatcaagagaagacttaatcaagataagtatgaaaaggttttttcaaaaactgagtagcacatggatttttctcaaaacatgtttaccaaagagttgttactctctggtaatcgattaccatattattgtaatcgattaccaggagcaaaatggatttgaaaaaagtttc

SEQ ID NO: 151334 - DNA, 374 bp, Glycine max
agcttgtcagttctattacttgtttttggtaattaaattgttttatgcaaaatttgacagtgggtcatagataataaaaatgatgatctaagatctcaatttaagatttctcgttaaaaatactctaataaacaagatgaagtgcttataccttttggtgcataatatccacctgacccgcctaatccacggcccatgacagcctttattagcatatatattatcccactgtcatttgcttcaccacttttggttatatatcattgtagttgactgcaccatgcttaaactagttagaaaatatcaaagtgattaaatgtcattaactaataactatactcatttaaagtactaagttagttggcatctgctgg

SEQ ID NO: 151335 - DNA, 390 bp, Glycine max
tggtcttcattctcttcgccaacgccactggtattcaaatgcatttctgttatatctgcctgcttccaccttcaattaatgtgttctttgataattgaatttttgtattgagtgtttttttctcgctcattgcaggtatatccagagcacatgtgctacctctggggaaggactatatgaaggactggagtggctctccaacaatatagctaacaaggtaggccttaaaaattctgcatctcttgtgttcgttgcttgagctgtataactctgattgatttctgttgtttacttttctggatcaggcttagggacattttgtggaatgccgctatttcttgcttattatattatgaggttgatgggttgctgcttctcttatatagcatt

SEQ ID NO: 151336 - DNA, 377 bp, Glycine max
tgcagcatgcaagctataagaataatattgctctgttataaacgaaagggaacgaaacctttgactgcactaaatacaacaaagttttatacttagcgaaagcttaatcaaggttaattcaggtgccgatgccctgaaaacagcataacatgtaaataattgaacgttcttaggcctctacaaatcgattactggcacaggttaagtacacttgggtggaaaaaaaaaataggatgtggcttgaatacgactcaagtaagactacgcgtgactagggctatacctacaatatgccttaaggtggctagacagttacgcatgcctcggggtaaaactagtatttccatatactgccctttctttcctcataaacaaac

SEQ ID NO: 151337 - DNA, 386 bp, Glycine max
tactgacatattaattcgagttaggatcctatttttttatagaagcggcacaccgcacattgaaatgaaatcaagcgtgagatatttagatacatatgtaaaagaaagactacatttcccaagctaatctaaccatgtattttctctctctctctctctctgatttgctaagatggtacataagttcatcagctataaatacactgtattcgtgtatgtccgtatgtgtttatggcagtgtactcaaaattaatatttacactcaatcacatagcttcaagttgcaccacatcactaaatagtagtgcaatatatgcagtttaatttgactacaggaaatctgggcattgccaattaattaattgttgatggagtgaccaacacct

SEQ ID NO: 151338 - DNA, 380 bp, Glycine max
agcttctcatgcctttggacaagcttattatgggaagaaattaaagactctatctcataatagatacgagatctctggtgcctatataaaagcatgaagaaaagataggaagaagtctaacgaatatattggacaaaaccttctctctgatacaatcattctagacaatgtgcttttacattgcaaagatattgtaatcacactaaactttcatatccttactctataagtagattgttgtaatattttcaaacattatttatgaaagtcatgactgtgttaaagaatacttacgttttcaatttaaagagaagattgtttgttgtaatcataagtgattaggagaatactctttacaatcttgttttaattagtgaaac

SEQ ID NO: 151339 - DNA, 396 bp, Glycine max
  unsure (1)..(396): unsure at all n locations
tgctctaaatgtacattgatgttngtgtttatgggaggattgttgatgccatttttgttttaagagtagtgtcccactggtaagactaactttccaaatgtttgccttctcaggaaatggccccgaggaagcttgcctcaaagaggtccaggaaggacaaggcagccaatggaactagttccgctccggagtatgacagtcaccgctttatgagtgctgtacaccagcaccgcttcaaggccatcaagggatggtcgtttctccgggagcgacgcgtctagctcatggacgacgagtatactgattaccaggatgaaatacggcacctgcggtgggcaccacttggttactcctatggccaagtttgatacagaaatattccttgattttatgcca

SEQ ID NO: 151340 - DNA, 342 bp, Glycine max
tttgttgagtgtccgcatggatatgttctacgattggttttgcatgaatttctaattgtcataacatatgatttgtggaagtgatctgggcattctttctgctttacatttcaagccattggccaaactactgtcccaacacaccttattttttgccattttgtaatccctttgagccagacacttgatttgttgtcggaacactaaacctatgatgaaagcttcctaccttacctaaggataggagagcaggggtgtttctaggggagatttctatcacttacatggctagttgtgggttttgaaggaagataggtatctactgaaagtttaaaaaaaaag

SEQ ID NO: 151341 - DNA, 400 bp, Glycine max
tcatggagaatcaaaggtgagttaaaggtgttttgatgataacaaaagatgatgacaaaggtgatgacaaaaagctcaaagatcaatcaaagaacaactcaagtgaattaagaacaattcaagagttcaagataagaatcaagaagaattcaagactcaagaagaaagtttagaatcaagaatcaagattcaaggttcaagatctcaagaatcaagatcaagattcaagaatcaagagaaggcttaatcaagataagtatgaaaaggtttttctaaaaaattgaatagcacatggttttctcaaaacatgtttaccaaagagtttttactctctggtaatcaattaccattttgttgtaatcgattaccagtagcaaaatggatttgaaaaagtttttta

SEQ ID NO: 151342 - DNA, 378 bp, Glycine max
  unsure (1)..(378): unsure at all n locations
agctttgcgtgaacattccangcttatttttgaatgacaacgagttcaacatggaacaaaagtgatagtgacatgcccaaaatgtaaggtttatatcataaccagtaagaattagaaacgtttcctaaattctgaaacctatcatattccaaacaagttagtttattaaaatgtaaagtaccatgaatcaagttagtttcattacacaaaattaattctataagtcaaaaactttataaacgcaataaaacacaaggttcacaagcaaaactcagaaaatttgaaacaacagctttagatggtcttcatatgataagcaggggcttaaaggacaatatcagttgtttcctaaaatatgatagcctactaaggaatgaa

SEQ ID NO: 151343 - DNA, 396 bp, Glycine max
ttacttcaatattttccatatcatcaagaatcttgtttgtttcagccaatttttctgtggttgttcttgactctgacatcttgaaggtgtacagttgttgctttaagcatagccgatttgcaagggactttgtcatatacaatgactccagtttcaaccacattgagattgctatcttttctcttgcaacttctcttaaagctttatctccaaggcatagaatgattgcacttctggctttaacaatcatctctgatttctcctttgagcttagagattcagacatcctttcttctcctttaaaagcttatgcacatccatgttgaatcaagattgcttccatcttgattctccataacccgaagtcattttcccctaaaaacttttcaatatcgc

SEQ ID NO: 151344 - DNA, 381 bp, Glycine max
agcttcggaagaaagtgatgaggtgcatttctcttaaggcaaagcttgaaagagcccgggtagtcaaaaaaaaagtcaaggccctagccctcaaagtctgaaaaaagtatgatgaactaagggacgttaatatggccaccgatgaagccttggaatgagaaaccaagaaggcctgaaaggaagaacacgaccaaaacaagttttgaggggctttatagggcagcaatagtgagctcaaactctgaagaggtgaaaggaatcatcatgggtcaaaggcatgatctggaaggacgagctaaaggcttgccttaggtcgaaaagagatttgtcccaacagttaaagtgagactgaagggaatatgtgggccatcatcgatgagt

SEQ ID NO: 151345 - DNA, 395 bp, Glycine max
ttacttctacaatagctaactttaggcttgtgtattctttctatataaagtcttagctaggtgactcattaaagtgaatcacataatttggtgatatacctttgagtgtgtgagatatcaaagtgtgagcaatctagctcttgtaatttctcaataaaagtccatgaagtatcctgaagagtggatgtaggattcagatccgaaccactataatccttgtgttcttcttctttcttttctttctacattcttctgctaccattgagcaggacactttttagttttgttgttgctaatcttacaattcctttctctctacaccaaatgatcacccatgctcctacgcataaactagcatccacatgcatgcttcaacacactaaaatgcagcaaat

SEQ ID NO: 151346 - DNA, 377 bp, Glycine max
agctttataagcgcaggtctgggttattttagtaagcgttcgtgatatgcgaggatgatattccgagtactttggatttggtacgaccatgccctcctgatttccagctgggaaattggcgagtggaggaacgccccggcatttacgcaacgagcataatgtaaacctttacggttttaaaagctctatagttgggcctaggctttagagtttttccttttgttaaggctttgtgtcttttgtttttgaatttataatacaaggatctttcttcatctgttcctggtctctacccattctcattcatttgcatgtttacttctttttctgaaacggcagatccgatgacgagtcccccgaaggtactaatacctggg

SEQ ID NO: 151347 - DNA, 397 bp, Glycine max
ttgaaaggggagcttgaaaaaacaagagtggtctatgaaaagctaaagatgatagtcactagggtcaggaaagagtgtgatatgctgagagatgtcaacatgactacggtagaagaattagagcgggaaacaaatagggcccgaaaggaagaatggagcaggaacaagttccgaggggatctatgggacaacggcaacgggcttaagcttagaaaggccaagagggacgagtcaaggatggaaagcatggtgttagaggataagttaaaggcttgtcaaaggtcgaagagaagtttgacagaacaactgagcagaatggaagagaatatgttgacaattattgatcaatataaggagaagatgaacctagctgctagtcataggcagaggctggagg

SEQ ID NO: 151348 - DNA, 376 bp, Glycine max
  unsure (1)..(376): unsure at all n locations
agcttaatacccaaaatcacatcnatacttcctangnctntcatatcaaaatttctagacaagaaaaacttcacatcatttatgaaattcatttactaccaaatatcaatatgttatcctgatacaaacacaaaatgatacgttcattattattaaattgtttcacatacacacatttatcactatcattaatttgaaaatcatacgaaagaataacttgatcaaacttgtgtgtcattgctttggggcttgtttcaaaccatataaagatttaacaatttatttttttaaggaaaaagattttcaaagaaagtgacatctctagattacataatagtaacattataatttttagtcacttctgaattaacaacta

SEQ ID NO: 151349 - DNA, 333 bp, Glycine max
ggaaggagcccatagcctctattttactgtgaacacgcgagactaatacatcatggccaaaaaattattccacacattccaacgatgagaacgcggggaattcggtttttaaggtgagatccaaaatttacaataatccaacggcggacaaaaccgggatcgcagatttactcggacatattttgggggtctgcgagaaaaaagaaaactaagcgcgagagacatttcttccaccacagacatgatctaaaaaaaccccacggcgacgatatgaaaaagtaagtgccgaatcatggcttaaaagttcacgatgattcaacgggtaacacgcat

SEQ ID NO: 151350 - DNA, 377 bp, Glycine max
agcttttatgtgaaaggatgtttttcttttcttttgaatttcaacgttcaaaggcactggtaatcgattaccaaaacattgtaattgattacagctttttgaaatcaattggaacattgtaaattctatttgaaaactttttcaaatccattttgctactggtaatcaattacaacaatctagtaatcgattaccagagagtaaaaactctttggtaaacatgttttgagaaaaatcatgtgctactcaatttttgagaaaaacttttcatacttatcttgattcttgaatcttgagtcttgaacttggaacttgaatcatgaaacttgattcttgactcttaactttcctcttgagtcttgaattgttcttgattc

SEQ ID NO: 151351 - DNA, 396 bp, Glycine max
ctcaacaagttccttcacaaatgatcatcacatagtttaaaactaacaaaaccacccatcatatctcccaaaaccccatacccacgaaatttaagagagaaagaagtccacccaaacctgaattttcgaagtcccactcgtagccacgcacttcacgactccgaaaatgctctcctttcgcgatttggagcagaaatgagcaccaaaggttgaagctttgttgggcaacaatggtggatgggagaaaagaagaagaaggctgcgtgagagagagagagagatgtctgaaattttgtggggctgagtgaagagagagagagttgctttttggttttaaaagaaagggttttctcttttttttttatttatttattcaagctctgccacatgtcccta

SEQ ID NO: 151352 - DNA, 375 bp, Glycine max
agcttagaaatatttacagtttcattatttatgtaatgctgtaaatgtcatttgtctatgaatatcttattttatataagtcagattttaaaaaataatcttctcccagcaaaaataatctttaggttactagcttttgtaattttgttgaggatttatcttattaggggtttcatatactattttcttaaatttttaggaattttacgattttatctgatgagagattttagtttgtttatgataacagcagtaatggttgtgatgggaggaactatgatggtagtgatgatggggatgatggcaatgatgagattctccacttagggaatagaagttcatgtagtattcttagggttttgcttttcatagatg

SEQ ID NO: 151353 - DNA, 393 bp, Glycine max
tgaagggacacccacattttctagtctcagtatctcttctgataaattctattttactacacttatactcgtcactccgttcacagccaattaacacaaacgtaatccttcctctactacctgtgtttgagttcgaccttaaaatcatcgccacaaatccattttcatgagccacggatcgagcccaccgcaaaacatcctctcggcactcaaacacctacaaaatccacataatttaagttttctactagtattcattttattaaatatgtgacaaacattaacattataacctgagaagacttgaacgcatccgaacaatcaacatgtggttcattcgcaccacatgattctgcattttcataatccatatccgctcgtttagacattatt

SEQ ID NO: 151354 - DNA, 379 bp, Glycine max
agcttgcttgaaaagatttctaattaagctagagcttagctacacacacctctctaatagctaagctcacctccttgagatgagaagctagaacttagctacacaccccctataatagccaagctcacccccatgacaaaatatatgaaaatacaaaaaaaagtccctactacaaagactactcaaaatgcctcgaaatacaaggctaaaaccctatactactagaatggccaaaatacaaggcctaaacgaaggaaaaaacctattctaatatttaccaagataagcgggctcatacttagcccatgggctcaaaatctaccctaaggctcatgagaaccatagggccttcccttggatctctggccaaatctacttg

SEQ ID NO: 151355 - DNA, 415 bp, Glycine max
tatcagggacctatgaaactcaagctggtaaaaaaaggaaggatccaaccttgattaaagaactgcaagactgtattatacatgtcattacccgcaatatcccattaagcttggtaaaaaaaaaaacctccaaatccatcaggccacatcatcgttcatgctaaaaagcacttatttcatttcctccatagagggttgtgttagatattcattagaaaattaataatagcaagtttctaagcttataattatgagtcttataattatgcaattttctaagttgaaagttgtaagttactaagtcaaggttgtgagttatgaagtcttgtagttttccatttgtatttagtatcttggaataaggtattaagcatttatgtgattagtcaaatggtcactctattctagtataaat

SEQ ID NO: 151356 - DNA, 371 bp, Glycine max
agcttgatgtgagaaagcgttgtttagtcagtcttcctacttttgtttgttgaccacagagtggtacctggagatatgtcgcgggggtcaggagaccttgaggacatcaggtggggtgctattgcccaaaaccaagcttgaccaatcccgacccaacccgggcatagtcagtcagtgagaacctgtgatgtagctaaacaggcgagctcctggcagtcaaccaataaaagaacaaagaccacaaagcaagaaggcttgtgtggtggctggccagctatggatcttgagtggtatctggaaattggcttctggtaatcgattaccaagggtgtgtaatcgattacagggcttaaaaatggagacaggaagtt

SEQ ID NO: 151357 - DNA, 388 bp, Glycine max
tgccacccagctcgcccaggcgagcagggttgcttcctccagaagcaacaaccttctggaggaatcttctagagggcccaagtgggcctggttgctatttgtacccccatttttactaaatacaccccctacctttttttggtgattcttttttcgtaaagttacggaaacttacgaatttcgtaacgatacttgttttctttccgtaatgttacggaaccttgcggatcacataatcatcccctttttgacttacggaatgttacggaaccatgtcagtctctgcatgctatcaagcgttctgtcttacagatagcaaaagaatgtttatacggataaccactcgggtatttccgcccgtcagcgtgactcaaaagtcagtatgaca

SEQ ID NO: 151358 - DNA, 365 bp, Glycine max
agctttttgtctagcattttatattttctcgagatagaaagggggggcaatcgttggatttttgaatctcttatgcccatttgcgtattcccttacagagacatgcaaaaattatcgagtattaaatgccaacaattacaattccttaattaatttagaaatacaatgaaatgtgacaaacctgccaatttggggtttggcggctttttgcaaatttcgcccaagtagttggatgaataccatacttcactgtaggctcactaattggttgaccctcattgtcagaaaacacaaatttcaaattcagattagacttaaattgcctccatctagttgcgactgtcgacatgacctttttttttgca

SEQ ID NO: 151359 - DNA, 393 bp, Glycine max
tgccctaaataacactccttgtaccaccaagtttctaacttagtcacttaagtcccgctgactgagtacaaagtgacttgcagcaatttggtgagtaattaaacactcatccgcatgtcaaattttaaaataatatacatatctaatatgaatttcatgttaatttcaggatgtgccaagtactatgtactcatttgtgacagatgtaagattcacccatttgaacttgaaagggactatgaagtgtatgatagtttataatcatcataagaagattgcaaaaattagaaatggatgaaggaatttttcacaatcacagaattcaacttctaactttgttttattttggatttgtttgtaattaaagtacatcactactctactattatcatt

SEQ ID NO: 151360 - DNA, 375 bp, Glycine max
agctttgaaacatcttaccggagatgttgtttagctctcccctggtatgtttgatgagtttctgggggagctccaacgatggcagtggcaccgggttctgaccaagctctcggagaagcggatcgacgttgctcttgtcaagaagttctactccaacctatatgacctcgaggacagggccccgaagtactgtagggtgcgaggacatgtcatccaattcaacgccgagaccattaatgacttcctcgacacccctgtcatcctggctgatggagaagactatctggcgtactcccagtacctacatacgtacctagaccattcgaccatcattgtattcttgagcacaccagggggaggatttgttctaaatgt

SEQ ID NO: 151361 - DNA, 357 bp, Glycine max
tctaaactgtatacacgcatgaagctgtcatacctgttgtttactacgggacccagatatcttaagaaggggggctgaatggccacattgcgccctattgcccaaattacccccctattttactttttctgccccttacaaattcccgtgaaaatgaactcttaaataatgattcacatacaacaatctaaccataacttgttaactttccttaatgtaacagggcaacggaagagaaaatgcaaactcggatttatactggttcggccacacccttgtgcctacgttcagtccccaagcaacttgcttgagagttccactatcttgtaaaatcctcttacaagttctgaacacaca

SEQ ID NO: 151362 - DNA, 371 bp, Glycine max
agcttattaataatagagatatcaatatttattacagatgcaacaatagctaaaacaaagggacattaaagatagaacccaaagacatgaaaacaaaacccaaaaaaaagtgacattgaagacaattaataattccaacaaggaaagaaacaatcaattaagtaaaaaatctaagaagaacccattaccgaatgaattttgtcatgattcttaataattaatgattaaaacaagaaaaaagtaaaaacccattcaagaaattgataagatagaaagaaaatataaccattggatgtatcttttaaatgaagggttgagataattttttcttttttctttctttcccaatttaaccctgcctatttctctct

SEQ ID NO: 151363 - DNA, 394 bp, Glycine max
  unsure (1)..(394): unsure at all n locations
ngaccaatcccgacccaacccgggcatagtcggtcattgagaacctgtgatgtacctaagcaggcgagctcctggcagtcaacagataaaaggaacaaagaccacaaagcaaggaggcttgtggtggctggccagctgtgaactttgattgatatgtgggttatggcctctggtaatcgattaccaagggtgggtaatcgattacaaggcttaaaaatgaagacaggaggctaagatggtctctggtaatcgattaccaaggggtgtaatcgattaccaggcttgaaaacgaagtcaggaaactaaaggagcctctggtaatcgattaccagcctgtgtaatcgattacatagagggatgggtcactggtaatcgattaccaggtatgtgtaat

SEQ ID NO: 151364 - DNA, 376 bp, Glycine max
agcttagaccattacataccatcctttattgattcaattaattcaaaaataatttgtttcacgggttgccaaatgaagacccatatgtgcacctagccacatatattgaaatattcaacacaattcgattggctggtgtgcctgaagatgcaattcgatcgagcttgttttcattctcattgtctggagaggctaagaggtggcttcactcgttcaaaggcaacagtcttaagacctaggatgaagttgttgagaaatttttgaagaaatatttccctgagtgagaccttagaaagattccatggtctattgagaaagacactcactcatggattctcagaaccgattcaggtcaacatttttatagatgggttaa

SEQ ID NO: 151365 - DNA, 394 bp, Glycine max
ggctcgcactaagtgcaaagacccttgattgattggctgattggttcagctaagcgcacatcgctgcgctaagcccaacatcttcactgtaagttgcaccttaagcagtggacttagcgtggatggtgcgctaagcgccacttcctctatgtgaaaatttattatagttgcgctaagcgtgccatcttgcgctaagccccagattcattctgtaagttgagctttcaagctgagcttagcgggaaaggatgcgctaagcgccaacatcattatgttttgaagtcattggaagtgcacttagcataggtagtggcgctaagcctgaatcactcactgtaagttgaagcttgatgtacgctaagcctcgcatctcaggctaagcgcatattgcaaa

SEQ ID NO: 151366 - DNA, 381 bp, Glycine max
agctttcgtaggtggaatcaggtgttttcttttcccttagagtcctctcacggggtggaggttgtttcatgttctcagaatgtccaaaatcagaatgtttaaaacaataatgctcaaaatcactaataatagaatgctcatgatgctcaaaaggtattaaatgatgtctaactaatctatgaaatgtcatatctatctcaagatcaaagggttgtaagtcagatgaattgcctctagtcatacactatattcagcatgcacaactagttgccttcttatgcaagtaacagtctaggtttgaactacaactaccctcaaatgatatccaaatgacttgaaattttgtgagcaaccttataaaatgatgagaaatagcacaaa

SEQ ID NO: 151367 - DNA, 397 bp, Glycine max
tgatggttcaatgactcaagaacactaggagaagcttggaagaagaagcaaaatgaatctttctctcaatgttgagctagtgaaaaatgaaggaatgaagggttccaatttttttcctcaaggaataagaagatatggtgagagcttcaagatgacaagctcaaatgacacttgaatgattccttggctggccatttcaacgtgccactccatgcctcaaacaagtggttttgcttattgcaaaattaccaaaaatggaagggataggatttgccaaaaatgagtattttcactttttaccaaaattagtaaattttatcttgatcgcctaggttattatgctaatctccctaggaatacatgtacccagagtgaacctcatacggagaacactctc

SEQ ID NO: 151368 - DNA, 364 bp, Glycine max
agagtgcatccgcacgcatgctagcttgtgtcacaatttattgtgtttattttaagcgccgttcgcttagcaaatcacccaatgtgccaccagaggaaaaaacacatctatgtgaaacttcacttcatcagagatgtgaatgaatctgagaaggtgaaggtggagaatgttctaacacaagaaaactcggctgatatgttcacaaagtccctctctattgtcaagttcaagcactgcttggacttgataaattttgaagatgcctaaagcagatcagtaaaagtgcagccctgaatcgcagataaacacttgttgatttggagtcaaagtggaaattcgtggtgtgtgactcaaaatcacaaat

SEQ ID NO: 151369 - DNA, 378 bp, Glycine max
agcttcttatccaaggttcatcttgtttgtgaagctccttcttccatggcttattccctagtggatggcgcctcctctcacctcttctcctttgtcttccgctgcatctccatggtggaaaaatcaccattaaaggacctcattgaagctcaaagatccagcctccatagaagccccacaagcaagcttccatcaggtcccttagtggcaaacgtagtgtatggttcaaagtcaacctaagcatgatctagagggtcttcacggttttcccccataggctaaggttgttggccctcaaagggaacaggaacagcgcggttagcgttctcgttgggcatgggcaccacattgggcggtgtgtagttggggggtaagcta

SEQ ID NO: 151370 - DNA, 392 bp, Glycine max
  unsure (1)..(392): unsure at all n locations
tctatggagactggatctttgagcttcaattttgttcttcaatggtgattttcagccatggagttgcagaggaagataaaggagaaaaggtgagaggaggcgtgatccactagagaataagccatggaaggagaagtttcaccaccaacagagtgcctaggataagaagcttagagagaaagattcaatggaggaagaaaatgcgagagagagagagagagagagagagagaaagagagagatgagggagcatacgaattgaaggagatgaggaagagaagttgaactttgaagtgtgtctcacaagtttcacattcatcaaagttataacaagtgttacacatgtttctatatatagcctaacacatgggaagcttncttgggaagctaga

SEQ ID NO: 151371 - DNA, 379 bp, Glycine max
agcttccataacagaagtttcaacatgattaatagtagaatccagcccttcagtccttaaattagatcacagcagaaattaaagattcaactaaagagcagttatcttatgttaggtacttaggttcatcttcaaagcttataaattatattcatctaagatgaaaattacagggaaaactaaaagaaagaaaaaactcaagcaagaagttagacatcagggaagattgattacccagcagtactagaccgtcccaaagaataacttccataagccccataagcactgttgcttccaagctacagatgtatgaagcaatatatcaaacatagaacaggaggaaacaatttgacaacttgaaaaactccagcacatgtaa

SEQ ID NO: 151372 - DNA, 393 bp, Glycine max
tagacaaccatttgttcaagagtatgtcctaaattcaacttattgtttcatagaaatttttattctaatatattagtaaatgcattatttagttaattttttaatactgattgtatggtttgaagatttttatttgtttttattttcatcttttaattattttaaatttctcaaatgtcactttattgtttaattagaaataaacacacccttatatttttaattaagaaaaagaaataaaatataaattatgtgcatgattgcaaaaagaaaagtgacggaagattttggaacaatctaagatcagaaaatcaacattttcttaaaatcaaatgtaaaattatttctaagcctttaactctaaatatggaagatgcatgctttcttattcta

SEQ ID NO: 151373 - DNA, 380 bp, Glycine max
agcttataagaacaaaattgtttttattatttccaaatatgcatgtgaattaggaagcatcaacaagaatcaagccaaggctattgtgcaagcaatcaatggggcaaaacacaccaaatgattatgatgatggatggctcaaattctcacaaaggtaaacttatcacttccaaattgagctttcaaaactatcatgacatgtagaggaaaaacaaggacttcaaatcacaaaatgtcaagagaattttattttcaaaacaattacccatttcttgaacatatcctataattcaaagaaaaacatgcaaagttgtacatgcaaacagaattgacctaaaatattaaactagaaacccaacaaaactaacaaaattaacaaa

SEQ ID NO: 151374 - DNA, 396 bp, Glycine max
tatgatctctcggaagtagtggagacagttgttcttccagctttagaagagaatcccattgttgctcagatcagttttcgtagtgagctagttgctaaaagagcaaatggtcataccatcttacactcagttatgaatgatgatgtttttataagaatctcaaatctggatacaacaaaggagatttaggagaagcttcaagatgagttctttggaaatgagaagaccaagaaaatgcaatttatcaaccttaagaggtttgtcttacctaaaaggtttgaatccaagatttcttcacttgaagagtcaaaagatctttccacgttaagcttgatagagcttgtaaatgcttttcaagctcaagaggagacaacaaaatatgctctataattcaaa

SEQ ID NO: 151375 - DNA, 382 bp, Glycine max
agcttcatgatgaatcaagagtgtttcatagatgttttgatgataacaaagatgataacaaaagatgatgacaaaggtgatgacaaaaagctcaaagatcaatcaaaggacaactcaagtgaatcaagaaaaattcaagagttcaagatagaatcaagaaaaattcaagactcaagaggaaagttaaggttctagatctcaagaatcaagatcaagattcaagactcaagattcaagaatcaagagaaggcttaatcaagataagtatgaaaagtttttctcaaaaattgagtagcacatgatttttctcaaaaacatgtttaccaaagagtttttactatctggtaatcgattaccaaattgttgtaatcgattaccaata

SEQ ID NO: 151376 - DNA, 394 bp, Glycine max
tacataataataagtaaaataaaatttagagacctaagacaatagccttaattgtctcgcactatccatgaccttgatcttgcactatccacgttaacataaaaatatataataactattcaatccaaggctgctgctaggtggattgttgttaaggtacatgatttaaataaaagttctacttatatatattttatttcattatgtatttagtgtaatagacaaaaaggaatcactgaatgtggctactacgtgatgcactggatgtccacgataatcttaggatctttcaggaataattgagaaacggtaattgtttatttcaaacaaatttggtttttttataattgttattacattattaatttatttttttatttgatcatgcagtatt

SEQ ID NO: 151377 - DNA, 373 bp, Glycine max
  unsure (1)..(373): unsure at all n locations
agcttgcatagggtatatttttttctgtccctgccccntaaaatattaataaaaaaaatgttattattttaccttaagatgcatgaagtgcatatataaaaatcaattttgaaacagcagcacactgttgtaattaaactttgatagttacatcttgacaaagtggacgactagatttttttttcatttcaagcgtgatgaagatgaggatatgcatgtatctgctgattgctcacactgcattattaaaagcgcccgacactggttagattctgagataaataggttcttaatttaagcggtcgcgatttcgtggctgtgtatgtaatggattattttttataaaagtggttataatgcattattcagagct

SEQ ID NO: 151378 - DNA, 393 bp, Glycine max
tgtagcatataactaccatcatactagggcctagttttgatgcctgacacccagaacagttgtaaatttgttttcactgatttcacagcctagcagtgttgttaatttagcaatcaaattgttggtaatggaaacaataaatatgaaaactatatttacttccatctagaatacctcatcaaggatcctctatcagcttctccccatagcacaaacaaatataagaaaaaaaccactcacactctgaatacagaaaagaacggcagttttatatcaccttttaccaaggtgttcccaggatgaggcattcataacaaaaccaaagtaatgtttacatgtctgagagcatgaaaaaacgtgaatcactacaaacccatattatttttcatctac

SEQ ID NO: 151379 - DNA, 369 bp, Glycine max
agcttggttcgaggtactttccctttgaagatcgaagaacgatgaagaacgaatgaagaacgttgaagaacggtcgaaaccttcgcgaaattcctcacggaaaacgttacggaaacgtttcggaagcgcctcggcttagattttcttcacggaaacaatttttccaagcaaattcgaaagagaaagaagtgcctaaggggctgaacccttttccttctcacttcctcccctatttatagcaaaataggggagatgcttgccgcccagctcgcccaggcgagctcagctcgcccaggcgagcagggttgcttcctccagaagcaacagccttctggaggaatcttctggagggcccaagtgggtctggtt

SEQ ID NO: 151380 - DNA, 391 bp, Glycine max
taacgagtttatgaatgacctcaacaacaaacatatggtgatattcatagaacaccctcagaaaaatgagcaagctgaagcaaccaataaagtaatcctaggagaattgaaaaatggttggttagggcaaaaggaagatgggtcgaggagttcattgtggtcctatgggcatatttttgcaccctttattccaccacccaagaaacgccttttcggctaacttatgggacaaatgctatggtcccaatggagttaggggaaatctcactccgaaggcataattttatagaagctgaaaataatgaagctttgtaggtaaacttggacctcatcgaacaagtgcgggaggacacaatcatcatgatcgaatcttgtaaacaacatatggcct

SEQ ID NO: 151381 - DNA, 354 bp, Glycine max
atggatcacgagtgatttttatatgtttacatgataaccaagctgattacaaaagatgatgaccgacgtgaagacaacaacgctctgtgatcgatcaaacgacggctcaggcgaatccataaaaattcatgagttcccgatttaatcaacaaaaatgcaagactcgccaggaaagacattgttctagatcacaacaatcaagagcgcgattcgagactcgggactcaagaatccataaaaagcttagtcaagataagtacgagcagcttatctctaagattgagtgccacatgaattttctcaacaacgtgtttaccatagagctcctactatctggtaatcgattaccagatt

SEQ ID NO: 151382 - DNA, 392 bp, Glycine max
actgcaaatacctgaactaagaacaatatctacatatctttgcacgaaacattcaaatagaaattcgcatccgaaaaaaggctgaaatctaaataacacttcactgcatttgtacatgaaactctatagcagaatgttgctctatatattccatatgctcgtcttttaactttaagtaacccttgtcaaaacctggtgaaaataaaatgtgcaacagtacctgtagctgcaacatatcactgccaacatacagaagggatgtctcaaaattggaagcatgtaaactaaaagcaacccccaacttattagcagtcggatcttcatggatgacagcttctgaaaaacatcattcatctctcctaaattaacccaacaccaaaccaaactttaaa

SEQ ID NO: 151383 - DNA, 308 bp, Glycine max
  unsure (1)..(308): unsure at all n locations
tataaatctgaaggtggcatccctggatgggctgcccttgttggattgatatcttcaattgatctaaatggtacatcaacaaagctttccttatttttccatagaagatatggatgcttgaaaatntcatgactgtcagcacatatggaggaagatctttggttaaactctttagcatctgataagacttgtgcatgagagaaaagcctctgtatttctaaagaaagattgaagcccttttgtatttgatcccagtagaatgtatttggagattactggccgccatatacacatccattcctatgaag

SEQ ID NO: 151384 - DNA, 241 bp, Glycine max
  unsure (1)..(241): unsure at all n locations
tgaagcaagacatatcgcagatgtattatcacangatagcatcacagagggcgcattggcttcaaagtacagtaagtactagcttaacctaacaatttcactagtaacagaagacaaggcatgatattaagcttcagtggatgagtnttgaacagtgagatgcttcttagaacgccaagaaagaaggtggttcccacantgacacacaagccagaagtggatcttgtggtatcaacacagc

SEQ ID NO: 151385 - DNA, 475 bp, Glycine max
  unsure (1)..(475): unsure at all n locations
tcctctcagtcacctgcggcatgcaagcttgtaagatttctaagatcattttccttgacaactctttgaattatattgccatcaatatgaagagatgacaatttagagatattcatgagatgacaatttagagagtgatcaaagactttcaaatcgatttccactgaatttatcaatagacagatcaagatatcttaatgttgaaagttttccaaatcatctagaaatggcaccaccaattgagttgttgtaaaaatctagcatgtcaatatttttaaaaactccaatttaatccgtcaaattgggttattttatcatctaaggataaagtttttctgattttttttttctcatgtgggtacttttcaaatcatgccccaaaagtgaataagtcttattataacatttaagttataagtcataaacatctattatgatntattattttttttaacttaaatcataaaattattta

SEQ ID NO: 151386 - DNA, 171 bp, Glycine max
ctttgacccacctatatttgtcacgatgcacactccctcactataatgaaccatccttggtcaacttttcatctctgcaaactctcattctttaccatactagatattcccctgccatttcttttgtccccaagtggatattcaaattgaagaaacttgtttctcttcaat

SEQ ID NO: 151387 - DNA, 445 bp, Glycine max
  unsure (1)..(445): unsure at all n locations
agcttaatgttcttctgattagtcatatacatctatattttctgagttaaagtctcttccaactttgacattctatcangccgagcttgttgttgttgtgatggacccttgtttgatggacttaaagaagaattgttagaaggacctgcaaaaggagtgttagtgggaccggaataagcattgttatttttttgcctctagccataaggctgatttgtaccttggccacctctataaccttggtgattcccttggaaactttgttgtgggcttccttgattctgcatataatgtacttcttcttcttgttgatagtcactagatgctgaacagtgaccattttgatgatcacctccatagaaatcacaactcaacacttgttgaacttgatgaacttatgatttgtgagaacttcctcggtgaattgttgaggaagttgatcaat

SEQ ID NO: 151388 - DNA, 246 bp, Glycine max
  unsure (1)..(246): unsure at all n locations
gctaccggaccctcgagtcacgatagcgaaattgagactttntcatggnctcggccagaagacgttgacatctccagaaatggtgcagatgaccatattggtctctgtgtgtcaacaggctcatttgcctctaacttatgaaaggtgtggataacgataaagtgtgtccgcgtgctaccggaccctngggtcacgatagtgaaaatgagaccttttcgcgatctcagccggaagactgtgacatct

SEQ ID NO: 151389 - DNA, 348 bp, Glycine max
  unsure (1)..(348): unsure at all n locations
agagattgatcattntatggtgtggctgccaataattaaccattcaaaagtttttaaaataaactaattatgcatgttcaatcaaaattttgttgtctttcataaaaaaaaatgttaatgggcaaacataacggtatacacaaggggacaaccatttaagcttgatgtcaagcaaaacatcatggcttcaaccccacgatgggtcatgggtgcaacccgctgtctcaagtctctacaaacatttgcacagaagtngttcaattcattgcatttataattgggataattgtatctttttttttaatggatctatttcgaatttaaagcctattatatttggggttcatt

SEQ ID NO: 151390 - DNA, 217 bp, Glycine max
tatagtttattttttttctaattattaaaacacttatcagatattattcttaacaagattaacttcctatacatataagatttactccgtgcatgagaattacgaccactgaaatttatttatttttaagtaatataatgatggttaaccctcaaggcattttttctaacttttagtctgctttttttttttttccccccccttttacccaccattt

SEQ ID NO: 151391 - DNA, 420 bp, Glycine max
cgataactaaagagacaacaaaatatattatgcatgccttttggaaagcttcttataccaaagtaggtcttgctttatagctctctcctttttcccttaagtgacaacaaaatataatggatcattcatgacttggatgtgaaaagttattaatttggctataaacatcatcatttgacacgtgtggatattggtgcacaatgcttatgtttgacgaacgttactactacttttataacaaaacctaccacaattaatttacaattataaatatacaaatgtgtacatgagtctattctcttctgacttgttgacacatgatttgtctatacatacccaacttgcgcagcagcgatactatgacacattctctgcatgtgacattacactaccctacatacagttatctactctcatata

SEQ ID NO: 151392 - DNA, 449 bp, Glycine max
  unsure (1)..(449): unsure at all n locations
agcttaaacaaagtgggctttttcaaaataagatctttcttctttangngactcaacacaaaaacacgtaaaatgatgcatttcactaaacctgtgtccaaggtcacaatccatatgttggatgcatgtgtgtagtgcacatataagctcattggatgataggtcctttgtatgcttaatgatgtattgaatcttaacacatggatttgaaacttcattcctcaagaatcatgccaagcctttctcttaatgagattaggctatctttagtaaggggttttgtaaataaattgacaagtagatcttttgtggatacaaattgtaattccacaatacccttctgaacttgatcccatatgaaatgatattntatttctatgtgtttagcatgtgaatgcacgatgtgattnttagaaagatctatggaagtattagtattgtagaggata

SEQ ID NO: 151393 - DNA, 256 bp, Glycine max
gacttatatgctctagctagaggggagtgttgatattacatacattgtatgggtacttcttccacatattgcatgggtacttgttccaataaagaatagttattaatgtacctagttagtcacatattcatgtatctaagaattcacatgcatgtacataggtactagaacttcattaatattcttataaatttcacattgtatttactccctaagtctatataaatatagatcagctgggtggggtaagcactca

SEQ ID NO: 151394 - DNA, 451 bp, Glycine max
  unsure (1)..(451): unsure at all n locations
agctntgtagcatangaactaaagtttgtgaacttttctcatcttgtcctacagntactgacggaggagctggagtggatgatgaagggatgtcttctgttctagctctttttcttgattccatctataactaaaaagaaatgaaggttccttagaccaaaaatcgttcaagttgaacaacaacaataaaggctaaaattaacaataggcgcttagcgggatatatttcgctaagtgcgccctgagcaacataacatgtcggcttagctgaagctaagctcgcttagcttaaaggttgccatgatgaaatgcgcttagctcaggtaaactcggcttagcgcaaggcttacgatacgaaatttggttaagttacctgggcttagcgattcaacctttcttagccataggtagttcagcaaaaggatgaatgttcatcctcaaaggatgaact

SEQ ID NO: 151395 - DNA, 319 bp, Glycine max
agaaactaagctctctgctgacgttttacttcccttttcacgctataattcactctccacttgagatggccccgaggaaacttgcctcatagagatccaggaaggataaagcggttgaaggagccagttcctctcccgagtatgacagtcaccgctttaagagcgctgaacaccagcagcgcttcgaggccatcaagggatggtcatttctccgggagcgacgcgtccaactcatggacgacgagtgtaccgattttcaggacgagatagttcgtcggccgtgcgcatcaatggtttcttgcgtcgatacttataccaa

SEQ ID NO: 151396 - DNA, 427 bp, Glycine max
agcttcaatgttaatgtcacatcagttttatgttttataccgtatcaaattatggagatcatggtatggtattgtaagtgacatccttggccagagtgaatttgattgggatggcactaagcacatgatcacagttgagaatgaaaatgcttggaatgaatattgcactgtaagtattctttaatatgtagctattttttattcaaagtagattggatttgaatttttctttgttttctagtcgcataaatcggctaaaccgtttcgattcaaggtgcttcaaaattgggatgatatagtggatttgtgtgctaaagatagagccaccggtcatggagctgaaactgctatggatgctgatgaagcgatgagtagagaaacaaatgaagtggaattcatggggttaggtgctactgccatagattta

SEQ ID NO: 151397 - DNA, 457 bp, Glycine max
  unsure (1)..(457): unsure at all n locations
tcatctgaaggttgntganataaccgttaattctgcttataagcagagttcattgtatgttaaggtcgaggccttccagcatattgatgttgaagtagtgctcgacgtgaatagtaggttctccatcacggtgaatggaggttgtgtcagtggtgataatggtggttgcagaagcaatgttttccctggagtttgacatggttntggagagaggagagactatgtgtttagaaaggttttcttgagagagtaaatatcgtgaagatgaatcatttccttgatttcttagaagttataaagggaatatgggtgattttccctaggcttctgaaaagtatctaatgtggcctgttaatgaatggtcgctcaaccatcacaatgtcatatactaataagatataggggtttcaaaatattccttggtcacttgtagtcgntcagtcatgcatgtatgtat

SEQ ID NO: 151398 - DNA, 436 bp, Glycine max
gcttatgataggaaactgggatacccggcctcttcttctaatggaattcctgttaattataaggttttctgtgaatttatattgagattctcatgagtcatgatactagtaccttattttcctttgctatgtcattgtgatgcattcagcattaagggtctgtttggttgtttggaaatataggggagggagtggaaatgggggtgatggataaaattgggtttgtttggtttgatatgaatagaaatgagagaattaaaaagtaagtgggttttactactcagttccactctagttctactcacctacttatcagttccttatttcttctctacttctcttcaatcaaacacctttaatttctactttatttgctccctatttctatttgccccatcagtgttcttgaacttattaattcattctatgggtgaca

SEQ ID NO: 151399 - DNA, 468 bp, Glycine max
  unsure (1)..(468): unsure at all n locations
taggagaagactggtcttacttntctcaaatgcccacccgttgcntttcaaaatctcagagatgattacaacagttggaatagctgagattcaatttataaagaagaaaagttagaaaaacaaaaggcaagtgtgtgtgtaatgttatataaccctcagtgagacatcagtcactacgatatgataaaatcacataanaagaatgcacaatgcannacagtttgacatttaaggtgtattanggtataattagtttcaatgcatgtgtgtaacccttcactgagacattcagtagtacacatatatgaattgagacactcaattacatataaagaattgccaatgcatacagttatgacatgttgggtacgattaatttctatatagtggagaatagagaacagattgaaataaatttcgggcaattaaatcgacttattttatattttacatgctaaccagacaccc

SEQ ID NO: 151400 - DNA, 434 bp, Glycine max
  unsure (1)..(434): unsure at all n locations
agcttgtgcctctttacgtcttgttcatgaatgtatcatatagaaccaaacacccctaggtgctttgctgatggcttctttccattccaagcttcaattggagtcttgtcttctacatacttagttggacatctgttgagtatgtaaacagcagtgtagactgcttcaccccacaatgtgttaggtagtcccttctccttgagcatcgatctatccatttccataactgtgcaattctttctctcagaaactccattttgttgaggagaatatgagactataagttgtcgctcaatgccttcatcctcacaaaatctttcaaactcacgagaggtgtactctntgccgcgatcacttcttagtactcttatccattttccactttgattttcacaagggcctcgaactttgtgaatactccaaagacttttgat

SEQ ID NO: 151401 - DNA, 163 bp, Glycine max
ttctctagaattgaatattacctcttcaccatcagaatcgacagtgtcatcaggctgattatcctagtcatctaaacttgcgtctagtactgattcagctttactagtggacgcattcaggtcctctcaagtgctcgagaggatcttttctttggacttaaat

SEQ ID NO: 151402 - DNA, 344 bp, Glycine max
tcattgactcctctattgacaatagcatcatttctagcattgaattgttgggagttggaagccatcttctcaatcaaattcctagcctcaagaagggtcatatcaccaagagctccaccattggcagcatcaatcatactcctctcatgtgctagtccctcgtagaaatattaaagaaggagttgctcagaaatctggtggtgaggacagcttgcacacaatttcttgaatctttaccagtactcatacaagctttctctactaagttgcctgatgcctgaaatgtcttttctgatggcagtggtcctagatgcagggaagaatttctccaagaacaccctctt

SEQ ID NO: 151403 - DNA, 460 bp, Glycine max
  unsure (1)..(460): unsure at all n locations
acaacatacattgtatgaaaatataattcctaacactaatttaactatcaactatcctagcatcatgcaatcagaacaaaaatcaaagctttaaagtaataaactaagttgactaacctaaggcttaaaaaaaaaaaataaaaaataaaaacaaggttaaaggaagcttacttggtgttgaccctcttccacatttcctttttccaaaatttgtaattactctttttatgcggaagcggtttaccggaaagtgcctcggatcgccaagtaaataattaaaacggaatgatccgagtgtcaaacacagggaacttattccttnggcaaagctttgttcaacaatcatgcattntgttgacagaaaataataattgtgaattgaagaaaagtatgattatcctaattgaaagcagaaacgtgacaaatagtgtgaaacagtgatctaaacattgggcttcta

SEQ ID NO: 151404 - DNA, 296 bp, Glycine max
gcctctcgacatattatgcacctgaatcggacatccgtgtgaaaagtcatgatcatttgaatttctcgagagttttcgatgtttaatttcgagcgtatcgatatattataagcctgaatcggacatccgtgtgaaaagttatgaccatttgaatttctcaagagcttccgttgttcaatttcgagcctctcgacatattatgcgcccgaatcggacatccgtgtgaaaagttatgagcatttgaatttctcgagaggtttcgatgtttaatttcgagcgtattgatatattgtaac

SEQ ID NO: 151405 - DNA, 403 bp, Glycine max
atgtatcttcatccaccgattgataaatgagaaagagagctttcttgtctctctttcttgactccttcaacgtctcctttacaccttggcttagcgaggcttcatcttgctcctcgaagccattctctacgatatcccacacatcttgagctcctagtagcgccttcatcttgatactccaattatcatagttgttctttgtgagcatcggcatttggaaaggaaaacctccattccccatcttttgaggatcttgaagctctgataccactttgttggaaataaggctttttatgtttaggaaaagtgtttaggaatattggagactttgaatagaaacttgataggaaggagaattctttatggaggagagaactttgtatttttgcttgatacaaatgtg

SEQ ID NO: 151406 - DNA, 153 bp, Glycine max
atcattcaactccattctcatagacataatcttttcaaacttaaggattgaaatcctaacaaagtttgtaatacatgtagaggtgacacttgacaagaaagagattataaagggtgaacatcacaaaatcagccacacaatgatggaaaactg

SEQ ID NO: 151407 - DNA, 318 bp, Glycine max
cacccaattaaatccattgatcgggtgttcttgggtcgtccgcgatcttggatggatatccgcatttgcggagagggggcataaggagtccaacaccttacaccttctagtgggggagttgacgatcacactggatgatgtaacatgtctcctccatcttcctatcacaagggcattacacaagtttgagcctctggccatggacgaggtcgtgttgttgttgataaaacttttaaaggtatctaaataggaggctcgagctgagaccgtacatgctcatggggcttacgtgcgactgtcatggcttcgtgatgtcta

SEQ ID NO: 151408 - DNA, 429 bp, Glycine max
  unsure (1)..(429): unsure at all n locations
agcttgacaaccaatattctgtgtcctaccaagccactgttggctctacacaaatcataagatntgnntattttttgtacactgactaactcttaatcatcttatagatggatgtacaatctcatcacttatcttttcttttgaggtgttcaaggagttatcggagcttttttgaactatttaaaaatttatagaaagctctttatagaaagaatttaaatgagagagcgtaagttcataaccatgtattcaaagattctagtatttataggtcttcttcaacaagtgttcattgggttcatatggatagacttgagctcgtgtctaaagattgtggtcgtaaagaatttaatgctcgctttaatgcatgtacttatcatgccggaaaccactcttggagctttatgttacttcatagaaacacttgca

SEQ ID NO: 151409 - DNA, 463 bp, Glycine max
  unsure (1)..(463): unsure at all n locations
tgggaaatagcaccccacctgacgtcctcaaggtctcctgacccccgttacatatcttcaggtaccactctgtgatcaacaaacaaaagtaggaagactgactcttccacgctttcttacatcaagcttgttggagtatggggcacccgtcatatgtggtactaggtggcgatcgggagatggagcaaatcaactctcccacttccacaaatcaaacataaagacaccatccccagntgcccacctttcaactgagctcacgcactcctacgtagcccttatcctcgttcctctcagcatcgggtccccatcaacccctccaagcttccacaatatccaatcagttcaattccaaatatcatgaactaccctaaaccaagaaaacagagtagaggcaggaaactctgtccaaaacccactcanataccacagctttccttactcatataccccagtaacattc

SEQ ID NO: 151410 - DNA, 306 bp, Glycine max
  unsure (1)..(306): unsure at all n locations
ntcttaagaagacctcttgagaagcttctgtgagaaaacttccttgataagctaaagcttagctacacacacccatctaanaactaacctcacctccttgagaagcttccttgagaagctagagcttagctacacacacccctctaataactaagctcacctccttaggaagagaagctagagcttagctacacacccctataatagctaagctcacccccatgacaaaatacatgaaaantacaaaaaatcctactacaaagactactcaaaatgccctgaaatacaatggctaaaccctatact

SEQ ID NO: 151411 - DNA, 272 bp, Glycine max
tatacattaacaatttctcaataatatttgaaacatttctgaagtgagtgaaagtgagatgtaatctatacgtatcagtctattccacattgtatgacatctatatacttcttgaggacaacccaaaagtgataccatccttgtgaaattgcaggttggcgcaatatcatcaataataaagctacaaccacatccaaacacagggtagcaatttacttcaaaagccaaatggagtaagtaaattcccatgaaaatactgggaatgagaaaaa

SEQ ID NO: 151412 - DNA, 302 bp, Glycine max
  unsure (1)..(302): unsure at all n locations
tgtgagtctgcattattgctcagatgatatgatctatnattangtcatggngcttcaaagtgcanacaanaggttagcaagggttatgatggctatataacgtcttgaggtggagttggaatgcatgttcagacgttngatccacacaagggttttgcttcttaacattcttaccaaataatagaaaaacttggtgggaaccccaatataccaatgacacanacaagtcaactagctcanaaccctntatctcttaattaaattacttagaattgtaaccattattattattctttgattgt

SEQ ID NO: 151413 - DNA, 423 bp, Glycine max
  unsure (1)..(423): unsure at all n locations
agcccaccattttccatagtttaatactggtaatggggctactatcnttgtcatcgnttttttgtcattgaggtgccactttgagctgccaggttctccacctttgggcgtattctttgaaagatttgtgccccctttttgcacatgttctatagttgcatcctatccaaagacattatactgacactgcctaacgaaggcaaccactatgtccttccaagaatggactcgagaaggttccaagttagtgtactaggtaacagcttcccagtaagactttcttggaaggaatgtatcagtaattccttatcttttgcgcatgcccccatcttccgataatacattnttagatggttcttggggcaagtagtccccttgtacttgtcaaagtccaacacctttaacttgggaggggtgatgata

SEQ ID NO: 151414 - DNA, 401 bp, Glycine max
  unsure (1)..(401): unsure at all n locations
tctgccctgaganactggttcccagaagacaacagggagtgatgaagctgaataccctagccttgcaacaagtcctagggaagtagacacggagatggacaagaaaatccgcagtattgtgagtagcattttgaaagacgcctctgttcctgatgctgagaaagatgttccaacatcctccaccccagatgttgctgtccctgaagctgatgaagatgtcccaacatcttccaccccgaatgtttctgtgcctgatgttgagaaagatgttncaacatctttcgctccaaatgctgaagccctcccttcaccctgtgaagaggaatctaccgaagaagaagatcaagccacagagaagactcctgctccaatggcaccagaacctgctccacgtgatctca

SEQ ID NO: 151415 - DNA, 446 bp, Glycine max
gtatgcccgagtcattcattcctatgatatgttgttgaagtattggcaatcagaatttccattccttggattacggggttgaaccaagctcaagcttttacaaaaaggttcatcaagtcaagttgaaatatggaagtaaccgtcctgcaaaattggggcaaaagatgaatcgagtcacatcactgcttcgtctactgccaaacatatttaggattgttgatgtccttgttacttccagtttcaccttgacaaagatgtcatggaccatgttgaaaatctaaattgattcaaccccatatcctgcgtaaaaattcgcaatacttcgactgtacatcattcgcatgcatccatgcttttcattggttgcattgctcattgcattctttccttgaaaaaaaaaataaaataaaataaaatgaacttatcaaaaagaaaaggacacgctt

SEQ ID NO: 151416 - DNA, 219 bp, Glycine max
  unsure (1)..(219): unsure at all n locations
ngaacgctcattatatntagcagcagagatagtttatatgattgttaggtggngacttgngacacattaattgaccaggacaattctctagctctgatgtgaaaatctccttaccccagttcttgcagtagtggcagcgaataccacgtcctccacctcgtcttccacaatgagaggagtgaaagacaagggcagaggaatcctcggtagaagtggaag

SEQ ID NO: 151417 - DNA, 357 bp, Glycine max
  unsure (1)..(357): unsure at all n locations
agctngagatgaggaagtgttgaatggtgaaacttcctgcttttattgntgaccacagagtggtacctggagatatgtcgcgggggtcaggagaccttggggacgtcaggtggggtgctattgcccaaaaccaagcttgaccaatcccgacccaacccgggcataatcggtcagtgagaacctgtgatgtatctaagcaagcgagctcctggcagtcaacagataaaaggaaaacaagaccacaaagcaaggaggcttgtggtggctggccagctgtgaattttgtgtaatatgtgagatatggcctctggtaatcgattaccaagggtgggtaatcgattacaaggcttaaaaatg

SEQ ID NO: 151418 - DNA, 224 bp, Glycine max
cactaagcttttatgatggcatgcacctttgatgaccgctttagggactggcaccctttgtgcacaatacgtgaagttgcttgacatgtccgagatcaaaagaaagcatagttacacaatccgtgagttttcgtaacatgccggaaatcaaaaagaagcattgttacgcaatccgtgaggttcaataacattccgaaagccaaataaggagtaattacttgacc

SEQ ID NO: 151419 - DNA, 466 bp, Glycine max
  unsure (1)..(466): unsure at all n locations
agcttagagatataagttaacccatttatgtgcctttactcgatgccactgttgctgccttctatggcaccggatccaaggaacaggtcatgcctcctttccctttcttactttttctctttctctttttgcttatgcctctgcgcttcaacattctccataattcgcctctttttgcttcaccaactctcttcgcctccactcactattctgcttctccaaacttgtactctttcagtgcccttttgtctcttccaatgcctaanaatagtttaaccatacgaaactaacttgcccagttagagtttgctactcttccagctatacggagctatttttaatttttttcaccatgaaattattttcgccttccataattatactttctcgagacactgtcttggttcactaaggtagtagacttgngaaataaaagtcttggtagtattgtcaatgtagaaaacat

SEQ ID NO: 151420 - DNA, 204 bp, Glycine max
  unsure (1)..(204): unsure at all n locations
ctatgctgnnaaagctttaagattaacctctagctagcatgaccaagcttcctatgccatatctagtgatgttttcttactaagagtaagcatgacatcttttgactggatagatcanccaagttaatcttataaagatntccttgtctcttactagagaatagtgaagagatgtccttgttctagatgatacacatatcctta

SEQ ID NO: 151421 - DNA, 371 bp, Glycine max
  unsure (1)..(371): unsure at all n locations
tcatgataacttttaatgtaattgatcgagatggggacgaaaatgatgtaaagccacaagcttgcattttcaagggtagctgggttgtatttatgatgatatcctgttatcctgtcaacaaaactgcagaacattacgctattgngacttagcaaattgccctcttcgaatatatttttaatctggctcatgtttacccgtgttatatatgtatattctcttcaaatatactttcgttttttccgtttttgtgtgggttgttagatggttagagatagtttcaaatgaaatatgaaccaaataaagagtagtgattgtttggagtatggctagtgttagataaaccatttttttttgcaccgtgtgtttat

SEQ ID NO: 151422 - DNA, 386 bp, Glycine max
cacacagatccaaacacccttaggtgctttgctgatggcttcttaccattccaagcttcaattggagtcttggcttttacatacttaattggacatctgttgagtatgtaaacagcaatgtagactgcttcaacccaaaatgtgttaagtagtcccttctccttgagcattgatctagccatttccataactgtgcaattctttctctcagaaactccactttgttgaggagaatatgagactataagttgtgactcaatgccttcatcctcacaagatctttcaaactcgcgagaggtgtactctttgccgcgatcactccttagtacttctatccattttgcactttgattctcagcaagggccttgaactatttgaatactcc

SEQ ID NO: 151423 - DNA, 410 bp, Glycine max
  unsure (1)..(410): unsure at all n locations
agatgcgagtagaggcanatagaagtngataggttcctttatattaatcttctctagacttgaatattacctcttcaccatgagaatcgacagtgtcatcaggctgataatccttgtcatctaaacatgcgtctagtactgattcagctttactatgaggacgcatccaggtcctctcaagtgctcgtgacgatcatttctatggactaaaataatttcttcttcttatcctgtgactntacaagatcatgacattatgagtcagattgtttttgctcttagccttatacttaatgtataatcatatgtaccttttttgttcacttaattattctttctattattatttgtcgttctacctaatcgcgtttcattatcttgatttgatctatatcatcgtattattttct

SEQ ID NO: 151424 - DNA, 429 bp, Glycine max
cttgggtcattagcttatttatgacctgtattttttttctttattgaatttctaaataaattttattaatttagtatatttaacaaatttcttaataatataaaataatttaaaattgtaataaaatataactttatatttaccaatatgacttaatatgttagataaaaatagacaaaattgtaaatttcatcttcctatttgtcccataattcaattttgatgtccttataatttaattcactaatttattcccttgttttttggaatcccgtccctaacctcaaaattggacgttagttgtccatgttaaccgttacatgtcacgttcttattggacgttgatcgtcacatgttacaattttattggaggttgacgtaaattaggtgtacaaaattaacattcaataaataacgcaacacatgacg

SEQ ID NO: 151425 - DNA, 345 bp, Glycine max
  unsure (1)..(345): unsure at all n locations
tcagctntccaacgcttcagatcaattcaagagagatgtactgggggtactnttgacatgtaatgatatcctatntaaactttcagcanatgtaaatatactttggatctatatatntgaggagtccaattatgtagtcagagagaatatgcttcaaatatctaacttgctgacagaattagagaaacaaagaatgaaatcatactagctnttatcataattttctgttcattatnntaattttcttctggtatttaaaaccttatacgaactaatatatttgcagctgcaattgcttggcatgaggatatgaaaaaatgggttggtgatatgtctcaacatcca

SEQ ID NO: 151426 - DNA, 331 bp, Glycine max
cctgatgagggcgtatcccatttcctggtgagcaaaagttaaacaaagaatccacatcctgattagatgtaaaactgttaaactcacattacaaattggttcagcttacaattacccagatccaaccacttgaactgaagacccatatttaatttggaattcttaatcacagatagtcaggcaactctaaattcatttcaacccaatgttttaaattccggatatcagcacgtagcggttggctctcaaaatgctatagcgagattgcgtatagctggatagccactattttgaatattttatggttatttatgtatactatatcctataa

SEQ ID NO: 151427 - DNA, 391 bp, Glycine max
  unsure (1)..(391): unsure at all n locations
ttcacaaataactatcatgaagcagaaacctagcaaaactgcccatcatatctcccaaaacccaatacccacgaaaatcaagtgagaaataagtctacccaaacctgaaattttgaggtcccacacgtagagatgcgcttcacaactccgaaaatgccttcctttcgcgatttggagcagaaatgatgaccaaaggttggagctttgttggagcttcaatggaggatgagaggggagaagaaagctacgtgagagagagagggagagagcttctgaaatttttggggctgagtgaggagagagagagttgctttttggtttttaaaanaaaattttctcttttcctattatnttatttaagctatgccacatgtctccatttgagtggagc

SEQ ID NO: 151428 - DNA, 254 bp, Glycine max
  unsure (1)..(254): unsure at all n locations
tgacactatgatactcagcttgaacaattactagccttcatttaactgtctntgcgctnggcggccacgctcaacaaagtattttcgacacctactgtacgttgatttgaccaatgctgntatgggaatgtttcgacaatccttcaaaaccttattgatacattctgaaagggtggttgtcatgtggccatatcgacgtccttctctatcataagccatcgtccatttntcctttgaaattcgaacaacccatg

SEQ ID NO: 151429 - DNA, 439 bp, Glycine max
  unsure (1)..(439): unsure at all n locations
acctgcggctgcagcttaattgtaaatgaaaaagaatngaagaagcttatctgaacttatctgattngannannccactactttatttgttactcacttattcaatgcatgcactttatttggctatttcattgtctagtttccattcttctaaagtcgagccttcacaaactcaaatataactaactattttgttctatgagacttgggtaggttgttctatctatttgtagtttaaaataattacactgaacactatataaattatttgatatattgtaaattatttttcattgtctctaaatattaagactcaatacaaattatttttcattgtcttgctttgataaaccttgacatcaattacaaacctgggcaagcacttcatcttttgtgcaaaatagttgatgctaaagttggggagattgaaactccaata

SEQ ID NO: 151430 - DNA, 290 bp, Glycine max
agtaagtcaaagataccgagggaggagctaatttgatccaatcatagcaggagtttaagctcaaaagctctagtctctgcagaaatgggtcttcttcaaatccaagatcctttatccttgaaatcgacaaaaccaattccttcagctgtaatactgttcccaaacgtggtgctgacgactctttaagcaaatgatcagtgctcaatttaagcacttttaaacggtgcatttggtacttgcagtattgttaataaccattccacgcttggtaaagtcatatccctaactcc

SEQ ID NO: 151431 - DNA, 444 bp, Glycine max
  unsure (1)..(444): unsure at all n locations
agctntgcaatntactctttattcgttctacttggtgtatttattaaagntnagttgagttacgtgataggcatagttctaaaaatcaaatcgagtgggactttgtcattaactcccgcaagcttttgtgatattgttgaagatatacttttgtaactgcataatattttattttttaatttttaaaataggatttagtaaataagttgatttcctatattttaggggtaagtcagttttaatggattagcctagtcaataagtggttcctatctttaaggagcaaattagttttaatattctattttgctaatatcttgttatctaattagtttatcttttgctatttattggatcgctactgagaaaaattngaattagaatagaataattctatttcctccgcatacgcattggctctcttctctcctctggtttttatta

SEQ ID NO: 151432 - DNA, 423 bp, Glycine max
  unsure (1)..(423): unsure at all n locations
actcagcttaggaactcncncaaagagaacgcgagctcgggaagaacttttatttgatatagaagaatagagggactcgagagaaagagggaaaagcttctggatatttttctatatgccattcgtagnttttacagattatttatattctcgaggaaccatatctaaccgcaagtgggtagtttctgttaaccctaactaactaaccaacctctaactacccttcccgcctaaggatcttatgatcagctnttacccagacctactcattctaactggtaaacatccgagtgcttgggaactgcttactctctcgaccgtctggctgctggctcgcttccatgtcattaagcacaagaatatgccccattaataaaagttatagagaattattttaaaaacacaaccgtcctatacaaatgt

SEQ ID NO: 151433 - DNA, 383 bp, Glycine max
ttgaaaaaaaattatttttattttttggctcttttggttatggaaataaaatattatcctaatgaatatttagttaaacataacattcatactatttcaacgaaattcaaatgaatttggaatcaagtaatttaaaaataacacttaaacgttaacacttatattttaaacaaaaataactttaaatatacaaaatgttaagtaaaaaacaaaattatggtcaagtacaagaaatgtatatacatcgaatatcaatatgaaatgtgtaaagaaactacgactaatctatgcggcactattcgcaaccagcaagtgtaccggatcgcacaagtagtataaaatggttagaatcgagtttcaaactctcggggaacttgtgtatc

SEQ ID NO: 151434 - DNA, 254 bp, Glycine max
gccccactgcacatttgaccatgcttatggtgaagctgggatatgagatttgccttctccaagaaaatgaagggcataagggtgccatttcgatcctgggaattgtggacagggacttctccatctctctcgttgatctcaacccccaagttattagttttgaagtttgtagagggcgtttgtagtggtgctactcctccgtgtatgggagtccttcatctgggagcaactttggtcccaccttaagccacttg

SEQ ID NO: 151435 - DNA, 411 bp, Glycine max
  unsure (1)..(411): unsure at all n locations
caagccacacacaacaggatatatcacctttgatttcaagaccaagtctatttttgtttctagaaatgtcattttctatgaagattgttttccctttagtgatcaaataaaccagatcctatcattgtcttacctatgcctactccttcatccaatgtcattgatcactcatctttagagccaccaagtgatcttatcatgtctgcctccaataatgattttaatccttcaacctcacaacaagttattcatacatctagaagactcatgagacaaatacacacaaccaagtaatataaagacttcaatgttacatacccataatcaactgctaccaatcactttataggtactagtcttgatcctcttaattctgtcctttcatatacanaaattgtttcattcctatca

SEQ ID NO: 151436 - DNA, 264 bp, Glycine max
  unsure (1)..(264): unsure at all n locations
ntagggtagatactgatgcatactcagcanaataacacgctctttaatattcaactagagtaccaaaatatgtattttaatccncagactaatcgacgcacattttcatgttttacttctacanaagttgtgtcatctcctagttacattatttntaaatcatcattnttcgatcttcaattaaatattgagaaataattttttaatagactatttagactaagtgttataatatagtcttttgactaanttcacgatgattga

SEQ ID NO: 151437 - DNA, 438 bp, Glycine max
agcttctttagtttcgctctcaacaattgcataattcttattctctctctcaacaattgcaaaagcaagtggaaaattgttcctactaccatcttgtccgatggcagtcaacaaagtaccatggtatttgccaattaaaaatgtctcatctacttgcacaagtggcttgcaatatttgaagccttcaatgcatggattaaacgcccaaaatacacggttaagaatcaccctaggagggttatcgtcaccttcctccattgaagatgaagttttgtattttactatggtacctggtacaaagtgttgagcagctgtgaaccatataggcaggtaactatatgaatgttcccaacttccaaatgtcatttcaagagttttttgtttagctgtccatgctcttttgtatgaaactgtgtaatgaaaccgttgatgcatgtc

SEQ ID NO: 151438 - DNA, 182 bp, Glycine max
  unsure (1)..(182): unsure at all n locations
aagttcaacaagtcacttgtcaaattaagtctcaaattatgttcaagntggttcggttcatttctagtcctaacatgatcatgatttacttcattgacttgaattgtttacataatttctacttgtcagttgtcaaatcaagtatcaaattatggtcaagttggctcggctcatatctagct

SEQ ID NO: 151439 - DNA, 445 bp, Glycine max
agcttatacaaagaagcttcatggttggcaaaggtatatggatcataacgtacctcaagggcgtggagaaattccgaccaagttgtgagtaaatggttggaatggagccatttgaaccaactaagagcaggaccttgaaggaagaagggaatgataatgatgcggcgggggggtggtgtgtccgttaggtcaaaatagtgttcagccttgaagatccagtcaagaggatctttcccatcaaaggaagatagggttattttgggtaatttgatggttgattgtggcgggtcggttcgaaccggagaggatgaatgggctgcatattgggaagaaaattgttcacgtatgagaaggggtaattgtgtggtgaagaaaatttggaaatctgtttgttgtttgggaccgcctcaaacacaattgcatttctcaaactggcactgaccta

SEQ ID NO: 151440 - DNA, 253 bp, Glycine max
  unsure (1)..(253): unsure at all n locations
ngtctttaaacaactctggttggaaggaaagacttatcccaattatttctttggngggacaaagaaatattacaagccttttcaaaatacacaatntcacaataaaaaaaacaagcttctataaatttaaaagatattntatgagagcaatacctattttttataggagaaaaaataattatntaaaatattcaaataaaaaaaattacttaataagagtaattgccgccataactgataacgtgcattcgtc

SEQ ID NO: 151441 - DNA, 396 bp, Glycine max
ctgactactgatattgcgaaggggcgctccttcggcaatataagaaacctcctccgacagtacaaggaacttactacgcaatactagtgtaagttttcttttttacggacaaatattaattgttaggatggttagtttttgttggctaaacttattagtgcaagagtattaatattcccttagggagctttagaaagagaacacacttttaaatgatcacaggcattttcatgtcatatttaaaggttacttgtgtggtaagaatacaacacatcaaacattttattttcgacacaccttctattacaaaacaaaatcaacattgattggaccatttcttatttaaaaagtcacactttctatttagaaaaactcatctaaccaatgttatgaaat

SEQ ID NO: 151442 - DNA, 438 bp, Glycine max
  unsure (1)..(438): unsure at all n locations
agcttttcgtcttacagacaacaaaaagtttatacggataaccactcgggtatttccgcccgtcagcgtgactcanaagtcagtatgacagatcttgtgagcgcggaagatgacgtaaatctccgcatgtcaacgggcatgtcggccgcgattggcgaatggcgcagaagatgacgttaatctccacgtgtcaacaggcttgtcgtcttacagacagcaaaaagtttatacggataaccactcgggtattttcgcccgtcagcgtgactcaaaagtcagtatgacagatcttgtgagcgcggaagatgacgtaaatctccacgtgtcaacgggcttgttggccgcgatggacgaatggcgcagaagacgacgttagtctctgcgtgctatcaggcttttcggcttacagacagcanaaagtttatacggataaccact

SEQ ID NO: 151443 - DNA, 311 bp, Glycine max
  unsure (1)..(311): unsure at all n locations
acacgcggtgatgtacgtcatctttcgcgctcacaagatctgtcatactgnactttgagtcaagctgacgggcggaaatacccgagtggttatccgtataaaatttttgctgtctgtaagacgaaaagcctgataacacgcagagactaacgtcgtcttctgcgcccttcgtcaatcgcggccgacaagcccgttgacatgcggagatatacgtcatcttccgcgctcacaagatctgtcatactgactnttgagtcacgctgactagcaganatacccgagtggttcttcgtataaactttttgcattct

SEQ ID NO: 151444 - DNA, 439 bp, Glycine max
agcttccttctgccgaagcttgtgtgtggcctggttgtggttgggttttccctcattcccccatatgaagtagtggggtggttctaaaagattgttggcttaagtatggttattctctgaaatgttattaataaatttcaatctggagctatacccaaggtgagttagatcataatttagtttaatttgcacttttataggctccgattttggttattttgttattgtatgttacaatgtattatctttcaaggttgtggagagtcctgttgattttgcattgaaccttgatgggtcatgttagaattcagatgttggaggccaaataagaactcaaaattctagattttttttgcttacttctcaaccttgttagacattgtagatttggtatttcttaccttgcgtttgtgtctgaggagcattggcttctgaaatg

SEQ ID NO: 151445 - DNA, 260 bp, Glycine max
  unsure (1)..(260): unsure at all n locations
tctggacttcactccccgtgctctccttgaagatntaagccaaacccctactttcgaggggcaactcccaccttatgacgactatcccgggcaagacgatgaggaaggagatatccatcttggccccctgctccacctcaaagatccgtccccccatgaactaccccaaccgaacatagtctgccatatcccggcttcacccacagctggtaaagaatctattcccttcgcggaagataaagggaagatggaggcgcttg

SEQ ID NO: 151446 - DNA, 431 bp, Glycine max
  unsure (1)..(431): unsure at all n locations
gcttgtcttttcatttacgagcgtctcgatatatttctctacttaatctgacatgcgagtaaaaagntattgtcgtttgaaattgctcaaagtttctgttttcaatttcgagcgtctcgatatactacgggacacaataagacatctgagtcaaaagtaattgtcgttttaattggctcaaagcttctgttttgaattacgagcgtctcgatatactacgggacacaatcggacatccgagtcaaaagttattggggtttaatttgctcaaagcttctgttttcaatttcaagcatctcgatattttacggggctctattcgacatccgagttaaaagttattggcgcttgaatttttctaaagcttcccttttcattacgagcgtctcgatatattacgggacacaatcggaatcccgagttaaaagtta

SEQ ID NO: 151447 - DNA, 410 bp, Glycine max
  unsure (1)..(410): unsure at all n locations
actatgaaactaagcttgagcnnatcacgacaataactttgactcggatgtccgattgtgtcccgtttatatcgagacgctcgtaattgaaaacagaagctctgagccaattcaaacgacaataacttttaactcggatgtccgattgtgtcccgtaatatatcgagacgctcgaaattgaaaattgaagctctgagaaaaatcaaacgacaataacttttgactcggatgtccgattgtgtcccgtagtatatcgagacgctcgtaattgaaaacagaagctctgagcaaattcaaacgacaataactcttgactcggatgtccgatggtgtcccgtattatatcgagacgctcgtaattgaacatagaagctctgagaacatacaaacgacaataacttttactcgga

SEQ ID NO: 151448 - DNA, 412 bp, Glycine max
tggtggtggtgggccacaagagaaggatccccaacttgtcttgcttgagcttctccaagtagcctcctcctcttttgtgactccaaacattgaagaagttgctccaattccctcacaaactctatagcccctccaattatagaagctggatcaccctatacataaacaaaaaatgaaggaaggaaaaaataggacaacatatgcaagatttgctatggtattcagagaaatcaaagagttttggtataattggttttttgagtcaatatatagttgaatgagtttctttttgttcataaaaattaaagacatatacaggaggactttaacaacaatttatgcactttgcttaattaattgagttagactttctcaatataattgaatgagtttaaatatatgaaagaagaaa

SEQ ID NO: 151449 - DNA, 226 bp, Glycine max
  unsure (1)..(226): unsure at all n locations
atcattctgngaggggttggtcatcttggttatccttttgagtctcactagattctactcagcaggaattttcctccacaatgaagatatatgccaacacttctacaatctgagggatgtttctgatggttttgatgtcaaatcattctctgatagagttggagaagtgatagacatgttggaagctctgcaggccaagcttgagtcaaaagttcaagaaatggag

SEQ ID NO: 151450 - DNA, 324 bp, Glycine max
atggccattgtgaaatgattgtaaatctctttgcacaccttcaagttggtaactttgaaagggtctcttgagggtgctgaaagtgtgtgattcatggggcgaatttggagaagctttatttatcattgggacattggtatgtgtggaaaatagaaattgagttttagagaaaacagggtcacgtggatgtggggacatgtagcaaaccacacccaaattcttcttacatgtctgcgagaattgcaagcttgaaaagaaaagattcaaaattttttatttcacggtggattgcaacaaattcaaaacatctcatattcatatgta

SEQ ID NO: 151451 - DNA, 309 bp, Glycine max
  unsure (1)..(309): unsure at all n locations
gctattnaatgctnnacattaatacacgagcatcattgntgcacttatatggttgcngctaaattcaaattagtggtgactggcatcatgctaaatattgncttactataaaaaaataaaaatgaaatacaaatatctgcgcccactttgtggtggcctactagcgtataaacgtggtgtcgaacatgatgcaatgtagaggatattattttaagcattttgcttagtggtagtgttggggaaaaaatgtggatcaagagcgtgaaaatctcaaattctataaaatatgtatcttttntatgtcaagga

SEQ ID NO: 151452 - DNA, 460 bp, Glycine max
  unsure (1)..(460): unsure at all n locations
ttacagtcacctgcggcatgcaagcttgtctcanagagatccacgaaggataaagtggctaaaggaaccttttcctcccccgaatatgacagccaccgttttatgagcgctgagcaccagcagtgcttcgaggccatcaaagaatggtcatttctccgggagcgacgcgtccagctcagagacgacgagtatatcgacttccaagaggagatagttcgccggcagtgggcatcactggttacccccatggccaagttcgacccagacatagtcctcgaattttatgccaatgcttggcctacagaggagggcgtgcgagatatgcgatcctgggtgaggggtaagtggatcccgttcgatgcggatgctctcagccagttcctgggataccctttagtgctggaggagggccaggaatgcgagtatagccagaggaggaaccggtccgatgggtttgatg

SEQ ID NO: 151453 - DNA, 262 bp, Glycine max
  unsure (1)..(262): unsure at all n locations
tggaagtgggtaaagatgttctagaagtaagaaccaaaacgtgatatcacccattgaggtaaaagcgtcaagctagtgacgttaaagaagcgctttctgggaggcaacccagttctaatttatgttaagttggtttattttatgcattggatcatgtggaacatgcttcacaatcagtacattgnggtatatcagtttgtttttgaatgatagatataanggtttcaaatttcttgaggaagggactanaaaatacttcaaa

SEQ ID NO: 151454 - DNA, 466 bp, Glycine max
  unsure (1)..(466): unsure at all n locations
agctntcaaccgttcttcgacgttcttcattcgttcttcatcgttcttcgatcttcaactggtaagtacctcgaaccaagcttttcgattcattctatgtacccgtagtggtccacattgtgtttcgtgcatttttattctcgttttgtttactttttataccccctgttgacgtgcttaagccattttacttaagtcatttctcgcttaacttaaaaataaaataaatttccaccgaacgtttgaattgtattatccattaacttcggttaaaataaattccgaccgttcggtcgtgccgtaaccacgttggaaatcaaaaagaggttaaaaataatataataatcaaaaagacatcttttagtaaaataaagcgganaatcaatcggacgttttctctttgggatttctcattcttaatcgaattgattaataactaaagtgaaactaaaggctaaaatcaatt

SEQ ID NO: 151455 - DNA, 193 bp, Glycine max
attaccagagaagattttcagaagatactctctttagtcacatgtgtttacttgggtcctgaatggccctcaaaggcttatatatatgtgacttgagacacgagattgctaagaagttttcagaacataaaggtcttatcctcttataaaagcaaaatcgtttatcctcttacaaaatccttggccaaaacac

SEQ ID NO: 151456 - DNA, 356 bp, Glycine max
  unsure (1)..(356): unsure at all n locations
actttagtctcattacttaaaaacctcaacaaactgggtggttgtctgccatacactacctcaaaaggtgttttccctatggaaacatggaaagtagtgttataccaatattctgcccaggggatccagtatgaccaagtcttgggctgctcagatgcaaagcacctcaagtaaccctctaagcatctattcagtacctcagtttgcccatcagtttctgggtggtaggcagaactcatcttcaacttggtaccctgtaactngaacagttccatccagaaatggcttacaaacaagggatccctgtcactgataatagaggtaggaatgccatgaagtcttacaatttctttcac

SEQ ID NO: 151457 - DNA, 282 bp, Glycine max
  unsure (1)..(282): unsure at all n locations
accttagaatactaagcttatcgcgcgggttcgggagacaaaggtcaagcgttcgcgatattctattatgatattccgagtactttggatttggtacgaccatgccctcctgatttccagctggggaattggcgagtggaggaacgccccggcatttgcgcaacaagcataatgtaaacctttacggttttaaaagctctatagttgggcctaggctttagagnnttttcctttgttaaggctttgtgtgctttgttntgaatttataatacaaggatcttg

SEQ ID NO: 151458 - DNA, 391 bp, Glycine max
atgatcgagtgattaattattaaatttatatttgttgaatttatgtgcatgatatcaaaggaaaattatttgaaaaagaaacctagaaaaattcataaaaaataccatggcttaatttacacttaagttctttgtaaaactgtttccatgaggatctcccttaattttgtagaaaataaagcaaaatactttcaaatgaacgaagcatttgaaacgtccaggtggcgtaagtgttccacaccctattgaaagaagtaatattttctcattagagatccagtgcacaagcttaattacttttgtactcatactatttaataactttctatacagtacgaaaataatacaactgtggaattgaaatttcttgcaaagtagattaaatctacgt

SEQ ID NO: 151459 - DNA, 234 bp, Glycine max
  unsure (1)..(234): unsure at all n locations
tgccgtatagcagaccatctatgcnatcaatgggttcacaatcactatgaatatttaattttcatcttttattacttacttgaccaaattcactcacattctataacatactacatatatgctacatctgatctgatcatatcttactgatattnttatactagaaaattatatatatgtatatatatatatatatatggcatctttttatatcaatacacacgagatgctgga

SEQ ID NO: 151460 - DNA, 415 bp, Glycine max
ttacaaggaatagtaatcaattatcaaaccctaaaacatagttttttctataaaaacttactattgtttactcataaaacctacacactcattgtaactattatcaacaacaattaaagatccaaaatagacattgaaaaacaagcatcataaacttcttaactacaatcatcaagcacaatcaaaaatacaaaaacaatcatcaaaacacaaacaaagacaatcaacgacaatcattaatcttcaaacaacaattaacatgactatcaaaacacaatcaaagacaatcattaagccacaattaataataaccatcagaaacaaactcaaatataaagaaagaaaataatcaaccgatttaactatttatctaagtcattgctatctaaaagtcctaattctcttctaatagcaa

SEQ ID NO: 151461 - DNA, 169 bp, Glycine max
catcttctctttgctcttggtgaacctatcctgaaacgcttttgtggacccgcctgaggagtggcccactcgtgggtctgacactgttcatgtcctccctcgaggactgggccccaccactaccccttgactggagggagtgccagtgtggtgcattgttgccttgcca

SEQ ID NO: 151462 - DNA, 454 bp, Glycine max
  unsure (1)..(454): unsure at all n locations
agctngagaatgttgtagcttcaaacttttaaaaagatatatcgcaattcatgtatgtccttgtaaataaactgttaatgggaagtgaattntaatttattccactttgaatgaaattgatggatcgtattgtggttagagttcaaattatttaaataagtacaaataattttgataaatataaaaactttaaaatgtcaaaaagattcaatgtgaaacagcgagaggttaaacaacattgacgtgaaagatttggttgacatttttcaagcttgtgagatgtcttttgtaatgaattaagacaacacactcccttctctccgacttttacctagtgtttcaagtgggaaaaaacaaaaacacaaactatagagaaattgaaagagaaaattgatgaacttatataaatacttttttctttaatagacaagagaacatgacagtataaatactt

SEQ ID NO: 151463 - DNA, 296 bp, Glycine max
ccttgatgtaagcttatgcaaaatacaaggcaatgactgcttaagggtgatgactagttgtgtccaaccatgatattaccttcactatatgtagtcctgcccaccaatgtccaattcgaacctattagccgataattaagaggggggagagaaaagtgaagcgtaaaattagtcatcaagagctagttggcaatcgaataggatggcgttttttatgctataaggagaatgagagattgtcctcaacacgtgccttcatattgttctctagcaaccactcctatgttatttggata

SEQ ID NO: 151464 - DNA, 459 bp, Glycine max
  unsure (1)..(459): unsure at all n locations
agctttgttcgtgagctccaatcgttacatttgatcttgcacattctgaatcgtctctgcgttgcacttgacatcaacactgagctccttcattcgcgtgttatctgccatggcttaatgaaagcaccaatgaaagggaaatactggaaattatagaatgtactcgttttattctcgtactgaaaatgagaagcaacctctaagagtatagtgtgtacaattagaaggaccgagtacaatagtcacagagagaaaaacaaaaagaaagagaaatgttcacacattaccaccgccccctcactacacattctctcccctctaaataccactattagttggttacataatccacccacctagagttgggttttctctctctcacactctntctgttacccatagtggatatggtagaattgacaaatattcccctctgctgagctgtctcaattgagtcat

SEQ ID NO: 151465 - DNA, 402 bp, Glycine max
  unsure (1)..(402): unsure at all n locations
cttaacataaaagagatgttgcgggataattgatgtctgatttcatatttatataagntnntgcctattgtctctgacgcttgtggatattataaattgcaatttaaaatggtagcaagttcacttcctaagaattttctgtttcaggttttaataactcttactaaaagggatttctctgangcgtgttttgtattgtgggcaaagntttaaaattttaacttccgtgttcatcaatttctagctcataacaaattgaaggccttagctaaacatacatagcgtacatattaatttacaacacattaaatatgaaacaaaaagcaggggacttttgaactccatatggcttatattataaaactatatgccgatatcaataattttaaccaataatctcag

SEQ ID NO: 151466 - DNA, 416 bp, Glycine max
agcttgagggatttcttgatgccttggttaacctagtaactcagctggccatgaatcagaaatctgcacctgttgcaagagtctatgatctatgttcttctgcagatcaccatacagatctctgtccttctttgcagcaatctggagtcaatgagcaacttgaagctcatgctgcaaacatttataatagaccccctcagcaacaaaaccaacaacaagagaataattatgatctttcaagcaatagatacaattcaggttggagaaatcatccaaatctgagatgggcaagtcctccacaacaacaacaacctgtccctattttccaaaatgctgctggtccaagcaagccatatgttcctcctccaatacattagcagcaatagcagcagtcacaacaaagacaacaagcaact

SEQ ID NO: 151467 - DNA, 242 bp, Glycine max
  unsure (1)..(242): unsure at all n locations
gcaatagcaccccacctgacgtcgccaaagtcttctgaccctcgcgacatatctccaggtaccactctgtggtcaacaaacaaaagtaggaagactgactcttccacgttntctcacatcaagcttattggattatggggcacccgtcatatgtggtactatgtggcgattgtgcgatggcgcaaattaactctcccatttccacaagtcgggcatatgcccaccatctccagttgctcacc

SEQ ID NO: 151468 - DNA, 404 bp, Glycine max
  unsure (1)..(404): unsure at all n locations
agcttanttggcattaaaggaaaatgacaaacctcctaggttagcttagtattttcttaagaaatttaaccaagcctcaaatccatattatgtcagaaagaacagttagcatgattcttgttgaggaaagtgtctgttcacggttatgctttgttatatgcatgcaatttattttctcatcaatactaaggactgatgttattaaatttactcatctgactttttaggttatctgaaatcctggactagttccattgatcttgttagtgttcttaagcatgagattcgtgatggacaactgaccttcagaggaaaaagagtacttgaggtatattgtccatgaacatttttattgcttgctactgtaacttgactctattcaattctgcttgtgctgcatcatc

SEQ ID NO: 151469 - DNA, 253 bp, Glycine max
  unsure (1)..(253): unsure at all n locations
cgtgcaanaaggtttgctttatgatttctgggtacaattgttcttgttcattaattaggcaatatgctagttgtaaatgtcatgtcatgtttatcactattctcaatccgntgcatatttattacctcatttctagttcatgctgcttttgaccaaataggaaggaacttaggatttacaaaatatgctagacatattttgttttagaaaatattctananatagaattacaaattaactaattgaatatcta

SEQ ID NO: 151470 - DNA, 314 bp, Glycine max
  unsure (1)..(314): unsure at all n locations
acccacttaaggcattaagatcatacttgcttcacttgctggattatactcttctagtatcacctaatttaatccgtatttatctataaaataacttatttgatatcattgatagccactgcaaatttcatcccttttacccttattttttagctctctgaaattcttaaaatttgaaagggagaaaaaagaagggagggaaagattaatctgattntctcatcaaattactcttccaaaaagctgtgtttttggtcatgattgtaatggtgtttatccgtgggtacctgcagatgaccataaaccattaattc

SEQ ID NO: 151471 - DNA, 396 bp, Glycine max
  unsure (1)..(396): unsure at all n locations
atgatattccgagtactttggatttggtacgaccatgccctcctgattttcagctgggaaattggcgagtggaggaacgccccggcatttacgcaacgagcataatgtaaacctttacggttttaaaagctctatagttgggcctaagctttagagtttttccttttgttaaggctttgtgtcttttgtttttgaatttataatacaaggatctttcttcatctgttcctggtctctacccattctcattcatttgcatgtttacttctttttctgaaacggcagatccgatgacgagtcccccgaaggtactaatacctgtgacccgcctatcgacttcgagcgagaaatgaatcanacggaagatgaaggagatgaggatgtgtgacttccccc

SEQ ID NO: 151472 - DNA, 237 bp, Glycine max
  unsure (1)..(237): unsure at all n locations
tacacactcaacaaatagtcatcatccatccacaattccaatcattcatgctcaatatgatgcatgcacctgacatcaactctcatatgcaatgtggtaccatccccaaggaaatagcctaagcgtgtccacacaacactttcacttaggaaaactaggcagtaagtgtcgaggtcaccctgtcgtgcacatgcaactcccnccgtnccccctcacagtgatcagnctgagtctcaa

SEQ ID NO: 151473 - DNA, 404 bp, Glycine max
  unsure (1)..(404): unsure at all n locations
ataagtgaagatctttccttcatctgttcttgcaccttcacccattctcattcatctacatgtttatttctattgcgattaaacggtacagatctgacaatgagtcctgtgaaggtactaataccgaggacactaacgtcgattttgaatgagtagcaaaccgagctgaggatgaagaagatgaagatacagggtttcccccggagctagaaaggatggtcgctcacgaagatcgagaaatgaagccccaccaagaggagatggaaatcataaacttgggtgtcggcgaggaaaggaaagaggtaaaggttggtatgggcatgaccacaccaatacgagatgagttggtggttttgctacganactaccaagacgtcttcgcttggtcataccaagatatgcct

SEQ ID NO: 151474 - DNA, 268 bp, Glycine max
  unsure (1)..(268): unsure at all n locations
gagcttcaagtaagtgctccttaaaccttcattaatcagagcataagagcttcaagtagcttccctttgtttctcttgagttcttggatataactctatgatgtttntagagtatttttgctttaatgtatgcatgagataaatatttattcatttgatgcacacaaacacctacacttttttgcacacatggtgagtatttaagggccctgtacccgggtccgtgggaacatatgagggctatgtgaatctgcggctttctgtattt

SEQ ID NO: 151475 - DNA, 483 bp, Glycine max
cagtcacctgcggcatgcaagcttaataactacattcacgactacacacaaaattatggagttatgttttcatgcgtttacacatcaagaaagacacactcatccaagatatatatatggtccaaaagggtcttgcaacactaatccacgcatcaaaggagaaataagctaactaacaacatacacataggatgatagaggttcgttagcacattatcaatcaatatcaagactacttgcatcacccaatggcttgccataatgtccaaccgcacttcgcaaattatagagatggtcagtctcataactcatgactcaatagtgaatttatggtatagcagacattaaggatgcaaggcacatacaagcattattattaagtcttatttaatcatgtaggagaaaatacaaataaaaattcaagcatgctcaacaaaagtactcataagtaaccacacagagtgcacaccagaatattgatag

SEQ ID NO: 151476 - DNA, 277 bp, Glycine max
  unsure (1)..(277): unsure at all n locations
aaagaaactntaacatgtagtatttattatggattatgataaagagaggacttgaatacaggtaagtataaaagatagaccagttttgtggtgaaagaaaaaatgaaatatctggctcaaacttgattcaatgacctgaatagctcaaggaaatataaacacctatgatggttatggcacgtacttcaacaattaattcattttagaaactataataattgatacgaaataaaatgtgtggaaatattgagaccatacttgcaatgatctaagtata

SEQ ID NO: 151477 - DNA, 248 bp, Glycine max
aaaaagagattaacatgaggcagaggagatggttagagttccttaaggattaggattttgagcttagctatcacccaggtaaagccaatgtagtagctgatgccttaagtaggaaatcccttcaaatgtctgctttgatggttagagagttggacctcttagagcagtttagagacatgagtttggcatgtgagatcacctctagtagcattaagttgggtatattgagagtcaccaacgaactcttg

SEQ ID NO: 151478 - DNA, 387 bp, Glycine max
  unsure (1)..(387): unsure at all n locations
attggccaacttttcaaactacaaccaaaacgtacgccaaattgctagtgaccaacattataaatgaaatgtagcataaaatatcagctttaattnttatttttgtagcttctaggttcttcccctcacccctttactagctttagtttaattcaattttttgtttattttctcagagatagaaaagggagctttcagctttgtgctttggtttgtgttaactctttcgaagatatactccaacagccgcaagactatntaacaaattatatatctttcattgtattaactcctttgggactactttgatagtaccagactactgtgcgagtgtggcttgcaacacttttgagcaatgattagtcagtgactacaatntatcaccga

SEQ ID NO: 151479 - DNA, 221 bp, Glycine max
tggtgttatctattacaatgaattggtaatcgattaccagtgtgttattacgttgaaattctcattcaaatgtgaagggtcacatcctttcacaaaaatgctttgtgtaattgattacaatgatatggtaatcgattaccaatgataagttttgaataaaaattcaaagatgtaactctttccacggttttcaagtgcttctattcagtataactgttctt

SEQ ID NO: 151480 - DNA, 445 bp, Glycine max
acagcagaatttagtaatgactccactaacctataattaaaataacttaatgccattaacctagggaattaaaacaaactaaatggctgagtgtaactgaaattgttggcaaccaaaagtcacccccaacagccaacaagtcagccaccatttggtctcccaaaaggctgatgcctaggttgccaattgggcccttattacaacttgaactaaagcccttttagttgattaacccaaaacatatttttggtcagccaactttacaaggattgggccattatttagacaaactaaacactctaaaattgaaataaagtggtgtcatttagtcctccatttgggccatgatacaaatcacaaccttggacagcacttgttgaagagcttccttggctttccttgctctagcccttgtcataggtcctccaagtccttcaagtggatc

SEQ ID NO: 151481 - DNA, 236 bp, Glycine max
  unsure (1)..(236): unsure at all n locations
aatcagtccggtccagtttacgaccgatngcgggctattgtttctgtgcaatccctgaataattntttgatgatgacgactaggaactgttcggntggcttcatccggtgatgctttttggtatacctcgactggtaatctttcttggccgatgtcgcatcggattattttcgatcaatgtttgtaatggagtcttttctctgttgaggtcggctacatttttgcctgcctattca

SEQ ID NO: 151482 - DNA, 443 bp, Glycine max
  unsure (1)..(443): unsure at all n locations
agcttctcctttgacaatcacagtgtcaggactnatcnttgacattattgtaaatncaaggctatgacattccttaattttattctgtaggtactaccaatgagaaacgggcaaacccaaatccagaaatgggttctacatctcaaggggaacggaagaggaagtggttagcaaccgatggagaggaggaaactttgcaaagccaatttattgatgtcttagaaaagaatggcaaaatgctacgtgatcaacttgaagctcagaaactgaattttcagttggatcgtcaacagcagaaagacactgcaagtaacatagttgctgtactagataagcttgcagatgctctagggagaattgctgataaattgtagagcaaggaggatcagaatagaatagtgtacataacaatttggagtcaccatagtggttccataattatc

SEQ ID NO: 151483 - DNA, 472 bp, Glycine max
  unsure (1)..(472): unsure at all n locations
agcttctataatgccttccatgacttattctcttgtttatttacaattatatatgaacaatataaatatttcacttcacactgaaaattagcaagactaaataacattcataaatccaacaatccataacatagggtcgtagaatggaaaattacaagtcttaatgaaaacaaaatataaaaattcagagattcaagtgtgcacatgttttaatcaaaccataagcatattcataaattcaaagattaaggactaggtctttcttccgctcatctgatattactagaaacacatctcttcaagtaaggtcatctttcaatgccttgattgcctttgtaaaaggaacaacaccaattccttcaagtttttaaaggatgcttaaacaagttatcaatttgttattatcctcatnttttttgtccaactaattcatccactgtggcattagaggatgatcctacaactcgacttg

SEQ ID NO: 151484 - DNA, 157 bp, Glycine max
tggacttatatttgcgagtcttcttgtggacatgtacctcgaataataagaaggggggtgaataattattataacccttactataaaactatcattcttaatggactagacttataggctttactactaggtagaaaggaaaactgaattggactta

SEQ ID NO: 151485 - DNA, 418 bp, Glycine max
  unsure (1)..(418): unsure at all n locations
agcttattcaataagaaattntgtcatttcccctgagtatatttcttctatttgcatattggttagttccttaatctcttccaattcttttatgataatattattctcttttttagtaacttatccaccttcaaaagtctagaaaaacttatgaggataaatcaaattcttcgttgtcaccgcatcatctttatctccaaaatgaaaatttaagtggtacacatagctaaacaaaggtcaccttattgattccaaccttgccaagctacgtatagttgctaggggatcattgagaagcaaaaatctaatttcatgacatctgaattttgaggagtgtgattactgcctttagtatattaattattgatgtgttaagggatggaaatggaagaaaaaaaagttcatgtatgaaaataat

SEQ ID NO: 151486 - DNA, 234 bp, Glycine max
  unsure (1)..(234): unsure at all n locations
accacttcattatcactggtcaatgttggattggtgtaaaagaactctggatttagataataacccgctgcatgcaaagggtggtggagttggcaatcccatcttttatcaatgattgcaaggatatccttatacttcccttcattgntattgaaagctctttgaattgcttctttgaccctatccattgcttcataaatgaaacccattgcacggttttnnttattatccacc

SEQ ID NO: 151487 - DNA, 330 bp, Glycine max
  unsure (1)..(330): unsure at all n locations
caagtgagcctggttgctatttgcaccccttttttactaaatgcacccccttctatttttttggtaattctttttccgtaacgtttcgaaacttcacggatttcgtaacgatacttatttcccttcctcaaggttacgaatccttacagattatgtatntactctnttttagctntcgaagaagttacaaaactcacggattgcgcaaaaacaccttttttcgacttccgccaccttacggaatttcacggatcgtgcaagcctgcttcctttngatttctgagacgtctcgggacttcatttattgtgcaacaaaggacgccaagtatc

SEQ ID NO: 151488 - DNA, 253 bp, Glycine max
  unsure (1)..(253): unsure at all n locations
cctctgatggtgttgagaagaaatcacatgtttgtcatcattcaaataattggagaaagngaatgcatgtatacatgatnttgatgatgccaaagaagaatcaaacaaggttgttacatttgcttaaagattaatacaagaatgcttcaacaaacaaagccttgattcaagatcaagccttgcctcataacaaagggtttcaaagtcatgcaaggctctagtaatcgattaccaggaagtgtaattgattact

SEQ ID NO: 151489 - DNA, 436 bp, Glycine max
gcttttggtcaagcaatccacactaaaataactggtatttaaattactgaaacataaagcaactaaataactaataactaaatttttcatgatttgcataaattaaaacaaaacagaatttaaacatcctgctcatcctatggctgatcttcatctaaatccagcacaggagcagctggtacatcctgaagaatgggctgctctggctccctggctggtgctactggcatagtgtcctcagaaatgggtgttggagaagtaggctcctaagctactggatcagtctcaaagataaatggcttaggaggaacaggctcatcctctgcatttggcacaggctcttgggctacgaaggcctcacctcctccagaaggagaaggctggactcctggccaagccacatgtgcaagaaactcatccacactcatgatagatg

SEQ ID NO: 151490 - DNA, 282 bp, Glycine max
  unsure (1)..(282): unsure at all n locations
ctcagcttatagtgcgggtaagacacgaaggccaagtcgccgcgatatgcgaggatgactctcttangagatcggatntggtacggccatgtcctcctggttttcgactaggaaattggcgaatggaggaatgcccagacgtttacgcgataagcataatgtaaccctttgtagctttaaaactctacgattgggcctaggctttagagtttccttttgttaaggcattatgtcttttgttcttaagctataatataaagatcttttcttatatgttactgt

SEQ ID NO: 151491 - DNA, 310 bp, Glycine max
cctgaacacccacattttagcattctcttagtaccatggacgtgccgaaatttttggtgtatgccttgcgtaaagaacctttcttaattgcatgcacacaatgtgcaacatttctggttgtgggggcgtgattcttcattttccctcaaagccatagtctttctttaattgtggtggaagattcgtgataaagatggcataattaaaggaactccaccacaaatggctcaggctagacacgcctatagagtaccagtgtgtgagtgcctaacagggcatttcaaaaataaaaacttaactcttaaattca

SEQ ID NO: 151492 - DNA, 258 bp, Glycine max
  unsure (1)..(258): unsure at all n locations
acacccatctagtctatttctcttagtttctggatccaatcagcttattttgattagctnttcgatgaagatcattgaaataaggttaaaaaaaagttgagaaaggtcataagccacttccataagcccaaataaactcttccaaacacccatctagtctatttctcttagatgctcaaccttcatcaacttctatatagtttataccgtgaaaaacaaaccatttttatggtattctatttattgattaccaattat

SEQ ID NO: 151493 - DNA, 462 bp, Glycine max
  unsure (1)..(462): unsure at all n locations
gcttctctctttctccttcatgctccttctcttccttctcaagcttatcatcctcctctgggggcgacccagaaaaattgaagcccatttctccaagcaaggaatcagaggccccccttatcgtttcttcattggaaacgttaaggaacttgttggcatgatgttgaaggcctcttctcaacccatgcctttctcccacaacattctccccagagtcctttccttctaccatcactggaagaaaatttatggtacatacatacattcttcacttctaacttctaacttcttttcttaatttcaaaaccaacaaacaaatgcatttcatattattatctatctctaaacgaacagtcctcttcatcatcattaaagttggcgctcttcngtgccattgatgatgatgatgatgatgatgatgatgatgatgtttctttttgcaagctctgtgttacttccatc

SEQ ID NO: 151494 - DNA, 276 bp, Glycine max
  unsure (1)..(276): unsure at all n locations
cttctcctggctanatgcacaagaggatcaaactaataaatttttaatatatggagtatatggcaaacctaaaacaacaactacaaaataatcccagcccaaaaatgaattcttaagctctaatgaaacctggccttataggcatcacttttccttcgtaggagaagggtgaacttttcacagatcaaaagctacagagtttttgtctgtnagcagccaaaatactaccaattaacagaactaaaggaaggtcaagaattccagatcacatatatg

SEQ ID NO: 151495 - DNA, 401 bp, Glycine max
  unsure (1)..(401): unsure at all n locations
atggacctcaactgaccacaaagaccacctactactaatcaaatgtacctcaagggaccaccacttcgccaatccttgcaccaaaaaccaaaaaagggccttaacttaaccacgaattccaaaaacagacctaacacggtcaccgtcttcagttcaatagaacaacacaagtagacgaaacgtacctgtcacggtcttcagtgcaatggagaacaacaacctttgatgtttacagtgcaatggagaagagagcgcgaaagggtacataaagaagaagaaagcgcgagagggtaaacggagaagaagggagcgcgagcgaaataggtagcgtcaaatataatttaaaatgaagtttaacatncaatttaatanaacaccgatgttacaaattgatgtcaacg

SEQ ID NO: 151496 - DNA, 438 bp, Glycine max
  unsure (1)..(438): unsure at all n locations
tcagcttagntnntcataatcttcttcctctacaacccgagtgtgaggagctntgattatctcncaacaatttcattacagtcaatatacttcaaatagttattataaaaatacgtaatttaaaataatttaatgcaagcagtattctatttaaatntaaataatattgactaatattataataaataaaatttaatgattaatatcaaagagatgaaagacataccgttgaaatgcaccgtcatgctacttaaagattagagtgatgatctattttatatagataagaggtggtagttactgaatagtggcaccataaattcgcctttaaatgaacatatattttttggggtggtgcaaatagaattatgtatttttacataatttattaagaattgattgaaaaattcgataatgtaatttttctaactatgttat

SEQ ID NO: 151497 - DNA, 489 bp, Glycine max
  unsure (1)..(489): unsure at all n locations
gatccttaagcacctgggctgcagcttatgggatgaataagatgattcaggtgttttgtgataacaaagatgatgacaaaaagcccaagagaatgagttcaagattgagtcaagaacacttcaagaatcaagagaaatttgatttcaagattcaagtttcaagaatcaagaatcaagaataatcaagttgaagattcaagaatcaagaaaagactcaatcaatataagtactaaaaagttttttcaaaacattgagtagcacatgaaattttcacaaaagcttttactaaagagtttttactctctggtaatcgattaccagtttattgtaatcgattacgagtagcaaagattattttcaataagctttcaactgaatttacaacgttccaatggatttcaaaatggtgtaatcgattacaattatttggtaatcgattaccagtatgtntgaacgttgaaatttcaaatcaattatgaagagtcaca

SEQ ID NO: 151498 - DNA, 273 bp, Glycine max
  unsure (1)..(273): unsure at all n locations
ttcattctatgctttctatgtggccattcttgcctgagatgctttcatcttcgtctaatttactttcgggatacttttcttccgtttttaatgagcttcgaccgattgtttaagccgttatctctccaaataaataataaaatgaatttcaacaaatcatttgtgttgtaatctcgtttaatcgctggtaaaatagaattcaaccgatcgttcacactgtaacctcagttgataaaaaaagggaaaatttcttcaancagacatttactttga

SEQ ID NO: 151499 - DNA, 418 bp, Glycine max
attcgagtcatgatgaaacttttatctattacatagcttccctttgtgaaaatacaaatccagaccacagatacattgctgaaatactattaactttaggtctattattgagagctttgagttctgagttgctgacatttcaacatcactcatcaggtcatcccattaaccctgagttattccttttgctggagcagaccaagttaggtagtttgcttttgaaagacaaaagcagatttggaaaagctgcttacatgaagctaaatacagagaagtggcagaggaaactcatctttgatgttgtgaatgagattcttggaaagatccttacataagctaagtaaagaattgaaggaaacacaaaaggagaattgacccgtcttaaacaacatttgttagaaaagggttcatttttcac

SEQ ID NO: 151500 - DNA, 304 bp, Glycine max
  unsure (1)..(304): unsure at all n locations
gaccttgaaactcagctgacaccattatttgctgaagcctatcttntcttgatttatttttttgaccttgaatattcttgaagcaatgcttaacctttgaatgtttgttgaagctaccttgtattaatcttaaagcaatgcttaatctttgaatgtttattgaaacaaccttgttgtttaattctactttggcatcatcaaaaccttgtattcatacattcacatgaaggttatttcattgccatagntaatcaantatatgagaatatgattgactntantttcttcangaaacccattctat

SEQ ID NO: 151501 - DNA, 287 bp, Glycine max
catttttaattatctctttgacacattacgtccgatataactcgatgaagggcaagctgttatggaactgatggttgctcgacacctttagtaatattaaattggaatgcaatattcttcatggcatggttaatgacaaatctactacttttctaaagcataaaccctataatttggatgaagtgtcaatttctcaaggctattaagcctaatttcaatgctgactcctatatagtctggtgcatgactaccataccaatgaaaggggtcaaaatgccatgctatac

SEQ ID NO: 151502 - DNA, 435 bp, Glycine max
  unsure (1)..(435): unsure at all n locations
agtattgaaagagagattttatgatagctttttttagangngaattntngtattagggggagaaacatatacgattcatgctgcttgaatctttttgtatcgtgggttcttgaattgacacttcttgtacttttttggattttttaataaagattttgcttatccaaaacaacaattccagaaagaggggagtgtaaataaattctagagtctatttttcagtatgagtatattatgggtaaacaaatttaaatgaggagtgccttataaaaggaaaagtggaaatagcaattgtaaggaaaaaaacaacaaataatgtaattngggtcaacagtaaattggccgcacaaaatgtaagtgggccaatagttaaaaattttaccatatagtacgaagatactatttgcactaccagaatcgctatnttaactaccc

SEQ ID NO: 151503 - DNA, 274 bp, Glycine max
  unsure (1)..(274): unsure at all n locations
ctcaagcttcnncggctccctctatctgcgaggaagagagaaatatgaatatttattttaanaaangcaaactttctgtttgtgtattagttgccgaagtggcaaagattttccacattcaaagtctacggaggggtgctgctgttatgtgcgtcactgaaaccaatgagcaacggctaaacgaccagaaaaattaataaatacacgacaacgaacaaggccttctaaaatactggtttttatttcagcatacatacccattaggttccaaaat

SEQ ID NO: 151504 - DNA, 438 bp, Glycine max
agcttctcatcaggggtatttaaaatttcatgaggttatatctttattcggttttgaagagaacaccatgaatcagtgtatatactcgaaggttagtgagagtaagatttattttcttattttatacgtggatgatatcttgcttgtgactaatgataagtttatgctatatgaggtgaaacaatttctctcgaagaactttgatatgaaggatatgggtaagacatcttatgtcataggcattaagatccatagagaaagatctcgaggaattttggttttgtctcaagagacctataccaacaaagttttaaagaggtttaacatgaaatattgttcactgagtgtggctcctattgtgaggggtgatcgacttaaagtgagtcagtgcctgaaaagtaaccttcagcaggaacacatgagagatattctatatgc

SEQ ID NO: 151505 - DNA, 319 bp, Glycine max
actaagcactgctcaatctagttttccacatcacaaggctacttgtgaaagtcttcacaagctcctatgattgccaattatcctatgacctatacttcaccactgccacagtcagttcctccatcgtcgactactcctaatcaaccgcaagccatggttggtggatccactactacactccctctaatagctggtttctagattcaagtgcttctcatcatatgacctcaaatgttcaaaacattcaggagtgtgttccctttggaggatctgatcaagcctataaggaaatgagttagggtgctacactaaatctatc

SEQ ID NO: 151506 - DNA, 491 bp, Glycine max
  unsure (1)..(491): unsure at all n locations
ttaagtcacctgcggcatgcaagcttgtgaactntagaggtcaagtgcattgcattttttaaatctgactcaaagggagtgaatttgtaggattttgagtccaaaactgaattccttactttcaaaaaccttgagaaacatatatggtttgtcccaattggatttctacatcaatgggaatgttgattttgaaagcgagtaattaggcacaattccaaatgagaaagtgtcttatatgcgtagaattgtatagaaaatatgatatgaattatggattgaattgcttgctttgattgataattattacgtggaattgttatgattaaatgttgtaagaccaagtgagtgtgaccacttagcaaggcatgttgcttgatttgaatngtcatgaatagatgttgtagaccaaatgagtgtgatcacttgccaatacatgtngcatgantataaattgtatgatattgatcatgaactattatgctttgggattg

SEQ ID NO: 151507 - DNA, 207 bp, Glycine max
  unsure (1)..(207): unsure at all n locations
gacatgatagaactttttcttaagcaaaggtgcttgattcaatcccatgttttgctagaatgaaaaaaaaaattgtgtgatcaatacctcgacaccctatcatggaggaaatatgatgaattcanaggaatgcttatgttatgcatgacacaaatgcactttatagacacaagagcccggaagatcatctcttcttactcacaaaca

SEQ ID NO: 151508 - DNA, 439 bp, Glycine max
  unsure (1)..(439): unsure at all n locations
agctcatggcgaatcaagaataattcaaagatgttttgatgaatacantgatgattaaaaaagatgatgaccaaggtgatgataaaaagctcaaagatcaatcagagaacaattcaagagttccagaatagaatcaagaagaattcaagactcaagaagaaagtttagagtcaagaatcaagattcaaggttcaagatctcaagaatcaagatcaagattcaagactcaagattcaagaatcaagagaaggcttaatcaagataagtatgaaaagtttttctcaaaaattgagtagcacatgattnttctcanaacatgtttaccaaagtgtttttactctctggtaatcaattaccagaatgttgtaatcgattaccagtagcaaaattgttttggaaaaagtttcannatgaatttaccagcgtccaattaatttca

SEQ ID NO: 151509 - DNA, 277 bp, Glycine max
  unsure (1)..(277): unsure at all n locations
acactataaatactacttatatctggtcgagtgcaggtctgagcatacataatactcccaactactgatgcatacggaattgcttccattngcttccgttccagatcatttntaggacattgtgcgagactaaatttgtctcctttctgaattggaacgggagatgctaagcacttttccatcctaaatctctctagtactttattgatatatgcttnttgagacaagcctaacaatccttgtgatctatatcngaatatttctatccctatcacat

SEQ ID NO: 151510 - DNA, 429 bp, Glycine max
  unsure (1)..(429): unsure at all n locations
agcttgagccaactcaaacgattataacttttttctcggatgtctgaangagtcccgtaacatatcgagacgctcgaaattgaatgttgaacctctgagccaattcaaacgacaataacttttttcacggatgtctgattgagtcccgtaacatattgagacgctcgaaattgaatgttgaacctctgagcaaattcaaacgacaataactttttactcggatgtctgattgagtcccgtaacatatcgagacgctcgaaattgaatgttgaagctctgagccaatacaaacgaccataactttttactcggatgtctgattgagtcccgtaacatatcgagacgctcgaaatngaatgttgaagctctgagccaatacaaacgaccataactttttactcggatgtctgattgagtcccgtaacatat

SEQ ID NO: 151511 - DNA, 271 bp, Glycine max
  unsure (1)..(271): unsure at all n locations
cttcaacattcaatttcaccgtcttgatatgttagggactctatctacatccgaganaaaagntattgtcgtttgagttggctcagagcttcaacattcaatttcgaccgtctcgatatgttaagggactcaatcagacatccgagtaaaaagttatggtcctttgtattggctcagagcttcaacattcaatttcgagcgtctcgatatgttacgggactcaatcagacatccgagaaataagtattgtccgttgagttggccacaagct

SEQ ID NO: 151512 - DNA, 377 bp, Glycine max
  unsure (1)..(377): unsure at all n locations
ataaccgagtgaagatagcgcatgcttcatacaatggcttacatctgcatgtgaacataggtattttgcattgtatgcacaagccaacaattctttaaaccttagcattatttgagcatacccacaaacctttgctggatgaccgctggatatggctgcaccatcattgcatccaccatcgttcactatgtagagagataccccacaagacgggcaactgcgcatataaagacactcatttctatacataatacaatcattagggctggcatgaatattttggtactccatacccactgcgcataatatcttatttgcctaaccttgactctctggtaacatatctatattangaaacgtattcttcaataacacaa

SEQ ID NO: 151513 - DNA, 382 bp, Glycine max
  unsure (1)..(382): unsure at all n locations
gaaatgcagntgagaagagaaaggggcctatgctttacttgtgatgacaagttttcccctagccatcgttgtcctaataagcaatattttgttccacagtgggaagaagaggatgaacctgcattacaaccagatccaccagacgaggttgagacagctggtgaccctagtttgcaagatcatcatttgtcttataatgctttaaaaggctcatcaagtcttggaacaatgaagtttcaaggatcaataaatggattgggagtgcagattctactagataatggaagttcagataatttcctccagcctagactatctcaatgcctgaagttacctgtagaaccaattcctaatttgcaggttttggtgggaaatggaaatg

SEQ ID NO: 151514 - DNA, 320 bp, Glycine max
  unsure (1)..(320): unsure at all n locations
gtgccaccatatttactaaacttagatcaactgatgcaatcnatttgattgaaaagataatttatactactcttataatgtagtgtacaactaanaaaataatataatagaaaatagtgcttaagccattcaagtcaagtcattttgaatctcatcattagtatcatacatctatatgtgtcaaagagaaggagaaacatgcatggtaatgcataacacaacaaaacattataagaatacatgctnntctaacccaaccaatggtaaatatttttcattttcatgaaaatattggtccctattggatgtattggatgtta

SEQ ID NO: 151515 - DNA, 369 bp, Glycine max
actagattcagttctttagatgttgttgcgctgctctcccattagaattagagtcttaccctgataatccattttagtcctttaatgcaaactttattttgtagattaccaaaaatgaaactctaattctaattgaataacaacatcaacagccaacaataccaaacaaaccttatctaagttttattcttgaaaatatcacccgtgatcacaagttcacagctatgatattgccataattgataaactgacctgcgataagaaaatgctggagtttatctcatgcgatgttaatgaaccacacaagttattattccttaatccaccaagcgaagaacgggccactagtttgattttcaacacatgaaa

SEQ ID NO: 151516 - DNA, 196 bp, Glycine max
  unsure (1)..(196): unsure at all n locations
catggcctgtatggcaagactactcttgctgacctcatggatacttgctactaatncaaacataatttctaaaaaggcagagcagtagttcacgagactgccactattgtataatgtctcatgtttgcaatcttatcccatgaatagagtgactatttcttctactaaaactagagactatcattcatgtcacaaa

SEQ ID NO: 151517 - DNA, 465 bp, Glycine max
agtcacctgcggcatgcaagcttcggaagaaagtgatgaggtgcaagcgctatttgcatagctttatatagcccgggtagtcaaagagaagttcaagtccatagccatcaaagtctgaagagagtatgatgaactaagggacgttaatatggccaccgatgaagccttggaatgagaaaccaagaaggcctgaaaggaagaacacgaccaaaacaagttttgaggggctttatagggcagcaatagtgagctcaaactctgaagaggtgaaaggaatcatcatgggtcaaaggcatgatctggaaggacgagctaaaggcttgccttatgtcgaaaagagatttgtcccaacagttaaagtgagactgaagggaatatgtgggccatcatcgatgagtgcaaagagaagctaaatctagcggcgactcacgagcaaaggctagaagatgagtacgccaagatatc

SEQ ID NO: 151518 - DNA, 398 bp, Glycine max
  unsure (1)..(398): unsure at all n locations
attctttctatataagtcttatcttgcgactcattaaagtgaatcacataatttggtgatatacctttgagtgtgtgagatatcaaagtgtgagcaatctaactcttgtaatttctcaataaaagtccatgaagtatcctgaagagtggatgtaagattcagatccgaaccactataatccttggggtcttcttctttcttttctttctacattcttctgctaccattgagcaggacactttntagttntggtggtgctaatcttacaattcctttctctctacaccaaatgatcacccatngctctacgcataaactagcatccacatgcatgcttcgacacactaaaatgcagcanatggtcttcttatangctcaccatactttaagctccaaag

SEQ ID NO: 151519 - DNA, 478 bp, Glycine max
  unsure (1)..(478): unsure at all n locations
tcttcagcaccgcggctgcagctggccaatataagaagaaacnnttctgtttatttatttattattctgggtggggatctagttagataaaacttttgctcatccccattaccacccaagaaataatgaatttgtctagtctcttatctaagcacacaattgaaataatgtccagaattttccttcaaatactcttatttcttttttacttattatatattaactgagtaatatcaaccaacaaaaattgacacaaataataacaatttatgtttcttaattaaataattcaaaatttaaattttaattgacctggagtatagaataaatcatattaaaatattcattttatatatgttcacaatctcccatgaagattagttatatttccgatgaanactattttgtaataatatgatgggtaatatatatatatataatactaatctcgtaataacactcaatacatgaaaaatca

SEQ ID NO: 151520 - DNA, 251 bp, Glycine max
  unsure (1)..(251): unsure at all n locations
aataaatgagataagagaagagagaatgcnaacacagttttatactatttcggcaaagtttgtgcctacgtccagtactcaagcaacccacttgagattttcctttctctttggaaaaatccgtttacaaagtctaaaccacatagggacaacccatccctggtgtttaggaatccttacaacttaagagaccctcagtcccttaatcaatctcnttgaatgaaaagaaagaaagaagaattctttcttga

SEQ ID NO: 151521 - DNA, 351 bp, Glycine max
  unsure (1)..(351): unsure at all n locations
atacaggacagccataccccatatgtgcaagncttgggacgttggatcctttcaaatgaagaatacttactttctttggagaagaattctatataaagcccagaaaataatgagggtcataagtgaatcaaatctaacagattactataatctaattgaattaactaaaactcgtaaaaagaaaaaaaaanaaaactctaattttagatttagttttaaaaacgtatctaattaaacttaaactgaaatacaacccacacatatgtataaaatattattatatcaatcatacttatattaagaaaaaaattataaaaggatcatatcaatttactttctttattatttcat

SEQ ID NO: 151522 - DNA, 216 bp, Glycine max
  unsure (1)..(216): unsure at all n locations
gatgttagnatctcaagaaactaaccatcgattatcaaagtgaatatctcaattcacaaataaaaatagtacatttaataagttggagtgacatgacacctatcataaaaagaattggttgaatgatttgaacatgcatttggtagtgccttatgatattggaagtaaatttaagatcttactaatgcacatataaattgtttgggacatggtgga

SEQ ID NO: 151523 - DNA, 300 bp, Glycine max
  unsure (1)..(300): unsure at all n locations
atcttaagcgacgccgctgcagcttttgatgaanagatatttatttgannattattangatgaagangnngnatgtgatatcttctggtgtcatcttgatgcagtgaagttatgcaatgcctgtaatttgatatttttgatagatagtacctacaaaacaaataggtacatgctcctgttacttgactttgttggtgtcacaccaatagggatgacattctcctttggttttgcctatttggagggagaactgttagacaagtggcctcagttatcttaagaaagagggggggggggggg

SEQ ID NO: 151524 - DNA, 290 bp, Glycine max
  unsure (1)..(290): unsure at all n locations
tctaactctgtacaagaatgaagctctgataccacttgntagactagtgttctcagatatcttaagaagggggggttgaattaagatattccaaactgtttcccctaattaaaaatctatttcactttttactcaagttatgaattcccttaatgacaatcttcttaaatattaattcaaatgaagcaacttgaatatgaatataaagcaataataaataaaggagattaacggaagagaaaatgccaactcagttttatactgtgttcggcacacccttgtgcctacgt

SEQ ID NO: 151525 - DNA, 448 bp, Glycine max
  unsure (1)..(448): unsure at all n locations
agctnttatgatctgtgtgcacaatttattctctgtttcttaaataatgnctccagtgctgaatacaaagcacaagggccatcaattccttctcatagacagattntgccagattcccatcagataaagctttactgaagaaagcaataggtcgtctctgctgcattagaacagcacctatacctctgccagccgcatcacactcaacttcaaaaggtaaatcaaaatttggaagaattagcacagggggggaagtcatgatccccttcatctcctcaaaggccttgacagcctctattccccaagaaaaattgtctttcttagtcaattcggtgagaggttttgctattttaccataatcctggataaactntctataataccctgcgagactcaaaaaaccacgtacccccttcacattctttggttgggccatgcaagatacact

SEQ ID NO: 151526 - DNA, 292 bp, Glycine max
  unsure (1)..(292): unsure at all n locations
ctcagccttcttacaaaatagtaagctgggattgatcatcttgactntaatactctatganggtgtataaatgatgtgtactagacatgcaagacaacaacaagttcacgtaaccaaactaaagtaaaactgatcataggttacctcatcaccctcatctgcatatgaggtgttctcatacatagcacgagaatctggttgctttgcagaaantatttcattgaccatgctntgagcagtcaaaagctctaatctttgtgtctggacctcaagctttcaggacaactccatg

SEQ ID NO: 151527 - DNA, 470 bp, Glycine max
  unsure (1)..(470): unsure at all n locations
cggatcttaagcaccgcngctgcagcttattcttgtataaagtttgattcttgaagtataattgccgcatcaaacttcttattcctagaaggaaattcaataaataggcctcctatttttaatgaagagggttaccactactggaaaacccgaatgcaaattttcattgaggcaatagacttaaacatttgggaagccatagaagttggaccttatgtacccaccatggtggctggaaatacaacaatagagaaacctagagaagagtggtctgaagaagaaagaagattagtgcagcacaatttaaaggctaaaaatatcattacttttgttctcggaatggatgaatattttagggtgtcaaattataagagtgctaaggatatgtgggacactctacaagttacacatgagggaacaattgatgtcaaaagatctaggataaatactctaactcatgagtatgaatt

SEQ ID NO: 151528 - DNA, 256 bp, Glycine max
  unsure (1)..(256): unsure at all n locations
gatactactctattttgcaaagattatgggagtcaattcttaatcgtctagatatatatatggatgatatcatattcggcgctactaatgactctttgtgctaggattattcccaacttgtgcaagtagagttntagatgagtatgatgaaagaattgaagttatttcttggacttcagatcaagaaaagagacataggcatattcatacatcataagtacgtgaagntacttctaatgaagcttaatatagacca

SEQ ID NO: 151529 - DNA, 453 bp, Glycine max
  unsure (1)..(453): unsure at all n locations
agcttatgagaccaaagcatgacaaagaatggttctctcaatctaattnttatgctaatctagtaaatcttgtcctattctttatatagctttatgattatccaattgattcaagagcaaagcgcaacctgcacatccacgttgtatcattaataagcaatatacaaaggttgttggcagttaattgaacaataatatattcaaatcaaatagatatctcatgacacaaatatactgaaagcgcactcaatttacaataataaagcaatcaaacatacaatttataggtacgaaaaacaagagaaagacacacattataatcatagataaatntttaaagcacaaaacaagggaatagaacacaataattttgcatcgggacatcaattgatccatcaaacacaatcattntgtgattaanagcaagagaacaaaattgaatatcataaaaca

SEQ ID NO: 151530 - DNA, 302 bp, Glycine max
  unsure (1)..(302): unsure at all n locations
ctaggttgtagatagatntctctgggtgtttcttaaacatttgttatattntatttggtntggattatatcgntaaatntggaactaaatttaaataatatntaagtaagttttaaaaaaaaaataatttcaataaaaataataattaatcatcaatattatattataccataattttcacgcgaatcggtgtttacttcaccaaaaatgagctccaaacatattcacaaaaacaaaagcaaagtttagaacagagaagataattccccatgttccaataagttttatgtcaacattctcat

SEQ ID NO: 151531 - DNA, 391 bp, Glycine max
  unsure (1)..(391): unsure at all n locations
tattcgntgaccacagagtggtacctggagatatgtcgcgggggtcaagagaccttggggacgtcaggtggggtgctattgcccaaaaccaagattgaccaatcccgacccaacccgggcatagtcggtcagtgaaaacctgtggaggcctctggtaatcgattaccagtctgtgtaatcgattacacagaggaatgggtcactggtaatcgattaccaggtatgtgtaatcgattacagagtgccttatgcaggttttcatgtcctgaagctgtgtgattcaagtttggcctctggtaatcgattaccaaggctgtgtaatcaattaccagagatgaaaagccttgagataccccttttacttgcatgtagtggttatgagaagcattgt

SEQ ID NO: 151532 - DNA, 333 bp, Glycine max
  unsure (1)..(333): unsure at all n locations
gcttcttgattatatttatatggagaatatataagaatgttatttgttcttcagaaaactaaaattaacttatgcattagttaaaatcaactntntttcaaaaagttcattttaacttatgttaagttaattgtaggttatgggagacaatttatttcatcttntttctttttattttcttttctcataagtgcttatggagaaacttatccaaacatggtcttaatgaatgacatttcgtttggatggaagacaatattagatgtacatgatctgattaaattgggtagttataagatggattgaatccaattctcgcaatcacaatatttt

SEQ ID NO: 151533 - DNA, 342 bp, Glycine max
  unsure (1)..(342): unsure at all n locations
agcttcngntttaaatttcgagctgtctcgatatatttctggactcaaaccgacttccgagataaatggtattgtcggtagaaatatctaccagcttccgttttaaatttcgagcgtctcgatatatttctggactcaatcggacttccgagagaaaagttattgccgtagaaatagctgcgagcttgcgttctaaatttgagtgtctcgatatattacgggactcaatcaggctttctagtgaaaagttattgtcgatcgaatntgctacgagcttcgatttggaatttcgagcgtctcgatatattaccggactcaataggacctcccagtgaaatgtta

SEQ ID NO: 151534 - DNA, 372 bp, Glycine max
  unsure (1)..(372): unsure at all n locations
actatagannnactcagttgtagcaaattcgaacgacaataacagttcactcggatgtcgttttgtgtccgaatatatcgagacgctcgaaatttaaaaccgaaggcagtagcaaattcgaacgacaataacaattcactcggaagtccgattgagctccgtcatatatcgagacgctcgaaatttaacaccgaagctcgtagcaaattcgaacgacaataacaattcactcggaagtccgattgagtcccgtaatatattgagacgctcgaaatttaaaaccgaagctcgtagcaaattcgaacaacaataacatttcactctgaaggtcgattaagtcccgaatatatccagacctcagaattaaaaccg

SEQ ID NO: 151535 - DNA, 375 bp, Glycine max
  unsure (1)..(375): unsure at all n locations
tctggcttcaattcattagtgggctttccttctgtgtccagcatcttgggatgttcccagcctttgatgacagctttccaggttctgctatccagtgatttgaggaaggccaccatccttgctttccagtattcatagttggctccatccaaaattggtggtctgttcactggtcctccttctttctccatgttcatcagaatttatctccctagatctcactcagtgatttcgagtgcctgctctgataccaattgaaattctgataccaatgccagatgtcgtacaggatgtcacgacatcacgcttcagaacatgcagattatatttgactgtntgaacagattaaacaagaaaatatcacaagagaattgt

SEQ ID NO: 151536 - DNA, 307 bp, Glycine max
  unsure (1)..(307): unsure at all n locations
actcagcttctcaagaggtgacttagttatgagagggctatgtgtagctaatctctagcttctcaagaagttntctcaaagaagcttctcaaggaagttctctcaagaaagcttctaaaggaagctacctagtctataaatagaagcatgtgtaacatttattggaactttgatgaatgagagtcttgtgagacatacttcaaagttccacttctctccctcttttgttccttcaatttcgtgcttccccctctctctttctctccctctttcttttcctccattgaagcatccttccaagttctta

SEQ ID NO: 151537 - DNA, 266 bp, Glycine max
  unsure (1)..(266): unsure at all n locations
tatgacagtcaccgctttatgagcgctgtacaccaacagcacttctaggccatcaaaggatggtcgtttcttccggagcgacgcgtccagctcaaggacgacgagtatactgatttccaggaggaaatanggcgccggcggtggacatcactggttactcccatggccaagttcgatccagaaatagtccttgagttttatgccaatgcttggccaacagaggagggcgtgcgtgacatgatatcctgtgtaaggggtcagtggat

SEQ ID NO: 151538 - DNA, 286 bp, Glycine max
  unsure (1)..(286): unsure at all n locations
aagtctgaatagagtatgatgaactaatggacgtcaatatggccaccgcttaagccttggaacgagaaaccaagaaggccccgaaggaagaacacatgccagcaaaagggcagcaataattaactcaaactccgaagaggtgaaaggaatcatcacgggtcanaagcatgatcttgaangacgagctaaaggcttaccttangtcnaaaagaaatttgtccctacagttaaccaaactgaatggaatatgggccggcttcatgattgtagaagaacttatctactg

SEQ ID NO: 151539 - DNA, 455 bp, Glycine max
tccttagagtcacctgcggctgcaagctgccctcttactctcctaggcattaatttctttttctcattcacacactatagcctttggagccaagatatcccctgtgctctaaattcaaccatttgtgataaccgcctatgacaccattgctacttcccctaagttctttatcttttccttccactttattccatgccttagagatcctctaaagtatattcacattagcttcattgaaacctcacgtgatgaaaggaacgatggtctctttcgatggcgcgcctctcatagggtatcctaactgtcttactgccaacacgagattataattaatacatcccctcgtccctatcaaaaggacatttggacatcctttacatgagcataacactgctacccctccttgtttccaccatgggaaccaactaatgaacgctcttgtcatgcctgacaag

SEQ ID NO: 151540 - DNA, 145 bp, Glycine max
caagtccatagccatcaaagtctgaacagagtatgatgaactaagggacgtcagtatggccacaacttaagccttggaacgagaaatctagaaggcttgaaaggaagaacaccacccatactagttttgaggggctttatagggc

SEQ ID NO: 151541 - DNA, 365 bp, Glycine max
cctgaaatttgataaaaatgtttatttagcacacaaaatggaagtactaagtatttattacctatacttaacagaaaatacttatagcactacaaaataaccataaactagggaagtttgatacaatttacacaggttttatacacaaaagttagtcgtatcatcgactaacagcagccaactatagtctacaagtgaatgctaaattttaaagggggtataaggggaaaatatgagaatagtataaatgaatatgttaaaatgaatgtgtcgagataaaagaaaaaaaattgatggaatacaaaaagattgcaatggaaaagatataagttagacacatactaagcaaaatactaaaggaaatc

SEQ ID NO: 151542 - DNA, 309 bp, Glycine max
  unsure (1)..(309): unsure at all n locations
caaaagtgactccgtaaacaagagcttcaaggtcaatggacaccaacttaagccattcctcaaaaacccttctttaatggacgtaatggtggaagagacttccttactccaccctactctttctccaccatgacttaaggagttttttcttttcctatctccttctnntactttagtacatttgnctgattctatttgatggtttaattgcttttaatcttttaattgtgctacattgacgacaatgtgttgtttaataaggcgagagtgtctctgctttgagttaatactttaaaatttagttggata

SEQ ID NO: 151543 - DNA, 396 bp, Glycine max
  unsure (1)..(396): unsure at all n locations
tgggacgctactcttaaaacaaaaatggcatacaacctccttccataaatacaaacatcaatgtaaatttagagcaagcttatgcgcatatttccttacgaacgttcacttgcacaagacattctattaactaagaaaaatgcacccatatacaatcaaggcagcttcgttacctagattatttacatgtacttccaaggtgtatttgttacctacatcacacacatttcctttgctaaattcacatacatgcatactctaagcactttggctatcgaaaattgcatacgtgcacatcctggtatntctaatacctatacatacacaaactttatgataaatcttgactatctacacaataaggtgctacatttcatgctnttttcaagtttttgg

SEQ ID NO: 151544 - DNA, 343 bp, Glycine max
  unsure (1)..(343): unsure at all n locations
ntacttctcaaggaagtttcttaagaaagcctctcaaagaggtgatgcttatctattagaagctaggggtgtgtgtagctaagctctagcttctcaaggaagtttctcaaggaagttacctaggctataaatagaagcatgtgtaacacttgttgtaactttgatgaatgagagtcttgtgagacacacttcaaagttccacttctctccttcttttttctccttcaatgtcgtgcccctccctctctctctctctctctctctctcattcttttcatccattgaagctttctttctaancttcttatccaaggcttattccctacaggatgatgtctcctct

SEQ ID NO: 151545 - DNA, 402 bp, Glycine max
  unsure (1)..(402): unsure at all n locations
aaatcacttgaaactcgaatgaagattatattaaactgcatggggtgcggttctaatctgacgttatatgaggaaatttcttgcttcaatttaatacaaaaataaatgtacttgaaagaattgaaaatgtaactacagaggatctcaatccaatgaagataagatactcatcgaaagagatgttgtttttcttttagtctctcgtcaattagcaccaagttattaactaatttgaatatacgagggattaaagttatattttataataaaaaattatgtgattacacatcaaatttcttgataaaaatgataaaataagtcaaatntattgagctggacagatcaatttggaccaaaaaatgttggttcaattggacaaatgatctgtatgatagattcatt

SEQ ID NO: 151546 - DNA, 127 bp, Glycine max
catcgcttctccacttcgaaaactcaataagaatataagctgcacacatcacagcttcgaacccagtaaatgtagcaagtacgatggatagaactgctttcttattaagctgttgtgccaccaatgt

SEQ ID NO: 151547 - DNA, 408 bp, Glycine max
  unsure (1)..(408): unsure at all n locations
gaaagtttataactgatataaaaacttaaccaaaagaaaaagcgataattaaagtgcacagcggaaattaaagagtgtaaggaagaagaagtcaaacacaagagttttatactggtttggaaacaacccgtgcctacatccagtccccaagggacatacggtccttgagatttcttttcaaccttgtaaaatcctttacaagcaaagatccacaagggatgtaccctcccttgttctctntgaacaaccaagtggatgtaccctccacttgaactgatccacaagagatgtaccatcgcttgttctcagtcacaacaacccaagtagatgtaccctctacttgtaccacaaaggatgtaccctccaatgtgttaagacaaagtcttcaggcggttagtcctttgaaac

SEQ ID NO: 151548 - DNA, 336 bp, Glycine max
  unsure (1)..(336): unsure at all n locations
tcnacacaacaacacacaatctaggtatccaaaacccctcaatttatatggatttcaagggttgagaagtgaaattgagaatgaggtaaatttggagcanactctcacctcacacaagtctataacatcaatttaaacttgctcaaactggatttacacctaanattccaccgaatcaaaatttgactcctcaacacccaattttaccctagaaatggctctttgttcactttggtcatttggttttctctcttgtacagcccaagctttctcataagtcctaaatgacatntcaagctaggattaactcactttaacctcctaatgcccttaaat

SEQ ID NO: 151549 - DNA, 463 bp, Glycine max
  unsure (1)..(463): unsure at all n locations
agcttctagccaaatggacttaccttgaattaatttctttgatangccctttgagccttgtttccctttccttgttttgaagctcactacaagccttaagtgaaaaaccatgatatcaccatatccttaaggaattttggagctttggaattgttttgggaataagtgtgggggggtttttgtttcattggataacttgttttgttggctatacttcatgatgtattttgggccatacttgatgtacattgtatattggttaaatgttggacatgctgaatgaaatgttgtttctcaaaggatatagagcaaaaaaaaaaaaaaaaattctaaaatgaaaaagaaaagcaataaagttgagtgaataagatcttaaatggcaaaagaatgatgagactcttggttctactctttatgtgaaaatattatctttacttcttatnttnttcttattatgcactta

SEQ ID NO: 151550 - DNA, 473 bp, Glycine max
  unsure (1)..(473): unsure at all n locations
tnctagagccattcctgcgaaggcaaacatttggaaagttagtttactatatatataacaatcattacaaacaagggccaaacaacacttctcatggcacgagcgtcaacatgcactttataaaataatcatattgnggtcgtgctattttatgacacatacgtatttgcacacataaaaattttgtatgaagcattntacgacacctatccatgtacatatatattttttttttgacaaaccttttcatgctacatcctatatatatacacacacacattnttttggaaggctncttttgttacctactcacaaatacacatattttgaaaaacacntttacgctacccatccaacactnttgtaaggcacttcatgctatatatattcctattatgcaggcatttattcactttctgaagcatntattgacatttgcaagcattcatgctatatattactattactaccgt

SEQ ID NO: 151551 - DNA, 348 bp, Glycine max
  unsure (1)..(348): unsure at all n locations
agaagaacactgcatataactacagtcctctaatcataagagcaaattacgggcaatacctgtcactagccatgaaaaattcactaattcactaaaaattctatcaatattcacaaaaaatcattacttggttgtattgtagggagctgcacgaacacaagctcccattgccaaaaaattatggcataggatctcttactaagatgaaatgttgtagcagataacatcattcaagaataaacacaagcacctacagtgcaagatcgtatactactcgaggcctctntatgatggaatcggcgttgccggaataatccaacatctactaagcgctatgagcaacgagca

SEQ ID NO: 151552 - DNA, 429 bp, Glycine max
  unsure (1)..(429): unsure at all n locations
agcttctacttatgtggcagggctggcttncttcactttcttgnctccaacgcgagctctgaccactgttcttccttcccgcgatgcttcttttcatgtccgcctgagtgggcttatagcctaaaccatacttcccacgatttccttgggtttttatcaggctagttatgccgccattgtctttgcctaaacccatcccgggttcataaccgttccccaacataactcgggccatcattaccgccgcatcggacagacaaggttgcccaaagagggagtccacggaggaaatgctgaccacctcaaaagactggaaagcggtttctaacgattcttctgcggcttccacataaggcatggaggatgggcagcttaccaagatatcttcctcgcctgacacgatgaaccaagtgcccctcactacgaatt

SEQ ID NO: 151553 - DNA, 268 bp, Glycine max
ccttagatactcagcttattggtcttctcataaagatcaatcccttgtgtggaattttggtcacggttgacttcttgctccttgttgaaatggttcctcggatgattccttcagtttaagccctgtgtgaaattcctcctttggttgaatcctgacggcccttcttggttgtagccttggaatctgtggcgattttgagctcccatgtagttcaccttcctagaagaatcttcttgggcaatgttgtacccatgtgtaggcgttcttt

SEQ ID NO: 151554 - DNA, 430 bp, Glycine max
  unsure (1)..(430): unsure at all n locations
agctngngcattctatatcctaatgatgatgntccatatgntctcaagacaggactaatacatttgttgtccaagtttcatggtcttgcaggtgaagatcctcacaagcatattaaggagttccatattgtttgttccaccatgaagccccctgatgtccaggaagatcatgtctttctaaaggcttttcctcattctctagagggactggcaaaagattggttgtactaccttgcccctaggtccattactagctgggatgaccttaagagggtgttcttggagaaattcttccctgcatctaggaccactgccatcagaaaagacattntgggcatcaggcaacttagtggagagagcttgtatgagtactangaaagattcaagaaattgtgtgcaagttgtcctcaccaccaaatttctgagcaac

SEQ ID NO: 151555 - DNA, 353 bp, Glycine max
  unsure (1)..(353): unsure at all n locations
tgcagcttgatgtagaaagcgtgaagagtagtcttttactttatttgttgacacaagggacctgnaatatgtcaaggggtacgaaaccttgggacatagagaggtgtatttacaaaaacaacttggcttatccgaaccaacccagcatattcatccgtaaaaccagtgatatacctaaacggcaagctctggcagcatccataaagaacaaatatcatgaacaagagctgtttgcatctggcactattatcttgggtgtatttaaaaacctctgttatcataccatcgtggtatcttacacgttaaaatggacagatttagtactctatactatttattttgatattattcta

SEQ ID NO: 151556 - DNA, 405 bp, Glycine max
tcatttgaaggtgggcaactggggatggtacgttaatgtttgatttatggaagtgggagagttgatttgcaccatcgcccgatcgccacctagtaccacatatgatgggtgccccataatccactaagagttagtcttcctactttttgttgttgaccacagagtggtacctggagatatgtcgcgggggtcacgaaaccttggggatgtcaggtggggtgctattgcccaaaaccaagcttgaccaatcccgacccaacccgagcatagtcagttagtaagaacctgtgacgtacctaaacaggcgaactcctggtagtcaaccaatataagaacaaagaccacgaagcaataaggcttgtgtggcggctggccagctatgaatcttgagtggtatctggaatt

SEQ ID NO: 151557 - DNA, 275 bp, Glycine max
gatgtatgatcagagcacgaatgcacgagaatagactcaaagcacacatagaaaaatgcatataagcacaagggtgggcacaagcacatgagagtgaaagcttcagggtataaagaaacttcatgagccgtctgttttaagctaaaatttgtattgctcgcttaacgcacagcccgcccttatcgagtcaatataacgattggttttaacaaagccttgtgcttatcccaacctcgcgctaagcccaattccaaattttcaaatcccagaaagtt

SEQ ID NO: 151558 - DNA, 451 bp, Glycine max
  unsure (1)..(451): unsure at all n locations
acctgagtcaatgaggtcctgannttgatctgccttatccatgtgacctattttattgttcaaaacgaatatctcagacgtaacttctgtagacccaggactggagaaactctgattaggttcatatgaatcaccaagtatggatgttgaccctggattctgagtagaatatgggctaggactcagagtatacacagaagaagaactcggtgataattgtgccctagctccagaacttagctttccctataacatgagagtgcaatcagtgcatacattaatgcaaaactcaaagatgggctgtagaacaacattcctatgcacacacagaataaaacaatataatttaagtaatttgctcaagataccaaatatgattcttaacaagaattaagtagtatgttatttgaggcacaaagccattaaatgaaacaattagtgcagaaaagca

SEQ ID NO: 151559 - DNA, 465 bp, Glycine max
  unsure (1)..(465): unsure at all n locations
ttttgatactntgaaacaaaaattgacctctgccttcataatcatgtttctttattggacactagatcctgaaataatgtgtgatgcaagtgattatgtaataggagcagttctgggtcaaacgaaaaataatatttttcatgtcaaacactatgcaagcaaagttntaaatgaagcttaaaaaaattatgtctcaattgagaaagaattacttgcaatatagtttatgctttggaaaaatttacatcttatttgatatgatctaaaattgtggtgtttactgatcatgttgctataagatacttggtagttaaagcctgattctaaacctcgacttattcgatggattctattgttgtaggaatttgatttcgagatcacatgatacaagggaagtgataattatgtatctaatcatctatctatgctgactattgacgaggtgaccacacaataacttgagat

SEQ ID NO: 151560 - DNA, 475 bp, Glycine max
  unsure (1)..(475): unsure at all n locations
acttatgtggcacggcgggcttacttcactttcttggctacaacactagctttgaccactgctcttccttcccgcgaagcttcttttcatgtccgcctgagtgggcttatagcctaaaccatacttcccacgatttccttgggcatttatcaggctagttatgccgccgatgtctttgcctaaacccattccgggttcataaccgttccccaacataactcggaccatcattactgctgcatcggacagacaaggctgcccatagaatgagtccacggaggaaatgctgaccacctcaagagactggaaagcggcttctaacgaatcttctgcggcttccacataaggcatagaggatgggcagcttaccaagatgtcttcctcgcctcgacacgatgaccnagtgctccttcactactaatgataacttttggtggagtgtggagggcacaactcccattgagtggtatcacgg

SEQ ID NO: 151561 - DNA, 457 bp, Glycine max
  unsure (1)..(457): unsure at all n locations
agcttagagagaaagcttcaatggagggaaagaatgatagagaaagtagatantttgaggggggcacgaaactaaaggagaataaagggagagaggttgaactttgaagtgtgtctcacaagtttcacattcatcaaagttacaacaagtgttacacatgcttctatttatagcctaggtagcttccttgagaaactttcttgagaaacttccttgagaaatttctttgagaagcttccttgagaagctagagcttagctacacatacctttctaatagctaagctcacctccttgagatgagaagctagagtttagctatacacatccttctaatagctaagttcaccccatgccaaaatacataaaaatacaaaaaagtccctactacaaagactatttcaaatgccatgaaatacaaggctacaaccctatactactagtatgaccaaaataca

SEQ ID NO: 151562 - DNA, 476 bp, Glycine max
  unsure (1)..(476): unsure at all n locations
tttagagagaggggagaccatatttttcttcttctcccaagttcatacatgtgttcttgatttttattccatgaaagcttaggtaagttgtctcaaatccttcttttggacatgttttcttcgctagaatcttgctagtttctcatctatggattcatttttttttcattcttagaagttggagacataagcttttatgtccttccaattcttaaaccctaacctattattgattagaagctagcttcaataggagttattttttaatgcgagaaattcatagtttctgccatgttgtgaactgtatggtgcaatgtttttcttactataatcatgtcaaaaatggattccatgcatgccaaaagctatgttttgatctaaaattcacttaaaaaagagttctatagagaaagttatgagaaaatcgagtttgtagtgattntgtaagaaccctaatattggttcgagttgcatct

SEQ ID NO: 151563 - DNA, 463 bp, Glycine max
  unsure (1)..(463): unsure at all n locations
agctntaatgtttctttgccatcatcaatagctcctttcatataaaaaattcatatacatgactgacaacaaaactttaatgaataaacataataaggaacgaaaagaatatgataaaaaatgctacctcaaatacaacaacagttcagaattcttcatgcaacatgtcatatggaccagggaaaaaaaacaaattcatttaacaatcaagtcacataaagagataagaagaaaattaagaaatgcagaatttaatcgtattattgttgaaagcacaggagacataaagggagtaatgaatagttgtaccttggaaatcgcataaactaatgcaatgcgtgtttatgattggaattttactaagttattgtggaatatgatagtctgaatatgattggggatgaaattattgggtcttgctatgggataaaaggtttacacaacaatttataagattgtcatt

SEQ ID NO: 151564 - DNA, 372 bp, Glycine max
acgaagaattctttttgcagcttttatatgagaagaggtaggagccttcgtaaagcgacacacaactcccaccgcatatagaatatcgggccttgtattggttagataccttaaactccccacaagactcttgaagaccgtggagtctaccttctctccttcatcaaactttgataacttcaagccaccttccatatgtgtgttcacgggattgcaatcaagcatattaaatttcttcaacacttcttttgtgtagcttccttgtgagacaaagatatcattctccgtttgcttcacttccattcccaagtaatatgacatgagtcccatatctggcatatcaaattcacgagacatggacttcttgaagtc

SEQ ID NO: 151565 - DNA, 196 bp, Glycine max
cggggagtggcatgttaaagtcaaataaagtcaaaatatgccaatcccaattaaatgtagatctaaagactaaagttactattataagcattattagacaaggtgagcaggatgcttatgtatgtacttacgattaaaatgctaatttgaactacctaacaaagaactgatctgcagatgcactttagaaaaacgc

SEQ ID NO: 151566 - DNA, 293 bp, Glycine max
ttactggtgaaaatcttgaaatcatcctttgattgacctttgagctttgtgtgatcaccttttgttatcatcattgttatcgatcaaacatatttgcatcacttttgattcaccatgaagctttgcttctacaacggaagcccttaaaatattgcacacattgagtgttgaccattctattccctgtaatgaccaaccctatctaccagggcctatgtgttaacgcgccctatgtacctctctgagcacttgacttaatgtgcactggttcctcactttacttgtaacacatg

SEQ ID NO: 151567 - DNA, 457 bp, Glycine max
  unsure (1)..(457): unsure at all n locations
agcttcacaacagaagcaagtgtgaacaactttctttacaaatgcgtggtatcaacatcggaagggggtcgtattgcgcaagacgggtttgttggtgcaaaggtctggttggaggaacaaagggaaaaaggtgaccgtgcaaagttgaagggagttccaatttaggtctttttttaactacaagcattttttttatttcatattttttcttttaagagataaaatattataaattaataactttgtaagccacctcatgggtggctctgaaaccatttggtttagttgactcaacttattatatctatcatcttcggatatccggtatactttcccgagtcacacctttgngcattaagcatctttaaataactttgactcaagatntctacagaccatagagataacttctcattgatatcaatattcatgcgtctaatacacaagatcctcaaag

SEQ ID NO: 151568 - DNA, 339 bp, Glycine max
  unsure (1)..(339): unsure at all n locations
ttcccttntccccacaccgacttgtagtaactttcaacattcatgcagatctgtacttgaacatctacactggcaccatgtctcccttcaagcacggtgagggtttcggtctcgacaacggcggagaggttcatttccttcttcctgatttttttagtatacctcttcatgcttaattntaacgtacccaggtggcgccttacccttgcttttattatccttaacaatgcccgtccttgtacttctgccgaagagatttggatggacgaggttttcatatcgactggttcttgattggatgaacttatatgtgggggggagaatccggggcatactgct

SEQ ID NO: 151569 - DNA, 434 bp, Glycine max
agcttctccttccatggcttattctctagtggattgtttctcctctcacctcttctcctttatcttccgctacaactccatggctaaaaataatcattgaaccttatggaagctcaaagatctagtttccacagaagcttctcaagcaagcttccttttgtggtgttcctgaatttttttaaaacatttttgaggtagttttccatttttgtatcatttcagcaaatattgtgaataatgttctagtagagtatttgtctgttatttttgtcactaattagctaagctctgtatgactaaatccaaaccaagtgacttgcatccatattgtcctaaggtagataggacatttcataggttgagtagaaataataggagtgttatagttctgctagaaagtgaatgcatagtcatttcatctcttgatttgtttt

SEQ ID NO: 151570 - DNA, 416 bp, Glycine max
  unsure (1)..(416): unsure at all n locations
ctgcgggattggtcttcaccggtgaaaagatcaaagtgggtcttgtttaagcaaatctgataatcctgctttgataaatgcaaaaaaaacttgggcaaatgaagagggtgagaataaggtagaaacccatgttgtgactgtcattcctatatggccaagtttcccaccaacccaacaatgtcattacttagccaataacaacccttctccttacccaccacccaattatccacaaaggccatccctaaatcaaccacaaaactcacctaccacacaaccaatgctaaacaccacctttagcacaaaccanaacactaaccaagaaataaattntgtagcgaaaaagcctgtaggattcaccccaaattccagtgtcatatgctaacttggtcccatatctacttgataatgcaatg

SEQ ID NO: 151571 - DNA, 69 bp, Glycine max
atcattgaaatagaatgaagcatcatgttggcactgagggaaattgtttcacaattaggcactaaataa

SEQ ID NO: 151572 - DNA, 452 bp, Glycine max
  unsure (1)..(452): unsure at all n locations
ctcaggggtccatatacttacagcangttcttatgagcataaatgttnttcttggaaagccaagagaacaggtaggtcgttcataacctacaagtaacatctaaagataaatgtgaaactaattattgtattacagattataactgaagtagcttaaagatggcctacatttaacaagcttgcaagttcaatatattgatttctttgggttggttttgtaaataagtgatggcttatatgtgctacaaaaataattgatttaaataagttgaatatatttttttgcaactattttagtcttttctatccggaacttaaacattgatccgtccctcacaccttgaggaacaagaatcanaatccatattgagagatatgtcatttcttcaaacaaagatgtctacaaggggaagaaatactatataacccaagagcagttaagaaagcataaa

SEQ ID NO: 151573 - DNA, 309 bp, Glycine max
taaaaaattaaaccaaaaaaagaggttgatattattagaaacatgttgcaaacacctcatagcaaaacaaattcaataataaagtagcgtaagtagactaaagacaccagcaaaatctgaacgtatataaataaaattcatatcggaggtggggcgcacgactgatgaatctacaagagaggaaaaagaaaaggtttggtggagagataaccggacggagtaggcacatgctgtgtggtggcagaggtggtctggagaagtggacaatgggggcggggtttaaggagcgttacgtgagtggtaaaatta

SEQ ID NO: 151574 - DNA, 375 bp, Glycine max
gaggtcattctttattcccaagatgagttttagaatgaatctgaatagtatgcagcaacaaagatattatggtaatgacttatggtcctaactattaactactaagcagtatgtattgggagagatatctattgattctgtttacatatatgtttggtaagtagtgttcatacaatgttgtaggttatggattatgatgaactgtatagaaatatgccttacattagtgtcttaagcctgaacattaccagggatcttatatttcttaatgagcacttgccacacgtggaacctgaaagcattgaacatgattttagaatctgatttcactctattcacggaatgaatcacgtgtagcagatagaggatattctg

SEQ ID NO: 151575 - DNA, 352 bp, Glycine max
  unsure (1)..(352): unsure at all n locations
tttattggttatcacagagaggttcctggagatatttctcgggggtcaagagaccttggggacgtcaagtggggtgctattgcccaaaaccaaacttgaccaatcccgacccaacccgggcataatcggtcagtgagaacctgtgatgtacctaaacaggcgagctcctggcagtcnacagataaaaggaacaaagaccacaaagcaaggaggcttgtggtagttggccagctgtgaaacttgactgatatgtgagatatggtctcttgtaatcgattaccaagggtgggtaatcgattacaaggcttaaaaatgaagacaggaggcttagatggtctctggtaatcgaata

SEQ ID NO: 151576 - DNA, 424 bp, Glycine max
  unsure (1)..(424): unsure at all n locations
cataacaagactttcctaatttggtttaaagatagaatctttggtgatgataatgcttttaaaatgtcaaggaagttggcaggtgggcctaaaagaaatgtcataacttggcaagcgatatcaacaagtattcgttctacacaaaatcacaagatgacaatagtacaatgttaaacattgagggttagtctaagggttgattctcaacactttgctattgtacatgatgacaatcctcgtttagcttccatgccttactttggagtcattgaagaaatctgagagcttaattatgtaaaattcattgtctgtgttttcaagtgtacgttggttgatagcaatatcaatgtgcggactgatgaatttggatntactttggtaaatatgaagaanatcgcttaccagaatgagcctttcatcatgg

SEQ ID NO: 151577 - DNA, 361 bp, Glycine max
ctcgctggcgagtagtactttgtagtaacagcattttctggcgagctgttgcacctcccccctatttctataatagcggagaaaaatttggtaaaggagaagaagaaaaaatcaagtgaggccttcgtacgtttcatgacattcttatgtcttgtcttagcggtagttgtatttgagcttgattatttatgcacccttagggtcatcttgtttacatattttatttattctttacatagtgatctttcttatttaagagagttcgacgatattggtcgaatctatttatcactgtaaagaatttaccgacattgtgtgaatctgttaatactgtaaatgaatcaccgacttctgtataacc

SEQ ID NO: 151578 - DNA, 293 bp, Glycine max
ctttttggaccaaacaattatctattggaaattaaaagcccccggtttggagatctatttgtaaaccaccttcaaggttgttggaattggacaatgcctttactgcacagacctgcgatatgttagtccatatcaatgaatctatggctgctttctcaaggcttcttatggagatttacattatatgccaatcaagactgcctgtcagtttcctagcctttatcaagcaaacttgaattattctggaggtactgcattgcagacatatgtgattacacacttgtttgcggggc

SEQ ID NO: 151579 - DNA, 473 bp, Glycine max
  unsure (1)..(473): unsure at all n locations
gtcacctgcggcatgcaagcttcacttatgaatggatgtatntattggccaatttatggtangagttattntgngtaggcatttgataagtttagcatattgcatctacactatttatttgcatgcaagtttctaatgaagaacttatatccaacttaaatttgttaccgccacaatatatttcttgagctagtttcctttttaaaacattcaattttatttgtaaagggttggatttaaattatatatgtgatgattggatataacatctgcatactggtgcagattttgaatgatgaaaatttcagataaatggaactggttatggtatttgttctgtaactggctttttctttaatgacataatgtgtggtcttcattgaacacctgtatacagaatatattaatgcatgagttgtaaaactgacatgatctggcagtggcaatacaatttcatagaatcaatgggtcat

SEQ ID NO: 151580 - DNA, 469 bp, Glycine max
ctttgctacaacctttgtctccccctttggtaacatcaaaaagttttagaactcggaaatcaacatagttacaacaatggagtagcaagatataagcatcagagtattaaatacaataagccaaactcacaaacaagaaataatcaaaccagaatccaaataactgaaaatgtcaacaaccacaaaacatccaagactgaaatttaaaatccacaagataaataagcaaagtacttagcataataatgtaaattctaagaaactaaaagccaaaatacacggcttataaaagataaataatcagaatctaaaagctaagaagacggaggaggtggtggaagatcgaaactctgacgaatgtatccgacatcctcttcaagctgtgtaagacgaatgtccataccggcaaagcgtgaatctaacgagtcatagctgtcaccaacatacgaacgaagaccccttattcgga

SEQ ID NO: 151581 - DNA, 226 bp, Glycine max
ttttttttgcatgttaaggaaggggagttgaactaaatgttactatcttaaaaaaacacatgtttgtagatatcctctgactagctacccactgggtggttgtttacatcctatggacggcaccatgaacaatatgaattaatttcggtgggattcaatttatgcaattaaaacacaaacgattactgtgatcgtgctgcgaatattgaaatctaacaggcaaata

SEQ ID NO: 151582 - DNA, 353 bp, Glycine max
ttctacgtgggctttctacatcctttgctaaacgaccgactaacaaagcgtggtggcggaatcttctgcacaatcgacttacctcagatttacttggtcgatgatcgatgctgctaactagtaccactcccgttgagaaggtggcttctaactgtgatggactcgccactggtggtggagtgattccagatcatgcatgaaattttatctaccgagattctatattccttgcgggtagttcaactgtccgaactgagttgaaaaccatcttgtaggccttgaactggcgtggcccttagactctatacaattctagttgatctggattctccagcggcggcgcactctttaac

SEQ ID NO: 151583 - DNA, 467 bp, Glycine max
  unsure (1)..(467): unsure at all n locations
agcttatgatcgtattgagagattttttatgtgtttgttaagtcagatgggtttccatatatattgaatttgttaagtggattatgatgtgtgtgactatagtcaaattctttattagtgtgaaaatggctggatatattgctccaagaagaggccttagacaaggtgatcttctttctccttatttgttcattntatgtgctaagggtttgtctactcttataaaggatgcaaaaatgaagagtgggcttcatggagttaaaatctataaaggagctatactatngtttcgcacttgttatttgcatatgaagtttctcactactagaaaaaccagatttaacatcgacggattaacatcgattnttgacaaaaccgatgttaacgtaaatacggtggcataattgtaaataatgtgtattccttaacatcggctnttaagaaaaccgatgttaacaaccacatgt

SEQ ID NO: 151584 - DNA, 401 bp, Glycine max
  unsure (1)..(401): unsure at all n locations
cttagatactcagctctgctaatactctatggctcatgggtttgcttacaaatataatttttatgatagtcatcgngtcactggcaaatgtaaatctcaaggctgtccttggagagtatatgcatcaaagttgtcaaccactcagttgatttgcattaagaaaatgcactgcaatcatacttgtgaaggatctgtcgttaaagctggataccgagcaactaggggttgggtgggaagtattataaaagagaagttgaaagattcacccaattacaagccaaaggatattgctgatgacataaaacgggagtatgggattcagttaaattattctcaagcatggcgtgcaaaagaaattgctagagagcagcttcaaggctcctacaaagaggcatatactc

SEQ ID NO: 151585 - DNA, 420 bp, Glycine max
  unsure (1)..(420): unsure at all n locations
gtcancagcngcccatagntccaatcaatcatgttcagtatgatgcatgcacctgaactcaactctcaaatgcaatgtggtatcatccccaaggaaatagcctaagcatgtccacatgacactctcacttatgaaaactaggtagtaagtgtcgaggttaccatgtcgtgcacaggaaactccccccgcccccatggtgatcagcctaagtctcaaaggagttccaaatcgagtgacatacccccaagtacaagtattcctcctcatgagaaactacaagtacttactgacaaagtttatactatntccatatcatatgaagtatgagacacggacaccatcaatgcactgaccgtggataattaaagaatttaagtcatcccncttccaagattcttataactctntaaccactctatt

SEQ ID NO: 151586 - DNA, 302 bp, Glycine max
  unsure (1)..(302): unsure at all n locations
ccctgcatgtcanaagattaactctcatgtttaatacgatcactgacagatgaccaccaactttgtttaataagaaggacccctttatatgactatatacctacttttctatgagatgccttataccatatataaataataaacggtacaaataaaaagtcaggacccctcaattagctaaattacatatagggggaagtaagttcttatacacatactaacttttggctgtgtaaatgcacacactaggaacttaagttgtattggctcaagtagttattaatatcagtcaaattactgta

SEQ ID NO: 151587 - DNA, 431 bp, Glycine max
  unsure (1)..(431): unsure at all n locations
agctntgcgagattggtcttctctggttaaangatctaagtgggtctaaaaagaggcaaatctgatcatcatgcttngataaatgcaaaaaaaaactatggcaaatgaagagggtgagaatgagggagaaacctatgctgtgactgcctttcctatacagccaagtgtcccaccaacccaacaatgtcattactcagccaataacaaactttctccttacccaccacccagttatccacaaaggtcatccctaaatcaaccacatagcctgtctaccgcacttccaatgacgaacaccacctttagcgcaaaccaaaacaccaaccaagaaatgaattttgcagcaaaaaagcctatagaattcaccccaattccggtgtcctatgctgatttgctcccacatctacttgataattcaacggtagccataa

SEQ ID NO: 151588 - DNA, 391 bp, Glycine max
ggaagctcctaatatctcccacactctttggggtggtgccattcttggatggccctgattatctcacggtccacttggaccccatttctaccaactacaaaacctaagaaaactatattatctacacaaaaggtacacttctctatatttgcataaagggtgtttttcctaaagactgaaagaacttgtctgagatgtcctaagtgaaaatctaggctcctactatacactaaaatatcatcaaaataaacaactacaaatctacctatgaaatcccttaagacatgatgcataagcctcataaaggtgcttggtgcattattgagcccaaaaggcatcactagccattcataccaaaccaaactggtcttgaaagcagttttccactcat

SEQ ID NO: 151589 - DNA, 449 bp, Glycine max
  unsure (1)..(449): unsure at all n locations
gatcttcagtcacctgngctgcagctgaaaggggcaaattttataaacttacatgnatttactatggagatgaaaagagaggacttgaacataggtaatgtataaaacaccagttttgtggtgaaagtaaaaacgaaatatctggctcaaacttgattcaatgaatcgaatagctcacggaaatataagcacccatgatggttgtggcatgtacttcaacaattatattattatagaaactataataattgatacgaaataaaatgtgtggaaatattgagaccatacttcaaatgagtaagtaatatgcatcttgaggttccaagtatatattgatggcttcacagattcatcccttgaatgttanatactaacaagcaatttgaagatcaactttccaggtatgtaaaacacagtaataagatcatctaccgttttataaagaactg

SEQ ID NO: 151590 - DNA, 367 bp, Glycine max
tctgctgcaagtactcactgatattttttgtgtgtttgcggaaaaaagctcattaactatctgataagctggaaagatattagcttgaagctcgttaaaggagcttatatacttcccgaatgccttaccaaacacaccggactggtttaatatttaattgagtgtaatctttattgtccgagtgttaatatttccagcactaatcatgtttgatgtgacttataaaataatgactattaaactcgacaaagttactaccattcatgactattttgtgtggtttgagtgacagtgcaaaaatctcttagagaagaataaattctttgtgaaatgcagcatttgttacttcttagtgagttaagcattt

SEQ ID NO: 151591 - DNA, 462 bp, Glycine max
  unsure (1)..(462): unsure at all n locations
agcnttgtgacgaacaaggtatgttataacttcatttctgttattcagnatatacaaatgagcatgttgtaattcttctagacttggagtgataacatacagtcctcttgaacccttacctcccactctttcatcatgctgagactcgggaagcccatcaggttttgcctttttaatgtactatgaacaacaatcagtaacttcttttgcaatgtacctttcaacaatagatgcttcaagacggtctaaattctttgtatacccttttagatcttcatgtatcactcaaccgggtacatccgctacaaataaatgtgactgcaacatttaatttccctcaccagatgaataattaagtgaataatgatgtcaaaaaaagaaggaggaaaatgcatctctaactgacataagaataatagttgccttattttccaactcatctaactttatgggatcaatgac

SEQ ID NO: 151592 - DNA, 480 bp, Glycine max
  unsure (1)..(480): unsure at all n locations
ctcagctggaaggtgcttcttggaggaaaagaattgggagagaaagagtgatgggggagcacaaaattgaaggaataaaagagggagagaagtggaactttgaagtatgtctcacaagagtctcattcatcaaagttacaacaagtgttacagatgtttctatttatagactaggtagcttccttgagaagctttcttgagaaaacttccttaagaagcttctttgagaaaacttccttgagaagctagagcttagctacacacacccctctaataactaagctcacctccttgagaagattccttgaaaagattcctaaagaagctagagcttagctacacacacctctctaatagctaagctcacctccttgagatgagaagctagaacttagctacacacccnctataatagctaagctcacccccatgacanaatacatgagaatacaaanaaaagtccctactacaaagactact

SEQ ID NO: 151593 - DNA, 452 bp, Glycine max
  unsure (1)..(452): unsure at all n locations
agcttatccttatggcctgcctcctgtcttacccttcgngccaccccagaagatntaagccaagcccctacttttgaggggcaactcccaccttatgaagactatcccgggcaagacgaagaggaaggagatacccatcttggccccctgctccacctcaaagatccatccccgcatgaaccaccccagccgaacatagtccgccatatcccggcctcacccacacccgtaaaagaatttgtttccttcgcggaagataagggaaagattgaagcgcttgaaaagaggttaagagcagtcgaaggcctcggcaattacccattctcggatttggcagatatatgtcttgtgcccaacatcgtcattcctcccaagttcanagtaccatactttgataagtacaaagggacgacatgtccaaaggggcatctctcgatgtattgccggaagat

SEQ ID NO: 151594 - DNA, 341 bp, Glycine max
tcatgggcgactgtatcaaaacagagtgtagaatgcttttgaccagagggtgtgcccgtgcaagttcatagagggagatcttgtcataaagaaagtatcgcaggctcaaaaggaccacagagggaaatgggtcctgaattatgaaggaccatttgttgtgaagaaagctgtttcgggaggagcattgttgcttacaaacatggatgacgaagaactaccttcgcctgtgaactccgatatcgtcaagcggtattacgcataacgcttggggcaattataaggctcaacgtctgaccgtccttcaggactcattgaaatctccaagtctttgaatccttttg

SEQ ID NO: 151595 - DNA, 391 bp, Glycine max
  unsure (1)..(391): unsure at all n locations
agctntgcttgaagcttcaatggagaatgaagaagaagaaagctacgtgagagagggagagaaaaggcttctgaatttctgctttggctgagtgaggagagagaaaagctttttggttttaaataaaaagggttttccctttttccattattttattcaagctctgccacatgtccctatttgattggagcaaaaagggcccactttctctttttgactgtgacccatactcagtcacaaaagtgagaaaaatctgacctttgaaacgctacaatcctgcctcggtttgcgtgccgtttctctgattccagtttctctgcgtccgtcggggccagttttcgaaagcaagcaatttatatatcaaaacgctcagaataaaaccccgagcatg

SEQ ID NO: 151596 - DNA, 420 bp, Glycine max
  unsure (1)..(420): unsure at all n locations
tgtatagttccccaatttgtagtcattntggagtaaattttgtaaataaatcttgtttatgggtaacactgtctctagaacaattccattggatttaatgatgaaatctgtgcattttcaggtgataaagaggctaaattttgaattgccaaaagtagcagttgggctaagcgcatatccatcgctaagtgcagcttcagcacacttagcgcanaggagaatctggcagagcatcaacatcaaagttgtgcgctaagcacaacaagtgccttcagccacgctaagcacgagactggcgctaagcccaatttacttatctgtgctaagcgcaaaggtggcgctaagcacatcatcgcgatttcagggcctatntaaagcttgtcttgtgcataattagggtacaacttttacaacattcta

SEQ ID NO: 151597 - DNA, 260 bp, Glycine max
tcatcttcttttccatcattgggggtgccactaggcccttccagaacattttggaagccgcgtttgttatggaggaagcaacctagctcgtctgggcgaactgggcggcaacctcttcccccttttccttataaataagtaataggggttgttccaaagggtcccttacccccttggctatgcatttctgtttgtttgggagaaaaaaattcgttccttgaagaaaatccaagcccatgtgcttcctgaacgcctcctga

SEQ ID NO: 151598 - DNA, 461 bp, Glycine max
  unsure (1)..(461): unsure at all n locations
taatgcttaccctcngaagattttacttctcgaatgacattaccgcatccatgaaatggagaagacgccccacacgaggagagaattctcaatccaagagagggagaagacataaaacagatagaaaatgtccaatgaataagtgggagaaagccctgaaacatacaggaatagtttgcatcgaggatccgtaacaacagactattatgcagaaaggtcttcgtaccatacaatatctgaacaatagagaattgtcacccagtgaattaaaaataaaggaaaccacgacccatagtggccctctccctttgattgccaaccaaaatccagtgcgctagcaactttctcgccacgcactatacataaacacgataggaataggcgtaatcactcaaagccaaattccccacctataaaccattcccaaaataagtcctattgatccatgatcacgcatgtaa

SEQ ID NO: 151599 - DNA, 402 bp, Glycine max
  unsure (1)..(402): unsure at all n locations
agcttataatatatcgatacgctcgaaattaaacagttgtatctctctttaaattcaaatggncataacttttcacacggatgttcgattcgggcgtataagatgtcgagaggctcgaaattgaacaacggaagctcttgagaaattcaaatggtcataacttttcacacgaatgtccgattcaggcttataatatatcgagacgctcgaaattgaacaatggaagctcttgagaaattcagaatctcgtaacttttcacacggatgtccgattcaagcttatcatatatcgagacgctcgaaattaaacatcggaaactctcgggaaattcaaatagtcataacttttcacacggatgtccgattcgggcgcataatatgtcgaaaggctcgaaattgaac

SEQ ID NO: 151600 - DNA, 339 bp, Glycine max
atatctctatagcttccgctgtttaatttccagcgtctcgacatatgatgcgcccgaatttgacatacgtgagaagacttatgagcgataggatatctccagagttttcgatgttgaatttccagcgtatcgatataatgataccctgaattggagctcactgagacaagttatgagcgatagaatatgaccagagctattcgttgtgagtttccgatgtcactatatgtgaggcgcctaatatggacatctcgagtaaacgttatgagcatttggatatgtcaatagatactgttcgagagattcgagcgtctcggtatctgatgggatcgaatccga

SEQ ID NO: 151601 - DNA, 299 bp, Glycine max
  unsure (1)..(299): unsure at all n locations
tacacctccatcagggatcaacgataccatctccgccgatgatgatgcttctatattgtccaagaatatcctctgtagtcctatgctaaatgtcataaacaggaatcttatatattttcttctactaacctcgccatatgaactgaatacagaatttcaatggttcncattgattgttattgtcattggacaatgacatctgtttacgttaggcactatgacaattctcttgctctttcttgcgcgtacttccgagacacatacataacttaaaagatactcatgtaaagaaaatctct

SEQ ID NO: 151602 - DNA, 454 bp, Glycine max
  unsure (1)..(454): unsure at all n locations
actggatgcattagttaacttggtaacccagctggtcttgaatcataaatctgtacctgttgcaagggtttatggtttgtgctcctctgctgaccaccatacagacctttgcccttccatgcagcaacctggagcgattgagtagcctgaagcttatgctgcaaatatttacaatagacctcctcaacctcagcagcaaaatcaaccacagcagaacaattatgacctctccagcaacagatataaccctagatggaggaatcaccctaacctcagattgtccagccctcagcaacaacaacaacaacctgctccttccttccaaaatgttgctggcccaagcagaccatacattcctccaccaatccaacaacagcaacaaccccagaaacagccaacagttgaggcctctccacaacacttccttgaagaacttgtgaggcanatgactatg

SEQ ID NO: 151603 - DNA, 471 bp, Glycine max
gctgttctgatttttctaattcttaacaagctttgaacaatatacttgtccttcatttaactgtctttgggcttggtggccacgctcaacaaagtactttcgacacctactgtacgttgatttgaccaatgctgttatgggaatgttgcaacaatcctttaaagccttattgatacattctgagaggttagttgttatgtggccatatcgacgtccttctctatcataagtcatcgtccatttttcctttgaaatgcgatcaattcatgttgctatggctggactcagttcacgaaatttttctaaattttgataaaaaaaatgtgcttgcaaggagtgtaggctgcataaaattagttatgaataaaaattctaagtatatatgaaagttaaataaacgtgaccatcaaatatgaaatcttacccaatttcttcaacatttctttgtgtttggcattattgaatttccga

SEQ ID NO: 151604 - DNA, 429 bp, Glycine max
  unsure (1)..(429): unsure at all n locations
gcaagctngtaacactgacaactatggangaaatatgcttttgtgtttaagtaatactacattattttttaaccanaaggcaagcggagagacaatgaattagtttcatataatgcatataattacataaaattaaaatataacatagatcttagccattctctcaaactgatggatatttgttttgttaatcacatggctcgtaacaacactagatgaaatcatgataccaacaaatgagcttgactcataaccagaacttaatggcgaaagaatgctagagatgatgtatgttgccaaacaaaggaggtagaagtaatgatattcccaaaccctaacaagaatggagattagtcacctaacattcagatccgcaataaacaaagtgtttcaaattcaaccaggaatactcgatcatctggttcatat

SEQ ID NO: 151605 - DNA, 205 bp, Glycine max
ctgagaattctggaaaccttttcaacttttgtaaacatatagaggaatataaataattgataatacaccaattttcccgtcaagaatatttaatgggtggtaaaacactttaaaaaaaatagttgcatttattggcaatataaaaagatatttgtactgtgagttaaataattcttttttaattagaaaagtttattatgattat

SEQ ID NO: 151606 - DNA, 262 bp, Glycine max
acttaaatggccatttgctagaatgtcattacatagacacaccaccattgagtgtaacctgaatgtctcttgcagatgctcatcccacacatcaaccttgccttacataatattctcaagtcttcaatcaacggagtaagatacacagtaatatgattccctaactgcctaggacttgctatcatcatacataggatatatgtgttttacttcatgcacatcgaaagagggaggttgtatattattatcgaaacaggccatg

SEQ ID NO: 151607 - DNA, 457 bp, Glycine max
  unsure (1)..(457): unsure at all n locations
agcttggtggagttcactgagatatatggaaggttctggttgggttacaagcctacatatgccgacaagaagatggttaccttataaaggaaggagagaagcctggcccatctacaagggcgaggactacaagtggaaagggtccccatttgtcacatcaacgaaagctttgtcaggcaagatggatgcgtgaggattangttgcagtgatagatgaagaaacccctctagaccgaccaaattgggtgcagccatgtcctccaaactttgaattggggaattgaaaaattgtcaaacgacccaagaattgcatgacaaattcaatgtaatccaatagttccaaccctattgttgggcctacgcttttgggtctgctcttttgtaaatccgatgttgagtcctgtaagagtaacaatatcgatgactctgacgtcgactttgagtgaccgatatgtca

SEQ ID NO: 151608 - DNA, 423 bp, Glycine max
  unsure (1)..(423): unsure at all n locations
acagaccttccatctttaatggagtgggttaccactactggaaaacctgcatgcaaatctttatagagacaatagatttaaatatttgggaagccatagaacaaggaccttatgttccctctataatagccggaagtgcaacaatagaaaaacctagagtagattggactaacgaagaaagaagattagtacaatataatttaaaggccaaaaatattattacatctgccttaggaataaatgaatactttatggtttcaaattgtaaaagtgctaatgatatgtgggatacactacaagtaacacatgaaggcacaacagatgttaaaagatctatgataaacactntaactcgtgaatatngaacttttatgatgaatgtnaatgaaagtatacaagacatgcataagaggttcacacaca

SEQ ID NO: 151609 - DNA, 335 bp, Glycine max
ataaaaaaaatttaaaaggttaacaagatgagtatcttttataaggtataagtcaacttatacttctcaccttttgaagagatatataaaagagaggttctttcatagttaagtccataaagtgatgtaacttatgaaaaaagctaaactcatttcttcttcttctttcttcgaaatacatttattttagggaatgacgatcacttcactcattgattacaacagctttgtggtgaaagctagtaaaaatggaggcaaataaacattatgtttgtggctctcaattgtgtgttcaattaatcatgaattgaccgatgcacttgatggcataagat

SEQ ID NO: 151610 - DNA, 452 bp, Glycine max
tcatgaatcatcatcggattcgctcggtgtttctatgagcactttttatcatgctccttctttcccttcatccttctctatctacaaaatcatattcatattctcgctttcacatttcctcttctctgccccctaacttcaacaatggccataatcatcaacacacttcaacttcaccttctgatgttcccatcaaagcccccattccttcatggatgaagaagggtcctcttcttcttcaaccccacgagctctttcacctctccaaccccaaatccaagaagttaagccggataaacatgaactttctgatatagctttgatgggaaaggaggtaccacggaagacggcaatgaaaaatattgtggagaaggttgaacagcttcacaagactcagaattcatatgagactcgagttggtccctctatggttgaaactctggaggatattt

SEQ ID NO: 151611 - DNA, 243 bp, Glycine max
ttatgctccaagatcaacttattcctgcacatacagagggtattccgcttggcctcattaatcatatagcgatctcttccatcaaccacacaatcaatatgtacacgagagactccccagtacttagacatcatgaatataatacatactctacacaaggcgtcacaatcatactgtactgactgttgaaagaatgccaactctctcttttttgagaaccgaataccaaatgttgattgacca

SEQ ID NO: 151612 - DNA, 454 bp, Glycine max
catgcaaacttaatgttctttgacatcctaaaactgttgtgcgaactcttaatccaggctcatctcccatgatcatggactttcatccaatgcaacaatctttacttcttgggctgctgctcttctaggcttgttaaaacattgatttatttatacagtagcatgtcattgctatcaagttgccatttgacctttattagatacaatatgtcagttggtacacatgtgggggacaattgatttgtgggaagtgggttctagggagcagttggtctcaaggaatttcaaaagattgggatcttagtgcatgttcaatgccatttcagggtatcatctctacctcttatgtatgaaatgtctttataggaatacgaatgtgtgcctaattgcaagagttgtatatttgtcatgactgataaacaaactaattattatcaattcacgctgctcttgc

SEQ ID NO: 151613 - DNA, 361 bp, Glycine max
attaaactaagctctactcaccatttttttgatgctcttttgatattttacaaggatggggacaccactcagcctactgataatcatattgatattttaatgtgagtttatgatatattatcatttgatatatttattgacaaatatttgtaaagacaatgcttgaaggtttattaaaaaaattaaaattaattttggaacataaatgacaggtctgttattgatcaatctgtattatatgtctgtgccattggatacatgtaaatatttattattaaaagtataaaaatgatcttattagaaatgaagaagtttgaaaatataataatatagactttttaatctatcttattatttaaaa

SEQ ID NO: 151614 - DNA, 438 bp, Glycine max
  unsure (1)..(438): unsure at all n locations
agcttctgcttcattcggnctcttcttctcctctttattataaagncttggacctatcagtttttggtattggcttaagattaacacttttagtttgtgntgtggtggtggttgttgtancaaaaaaatcccccatgttatcttcttctcctcctccttcttccttggcttccccatcaaaacaagagaaggagctatgtgtatagctaattggatgataaacattcacagaattactattgcagtgatcaaatgggattgcagggtgtgacaagaatgagttatcaacaatgaatgcttcattgatagacttanaattgaagttatagatggcatctnttatgctcccacgaatcaagtcgatgaactgatctaagttgggatcttcaacanagtcatgcacctcaaagtcttaatgtgcactagaggatcttgatg

SEQ ID NO: 151615 - DNA, 410 bp, Glycine max
  unsure (1)..(410): unsure at all n locations
tcataacctcagcactctttgatagatgccccaccgtgcgagcattttctgcttaaatagccaaaggcattaagtttctaagaacgaaattctaataacacaaatctgacttgataactaatttagcaaaagagttcacaacttagacaactagttaatctaaatattggatttaactatttgtaataaacagaacaggtacagcgagaatatcacatatatgtaaatgttgcacaccagattgacatcccagtaattctatcctctttaaccaaaaaactaaagacagaagcatccgatagccaagtgttcattntcctcaaccaaaatatcgatcatcaacaaattcaattatgttgacaaacttacccacatcattcagttagtaagagggactaaagaaaactaaa

SEQ ID NO: 151616 - DNA, 475 bp, Glycine max
  unsure (1)..(475): unsure at all n locations
atatggccgcgatctgtcattacgtgcgactatctcactatagaaagaaatttattttaacaagctaatccacacatactaatataataaatactagaaataaaggctttctacatatacatatatctgccaaaacaacgatttttatcatctgtagcaaagaatgaaacttcatagaagtcaaaatatgaagaaatcaatatgtctagataccctcttttctatggataaaagatctaatcgattaaggaagcatcgtaaggatccattaacgcggttttgaaccgatacaataaaaactgcttacttatctcatgatagaaaagtcaggaatccacttatgtaataaagtagatcccccgatatttngagcagcggtgtagtatcagatcccaaagatagaaagtcttttctctctactctataaataagatagaaaagactctttcctagattctattgaaatggatatatt

SEQ ID NO: 151617 - DNA, 402 bp, Glycine max
tctcagagctagaagagtctttttctgagataaagatagattatttatttagtatactactacatccaggcaaaaccaacctacatccaatccatttgcaaacaatcagccggaagaggtcagagaaccaattggacacttgctaaggaaacattatccaaagtcccaaatcattggtgatcctaaagacaaggtcctaacaaggaattttctcaaaaacataagttgctgtctgagatcaagccaaagaaaatagattatgctataactgatgaatattgtgtcaaagcaatgcaaggagagctggaccaatttcagaagaacaatgtctataagcttgtagaactccccaaaggaaaatctgatgttggagaaaaatggtgttcataaacaagctggatg

SEQ ID NO: 151618 - DNA, 365 bp, Glycine max
  unsure (1)..(365): unsure at all n locations
taatgagataagattattttttgtaagtttnttttnaaaggggtaagtttgaaaggaagtgactggattgtgaagtatttaaaggtagaatgagtattgaatttgagaattggtttttttaaagtatattagtgaataggtgntagttgaaaagagagtgttantatgataagtatgtaaataatattaaaagaaaatangtgagtatgatgtgtaagataatagaaaaaattggtttttattaggtggtgagtaaaagatattttattaaaatgtatgtgttatgggntatgaatgtaaaaagttatataaattatataagaataataaggttaattatttgtggataataaaaaatggataaa

SEQ ID NO: 151619 - DNA, 407 bp, Glycine max
tcattttctggccccagcacacgccgtagaggtgcctgagctgttaaaccttcattataccccacaaaagaaagtctagcaccaagccaggccacctgttcgatgaacttctctacactcataattggcctttgctgaactggttcctacaaactttggataatgagaatctgtcctatgaacaatctttgcaatgtggcatatgaagtttgagagctctgggcagattagtctgctaaagctgggagtggggtgaagtagatgatgcaaggatgccatctattggccgcaaggaagagggagcatcaactgctctgagcttgctcttcttgcctctagaaattaactgtctggcatttgattccacagttcttatgaataactaagtcatggcgcgcctactttat

SEQ ID NO: 151620 - DNA, 372 bp, Glycine max
ctttatctcagcttgaatctccactaaggacagtcttttaatagttattctctcacggagactctacagatatactttctaggatattacaatacatgcatgtagaagtttatcagctcaataaaatgaaactaaattcttgatgggatatcaccaaaaaagtttttaagtctgttttaggaactttagcactaaaataataatcatactgtatggctcctgctaatcgctccacagtgtattcaaaccgacatgactctttcttaatcttacgtggatggattggcttttactgcgccttatttcactccaggctatggagtcatagaaatgagaatggccccaaattatatcactggagcaaatggcaca

SEQ ID NO: 151621 - DNA, 450 bp, Glycine max
  unsure (1)..(450): unsure at all n locations
agcttaatgatctnggaaatgctttgctagataatgtttttctattaatgattgctctcatttctaccttactttctggttatggataatgaatacattctaatagttgccagccaatattggtgatggttggtgcattctatggtagctgactattaatggtgaaattacagtagtaaaaagtatcaattttcttccttttgaattgaaatcctctgagtaattattgtagagacacatggtaataatagagttggactatagatctgagaatagtttatatcaatttatagatgtgattcgattgaatactctctaatgcatataagtgaactttcacattgagcatcattcgtagtaactgtgataattctatctgccttgggttgacgaatatgatctaatgtctctcactcttaaatattattatattcgtggtctattttggtc

SEQ ID NO: 151622 - DNA, 380 bp, Glycine max
  unsure (1)..(380): unsure at all n locations
gaagcgcaacccaatcggtggcctcaaaaccgtcgtcattcacggtggctccgggtgtgttttccgggttccacctacggcaaaccggcaggatgggacgatggaatatctgcttcgaactacagaaattttaacgaccggctaagggtaaaacatatctctctttataatttctctagtttgaatctaatatgaggattaagtttctttctgttagcatttattttttataaatgggctttctcattatttatttattgatgatatattgcacgtgtatatgttaattcaatataattagccacataacatgtttaaatacatttatattatctctaaataatgagagattgtctcnaactctaaacatatattactta

SEQ ID NO: 151623 - DNA, 406 bp, Glycine max
gcagcttaaccacatcgtctattctttctttacatttgtgagcccatccaatccttgtgtcccggctctcagccacttatgatatccgccgttgatcccattactgcttcccctgagctacttgtcctttattcacgccgcatcccatgccttgcgaactccttggagtacctttgtattgtggcactggaacctcgtgttatgaaaggcgttatgctttcctctaatggcgctctttcatggggaacccatctgtcttattgtgagatgggattatattatacaccccatgtttctcctaggacatttgacatcttccatgaaagaccatctgatcttctctctttgcagggaccattacagagccctcatgcacacagattggtcacctgcttttttttaccac

SEQ ID NO: 151624 - DNA, 464 bp, Glycine max
  unsure (1)..(464): unsure at all n locations
cctttatactaagcttctcgggccatttctgcgaaggcaatatttggagagatagttttatcaataaatgctattcttaaaacgaaaaaggcatacgaactctcccaataacacaaacatcaatgtaaatttagagcgaactcatgcacatatttcctttcgaacattcactcgcaccaaatattcttcttactaagaaaaatgcacccaggcacaatcaaggcaccttcgttacctagatcactcatatgtactttcaaggtgtatttgctacctacatcacatgcactttctttgctaaatttacatacatgcatactcaaagcattttggctaccaaaaattgcatacgtgcacattctggtatttcaatacctatacatatacaaacattgngatgaatcatgggtacctgcacaataaagcgctacattctatggcttattcaagtgtttttgctacct

SEQ ID NO: 151625 - DNA, 215 bp, Glycine max
  unsure (1)..(215): unsure at all n locations
acctgcggcatgcaagcttacaaaaacaacgcctgtatatttntttgattgtatattgaanccccctgcggctggggcgatacaatatgtcacgcagagagcatgctttaaatttttatttgacgatgcatataggaatgctatgggatntgcaacaaaaacacactctgtagaccttgagcacagaccggctattgacaacagtatgattatta

SEQ ID NO: 151626 - DNA, 399 bp, Glycine max
  unsure (1)..(399): unsure at all n locations
tgcttggaaacctataaaaccactcctaagaatgttgtgtatntggctcctctncaagaggtaaaatataatatgatgtttctttccttcactcttgagatagaaaaaaaattatgtctattgcctgaatgagtttttttctgtggtatgcactctactttacattnggtattagttttcatgtgaaaagataggttaggactggtttttgatgaagaattatttgtgctctttatttctgacgtttgaaataagaattaatgatagtgtctatgaacaggcaatgttgcactcttggctttgatgaagtacctgcagaatgaccatcttggacgaccgatcaactcactgcattacatgatgtacaattggacatacgggttgtatacacacacgatt

SEQ ID NO: 151627 - DNA, 404 bp, Glycine max
  unsure (1)..(404): unsure at all n locations
tgctctaatcagnntgtgtggtgttgtgttctctcttgctcttcttaccgccgcttttcgcgaaagcgaaatccactcaccaatggttagtgccattcaatcctctcaattcaacaacaacaacacctgccctgattacaaaacagctttgaactctgctgaatggacttgcatgacatgcctaaaggcttcaccatcttgtggttattgtgctgctgatgacaaggtaaatcaaatctattatacccttttgtcattctactaaccacatgcttcaattttgttntccgcacactactatcaattattgggagggaaggattagaannacaagctgtttaattgcaatttgggacactgaacaccattatacacatagcaggattttgtatgctacgtgcatt

SEQ ID NO: 151628 - DNA, 448 bp, Glycine max
  unsure (1)..(448): unsure at all n locations
agcttaataagtccatctattggatgaaataagcctcccgccagtggtatttaaaatttcatgaggtcatttcttcattaactntgaagagaatgtcatggatcactgtatataccanaaggtcagtgggagtaagatttgttttcttgtactatacgtagatgatattctacttgcgactaatgataagggtatgctatatgaggtgaaacaatttctctcaaagaactttgatatgaaggacatgggagagacatcttatgtcataggcataaagatccatagagaaagatctcaaggcattttaggtttgtctcaagaaacctatatcnaacaaagtttagagagatttaacatgaaagaatattcaccaagtgtagctctcattgtgaagggtgacaaactcgctttgagtcagtgccccaaanatgtatttgagcgagaacac

SEQ ID NO: 151629 - DNA, 457 bp, Glycine max
  unsure (1)..(457): unsure at all n locations
ngaagctcaagaaaaagtttgaagaagctntagaatatgnttttgttgttacatgcctaactcccttgagtgacatttatattggttgttaacttgggtgttgcatcttagtacannnganatangnnntgcattgtgcatcatcatagtgtgtgtgaaggaaattttctaagttagaaaaatttcttcaaaagaaaaaactctctattttaattgattacaaagttgtcgtaatcgattacaacaagttatctaaagcttaaagagttatgtctcgtatcggtttaattgattaatgtagtactttaatcaattacattgttgtttgagacaatgactgttttttcaggagtctctagtttaatcgattaccagatggattaatcgattacttctctcttgtttaagttgttcagtggtaaacaagaaactctntaatcgantacttangtcatct

SEQ ID NO: 151630 - DNA, 386 bp, Glycine max
  unsure (1)..(386): unsure at all n locations
tttctatggtaaaattgggtgttgaggagtcaaattttgattcggtggaattttatgtgtaaatccagtttgagcaagttcaaattgatgttatagacttgtgtgaggtgagagtttgctccaaatttaccccattctcaatttcacttctcaaaccttgaaaatccattaaattgaggggttttggatacctanattttgtgttgctgtggtttgaagcttggccttggtttagacatgattgatacatgatttgggacttgtaggattcaatttgggcagaatttgatgagggaaagtgtgatttcgaaatctgccctctatgcagaattttgctgtggaaatgtgcagcagaattttgcataagtgcagaanaatgttatgta

SEQ ID NO: 151631 - DNA, 461 bp, Glycine max
  unsure (1)..(461): unsure at all n locations
tcagctcttattctaaccttgaaattcaagagagtacctngatttctgatgtctttgggataaagacggtcattgaccaatccctcttctatganttgacccaattgtctagcgaaggtgtaccatttgaaggtgcactggatgatgattggaaatttgatttttttgtacatgatgtcctccggttggtttgcaccaaccaagcggaaatgaccggaagactgcttgccggttcattggctcttgaaagccgcatccttcattatctaattattcgtatcctactccctagatcttcaaacattgcataggtttctgaagaagatctaatagtcatgtaggtcattcgtaccggctgacaaattgattgggcacatctactccgatatcgcatgcataaggcattgcgattaaatgctccttttgcctatcctcacttagntactntgttccttcaacat

SEQ ID NO: 151632 - DNA, 369 bp, Glycine max
gagtacatgagctatctgagaatatttaaagtaccagttaggtttggctctggagagctacttagattccaaccaaggggggatgccccccatgacaccttctcgggtggcaggagggttagcccaatcatcttcgcattctggaattctctctcaatgagatgggcagtcacagaatgtagttaactctgacttaagctcatcttttgttaactcgtctagcacggttccaggagcctggcgttcaaacttgggtccgcgttctgggggtatgaataatgcagttttaacagtgtgccaactcacaccaagtgttggagccagttatagtacggatgcaatctgcttttctgaggccccatttgcaag

SEQ ID NO: 151633 - DNA, 423 bp, Glycine max
  unsure (1)..(423): unsure at all n locations
acctactgcagctgcaactttccatttnctacagaagaaaagcactttttcatgggtatanaaagaaaaaacacctaaaagaatttacgggtgtcattntaaaatccaaaccatgaagttctctattaaaatcaaatcatatgttcacaataagacccggaatttatttatttctcaaacaatttccttcacgcacaaattggatgtttgtggaatacagcgattctcaaaattttntatccttccatgttgtcatttcccccctgttcttcagcaggttctctataagcaaatgtacaaacactctataaaggcaagttgggaaggatctccatagtgatattcttcacttgaagataacacccttagaatgtcaatgctgatctctaaagagtgaaatttcaatgcttggaactccataat

SEQ ID NO: 151634 - DNA, 413 bp, Glycine max
  unsure (1)..(413): unsure at all n locations
atgtgcttaacaccagtagttccaatctttttatgtctttagcttcatatgcaatctggggtgctncaaccaaccaattacaaacaaaagtgataaaatcagaggaaaatgtagatgccaacccataagtatatttgacaatcttgggtnagaagattctacaatacctgtaaatctacacaaggaggcactttaatctnctccattttggcagcaattgacaaacatgctacagctaacagttgcatactccaacttttgcctctctaaacataccaagagaaaaaggccatcaaaatgaattttgactatcaaaaggagatcagagaacacaaattcaacaagacactatttatgctttagcatttgatcttactggtaattcatatactgataggaaccgatcccagtag

SEQ ID NO: 151635 - DNA, 470 bp, Glycine max
  unsure (1)..(470): unsure at all n locations
acctgcatgcatgcaagcttgcaaacttgccctggtttggccactntcatattttaagaatgtacatgtacacttcttcatgcaaatcaccatgtaaaaaagcattgttcacatccaatttcttgagataccattgattgatggcagctaaagctagtaaaagtctcactatggcaagtttagccattggagagaaagtgtccaaatagtcatgtccttctacttgagtgtatcccttggccaccaatctagctttatacctctctattgaaccatcagatttatgcttgactttatacacccatctacaaccaattgttgatttgtgctgaggaagatcagtaagaacccaagtattattgagttctagtgctttgatctctacattcatggcctcaatccaattaggatcttgagatgcctcattgtatgattgtggctcaacactttgtgcgatagaggaaacaata

SEQ ID NO: 151636 - DNA, 462 bp, Glycine max
  unsure (1)..(462): unsure at all n locations
ctcatacctgtgagtgccttattctntttctattgtcaaacggctattcttcccgtgagtgtcttgttaaaagaaaagnaatcataagcatttaatcgattatatgtctgttcatataaactagtattttctttttttgcgaaattgttaaaaaggcataaactctttttaatgtgcataaaaattttattttcttattttatttttttacctaccaaacaactctaattaaaatattttatctgttttcggcatctttcatctaaatcaaacaatcttactttattctttatcatctcttttcattctcacattttcattcatatttatttcactctactaaacacaatattaaggcataggtatgatttaaaatctcacttttcactcccctcaatctgacattgacttgaatgtcgaaatatttgtaggcgacaacatattttctactcgactgtcatt

SEQ ID NO: 151637 - DNA, 463 bp, Glycine max
  unsure (1)..(463): unsure at all n locations
agctcgacacatatgatctatatgctcnagcnggatttgttattgnngttattgaanannganannacgcattcatgggaataaatatagtttataggcacataatcactaatttagaggaaatcaaatatccttcatttgtttgtaataagtgcaataagcctatataaacttagaatcgtgttgtatttagacacacgatttcaatctcaatatgcctttattctttctcctttaacacaaacaaacatcaaatcttttgatttgctggagccaggaattgcttggtacgtagtaaaagaaaacttgggttgtttaaagcttgcgataaactctgttgtaagagccagaagtagttggaaacaatatttgaactctgttaaagtagtgaaactttggggttgcaagacaatatatatctaggggagagacaaccaaatagatctatgttgatctattatct

SEQ ID NO: 151638 - DNA, 462 bp, Glycine max
  unsure (1)..(462): unsure at all n locations
tcagtctggctagtgactaaccattctatcataatgttacactcttgttctttctntgnctaacatatgcacttgctcaaactcatgaaaggaaacacaaattccatcaaaatgatgcatttagttcaaaatgaaagcatacaattattttcacaaaaagataaaagtgtttcactgccatgtcatcaaaaaccaagataaactgttcaaaatgctttatgataagcatactaactattcattgataaaactaatagtgtatataaatataaaggagatattgtacgagaaccttaattataataataacccacaaagcaaaaagtgacatctagaattaacaatgttagaaagttttaaactggggaatcagtgagagcaacaactcttccagatgatgaatcagaaagatcagaaattcctccaattgnggaaacatgggggtcaactggttttgcagct

SEQ ID NO: 151639 - DNA, 334 bp, Glycine max
ttaacctcgctatataaatgaggcgacccaagaaacctcagactctgttctcggtgcgtggctcgggcatcttaaagatggccttcaccttttcgaggtccacctctattcctttttggcttgcgataaagctgagcagttttccagacttgaccctaaaatgacacttggcgggattcaatctttagctggacatgcacaggcttcctaacaactatcgcaagttgacgagatgttcctcctcagttttagacttgtcaatcatgtcatccatgaaaacttcaatgtctttttgcctcatatcatggaacaatgccagcatagcccgttgata

SEQ ID NO: 151640 - DNA, 385 bp, Glycine max
accatcaacagagtactttcgacacctactatatgatgacttgaccaacgctgttattggaatgctgctacaaatctttcaacacctttattcacacattctgataagtttggtgtcatgtgaccatatctgctgccatatgtatcgtacaccatgctccatattatccttgagattccgacaatccatcttgctatggctggactcaattgacaaaatttatctaagttttgatcaaactcatgcttgcaaggagtgtacgctgcatcaaatttgttatcattaaaagtttgtcgtatacatgaaactcaattaaattaatgataaaaaaaccttacccatttttgaacatttctatgttcgcgtgttaatttggattgaattg

SEQ ID NO: 151641 - DNA, 401 bp, Glycine max
  unsure (1)..(401): unsure at all n locations
cctatttttctgacatacccagggggggtgacacanttactcctgtgtataaaacatctgtaatttgcacaaaagaaagctgaaccttcatttctcattccctagttaaattttactcatttggatgtattattatttaagtaaatgacttgttcaaaatgaattcttttcttcaggtcaagtatctttgatgccaaggctggcattgcactaagtgcttcctttggtaagctactttcgtggtaagacaatgagtgtggatacactagtgtgtgcattctgtgtatttagagtgtaaaaatttttgttcatgcggaccattatttgatatatttgaatgtgtttttttgcagcaaccgagtattggaccttatagagcacatggcattggtgggagctca

SEQ ID NO: 151642 - DNA, 460 bp, Glycine max
  unsure (1)..(460): unsure at all n locations
gctaagnacctacgccattggagacccttntctctcatctactagtgttttgtngatttcttgtatgagtggaaaaactatctntctcttgttcattttctttaccctatatgaaaatatgtaatgggttttacctcaaatctcgattgacagatgaagacttaattaaagtttattttggtatcgacctaagtttatactaatgggatatatagaaaatgatgggtgaagatgaaaactcatatttaagactataaaatggtttgcacatcatatttaattggaattattaccatggtatgagtatgataaagatgtcacacaagttctagagctatgctatgaaatccatatttggtgaacgttaatattgtgatgtgggtacggattcaaagtgtgagaatgagagtgccttacttccacttattgaatcgttagatgagttcatacgcacaatgag

SEQ ID NO: 151643 - DNA, 457 bp, Glycine max
  unsure (1)..(457): unsure at all n locations
agctngtcactngngctntattgtgcttggntaattatcgcatgaaatcattgagctcaaacatcattaggcactgccaaattngctatcgacaatttcagatcatgcgaaatccctcttttgtccactcacctaaattacacatgcatcgcatttgtactatctagttactagaaaaaacctattatcaaactaaataaatcacaattaataaactcaaattaagattgaatagtgctaaaatataccatgcatgatattaaattcaaacccaatctaatcatatgtaatttttaatttggtttggatgaccttttaagtaaaaatcgaatcaaattgcattgcgaacactcctaatatatgaatacttgaataggaatttaatgcgttgtttttaaaaaaaaacaattaaaatatttggagccattatatatattaggattcaataataatatct

SEQ ID NO: 151644 - DNA, 433 bp, Glycine max
  unsure (1)..(433): unsure at all n locations
atactcaagcttctaagttctatttctagaacaaaatccaattattaacatctagatcattaataagttgaccattatttgactagagaattttctctgaattatccttattctttctaaactttagcttaaaaacttaaaagtttaaccatgcctaggtatcctatagtagcatctaattttgttatcatttcgatagtctaaaaatactacccaatcacatgacaaagtaataacactgtctaccacgcacatggaaaattaggatattacacttcccttcttaataccttcttcaaccaagaataacatcataattatttattaaccgctccatcccaaataccatcatcgatcaagaatgagctcatcaaattatgaatataatagtttggataaaagntgaacttattaatgaaggtgaacaaatctt

SEQ ID NO: 151645 - DNA, 458 bp, Glycine max
  unsure (1)..(458): unsure at all n locations
agcttctcaagggaagttctcaatgaagctacctattgtctataaattgatatttgtgtaacacatgtggtaactttgatgaatgagagtcttgtgagacacaactcanagttcaacttttctccctcttttactccttcaatttcatgctccccctctctctttcttttcatccattgaagcatcctctccaagcttcttatccaatgcacattcttggtggcgaagctccttcttccatggcttattccttagtggatggggcctcctctcacctcttctcctttgtcttccgctacatctccatggtggaaaatcaccattgaaggacctcattgaagctcaaagatccaccctccatagaagtgtggaagcaaagcttctaagcttattttgatgatgccaaagactcaagtcaagaatcaagaatcaagcatgtttcaagaatcaatattcat

SEQ ID NO: 151646 - DNA, 427 bp, Glycine max
  unsure (1)..(427): unsure at all n locations
agcttgcatgtctagtgattctagagatagaaaggtccaagttcttgttagtttcgatttatttattgngngaagatctgcagagaccagagcttgaagaggaagctgttctgagagcttgagatgagtttgtgagtggttgtgagatcctagaggtgaatgagacatcctcaccacttgtatttttgcaatctttcatcttgttcttctcttttttgtaaaggaggcttccttggtatggaaagctaaaatcctctgttggatcttccctgtaggtacttaatgtaaatatctttctatctatttaatgatgttntatgtgttctctgtgctatctgcttttcattctagtatgcctttaccttgatcacgtagatgcatgctttgtntgtgtcattcaacaatgaaaactggtcttattctgatg

SEQ ID NO: 151647 - DNA, 461 bp, Glycine max
  unsure (1)..(461): unsure at all n locations
agcttagagaaggtataaagagataaaanacanntatatattattgtttcacacaaacacacaacatccacttcaaatgtctcatacacaaagacacacatacaacatgatgcacatttaacttatagactggtatgcaagtggtaccatttcgagaacacattgtgaatgtagtccgggagtccatgtaatcgatgaattgccacacaatgggaaacctgactctctctcaccgagatgtcaccgctagcaacacattanggtgttctggccttgcaaggataccccaactcatatgatcaacatgagcttaaaggagattccaaattattgacccccaaggtcaaattcatgtcaactcattcatgacctcatcggttaggtttataaacggcattcgcttaaaatacatatgaacaacatgatgcatgattcactgacaatatgcacatggtttattt

SEQ ID NO: 151648 - DNA, 474 bp, Glycine max
taaactcagccaatcagtacactatagcttcaaagatattgttgcactattacagtaaatctcatcaagaagatgatatatgtacaccaattcacatgtactttgctccatttctcagtatcctaatttgacaacctaacaacactctgcttcttacttttctaggaaacagggtggtaagcacccaagcacatggggaaccaagccacttagcatcccatactacttgatgtgggacttaagcatcgcatagtccctaacacaaggttacctccaacaagaatccagcagctaaagtgaatctcctatcaataggggatccagcacagtcagcaccaaggaaggcctcaactgcagtatgctcatcatctctaccaaacaccacaacctaaagtgtctttcagataactccatatatgaagaacaacttccccattagttgtcctacagatgacaggaactaactaaccatac

SEQ ID NO: 151649 - DNA, 423 bp, Glycine max
  unsure (1)..(423): unsure at all n locations
cgagagatgccggttattttcttactaacctgccaactggatgccgatcattgtcaaaaaaatttaagagtttgctctgattgtcattctgcattaaaatttatttctaaggttacagagagaaacatcatagtcagagatatcagcaggtttcatcatttctccaatggttcgtgttcctgtggagattactggtaatgctcaaaagcttgaaagtnttggaaaagatatgatgcttcatgctagaaaaccatattgaaggaaattccaaggacattaattttcacaattgtttgcctcaccattcaaaataagtggtatgtccatgctgcattaacttaattattaacaagggtgagtcttcaaagtttatggtatctatgtcatgcgagaatcttaaggatgagatttgttgaaattcat

SEQ ID NO: 151650 - DNA, 438 bp, Glycine max
  unsure (1)..(438): unsure at all n locations
cttgctgattctgttgtattctgctgttagaccactttttgtggatngtaacatgttaataaaatttactctgttggcagctaaaaaaaaaaaacaacaatactctagatttctagattgagaagccaaggacttcaattatagtagttaaaaaaatctcatcgtttaaatggattttcatcgatgatatttgtctgtattaaataaattgaatttgcatgggtctcatggtaagcttaattatctacataaagtagacacgtctccccttttaatactcaacaaatcttcctgtttttgtttatcaaagcatgccactntctccttaanaaacgacttcactctatttggttagttcttgaatttataatntatctatgtgaatggagtagtttaaaatttataaaacttattcacaagttagtntcgtgactgtta

SEQ ID NO: 151651 - DNA, 390 bp, Glycine max
  unsure (1)..(390): unsure at all n locations
attattaagaaaaaaatcactctaattcatctttctttgttcaaatacgtaaaacgatatttgtttaagatatactattactgaggtgaaactcaatttgtttttcatatatcgaagaaactgngtctgttttgtcctttttcattatcttttgctcatttttctgtcaacatctaaacaaagcatcagtgatttgtgtgctccataaaaaattctttgagtgtgtgtgcggaaactgacaccaatcatacccttgaatccatgggggattaaaaatcctttagtagatgtgtgtttactcctctctcgcatatatatacctaatctttccctctcaccgctgccggctcataagtaggttcaatactactatctttggtgccacgtatg

SEQ ID NO: 151652 - DNA, 419 bp, Glycine max
  unsure (1)..(419): unsure at all n locations
tcctgaacagattcagaagccgtatattcttcttctcgccgttatcttccggaatctcaccggagagcatgtngttatacaaatccattgatttcatgctcttcagggtccccagctccggtgtcagtgatcctgacaatgcattcacctgaaggaacagtgtgtccagcttttgaagcttcccaagcgccgacggaatctccccggacaacgcacagtacgctacgtcaagcctcaccagctccgacaagtttccgatctccggcggaatgccgccggtgttggtgttgtattatccgatgtagagctcccggaggctggtcaagttttcgatctccggcgggatagtcccgtcgagttcgttgccggagacagcgaggtactgtatgcgctgccatcgatcgtactccggcgggatc

SEQ ID NO: 151653 - DNA, 456 bp, Glycine max
  unsure (1)..(456): unsure at all n locations
gtcactcccacattntatcttttttatgcattgtatgttggtctcgtcctttgncacgggaagccagaaggtccatatcaccttcttaattgtacacatggggcactgcgcccccaaatgcgcaagtaagaagagataattttgcgggctctcgtgtccgtaaaatgcattcatatcatgcatcgcataagcatctcttcataacatcataatggacatatcctgcatttgtccgttatcatatttcggcctcacattttgcatgagtcatggcatcatcatgcatatgcgttcaacaaactttttgatctgcaaaagtgcataccatttgttntcatgtttgctcatccttgcgttntcctctacaaaacaaaaacaaaanaaggggaagcgtgaaacttcacactacattcttagtttcatgtgttaggcaccacgagccaaccatgttgggat

SEQ ID NO: 151654 - DNA, 456 bp, Glycine max
aacttccttgagaagctaaagcttagctacacacatctatctaaaaactaagctcacctccttgagaagcttccttgagaagctagagcttagctacacacacccatctaaaaactaagctcacctccttgacaaaatacatgaaaatacaaaaaagaagtccctactacaaagactactcaaaatgccctgaaatacaaggctaaaaccctatactactagaatggtcaaaatacaaggcccaaaagaaggaaaaacctattctaatatttacaaagaagagtggatccaaccttgatccatgggctcaaaaatttgccctaaggttcatgagaaccctacggccttctttagtagctctagcccaagcctcttggagtcttctatacaatccccatgggggggaggattgcattaattggagacgccacttcaaggaaaagatgagtcaagaag

SEQ ID NO: 151655 - DNA, 379 bp, Glycine max
  unsure (1)..(379): unsure at all n locations
taagatctcttataactgttagaaggagaaatggtctcttaatgagctcatttcatactgtgtgcaagaagatgagaggctgaagcaagaaaggattgaaagtgctcatgttgtgagtacctctaaagacaaggacaaaagaaaaagaactaaagagcccaagaatgaagctgctaagggtccaacacaaaagaaacaaaatcaaggtgacaactgtttcttttgcaataagcctggacatgtaaagaagaaatgtaccaaatatcatgtttggcgtgcaaagaagggtatgtntcttactttagtatgctctaagggtcaattagcttcagtacctaaaaacacttggttgntagattctggtgccactactaacatt

SEQ ID NO: 151656 - DNA, 484 bp, Glycine max
  unsure (1)..(484): unsure at all n locations
atactaacaaagtacctaataanaataacagataatttccatgttattaatccaaatttttttactggtattcaatctatcaatttttaatctattttaatttaagcatactagtgaagaagttaatattgtgaaggagatcccataattgataaatgctgtgaagaccggacacaactatctatatttattaattattactatggtgtctcattgaagaatttcttgcaagattatgtattctgtctctgaaggcttatttactcaattgcatggagcagattaaattcggttttatcatttggagcgcaatcttcatatggagcagagtaatattcattggtttattatatgctcaatttagctggctcttacgttaagtgttgttggctatctatgttcgtaagtaaaacagcagggtgttcttctatgttggtatttaatagctgttgtgtagaacatgctgttacaaatgtctcatgtg

SEQ ID NO: 151657 - DNA, 230 bp, Glycine max
ggtttcaaaatctgcactttgtgcaaatttttgctggaaaatgtgccacagaattttgcaccagggtagaaaaatgctatgcatttgctggttgtggaaagaagcatgcaaaatgaggtctggatgtttgctagatgatcccaacggtcaaaatgtaggcttatgtactggagacttccagttaaattttggagtccatccttcagttactaattggaacataagaattg

SEQ ID NO: 151658 - DNA, 468 bp, Glycine max
  unsure (1)..(468): unsure at all n locations
tctactaatatatgcgattgcccactgctttgcctgagaataactttntcttgactattacagcgccggaggcggcaaaggacaatggtctttcaaatatacctgttgtacatgaacaaacattatatcatgcgctgaccgtgccaaacgaaccaacgaagacattgcataattgttatgctaactatattcaatgtacctgaacaaaatgatttccaaacacgtgaccgacacatatgatgcgatggccagaagagtcaagtggtggttgacttctaagagggaaaaatgtcatgctctgttgttgggataacgatacaaggattacgtcataccgtgaagcaatcacatatcccatgtcgcgtatatccatccacttgtccacactaccctgaatgaaccaaacatacacatgtaagtaatttatacattgttatataaaacatataacctaactacatacccttg

SEQ ID NO: 151659 - DNA, 480 bp, Glycine max
  unsure (1)..(480): unsure at all n locations
atcttaagccacctgcggcatgcaagcttgccacccagctcacccaggcgagcagggttgtttttccagattctacagccttctggaggaatcttctggagggcccaagtgggcctggttgctatttgcacccccatttttactaagtacaccccccttttctatttttttgtaactctttttctgtaacgttacaaaactttacgaacttcgtaacgatacttattttttcttctgcaaggttacgaacccttacgacttatgtatttactcttttttagctntcaaagaagttacagaaacttacggattgcgcaaaaacacctctntntgacttccgccacattacggaagttcacggatcgcacaagcctgcttccttttgatttctgagacatctcgaaacttcatttattgcatgtcatcaagtaataatccccggacgaaattanggtatgacactttcacaaacacatcttt

SEQ ID NO: 151660 - DNA, 449 bp, Glycine max
  unsure (1)..(449): unsure at all n locations
tcactcctacatctcatctctagcatgcanttctttctttccctctttcacgtttgggtgtttagggaaaaacaccataactaaacgcgccgcaagggatccctatcgcaccagatccaaatctagaacgatgggtgatcaagaggagacgcacgaacagatgaaagccgacatgtcggctctgaaagaacaaatggcctccatgatggaggccatgttaggtatgaagcagctcatggagaagaacgcggccaccgccgccgctgtcagttcggctgccgaagcagacccgactctcttggcaactacgcaccatcctccctcaaacatattaggacggggaagggacacactgtggcacgatggcagccctcacctgngatacaaccgagcggcttacccttatggattgcctgccaactattcaccacccatcttgcaagaagatg

SEQ ID NO: 151661 - DNA, 401 bp, Glycine max
gatgctggcaccaccaccaagggtctcccctccagcgccagcttcagcccaatctcgtcccaacaacaagttttctcccaacacaagctacaatgccggaggatgccctccagcaaggagaaccccagaatttgccccaatccccatgtcctatggggacctcttgccatcactgctgtccaaccatatggcggtaataaccccgggaagaacttatcgtgtcccctttcccaagtggtacaatcctgatgctgtggaagcaatgccttccaaggatatttgttgatgccaaatgtcataccctaattttatccggagactatagtatgtcggcatgcgacccttctttgaccacctcacaatgttaaacacccatcggtgtggattcataaagtgtcaag

SEQ ID NO: 151662 - DNA, 352 bp, Glycine max
  unsure (1)..(352): unsure at all n locations
ttaaaagaagnatcttctctattgaaacgatctatgaaatgacatagtttgatgagtagctttcccttaagcccttctattataatgccttctaacaaagccatcctaaaaccggtttcgaagatgtgtctttgcgtgctgcagattatgccaagtgtcttctattggctctaaatgtaataggctctcatttggctactctctcatagagaggttaagcacttgtgaatatgcattgaatgactatcataccctaatctcatttggggaccatcgtttggtggcatgccactctcgcttgactacctacaaatgttgatacacctatctgtatgtaatttgttaagcttct

SEQ ID NO: 151663 - DNA, 387 bp, Glycine max
caacccgagagcaattcctattctccgtgacctaatctgaacacacagtttggatgttatctttctccgtgaaaccttagtgtattctagacacattgatgaagtacaaatctcattggctttgactcctgtattgttgttaatgttaattgtaggagtggtgggcttgctcttttctggaagcacttgcttgattgtcatctcttcaattactcctctaatttcataaatgttgagtttcttgaaaatgactttcaaacttagcatttgatgggtttctacagatctccccaaggagaacaaaaagaaaagactctttggatcttatatgttcttaatttatccgcccataccttggagcatctttagagattttaccatctctta

SEQ ID NO: 151664 - DNA, 343 bp, Glycine max
  unsure (1)..(343): unsure at all n locations
aaggaactcttcctttatgagctattctttttaatactggcagtgagngcattccttgagcccccagcatattattgaaatttaactacttagtagttaccaagtgttttatgattcttctaatatccatgcgagtgtgatttttttaactaaacggcaattattgaatgattgtgtatgaccagataatgttactccaatatgttttgacgtggtcagtgcttacctgtttgcctattctattttcttctcttcaagtgacaaatgctattgcttaaattgattgaatggaagtgttgattaaaccatttgatggaaagtggtcatcattggatatatatat

SEQ ID NO: 151665 - DNA, 419 bp, Glycine max
acccaccttgcctcgaaacaaaaatctgcacctgttgcaatggtttgtggtttgagctcctctgctgaccatcatacaaacctttgcccttccatgcagcaacctggagcaattgagcagcctgaagcttatgctgcaaatatttacaatagacctcctcaacctcagcagcaaaatcaaccacaacagaacaattatgacctttctagcaacagatacaaccctggatggaggagtcaccctaaccttagatggttcagccctctgtacaacaacagcagcctgctccttccttccaaaaagctgctggcccaagcagaccatacattcctccaccaaatcaacaacagcaacaaccccagaacttgtgaggctaatgactatgcagaacatgcggtttagcaagagaccataacctt

SEQ ID NO: 151666 - DNA, 414 bp, Glycine max
  unsure (1)..(414): unsure at all n locations
ctcatcttnggggagaatctccttcttccatggtttattccttattggatggcgcctcctctcacctcttttcctttgtcttccgctgcatctccatggtggaaaatcaccattaaaggaccccattgaagctcaaagatccagcctccatagaagccccacaagcaagcttccatcaagtggtaatcagagcacaagagcttcaagtagttgctccttaaacctccattaattttttgctttaccttctcttccattggtttttcttcattgtttctccatgtatctcctcaaatgtcttgtgctaaatgttgttaacatgattctttagagttgtcaccgattaaactcgctatagaagctagattctatattctatggatcaaatttcttgttcttgttctgaaccatgaa

SEQ ID NO: 151667 - DNA, 454 bp, Glycine max
  unsure (1)..(454): unsure at all n locations
agcnntggtcactctgtccattttcttatcatctgttcttccatcagcttccatgcctagatcttcaacaaaatcacagatcagagaaatgcatttgtgtctgtttccttcagtggaccttcttatgaaagttntagtgcccgctcagtcttgtagtttttttttttcaaagcaaatataggacatttttttttacctataagttgaaccaagggtcttgttttttctgctgaaacaaatttgtaaggaagtccatccttatccttctgcttaacttcaaataaaagacctctacttgaagcaatcaaattgcaaactaaaacaatcaaggaaaatgaaaaataatgttttggtttaagttgggatgcttagagaggcaaacatccagtagggtgcaaactgcaaatgttaaatttagttgacaaaacaatattgaatgcttnataacaagtac

SEQ ID NO: 151668 - DNA, 481 bp, Glycine max
  unsure (1)..(481): unsure at all n locations
cctttaaactcagcttcagggtaagtcttcatgttgctcatgttgctccccctatctcttatcttatgactttatcctatcantaactttgagatgatgtttatggaaagtttctcattntattgacatcctcttgcataatggctacacgaatagtgtatgtgttgtccaactttcctgcaaaaatcaaaatatatctagaaatatatgtctttatgacttctttctcttttcattttcctagtttagctgtagtatttatgtaggttggatgtgttccaagagtggggaattatttctcctgagagtgtctccaaaatataagctccttggctttttctattactttgtaaaggtcttcccaattttttgcgagttttcactagtgattattntttccaccaaaactggctatgcataagactaagtcatcttcttctaggtgcatgggatgacncattttgtatacctacaccgttat

SEQ ID NO: 151669 - DNA, 366 bp, Glycine max
cactttttattcaagcctacccccaatacttgcctctttttaggcacttagcttcatttcattgatgtgcaacacacacacttaaacacttttatttgcacttccaattgtgtatatatatatatatatgtatatacagaaaatagtgtgtatatgctgctctgtattgaccattttatttcttacccaatgtctcccccatatatggaacaaatttgtgttgacatataactcccacaaatttgggacaaatttgtcttgaaccaagcttttctctggatgatgctctcctacaacctaagacaaggtagcaagaaataataatgtataggctcaaggttcaatgcatcaatcaatcaatcaact

SEQ ID NO: 151670 - DNA, 449 bp, Glycine max
  unsure (1)..(449): unsure at all n locations
ctttaaccactcacgcctgtgaagatacactctctatatcgatttttctaagagtgtttgccttcgaagaaagtattctaacttagaatattttcttctcacacactatgacgatgcacaatgcgaaacaaatatcaaatgtgctatgatgcgacaatcacagttaacaaccgatacaaatgccactcaaatgagttaggcatgtaaaagccaaaacatattctaaagcttcttcaaacatttccttgttccttgagcttcaagcattatccttatgttggtccatgttactcatgttgttgctccccctatctctaacatagtgcatttgaaaagcttttgtaaaactttatttattatcattagacaacaatacatgttgtgtattgaatgagttctctctcacttattataacatacactnctagtccaatgtttcaacatattga

SEQ ID NO: 151671 - DNA, 421 bp, Glycine max
catgcaagcttgctcggggccgttcctgttattgcaaacattttttaagttttttttaccagcgggacattactcttaaagcaaaaatggcatataacctcctcccataaatacaaacatcaatgtaaatttagagcaagcttatgcgcatatttccttacaaacgttctcttgcacaagacattctattaaccgaagaaatgcacccatatacaatcaaggcagcttcgttacctagattatttacacgtacttccaaggtgtatttgttacttacatcacacacatctccttggctaaattcacatacatgcatactcaaaagcatttggggtaccaaaaaatgcacatgtgcacatcttggtattttaatacctatacatacacaaacttcatgatgaatcttgactatctacacaat

SEQ ID NO: 151672 - DNA, 178 bp, Glycine max
ccttgatctaactctgctgcaaatttgtgaagaagtcagtcttttttttatattgtgagcatactgaagaacactgagacaatctacatacatagatgattgtatgctgtgggttatgtggcgaacatctccactgcttcctctactcatttctatctttgtggacgaagcttccact

SEQ ID NO: 151673 - DNA, 439 bp, Glycine max
  unsure (1)..(439): unsure at all n locations
agcttatggtaagcattggtgacctagctagggtttaagtctccatggaaccaattgccttcctcgcccagtattatgatcagccgttgaggtgcttcatctttggggacttccagctatcaccaatggtggaagaatttgaagagatcctatgatgtcctctaaggggaagggaaccatacctcttctcagggttctacccctcattggccagaatttctaaaaaagtccaaatctcggcgcaggaattataccgccaaaggcaagtcgaatatggggtggtcggaataccgagaaaatatttggaggtaaaagcaagaatcttggcagaaaaaggcgagtggaccccattcatagatattctcacactgttgattttcgagggagtcctctttccanatgtggatgggttggtggacctggcagcgatcgacgtttt

SEQ ID NO: 151674 - DNA, 435 bp, Glycine max
  unsure (1)..(435): unsure at all n locations
tgacagagaaatataaactgtctgagctagatttcgatttgtgctttaattgcatgttgcattgagtcccagtgtaatttgtctcggtatgagtagactttgtgcaaggttttctttgagtacacatatcccaagggaagttagcacactaatatagaagattaggataagacttactagttatagcaaaaataatttttaccattttgggcaaaactctactttatccttttatagttagttttggagaagtgcaagaagccatataaggcatggctgagctcatgacaagcacctcaagggttttccaagctaccaattagttatattaatggtcattcaatgtgcttagattaagaagataaggattaggccttgcgattccactggtgcaagcattntacctgcaataagtgttactttacacacacactc

SEQ ID NO: 151675 - DNA, 272 bp, Glycine max
tattaaaagaggagcttacctcgtagcctaagttataacgatgatgtaaggtagggtgcttatttcattggaaaaaaccgtaacacacttaggagttgatctaagttggtctttactatccagaatctgtgtgatcatgccgtgcaggaatatatatacacagttaccagacctgagaccctatggtataaacaggaaacacaccattggttcggcgcgattgccttcagaacttttccgcagatatcgccccgtcacctttttaaaaaaaa

SEQ ID NO: 151676 - DNA, 467 bp, Glycine max
  unsure (1)..(467): unsure at all n locations
gctnggtggtactatagctgcactaaatgggggctgtggtnatcaatatgctgatgcaatgcagnagaagggggtaaagacaatatattactacaattatatgaaattgagtaggtaatactaagaatagaatattagtagcatgaccgaaaataaaatagccgctgtgtcaaataacataacaattgtctcaaatacagggaaaaaaatactccaacgccatcattagccggtttgacttattgctgtctttaaaaaaaatgttgcccatttctttcgaattgtggtgatgatgccgatgtccaacggtgtgtcattagcaaaccactgcaagtattcataattgtaagttagtactgcaaatataataattcagttccaattgtactgaagtttatgcataccatggaccaatcactctttatgtcgctggctagtgatgtccagatccaatgcattatgtaata

SEQ ID NO: 151677 - DNA, 452 bp, Glycine max
  unsure (1)..(452): unsure at all n locations
atatacactctagagcttngatccgctgagagattccatctagatgttgtctaatagttttggcgcttgtctcgaggccgntactgtgcaaagagagagagagaaaaaaaagggaccacaaacactttctacatcatatctttagagaagtacatcctgttagtgttgcttagtgcccgaggctaactntcagcatacaaattgaaagaaacgttagcagcataagacaaaaggagtttagaatgttaagacaagacaatttacctcttctcttttgtgcgctatgggaaaagttccttactgaacatatggacgttactttctcatgatttttttcatcacttgaggatcgagtaactgtttcattgcttttgtactacaagccaagtgctaaagcacttgtcttctcatcattgaacgcagaagcagtatcatccaatggttgatacttt

SEQ ID NO: 151678 - DNA, 364 bp, Glycine max
  unsure (1)..(364): unsure at all n locations
ccaaactaaccgcgtcacgcacggcagatgggntngaacaactcaaggcagnncgaaagaggncattggtcacagccatggaattcaacacctcagcatcaattgtttcatcctctaaggcaatcacatccattttctcccggatacactgtagtgcagcctctgtgcaaagagcagcaagatctgatccaacataaccatgagtatctctgccaactttgtcaagatcaacctgaaatacaccataaaattggaattgtgaagagcaagatatattgccttcataatatgataacacgtttatggctagacaaatgaatagaatcttacattgtctgaaaggttcaatgttctctgtatgaat

SEQ ID NO: 151679 - DNA, 472 bp, Glycine max
  unsure (1)..(472): unsure at all n locations
gcaagctctgccatataagctntgatcctatcatccaacccaatgaatgttttatacctcttaaggcacttatcctgcattctgtccaatgccacaaccaaagggtaactaattgtaaaccctagctccagccattgcaacattttactagctcaaccaatcaatacacgaatagagggcaatttcacacattaatacaaaagagtatatatatatcaccaagaaggatatggatgtgagtgattattgtgtcttgtttgttaaggaataatatttatggtgatggctccacccaagcttcttttaaattagtataggagcacttcaaagtcatagcccacttgcactccatgcttttagtaattcaatcatagagcaccaatttttaagctgttgggtgaagaaagaaaagacattgcttcctcctattttggtttggtttcaattttttccccatgtctttntccccctc

SEQ ID NO: 151680 - DNA, 412 bp, Glycine max
  unsure (1)..(412): unsure at all n locations
gtcacctctttcaaaaaaccaagagatcattaatggccaatgccttaatgttttctctttctttcaaaataatcgaaagatcgtttaatggtccaatgccttatatgacctttcattcaaatcaaaatatatcatgcaaaaaaaggataaaaacaatttaaccaacgtttagttctcaaagaactacgtaggtctagtttccttatcacaattgaggaatacgtangagcaagggaaacacccttgtctaccacaaaaagataaaaatacaaaaaaggcataaaaagacataaaaacataaaaaagggaaaataaaataaattgaagtcatattngcacacttgattaaaggctgctgtcctttgtgacggacgcgtggggtgctaataccttccccgtgcataaatacaac

SEQ ID NO: 151681 - DNA, 459 bp, Glycine max
  unsure (1)..(459): unsure at all n locations
accgcagcatgcaagctcgtggaagctctatagattggtgaagnttctcttctcttacttttactcctatatncctattcctacaaaataaaaaaatcgcattcactttttttcttcccttatattccttcttccattcattcattcacattctacgctttcttcagagcttgcacttgttccacccttctccaattctcttatctgtgtaagtattctcatacccttttctctctgtctctgccactgtcatggggtgctttcaattgggctgtattcttctttgtttgtttcctttggctctttggttcatctgggtattcaaatcttcaataaaaaaatgtttctttttcatatttatcagggaaagctttgtcttttactggatcctctgcccaatatgttcaatcatggtttgtttgttgcgtcgtttgatgaggtttgcagagggttatgttg

SEQ ID NO: 151682 - DNA, 392 bp, Glycine max
  unsure (1)..(392): unsure at all n locations
acacacgccattcacactcccagaagatttttaatcaaangtaatatttttatatgagcctccattgaaagtccccatataaactacctacacatctaaagcgatctactaaactgaaagattgccgaatgaacggaacacccgcnatcatttcgatcaaatccccaacctccatttatagcatatgacccattcccttgatgcgtcattttgaatggtattcaaatcggattcaagattggatatcatatatattctgctaaactaaacaagttagagactttttatcccaagtagtggatcaattagttgaatttaataaaaataattgagttgggataaaattattaaaaatattaaatatcaattaagtatgaaaaattgtatccata

SEQ ID NO: 151683 - DNA, 429 bp, Glycine max
catgcaagccttgatttacacagagggtttcagggacaaagtcttttatttacatatttaatttcatccaaatttttgacaagtcattgttacttccatcaatattgatattgtatcatgcttaattatatgcatttgcttattctgatcattgtgtgttgtgtgattatttcttccatgcaggtacatgattcctatttgttgtgagagtgaaatgatgggcagcagcaccaactgaggtgagtttatatttccttttttttgtctttatctttgtttggttgttatatattttttattttatatgtttgagttctaaatgtgtaaaaaatagaaatagccttccctgccattgatagagtgttctggttccatttggataattcggcttcatatttttttatcagtggtgttaaaactgaattaatc

SEQ ID NO: 151684 - DNA, 408 bp, Glycine max
  unsure (1)..(408): unsure at all n locations
agctggtcacgtagaagggcattatcattggcctttatattctctaccagctccatagcttcttctagagtctttaacttgatcttcccaccggctgaggaatcgaggatctgcttggaatggggttgcaagccatcaatgaagatgttgagctggattggctcgctaaacccatgtgtaggagtcttccggagtaacccatggaagcaatcaagggcttcactcaatgattcatgaaggtgttggtggaaggatgagatttccacctttccctcaacggtcttggactccaggaagtacttcttcaggaacttctccaccaccttgtcccatgtccgcagggtattccccttaaacgagcgaagccatatttntgctttatcggccaaggagaaacaaaataagttg

SEQ ID NO: 151685 - DNA, 449 bp, Glycine max
tacttggcactgtattatcaatgtgagatgggattcagggatcttaggccatatatgacaatgatacactattaactcatcgaatcgacttagcttgtcataaactttatcgttacccaaaagttgaacagatactcgctggttggttgttgaaaggacatacatatcatatgcacaaacaaaagaagaaaaataattatactaaagagagaaaaataaggagaaattgcatgaagtcaagtgttctaaatctatattggatgaaataaattgcgtacttgttgtgaggttatcccaactatccactttgaaccattcataggtatttgtatttatctgcaaaaacagatggaaatagaatgccacccactttggaatatctaaatatgcagcagaagcaaatgggcaaagaaatggtagtagataaagaagtatgatgcatttataac

SEQ ID NO: 151686 - DNA, 397 bp, Glycine max
  unsure (1)..(397): unsure at all n locations
cctcgcccagtattacgatcagccgttgaggtgcttcacctttggggacttccagctatcacccatggtggaagaatttgaagagatcctangatgccctctagggggaagaagaccatacctattctcagagttctatccctcattaactagaatttccaagatagtccaaatctcgacgcaggaattataccacaggaagcaagtcgaaaatggggtggttggaataccaagaaaatatttggaggcaaaagcaaaaatcttggcaggtaaaggcgaaagggcctcgttcatagacattctcgcactggtgatcttcggaggagtcctctttccgaatgtggatgggttggtggacctagcagcaatcgacgcttttctcgcctatcacaaccac

SEQ ID NO: 151687 - DNA, 401 bp, Glycine max
cagcgtgccttactgcactaagtgagttcatcactttttgttttatatctggagttccagatgaactcggtaagccagccctgtcccactaagcgagttcatcttttctgatgaatgcttgaatgtttatgaactcgctaagtgcagttgtgcgctaagcgagtaatgtgtttcagacactcagaaatttttttagtgttttcgtattcgtggctaagcgagcctgctcgctaagccactcagccctgttggttgaataagcctgggctaagcgagcccatctcgctaagcccaaggcacttgtgattttcttatgtttcgacatgcgctaagcgcacctcattgtgctaagcgcaatttattctgtttctgtaattgttggaattgggcttagcgagcct

SEQ ID NO: 151688 - DNA, 413 bp, Glycine max
  unsure (1)..(413): unsure at all n locations
agcttcaaggatgaggactacttctttgttcgctgacttggttaactntaaggccatgagacaaccaccaaaaggtatgaaattccccgagagagaaaggttcttctgaatagtcaccaagtatgtttcggatgaccctattctttttaatattggtgttgacaatttgttaaagcgatgtgtaacaaagggagaacaaactagcatactttggcattgccactactcaccatatggaggccacttcaatagagaaagaatgtctacaaagatccttcaagccgaattctattggccttcaaagatgctcataaccatgcacatcatgcaatagttgtcaatgaatagacaacatatgttgatgacaagaaatgccattacagaacatgcaagaagtagatagtctttgttgt

SEQ ID NO: 151689 - DNA, 419 bp, Glycine max
  unsure (1)..(419): unsure at all n locations
ttaaattgacaggacagagcatccgctgctttgttctctgggccaagtctgtaaatcacctcaaattgaaaccccatcaattcagaaagctagtattgttgatccgaggttgtaatccactgctgcaacaaatgttttatgctgctatggtcggtgtagaccttgaagctcctactgaaaaggtaatggcgccaatgctgaaccgagagtgccaacgccatgatttccttttcatacacagacctctntcttggtcaacattgtcaagggtggacaatcttgccataatctttcatgaatctcatgtattagcctgtgaggcccaagaatcctctcacttcttttgctgtacgaagaattggccaatccagaacagcttgtactttcgaaggatccatgttaactccccgagcagaaat

SEQ ID NO: 151690 - DNA, 434 bp, Glycine max
  unsure (1)..(434): unsure at all n locations
agctngaaattgcattcnggcacttactttgaatcttctatgctatctctacatatataaaacagncccaccattccaatttcgcaaaatcatattcatatatcattggggcatttcatcgaacacttggggggtgcacgtttggacacaaattgcaagagaatggggacaatgtggcataccccattgcttcagaatacaacataggcctaatgcattctcacacaaaccctcaactcaacaaaacaagcatggattcagatgcgaattgcttcacgaattttgcaaaaaatgagcaactaaagcaccaaaacacatcaatggagagccaaataaccaagggaaattgcacttacttgtggggagtgaattaaagcgtgaaaagggaagcaaaaactcaacaatggaaagctgngggctgctgttctcgtaat

SEQ ID NO: 151691 - DNA, 459 bp, Glycine max
  unsure (1)..(459): unsure at all n locations
tcttagtttcagatgatgcagctgagtttgtagctacctcatgtattcttctaatgactataacatcatttctggcgctaaactgctgggagttggaagccatcttctcaattaaatttctggcttcagcaagagtcatgtctccaagggctccaccactggcagcatctatcatacttctctccatattactgagtccttcataaaaatattggagaagcaactgctctgaaatctgatggtgagggaaactgacacatagttntttaaatctctcccagtattcatacaggatctctccactgagttgtctaatacctgagatatccttcctgatggctatggtcttggaagcagggaaattttttctaagaatactctcttcaagtcatcccagctcgtgatggaccttggagcaaggtaatacaattagtcctttgccactccttctaaagaatg

SEQ ID NO: 151692 - DNA, 411 bp, Glycine max
cacaggttatccaggtatctatcacaaaacaaaagaacactgatgcttctattaaaaatctagaagttcaagttggacaactagctaaacaactatctgaacatggaagtagatctttcttatcaaccacataggtcaacccacaggaacattgttatttaattacaacaatatgggggatagtggttggttttaataaagaaggagttggaaaagaaaacgagaaaaatgatgaagtggtgaccactgaaaaagttggtagtgaataatggaagaaaaaatctaatgaaccaaccactaattaaggtgaagctatatgtaaccatccacccattgagcatctttcttatccacatgctccggcaaagaaagataaggaaaggtagtcaagtgtttatatatatttttaac

SEQ ID NO: 151693 - DNA, 452 bp, Glycine max
  unsure (1)..(452): unsure at all n locations
gacacttgaaactcagctacataaccctcatcttattctaattctaacattttataanaattctaaaaatctaaagctacagctaaagtcttctaccctatagttaagacaagaaaaagagaaaaaaaatcaaggaacttacttggatggtgtatgattgatgcttcaaagtcgaaaatgcacaaagagagtacatatgcaaaatgtgcaaatttttggagagagagaatgcaaaggcgaggtttctgtaatctggaaaatgtgagtgtaactgttcttacactcaagcaatatttcgataccttcgcttagcggaccattgcgctaagcgagaaagagagacgtttggtttctcaaccaggctcgcttagcgaacacgtgcgcttagccgacatttcaatttctaaaagaatcgtttttttaacagaaactcgacttatcgcgagtgtacg

SEQ ID NO: 151694 - DNA, 446 bp, Glycine max
  unsure (1)..(446): unsure at all n locations
agcttanatcattgaatcattntatttatttgggattttgtagaaaaaataattttttcaaaagaagagaatgcataggagcttgttaaacttttatccttggacattatatgtagacttttagtgtcacaaaattcaaataccaacaacaccccgatcttaagataaaactggtaacatccttaagttcaggtaatgaaaataatatccttattatctttatctatacaacatcctataaatntgaaacataacaaaaattcttaagaactagattattcattttcaagctgcagacatttaggtatttcaacattattgtcatttaaactagattattctttctaagtatatatggacatgagggaatcaacactggtgcatgcttgcttagttctgatacataatgggatngagagctttatagtttattgaatngatatctt

SEQ ID NO: 151695 - DNA, 460 bp, Glycine max
  unsure (1)..(460): unsure at all n locations
cgagataacatagtcaaagctgtttccactatatgttcgtgctttctttctaccagaccatattggtggtgtgtatgagggcatatgagtctatgaataataccaagctctgcaagatacttaataaaaggtctgtattcccctccccaatcagactaaacagctttaataggcaaattaaattgagttttcaccataatttgaaactgtttaaagataggtagtgtctctgatntatttttcaacaagtacaaccaagtgaaacaagtgtgagcatcaacagaagttacatagtatttataaacagtgtaaatgagttcaaaaggagttgaatacacagtaagagagggagaggagggaagttatgagatttgccaatgcaacaatgggaacaaaagtcagaacttgttttattgattagaagtagattacanaagtttgaatacaagtttcataacat

SEQ ID NO: 151696 - DNA, 448 bp, Glycine max
  unsure (1)..(448): unsure at all n locations
agcttatccattattccaagaacattatcctcaactacttttacagacacaggtattgaatttagaatcaaatatctatatctttccatgcttattntgtaagtttaaattctatggaagaaactcgaaattggtggtttttcacactttctgacgaagtgttttgggtgttggtaattttaggaaatcctgatgaatatatttcaatttggaagaattanaaaaactgggaaattatggttattccatgttcgaaaaagtttcatgtttgagaaaacactaaaactgttttttcttaaatcatgattntcaaaaaccgttgatcttacttctccctaagtgagcctctaagacagcagatctgttggataaatggcattaagatttaaaagcaataatgccaatccaatttttcccatttactgcattagtgtttatgtgacagtca

SEQ ID NO: 151697 - DNA, 376 bp, Glycine max
gatatgactattatacttgaagtgtcaaataagaattattaaagtgattgacatataattcttatttattactttttattgtgtgatatgatgtgacaacctaaataattaatatcaagaaaataattattaaatgttgacattaatattgatattataggtcaataaaatatttcataatatatctatcttaaaacatagtttataataatgaatatcataatactttgttaggttaaattaagtttagttctttaatttattgtttagactcaatttgagtttttatttttttgattcaatttaattctatattttttctaaactgattcaatttgatctttcgatttaaatatataaaatcacatcttatgtt

SEQ ID NO: 151698 - DNA, 469 bp, Glycine max
gcttctatagaaggtttgttcctaatttctctacttttgtctcacctcttaatgagctggtgaagaagaatgtggcatttacttggggtgaaagacaagagcaagcctttgctttactcaaagaaaagcttactaagacacctgttctagctcttcttgacttttctaaaacttttaagctagaatgtgatgcctctagagtgggagttggagatgtaatgttacaaggtgggcaccctattgcttaatttagtgaaaaacttcatggtcccaccctcaactaccccacctatgataaagagctttatgtcttaataagatccctccaaacttatgaacattaccttgtttccaaggaatttgtcattaatagtgatcatgaatcacttaagtacattagagagcaaagcaagttaaacaaaaggcatggaaaatgggtagagtacctagagaaaattcccatatgtat

SEQ ID NO: 151699 - DNA, 464 bp, Glycine max
  unsure (1)..(464): unsure at all n locations
catctacacaaccaaggtctttcatatcaaaatttctagacaagaaatacttcacatcatttatgaaatgcatattactaccaaatatcaatatgtcatccagatacaaacataaaatgacacatctattatcatcaaattgtttcacatacacacatttatcactatcanttaattgaaaatcatacaaaagaataacttaatcaaacttttgtgtaactgctttggagtttgtttcaaaccatataaagatttaacgatttattttttaaggaaaaagattttcacaggaagtaacatctctagattgcataatagtaacattagaaatttcagttccttctgaattaacaactaagaatctataagtagtattatgtaaaanatatccaacacaatacaattaacatttttttcaagttttcatttcttattaatagggatattaacctttactagacacc

SEQ ID NO: 151700 - DNA, 280 bp, Glycine max
atatctctcgtattgcctgtgattagaaaaaatattattttcttgtgctcactatacaaattctttgaagttcgccctgctcgaaagagaaatcgtttaaaatgagagaaattgagtataatgaaaataatatgctgtggtgttcggtcaacacacacaggtgggatacttctttgtgtgcacaagaaaattgatgttttgtctaaaaattattttcatgccgaaaaaccagaaaaaatggatttgtcggtcttatgcacgggaaagataaaactttagc

SEQ ID NO: 151701 - DNA, 352 bp, Glycine max
ttttcttatattattccacgccctttaaacttaatcacattatcttagaatggattagggaacgattcacctcccttgcttgtgggggagggaaggaaaaaccaaaaaatatgtatgaatttaatgaatgacctggtatttcttgactaaattactccaaaatatttccccatgttgtgttcttggtctgggcttttagttaatacattatgaataatgctcatgttataactgattaatctttatgctcgaagagtgatacccgtattatatgaattggatgcaagtgtgagttaacatattgtaccttcaaaatcatctcatagggtgtgcccttctcgtctctacaatc

SEQ ID NO: 151702 - DNA, 151 bp, Glycine max
atttaatgaagtcatatccatttttagaacactcttcatgtgtctttttatctaaatgaactgtatctgagcctttgtgatggctactttacctacatttgcatccctactgtggcaaactcaaggtttgatcgataatattcctttggtt

SEQ ID NO: 151703 - DNA, 258 bp, Glycine max
gcgggccactacaccagtgcgtaatgacttgtctgccaacccggaattggagaacaaagatgtggttcctgtcaacctgtgtcgtggagagactaatttgatgctggaaaacattctaaggaatggctggcgcaccgggaacgcctgcgatatgtagatgccacatgggaagaggaactattgttagagatcaattcccagatttcctcttgaagaccaagctgtgttgcacgagggggcgatgatataagtcggctc

SEQ ID NO: 151704 - DNA, 432 bp, Glycine max
  unsure (1)..(432): unsure at all n locations
agcttgtctttactgccagacgacacaacaatcttgtangtgatagatatgataaatcttagtcaatagaatgtaacgtgtttgctatctaaaaagatgaaggatggcttctgcacaaaagacttgggcatgtcaattcaaaacatatttcaaaactatccaagaagaattttgatgcaatcctaccccccaagggtattggatagaagactccaagaggattgggctagagctactaaagaaggccctagggttctcatgaacctagggtagatttttcagcccatgggtcaaggttggattcacacttctttgtaaatgttagaattagttnttccttcttttgggccttgtattttggccattctagtagtataaggttttaaccttgtatctcacggcattttgagtagtccttttaatagggacctt

SEQ ID NO: 151705 - DNA, 441 bp, Glycine max
  unsure (1)..(441): unsure at all n locations
tgtacccaccatcttctcatagtagaacactggtatattgtccactatcattgntatcatctccctccccatcattgggggtgctacttgagccgcacatccctccatctctgggcgtattctttgaaagatttgtgctcccttttacacatgttctacagatgcgttctatctatggctatatcagaattgtaatgatactgcctaatgaaggcaaccattangtccttccaggaatgaacccgagaaggttccaaattagtataccacgtgacggtttcccctataagactttcctggaataaatgcatcaacaatttttcatcttttgcgtatgccctcattttcctgcagtacatctttaggtgattcttggggcaagtagtccccttgtgatgcaatcctactccgcaagggcatttggatagaaaacttccagta

SEQ ID NO: 151706 - DNA, 288 bp, Glycine max
cctgcacgcatgcaagctttcatgttgctaaacaatttttgcgttcattctgccaaaacccccaaaaaggttgagaacttaaatatgccacgctgatcttgcttataaccggtaagttggatggacaacccgggctattgatcattgctaaatgaaccctgctaaactcgtcttgtcattattaaaaaaatttgaaaattcagggcaggatatatttatgaggtattcttacacattgagcattatgaggaatagcaaatatacttaaaggtcgttgggggtatcttt

SEQ ID NO: 151707 - DNA, 413 bp, Glycine max
agcttttcttttgggtgctctgctattgtttccatttgttagagagaaggagaatgagaaggggattgaaccttaattttactgttggtgtgcgagggatatttctcccttcatagacattatttcgaaaatcccaatggtggggatgtgtgaaaataagtttggaacttggttttcgaatttcacgatgatccaacgattaatgagtccgagatcataattttactggaacaagtttatgtctatgcgaagaaaagagagggtcttggggagaaaaagaaggaaagatgaatttgagacgaagagagagcgaacagacgtatagtaaatgtaaaaactgatttaatatatctatttataactagggtactctcaacccattatttactttattttttattttatcatcttat

SEQ ID NO: 151708 - DNA, 455 bp, Glycine max
  unsure (1)..(455): unsure at all n locations
ctgtaacccacctgggcctcctgattgctttagtatctgtggagggaggactttgctcatgtgttgagcattcatatttcgagataaggcgcccatttgtgtagccttggctagctagctagtgttacctagaccatccagggattgcaggatcaaagaattgagtatgtgcttgagagagggcattctttaaagaacagagaagggtgatgcatcctcgnttaattcatcctctacatgacaatttaagagagtatttccagttttatctctgtattttgagatagataagggaaaatcttctatggacttgttgaataagctagaatcaagcttaattatgtttcttttgtccaactgttcttgcattggatgtngacgagcttgaggcanaccacagtgttgttgtagctttctgtgaaggtcaattataagaaattccatgagacaattat

SEQ ID NO: 151709 - DNA, 439 bp, Glycine max
  unsure (1)..(439): unsure at all n locations
agctntgatagaggtaaaacttcatattcttgccattntntctttcatcttcttattcctttaacaagtttcattatgagtcttgatttagacatgttcacgttggttttttgttacttggtgatatatgttttctatcaatacttttttgcatgtcattataactattatatttagatagctttttcattatagaggcaatgtagttttgggacatcaattttaatggttcctcttgttgttgtcctatgttgtgtcatgttttaattcatattttaactatgtttagcagatgtcttctcccttggaaattagtgaaccaatagcatccactcatacaaatgataatgaggtgaatgtacaagttcctgtagattcaactcaagtagaagcttacaatcaagaaaatgaacatgaagaaccacgtgtcgggagaaag

SEQ ID NO: 151710 - DNA, 464 bp, Glycine max
  unsure (1)..(464): unsure at all n locations
tcctctctaagccttctattaatacactctcttggtgatgaagctcctcctcctcccatggcttattccctagtggatggcgcctcctctcacctcttctcctttatcttccactacaactccatgggtgaaaatcaccattgaaggacctcattgaagctgaaagatccatcctgcatagaagcttctcaagcaagcttccattagtaactttaagagagaacaagagacttttgattatgttaccttaggtttctttttgggctttgatgtactctgtgtaagaattcgatccaaagcaccaacactattagaagatatgttgtcttcagataatgcactcatttntttattgacctaagagtgttcatagttggatttggttagaattaatgttattgtaatgaataaaattaacataacggaatttttgcacttttacttttgactctttataggccata

SEQ ID NO: 151711 - DNA, 419 bp, Glycine max
  unsure (1)..(419): unsure at all n locations
tataatgacattaaagatacgnaagatagagatagctatttccatttatagacnncnaactcatcatcttataaaatcttctagtagtnaatggaccatatgagcgtgcataactttagctaaaaagagggtttggacttaactcaatcttacaaaatcaatggataaattaaaaattactttcatttatatagngtatctcaggactatctttatttgatggaggactttaacatgttccatccttttcatgggtacttgttatggggactttcaacatactcctttatctaagagagactacatctctccttatactcttaaaacgtgacaaacatagaaatctatttaagatagactgtaataccatgtcaaaaaatgagtgaatctaattctatacatgtcaaacatccaattac

SEQ ID NO: 151712 - DNA, 359 bp, Glycine max
  unsure (1)..(359): unsure at all n locations
agatactcatcttctagccaatagactaccttgtatattttctttgattgcccctntgagcctatgttcccctttctttgttttgtagctcattacaagccttaagagaaaaaccatgatatcaccttacccttaagagaattttggagctctggaatagnttagggaataagttgggaataagtgtaggggggtatgtttcattggaagatatgattttaggccatgctcaatgttttattttggccatgctagatgtatatatatattgcctagttcttgctttaatcttcaattgctgcaaaaaaaaatatatatcaattgctgcaaattccgattgggtaaaaaaaaaaagaaaa

SEQ ID NO: 151713 - DNA, 362 bp, Glycine max
  unsure (1)..(362): unsure at all n locations
nctcaaagaagagatgcaatttatgagaagggattgagttgccaagcngaagccacgnaaagaaggtttctctttgaatctcatcaaagaagtttcgcaacaaagctgctcaagagaagctacctatgctatttttagaacgcatgagtacacttggagtactttgaagaatgaaagtcttatgagacacactttaaagtaccacttctctggttgtgttatacattcaatttcgagctcgccccttctctctatttatagctccattaaatcatcatcttcaagcttcttatccaagagacattcttggtgggttagctccttcttccatggatattccctggaggatagtgcctgccctc

SEQ ID NO: 151714 - DNA, 131 bp, Glycine max
agagagcaagacaagaagagccaaagagcgcaccccggacagagacgaaaaagatcatgaggaagcgcgaagcgccggctagccactcaaaggaccagaaacgcaagccccaaaaacctaacccaagcaac

SEQ ID NO: 151715 - DNA, 411 bp, Glycine max
  unsure (1)..(411): unsure at all n locations
agatatgaagaagtgttgaaaggtgatacttcctgcttttanaggagaccacagagtggtnacctggtgatatgtcgcggaggtcaagataccttggggacatcaagaggggagctattgcccaaaaccaatcttgaccaatcccgacccaccccgggcatagtcagtcagagagaacctgtgatgtacctaaacaagcgagctcctggcagtcaacagataaaaggaacaaagaccacaaagcaaagaagctagaggaggctggccagctgagaactttgattgatatgagggtagaggcctctgagaatcgattaccaaaggtgggtaatcgattacaaagcttaaaattgaagacagaaagctaagattggctctggtaatcgattaccacggagtgtaatcgattac

SEQ ID NO: 151716 - DNA, 359 bp, Glycine max
  unsure (1)..(359): unsure at all n locations
gaagctatagatgaagaaccgncgaaaggtgttatctgtctgctgttatttncgaccacagagaggnaccaggagatatgtctctttggtcaagagaccttgaggacgccacgtggggagctcttgcccaaaaccagacttgaccaatcccttcccaacccaggcatagtcggtcattgagaacctgtgatgtacctaagcacgcgatctcctgccagccaacaaataaaaggaacaatgaccactaaccaaggaagctcggggttatatgccagctgtgaaacttgactgttctgtgagatctggcctctgagaatcgatgaccaaaggtgggtaatcgatcacaaggctcaaaaatg

SEQ ID NO: 151717 - DNA, 382 bp, Glycine max
  unsure (1)..(382): unsure at all n locations
ctaaggatgaatgatccagctagcctgagctgatgtaagtttcttttggaggaagcaagcannncagctgagcgatctgctatagctcctccacccctcatttcctatcaataggcgtgagataaattacagagtagaaagagtttgtcctacttcatacccagatggggcgcttgcctggcgcctccatgatcattcttcatcgttcttcgtgctttagacggccagtgcctatcatcgaaactttgaattcattttatgcacccctaagagcccagacttgctttacatgagctaattctcattcttctagcatgagagatcgctttcattactttaaagagagtggcgaccaatccattgagtctaaatctcatttaat

SEQ ID NO: 151718 - DNA, 387 bp, Glycine max
  unsure (1)..(387): unsure at all n locations
agaaactaagctaatacatgaacattacagncatatgtgattaacatgttatttataggntcaggaccatgcatnnnaccttcttggttgaacatatcaagcagtctaagtctatcagagatttctaatagagaattcaccaaaactaccctattgaggacttaagaacaacttgagatttcagaattacaatatactcttgncttcaaccgattgcaaagattatgagtagcgataacgctaaagtgataaatattcccaaaacaatatgggctgggcaacaatagataataagttccagcttcactaaatcttgatgactattaaatattaaaactcgctcacctattttggtctacaatgacttgctttatatgtgtaaaaagt

SEQ ID NO: 151719 - DNA, 346 bp, Glycine max
  unsure (1)..(346): unsure at all n locations
agagctcatagnagctgacccacaaagctcctcggaatttgtctcggccatgctcttccttgcgagccctcttggtttctttttcaaaggctcttgcggnagcttcattttcttctcgtaactcgacacactctttccagacgtctatagcgactaacttgaatatttctttggcaaggcttgcctttcctagntctgtttttagagctaggacttcttcatcctcttccggagcttcgaagatctcctcggagataattttcaacttggagagcccatcttaccctcgggtacgaactttcaggcattcatgataaccacccatgatgccctaacggatgccccc

SEQ ID NO: 151720 - DNA, 372 bp, Glycine max
  unsure (1)..(372): unsure at all n locations
tcaagatatctaggaatacttcatctgcagagttaactttctagaagnagnatcaagataacaaagtcaatcttggtctcaacaacaatgccagaatggcacagnagctctccttcaagctgcagagaataacattcttgccctccttcaagctcaaatggcacagttgcctggagcctctcagcaagacccctctgacactgnaggtattgaaaccataagcatgtcaaactctactttaaattcccctttccaagcacctaaagcttggattgttgattctggagcaacatctcacattacttgttttcctgaatttctctttaacttcaaattcttgaaaaacaaccaaatggaactagagttcaagtg

SEQ ID NO: 151721 - DNA, 156 bp, Glycine max
ggccgccatgtcaagcccactaccgaaactaaattttgtgaatggcttagccgatcctggggaggcatatacagggcgctctcctctaggcctgagggcaaataagcacacttttatcgcgcacccagcctcatccttgcaaagcctctgccggtt

SEQ ID NO: 151722 - DNA, 388 bp, Glycine max
  unsure (1)..(388): unsure at all n locations
aactcaagcttctccccaatnctcataaataattgagagaagtgatttgtaccaaggcncagcccccnaagcacttctctctctatcgaattagctaggaaaaataggggccgagaagaaaatctaagccgaagcggctccgtaacgcttccgagaagaattccgcaaaagttacgaccgttcttagacgttcttcattcgatcttcatcattcttcgatcttcaacgggtaagtacctcgaaccaagtttttcgattcattctatgtaccctgggtggtccacattatgtctcgagtatgattattctcggatcatttactttctatacccgccttagacgagcttaagccatgttatttaagtcatttctcgctaacctaaaaaca

SEQ ID NO: 151723 - DNA, 373 bp, Glycine max
  unsure (1)..(373): unsure at all n locations
nctactnatgcggcaaggcatagcttacttcactttcttgtctccaacgcgagctttgaccactgttctttcttcccgcgatgcttcttttcatgtccgcctgagtgggctnatagcctaaaccatacttcccacgatttccttggagatctatcaagctagttatgcagccgntgtttttgcctaaacccatccctgattcataaccgttccccaacataactcgggccatcattaccgctgcatcggacagacaaagctgcccaaagatggagtccacagaagaaatgctgaccacctcaaaagactggaaagcagnttctaacgattcttctgcggcccccacataaagcatggaagatgggcagcttac

SEQ ID NO: 151724 - DNA, 303 bp, Glycine max
  unsure (1)..(303): unsure at all n locations
atcaacatatagcaccaattttgtttaaagnntgagcccaaagaacaagcacacttccctttcacttttttttctggatactaatctttctgccaactagagtaatttttagtatgttttccttttatcaaaatcacttggttctttttgaataaattttttccagatgtctagaaaattaagtaaaaatttcatgccaaaattcgaagtaaccaattctcaataatttttacaaggttgtatgttcaagctgccaacaccaacgatttagtttttaagcatgagatattgattagcttgagc

SEQ ID NO: 151725 - DNA, 378 bp, Glycine max
  unsure (1)..(378): unsure at all n locations
ntttatctagccaagatcatactatagtgttactacagttcctaacggnnnctaatnatatgaggccatcaaatctatcatgtgtagacagtagtagattatcccataaatntcctcaagggctgtacacacttcagcgatggcctttgctttggctaatagtcgcgggaagtcttgacttccatttaaagtcaaagcgatcctatccatccacatggttgtntcttgatagcaatgcatcaattccctccctcttgcttccttctcggagtacgcttgagcgaagncctctactagcttttgttcattggtcaacgacaggtntaactcttccttgtattgccctatgatagctagcatgcttatgctcgtggcttc

SEQ ID NO: 151726 - DNA, 323 bp, Glycine max
  unsure (1)..(323): unsure at all n locations
gcccgagcactnggccaactatcaatagatgagccttaggctgcattgggtcatccgattatatgatcgacttagatgagtggagacctggtgcgacttaggcccgtgagatgtgctagatgtggatgctgaggtatgcggagacttatcgacataagtagatgatgccatccttcccccctagagcatggtgttgacgaccctttctattctttgatgctggagcaagcgctgatttcgcttgatcctctatgtcttttatgagcgctctggctgatttcccccacagttttctgtgtgcttgttatttctcggctcagtct

SEQ ID NO: 151727 - DNA, 333 bp, Glycine max
  unsure (1)..(333): unsure at all n locations
cttcaatatagcctcctacttgactaaattccggacctactctttattagtgcctatgacctggatccgcacaatctatttgggcaaactcattaaccacattaagtggcggttctaattcagcttcttgntggacaacattcacattctcaatacttagtctatcaaccaaaaaatccctcatctctgaaattaaatgatcctaagcttatactccattaacaaccaaaaccataagaatcaaaatttaaataagaatagnttctcaaaataaaaagaatccctcatgatttataaagaggaagaacaagcattatattatattcaatttaa

SEQ ID NO: 151728 - DNA, 249 bp, Glycine max
  unsure (1)..(249): unsure at all n locations
gacgccccgcccgaagcaaaaacccagccaccccaggaaacggagcaccccccacacnaagcacctaaaagagggcccgangcgacaaagaggaagaccccacgaagaggaaccgcaacacgaccatgcacaaagcacaagcgacaaggaccaaggagagaaaacaaaagccccgccaccacaaaagaaagatcccgccaaagcaaacactaagaccagggaagagaaaacagaccagccggaccccac

SEQ ID NO: 151729 - DNA, 352 bp, Glycine max
  unsure (1)..(352): unsure at all n locations
tgatgcagnagcaaataaagctggaattgttcttaagaagaaataagagtgcctaattatggttttgtaacagagtggcagaatgcattcatgttccttgctgntaatagtagatttttgnttttcaaaaacaacttgagttgtagcttctagagattcataatatggcgaggtcatgtgcttactaagccatgaatctcactaatggaaatctcttttgaataccccctcatcgaggtacttataatggccatggatatcataagatctttagtagctttaccaacttgaaatatcctactaaattggtattttgatagtatgttgaattgtaggnaccacaaccaaaatt

SEQ ID NO: 151730 - DNA, 353 bp, Glycine max
aggcatcacctgattcatttgttccccatcaaactgagaagagggccctccaccagatgacacccttctacaacatctttcataatccacctgtattatgcacaacccaaacaaggacacatacattagtataggctaataacctatttcattaagcatgtcagccaaatcagaacaaaaataaattagaaaaataaatttaagctctaaggctcctacagcagtcaatcaatgctttgctttttaaataagatacaacatgccaatagataataacacatagaatatcagcctttctacctatgttcacaagtgaaaagattctaagacttaaagtggcaataacaaagtct

SEQ ID NO: 151731 - DNA, 405 bp, Glycine max
  unsure (1)..(405): unsure at all n locations
ncttcccactaaacaaagaactccagttccttgttattttctcactncaactntcatccgncttgaaggaattttttcattatagtacagntagttgcccttcttaacaacatcccaaatgggtagacgaaggcacaccttatctgcaacaattntgatctcgacagcctttgagatgtgcaaccctagttgatacgaagctgcttgattgagaatgtacatattggcatgtattcctcaaagatagagtaatctactgaagttaagtcaagatctgctagatgatacaagaagagcttagcgataggcgtctagagattgacctttttttggaactcactatttggaggttccacctcctgtaaaagatccctcttgtgtttctcaaacaaatccttaaggata

SEQ ID NO: 151732 - DNA, 410 bp, Glycine max
  unsure (1)..(410): unsure at all n locations
gaaacnnaagctnatgatcccaaggatgggattagagctgaatgctgatgttcannctnagaagacacagaagtagaacatgaccactctagctcagacatggagcgttctttccttttctaacctcattcctacctcccacacatctgatgtcaccttagacagagccaaactaatttatggcatcattatgaagatggatatgaacttggggtacctcatctcccaccagatctctctgattgcacaacatgacacatctagacttggattccctgccttgatcatagctctatgcaaagccagaagagtccaatcagattctagattcctggagaacttgagccctgccattaacttggcatatattaagaagaactgntggaatcttgatgatccaacagagacat

SEQ ID NO: 151733 - DNA, 293 bp, Glycine max
  unsure (1)..(293): unsure at all n locations
gctcattccaaagctcatatagagagatgaagcttcttcttncaaggcncaagccctagaggatgggacgtactctctctccgtctcctatagcccccgctggatctccatggaggaagatcaccagtcaatgatctcattgaagctcaaagatccagcctgcatataagccccacacgcaagcgcccatcatagtggatcagaacacaagagcttcaagcaagtgctccttaaacctccattaatactttttctttaacttcgctcacattggagatgctcccatttgtctc

SEQ ID NO: 151734 - DNA, 402 bp, Glycine max
  unsure (1)..(402): unsure at all n locations
nctcaacaagnnaatatatttcttattccacctatatttgtgatatnaannnnnnatnnaagaagagcaattaaaaaaatatgctcaaatctaaatgagtaaaaagnacgcattntaattagaggaataaaaaaaatgaatgtgattaacgaaaaaaaatgcatttcagacgctaaaaaaattaaacaatactatgattcttaaaaaatagaaaatcgattagatttgaagaaaaatgtatattcttttggcattaggaaaattgtttttaattttttttaacaactttcataaaaagtattttattaaaagcatttcagacattaaaaaaatcaaacaatttttttaacactaaatataaatttctctgggaaaattttttgaacaagttccttcttattt

SEQ ID NO: 151735 - DNA, 374 bp, Glycine max
  unsure (1)..(374): unsure at all n locations
agnnctagacctttcaccatagctctatatatatcactcttgaaagnagcagncagagcaattcatagttcatgcctcttatgcaaacaagcatgaagaaactacatagttcaacataaactcaagctcagctactaggagatnctattataattgcaaatnnatttctagttcaataaaattttctaatttaaataaataaaatcatccactgaagttaaatatatggatatcgattacaagtatagctctctttcaagagtacattagctgataaaaaaacattaagatcctagctaataacctaaaacatttttaagagttctttgaaaaattaacctgatattactggtctacatgcagagttcatcaat

SEQ ID NO: 151736 - DNA, 239 bp, Glycine max
  unsure (1)..(239): unsure at all n locations
agtaagactcaccaaaggtggaccttgtgttntatgagccctnnagagaaccgactaaggaattgttcgnctctagttttagagagactcaccaaagacagaccttgagttttgcgaacccttagaataaacaacctatgagactcaccaaaggtggaccttgggtttgacaagcctttggagaatcgaccagagaattatcccgccctgggtttggagaaactcaccaaaggcggacc

SEQ ID NO: 151737 - DNA, 165 bp, Glycine max
  unsure (1)..(165): unsure at all n locations
acacaggnagcgagtctactatcattattatcatctctctctccatcattgggggcacttcttgagctattagatccctccacctttgggagtattctttgaaagatctatgctccctcttacacatgatttggagntgcattctatccggagccctatcaaaat

SEQ ID NO: 151738 - DNA, 409 bp, Glycine max
  unsure (1)..(409): unsure at all n locations
accttaaaactcagcttaacacctggctttccccatgtttatctccttctttgtccntnattgtgncagcatcctcctaagttttttcaaagattatgtccaggacagagattcagagacaaattgatagagtatcaagtgctagtatattgaagttaagaaccttttcatgttagtagcattacagatctggcttatattagaatacaaaactagtgcagttagtattgcaacagtatgattgccaatcttggacttaatatacaagggcacaattctggcaaaccaaaaccaatcatgttagccttaccggagtcccctttaccactgtagatacatgaccaagcactactncttccatgtctggaactggggcaagccgagagagtccaaaatcaggcactttcgc

SEQ ID NO: 151739 - DNA, 410 bp, Glycine max
  unsure (1)..(410): unsure at all n locations
agagggattnagagatagagattnagccggagatgttgttgatagataaagactaccggatttggattttttatgggagatagagntttacatggagttctaagaagcaaagcacttgaacactttctacttgagaagccgagtatgtagctgcaacttcttgcacatgtcatgccatttggctaataagattgntggaagaacttcagntgttgcaaaaggaaagcacaaagatctatgttgataatagatctgcacaagagcttgcaaagaatccggtgttccatgaacgaagtaagcatatagatacaaggtatcatttcattagagagtgcattacaaagaaagaagtagaattgactcatgtgaaaactcaagatcaagntgcagatattttcaccaagcctctc

SEQ ID NO: 151740 - DNA, 352 bp, Glycine max
  unsure (1)..(352): unsure at all n locations
acatagatactaagctttgatgcccnnctaacatatatgatatactgcattnttgtccgcatcnnnactatcaaattccatgccaacatataattctaggccaacattaaaagtcgacggcatctccaaaccgcaaaagtcctcctcatcaagataactccagttgatattggtataatgtaaagcatcattccaaaaaggattttcaattcgttgagcacctaacagttcaaaataaaaaatcaaataatacttatctaacattaaatacaattgtcattaaataataaatatattgagtaatttttttatacagcaaattataccttctgctgggagaacaattcttact

SEQ ID NO: 151741 - DNA, 248 bp, Glycine max
  unsure (1)..(248): unsure at all n locations
aagcgcnaaacggaatcaaaaatgcgaaaaaagatggccctatggctgcaaactccncaatcccgtgggtatggcttctgaaaagggggaaaataagtttttgaatgttaaaacgcccccccccccttttgtcattcttataatttggcacaagggtggctctcccattctagcccttctcgcccaggcgatcttacctgcactttttttttttgttcggaagggaattttaaccatgtgccctccct

SEQ ID NO: 151742 - DNA, 410 bp, Glycine max
  unsure (1)..(410): unsure at all n locations
tcttatccaaagcactctctaggaggagatagtttctccttccatggctnatnctctagaggatggcgcctcctctcacctcttctcctttgtcttctattgcaactccatggctgaaaatcaccatagaaagaacttattaaaactcaaagatccagcctccatagaagcttctcaagcaagcttccatcaagagagatcaaagcacaaaagcttcaagtaggagctccttaaacctccattaattttcagctttaccttctcctccattgtagtttcttcatttttctccatttatctcctcacatgtctagagctgaatgtagtaacatgattttttagaatttccgctgattaaactagctatagaagctagatttgattttctatggntcaaatttcttgttctt

SEQ ID NO: 151743 - DNA, 362 bp, Glycine max
  unsure (1)..(362): unsure at all n locations
tcaaagatataaacttttgcaatataaaatctaatatagatagtaatagtattaaaaatggatcatccattgagaattaagctgattttaatgaagatcaatatgttcgtctagagatagataaaagagagttctaaaacaatttttaaaaaaacacttggagttaaaaagaagtgatagaaagtgttataagaaagctagataaaccattatggagagaagtggnaacatttggnttatactggttcactcaaccagagntacgtttagctcttctttactcactagtaaaaggttccactaatcaaaacttgattacaaaacaagtattctaacctatcactcctagctatacaagtatt

SEQ ID NO: 151744 - DNA, 408 bp, Glycine max
  unsure (1)..(408): unsure at all n locations
tcgaatggtcaccgcttcattctatagggcgatagattatcttaccaaatgggtcaaagcggcttcttatactaaagtcacgagaagagaggaggttagattcataaagatggagctgatttgtcgatacgaactccctaagaagatcattactgacaatggcaccaattagaacaacaaaatgatgcaagaaatgtgcgaagatttctagatccagcatcataactccaccccttatcgaccaaagatgaaagggtctatagaagcttcaaataagaatattaagaagattgttcagaagataacagngtcatacaaagattggcatgatatgttgcctttcaccttgcacagatatagaacctcggnacgaacttctactaaggcaacgccgtattccttggttta

SEQ ID NO: 151745 - DNA, 179 bp, Glycine max
  unsure (1)..(179): unsure at all n locations
gctgtctctagaacgttnccattgaatttaatgatgaaatctgagcattttcaagtgaaaaagaggctaagttttgaattgcaaaatgtagcaattgggcttagctttgcagctgggctaagcacatattcaccgctaaacaaaacttcagcgcgctttgcgcaatggagaatctggca

SEQ ID NO: 151746 - DNA, 363 bp, Glycine max
  unsure (1)..(363): unsure at all n locations
agacacaagaatactaagctaaatgannatgagagagacgtagtctctttcantgtttgganaaaaagcgnnaagnnncctttatcttcccttttttacaaagagacatcctgaagctcaactgtgnctcatctcatctgtaacttaactttcgcaaataaacaccatgaatnccaaattgattatgatagatgattaagctttaactttttgagaatacacaccttaaactttaattgcattccaagagatctttaaaacgcatctttttactaatatttattatttcaaggtatttatcttataatgtnaatcattcatttgtttttgttacaactcatttgttctatatgtaaatctaac

SEQ ID NO: 151747 - DNA, 416 bp, Glycine max
  unsure (1)..(416): unsure at all n locations
acacatagaaactaagctacaaagagnctctatatataacactaattgagacacaatctcttacagtccaagcgaagagggactagagacctcacaagttntacagaccaagcaaagagggacaaaagaactaagaccataaactctaacaattctcccacttggggtctaagttccaaactctagcagctccttgttagcaatgagttcatcgactctctacctagtagagagccttcatcttcaattatccttgaaagccaactgaagcaatgcaaagcctcagttagtcatctagaacaactttagtcaacatatctgtaggattatctgatcctaagatctcaatacagataagtctccatcattcatcaactccctgataaatatggatcctaattgaatatgcttagctc

SEQ ID NO: 151748 - DNA, 326 bp, Glycine max
tgcctcgcgagatatcagagcgcccggatcggacctccgtgcgaaatgttatgtccatatcaatcgctggagagcttccgatgtttaatttcgtgcggctcgatatattatcagcctgattaggacctccgagcgttaagttatgtccattggtatcgctcgagagcttccggcgttcattttcgagcgtccccatatgtgagagcgccgtatgcgaacctccgagcgtaaagttttgaccattggtttctctgaagagcttccgatgttcatttttgagcctcgcgacatatgatgcgcccgaatcggacatccgagcgtaaagt

SEQ ID NO: 151749 - DNA, 383 bp, Glycine max
  unsure (1)..(383): unsure at all n locations
nagcatagaacaaagcaatgtaattttagtcccagacctcgtatattcactcaaaaatagagaagagaatntctagataccttaaaagaatcgggaaccaagggctactaattcaaactattcatacttaacaaccatctcttattgcattatgagatgcaaactaagcctcattaatagatgatagataaaaagccctctttaagagctagtatatatcttaacccgaatttaattttatagaggctcaagaaacaaaatttatcggcctagtccagaattgaagctgagtactgcatctgaaatcctatggattcaatctctcctgagttttttcagatctcaaagatctactattacaaccttagtacaatctgtcacac

SEQ ID NO: 151750 - DNA, 288 bp, Glycine max
  unsure (1)..(288): unsure at all n locations
ccctgaaggtgcatagatcacattcaaatccttaaaactaaaactaaccgaatgataaatgaagatcgaatgaagaacgatgttgttatcgatttcagtcgcaattcgatagcgtntcggcctcgtttcctctttttttcttcttcttcttctttctctcctctctcaattccctcaattgctgaccttggaacccttataacaacccctagaacacctatttataagaaaatggtcactttgggagtatgttcagctcgcccaggcgagttgggttcttcaccatga

SEQ ID NO: 151751 - DNA, 412 bp, Glycine max
  unsure (1)..(412): unsure at all n locations
agactcccacataaaggncaaagctaccagagatattcttaacatggaganccctagccttgacaacatagacgtacaagnaattcatctgttccactaagccgnaggaggtggatatctngtcccggcctcctctattgcgcaaacgagccgccagtggaggacttgtctccaccaatgaatactcaaggtctggctttgagatctgctgcattaacattacattgggaggcccagcttttgcaaaatcaaccctcctttgggtcgtttccatcgcgggtgctgctggaatagagtgaaaagtcctgacttccttctctttcatttgcatcttatttttcttcttgtacccgccaccaaccgcgcttttctcatctagcaccgagttcatgtagggggttatttcttgaaa

SEQ ID NO: 151752 - DNA, 265 bp, Glycine max
  unsure (1)..(265): unsure at all n locations
aacacattcttccacctaagtactaagaactatgatttagcatattccgtgttccattgagaagggtgctgtaagaaaagctctcatagactagggagctagtatcaacttaatgcctctttccatgtgctggtgacttggagagatagagataatacatacacgcatgatcctctagttagcttattgctccatcgcaagaccatatggagagatcgaagatgttntggggaaagagaaacaccttatattcccagcttatttt

SEQ ID NO: 151753 - DNA, 255 bp, Glycine max
  unsure (1)..(255): unsure at all n locations
tataaatctcatgcttacttcttaatgaaatttccatttgagcttgctttcctatttggcnctncncagaatgggcactcttcttgttcttctatccatttttttagcatgtgagcctcctttcttttcaactcaatcttttctccttatttttttggttctcctgcataattagctgctcaatgctcccagatccagaattcgagtagttcaatcccttcatgcaggcatgttatttcattttcataagnaccc

SEQ ID NO: 151754 - DNA, 350 bp, Glycine max
  unsure (1)..(350): unsure at all n locations
catttttaagccaaagnnngagggaatcaatacacataaaacaacgaggcgaacataagaccaattatgaggcataaccaaaatataatcctaacagtcataatgcaaaaccacatagaatctaaacataaaagactaaagtncaaatactaaaagataaatagagtgcagaaaaagatacgttaaatagcatagccaaaatacagggcttaaaagaaaattagaaactaaactctaagaaagtggaagaggaggcggaaagttgaagctctgacgaatataacccacatcttcttcaagttgtgtgagacggatatccatgccagcaaagcaagtatccagagaatcaa

SEQ ID NO: 151755 - DNA, 385 bp, Glycine max
  unsure (1)..(385): unsure at all n locations
tctaagctatnaccacttgcaagtatggtaagaaaaattatgaactaaatagcactggcaacaaattgaagcgaactcaaaaaaacaaatagcccaaatcgtactgaactaataacagagtgggtgaaccgaaccgaataggtctttgattcagttaacagcattctaaaaatttgaactgattcgagctctagataggntagaactgtttttatgctttgaactgaactgaattgcactctaaaaaaatggntcttcattcattttcaaatcaacaatataattttcatattgaggagtatttaatcagtacaagagtggntcttaattcaccatatgaagaaaagaatccacctcttaattggcgtgtctcaatgagtatgtt

SEQ ID NO: 151756 - DNA, 380 bp, Glycine max
  unsure (1)..(380): unsure at all n locations
accacacaagcataaagctctaacgttggctttacgccatacaaactctgcatttgaccaagatattttaatccttctttttctatagccagcatgggtacaggcaattagcactcccagaaatgcaaaagaatccggcctgcatcctttattttgcattaatccaaacagctcaatagccttcagcacatgtccatggataccatatcctgctattataacattccatactagcgtcatccttctcattcaccctggcaaaaaagtnccgagattgtcccaagcatccacactcagcatacatagcttttaaagcacacagaacaaagttatcctcagatagatcatagtttattgcaaaggagtgatacttttttccc

SEQ ID NO: 151757 - DNA, 400 bp, Glycine max
  unsure (1)..(400): unsure at all n locations
taaccgatgactcgcgctcccagataaagagccagtagtttctctttatcagncncagggccacccccctgatattggagggcgaccaactgagcaagcacaaccagagatggaagctatcacacaactactatgcataccggggcaagatttcacccatgccgctgcaaagagacgagagtggatcatgtgtaccaacatgacccctttttacacagatataaatgacggtgctacttagcaacattctgcccagcgaccgcaataccgatctccccctgaggaagtatcaataggtctgagccatcccgacataagtaggtatgcattatttccaactaatttctaatgccatctactatttgtaaggatcgcgcccgcaagacacccagtggacccg

SEQ ID NO: 151758 - DNA, 328 bp, Glycine max
  unsure (1)..(328): unsure at all n locations
cactagataatactagggcttgtcagatcccctgtgctcagaacttcttatatgggcttggganaagattnagagnaanaaagatgtagtgtctccttgcagctgctttaagtccttttatgtttagctcgcctggcgtgctttcctagactgaccgactcttatgagttaccgaattcggcggcttacgatcgtccagatcggacgactctttatgagtctgnaagattcagctagctcactttgtcatgctctagtatgactgactctttgtgatgtaccggatctactctcccatgtgagaactacgatcatgcgtactccctca

SEQ ID NO: 151759 - DNA, 385 bp, Glycine max
  unsure (1)..(385): unsure at all n locations
cttagattactcagctnataagtgcaggtctggaagacgaaagtcaagtgttctctttatgtgaagatgaagnnccaagtacttcagatttgagccgaccatgccctcctgatttccatctaagatattggcgggtggaggaacgccccggcatttacgcaacaagcataatagaaacctttacaggtttaaaagctctatagtagggcctaagctttagagttttcattttgttaaagctttgagtctttcgnctttgaatttataatacaaggatctttcttcatctgttcctggtctctacccattctcattcatttgcatgtgnacttctttttctgaaacagcagatccgatgacgagtcccccgaaagtacttatacct

SEQ ID NO: 151760 - DNA, 331 bp, Glycine max
  unsure (1)..(331): unsure at all n locations
cccttcattnaactgactctgggcttggaggccacgctcaacaaagtactttcgacacctactgtacgtagatttgaccaaagctgttatgggaatgttgcgacaatccttcaaaaccttattgatactttctgagaagtaggcagtcatgtggccatatcgacacccttctctatcataagccatcgtccatttttcctttgaaatgcgatcaatccatgttactatggctggacttagntcacgataatcctctaaattntgatcaaaaatgtgcttgcaaggagtgtagactgcatattattagttatgaataacaatttcaagtata

SEQ ID NO: 151761 - DNA, 369 bp, Glycine max
  unsure (1)..(369): unsure at all n locations
actcagctatctacctatcatcggcagatagagtgagatagattcnattttaaaaacacgaagnctaatccaagatgttgtgttaggagcaagggcataatagcattcactctatgtctatccatgattatattaagaagtccctacctttgagtcttactaaaaattatcctctatcgagcgactaatgcctaaaactgatgcatataaaaccttgaaaggagagctactaaggatgaccctctttcaagcgccaaacccctaaagaagatgcgaagatgaaacatattatacatttgttggcattttaagccagcctagccctaactaaaggggtgaagcccttcattgacatgagagactctcaca

SEQ ID NO: 151762 - DNA, 273 bp, Glycine max
  unsure (1)..(273): unsure at all n locations
ggctcccttcctatgtggagtaaagacccaaatgagatagcccattttgtctcactttttttagtggagatgggtcagatttgatttatacacaaagtatgactcttttgagaaggaaaaacagctataaatcattgagagaaaaatgagtggctaattcattgagattttcgcatacccaccagagatcattttcaaattgcaactgtaaattcgntcactataggataaggctgatttttggacagagggttctacacatgtgatacttca

SEQ ID NO: 151763 - DNA, 153 bp, Glycine max
  unsure (1)..(153): unsure at all n locations
aataagagaaataaacatttatttttatccttgatgacataaacgaatattatgtctccgttggcaagctatatatcctcagtgaattatgataatagaaactntgatgaataattattagatctctcaattatttggttcttcttcctaggc

SEQ ID NO: 151764 - DNA, 210 bp, Glycine max
aaccctaaccctctaattatcagcatcagagacctcaacagagtcgataaagacgccttctttgcgcgcctccgagactcctattgcaccctccatttccttgtcaccactaccacgcgccccgctaccctatcgaagttgatgggaaagactacatcttcatctccaaagatgagcctcttgggattgtggagtgggaagatctgctgg

SEQ ID NO: 151765 - DNA, 407 bp, Glycine max
  unsure (1)..(407): unsure at all n locations
gaccttagatactaagctacttggatggaaatcaagttaaatgggactggtgtttgtgnaaactcgatnnagcccattaatcaagtgttaagcccattaagtttgagctattactccaaagaaaattctagagaatgtgaaaaataagtagaagtaatatttaattggaagaagtgtgtagaactaagtagttgggagaagagagtagaactctcccttaatgtgagaggaatctttcttgatgtatctagaactctcccttgaagcctacaaaaaggggataggttgncatttagaaagtatccaacgaagccaaaacaaaaacatttctcaagtaataaaaactagccttcttttaaatattctctcctcctccatttctcttaaatacttnctataacctttcc

SEQ ID NO: 151766 - DNA, 305 bp, Glycine max
cagctagcatttagaattgcgaaatcccctctccatcattaagaggaggacctgacatttcaaacaaacaaatcatacgttacaagacaattattggtgctgtttgaatacctcacccactcaagaggatcacacaattatgggttttctctaatgaaacactcttgccctttaccactctaattccccttgagatctttagcgattcaagaaattattggcacaactaagaacaattcacccatattgtgaaaggaaagcttgacaaagaaaaaggttacccagaaaaaaggttaccatgtttc

SEQ ID NO: 151767 - DNA, 363 bp, Glycine max
agccacccagctcgcccaggcgagcatagttgcttcctccataagcaacagccttctggaaggcccaagtgggcctggttgctatttgcacccccatttttactaaatacaccccctgccttttttttggagattcttttttccagaaagttacggaaacttacgaatttcgtaatgatacttgttttctttccagaatgttatggaaccttgcggattacataatcatccccttttttgacttacagaatgttacagaacctcactatttgagcaacgaagcttcctttcgatttccggagtttcatggaaccttacagattgtgcatcaatattttcgtgtgatttccagcacgtcacgga

SEQ ID NO: 151768 - DNA, 357 bp, Glycine max
tccactctgcttgaatgccatgtgtttacaactctatttattgatattgccaagaaagcatatattaacaaaacagagttccatgaacactacttgatccgcaagagagagagagttgcacgaacacttcctaatccgctagaaaaagagttgcatcaacgatcccagatctgcgagaaagaaaatatgagcgttctgggcgcataactatatttgagttttggaatcgcattgagaatagaaaagaacgctatgaagaaccctaaaccgaaaatgagagtaggagttaagaaatccaccatgtttcggcactatgaagatacttcaacccttaatgagatttggagtttgggtgct

SEQ ID NO: 151769 - DNA, 255 bp, Glycine max
aaatcttattttaccccaccctctccaagatctggaaaacttgatcacaaaacccacgaagcatccattctggcagcaactatgacccctttttgagcatatttgcctcaaatcttttgcattcctttcatctcacccaagtaaggatcatcttcagctcaaaatacaaccttcttcttgctatgatgagatgatttatacttcctgttttagtagaaacgcaacgtgtatgacggctatttggtcatttctttt

SEQ ID NO: 151770 - DNA, 314 bp, Glycine max
  unsure (1)..(314): unsure at all n locations
taaaattggacataggcntgaggtcgagacaaacttatataaattcattgtgggatgtcttgatgttgaactaacacatgatgntgaattagtgttagatcttatgcattatttgaggttacaaataaaagaggtctttctcatcattagatacaatctatatcaaaacctttataaagaggtatattnatattcatcggacgataaatatgctntttagtccttagaaaaaatcctaaatagataaaaatattattcaatcccttttttgagttatttgctctagtagagagaaattagctcctcgttgtcac

SEQ ID NO: 151771 - DNA, 385 bp, Glycine max
  unsure (1)..(385): unsure at all n locations
atgaagttctaacctacctgttctgtcctataatcctcttgcattgntaagatccctgtatctgaagtattattcgcttatgtactcgatgatcatcatgattttgtccttagaataagagtcttggagggtttagtggaaaatgtgtctataaataagagtacctaagcgagtgtggcaagggttatttatagacatcatgtcctctcaacccattgagacatcttttacaaagaaaaaatcgagatgggtatttagtacctaatcggattatacctcagatatggagaccctaatgatgcctgtggatttgaagtcgaaacattggggttagaatgagagcctaagncactattgcctctagactcaactgggggacatgttt

SEQ ID NO: 151772 - DNA, 226 bp, Glycine max
  unsure (1)..(226): unsure at all n locations
agatctacatnatgactaatttgcctaatataattcgatcaaanattatatgcatnaggatttagatagagatgcagctagactagatctggatttaattctttttaaggtcaattntatgagactctggatcagnatatcataaatgttncttttaagagatgatattataaatgntatcttatcgatttatctaattccatgtttccttcattaaatgcataat

SEQ ID NO: 151773 - DNA, 326 bp, Glycine max
  unsure (1)..(326): unsure at all n locations
agccagatcatgttcgtcttctatatctctatcccctnncaagcattatattccaactaagtcacacaaagttctttatcaaagcgtcaagtttaatttataatatataaaagcaaagaaaatcaaagcataaacttaatcatataaaaccatccgaatcaatttgcccttagaatatgggaagaaaatcaaaagtcttaaaaacatcatgagcttaggtaaattaaattgattggggacgaacagagccgcgtgncctatgtatgatctatgggagccaatactggccccatattaaacggatcatggtgagcgtaattaaattt

SEQ ID NO: 151774 - DNA, 184 bp, Glycine max
  unsure (1)..(184): unsure at all n locations
agcattcgatcatcggagccatagagatcaagatagctctgaatacaacgggcctgcattttgctcagatctttggccaaaaggtagcttatggcgaaaccagccccaccataagccatgccgnaagagataatatatgttctgcaagagactctccgacaagctcccaatgtagnacatgtag

SEQ ID NO: 151775 - DNA, 147 bp, Glycine max
aaatacacataaccaaaacacttgtgagcttgagagaaacaatatacttgtgagtagtgaatcatgagtgatgattgtcatacttgctaaccttctttatctccaagagagttctcgcttgcttctatcatgaaaactatgaaaaat

SEQ ID NO: 151776 - DNA, 354 bp, Glycine max
  unsure (1)..(354): unsure at all n locations
agacctatgaatactcagctaggagtatatccatattctgagatatttcttatagcatgcatnaagagagaacctcagnttcccgtttgagattcaatacactgattaatacggatagttaggattaatcgatatatagagtcttgaattatctgttaggacagctagggaggacatttttttatagttgattcatacgtagagagaaattctcttttgcatgattagaagaaatntaagtatactgcattncacattattcttcaagtgcatactgactgcagagattgtgcaccatgtcaccgctttcatcttgtgtacctgaagaccaatgcgaaatgctaccgaaatttc

SEQ ID NO: 151777 - DNA, 342 bp, Glycine max
  unsure (1)..(342): unsure at all n locations
agcttctggagggacatcttgacttgcttttctatctgacattcaccacagattctgccttcttctattttcagattgggaatgcctctaacagcacttttgtcaaagattttcttcatgcctcttaagtgcagatgtccaaacctttgatgccatattctgacttcatcttctttggaggatagacatgtagaagagtagctggtttcttgggagagccatatagaacaattgtcctttgatctgctgccttcattagaacttcactcttctcatttgncaccaagcattctgactttgagaagnttacattgaatccttcatcacacagctgactgatgc

SEQ ID NO: 151778 - DNA, 414 bp, Glycine max
ttgcttagaatgcactattcaatggagttgcaagatcatcttttgtctgttctacactagcacagtggccaaagatgcatgggagatcctgaaaatcactcatgaaagaacctccaaagtaaagatgtccagattgcaactcctggctacaaaattcgaaaatctgaagattaaagaagaagagagtattcatgacttccacatgaacattcttgaaatagccaatgcttgcactgccttgggagagaggataacagatgaaatgctggtgtgatagatcctcagatccttgcctaagagatttgacatgaaagtcactgcaatagaagaagcccaagacatttgcaacatgagagtagatgaactcattggttctcttcaaacctttgagctaagactctcggatatggctga

SEQ ID NO: 151779 - DNA, 193 bp, Glycine max
ttagattactatatgcttctagccaaaggactcacctagaatcaattccttagatatcttctttgagccttggggccctttccttgttttttatctctctacaagccttaagagaaaaaccatgatatcaccatatccttaaagaatttaggagtttaggaattgtttagggaataagagagggggggggggg

SEQ ID NO: 151780 - DNA, 369 bp, Glycine max
  unsure (1)..(369): unsure at all n locations
agctagagaatcnaggcaatttctgtatttctattcactnaaaaatttgtgactctagaaaaaatcttcaaaaacatgtctcttgaagaattgcgacttttggaaatgcaattcttgaaatcagtcactgggaatccatttccattaaggagttattgattacacatcaacagatgagactctattctgaattttgaaaattaaaacgtttagagactctgagtaatcgattactattgtggctgaatcgattacacaagccttaaatgatttaaaactgttcaacacaagttgtgactcttgatatttgaaatcttaacattntataacacatggcatcgattacttccttctaggaatcgatttcaa

SEQ ID NO: 151781 - DNA, 229 bp, Glycine max
  unsure (1)..(229): unsure at all n locations
tgnnccttgatagcatcatgcatctctgcatgacatcgttatgtacatatcacncttgcatatatcatgaatcatattcatgcattgcattggcatgatgcatagcattatcatacatcttcatntagcatagcctnagntgtgccaattgcggacattttcatcatttgcatgctatgttcactcatgcatgatcctgacacatatntgctcatgccttgcattttct

SEQ ID NO: 151782 - DNA, 368 bp, Glycine max
  unsure (1)..(368): unsure at all n locations
tcaccagatgacgccgatcgaacattttctttccgactgtcatgcaaatnncgnncaaggattgaatagaaatctcgttaagcgacatctgtcgagaagtagcgaccgatatttttcagccgacattgcacaattctttttagaaaagctcgctggtcgataatggtctttttacggcagagtaagttttcttgttttggagttgcataaaaaagttacaatgtacttcggctaagtttttcgagcgagttcaaccgacattttgtttcggccaggaaaacattagcccacctctgcaaaaaaaatatttgctaaccgncttcatgcatatttcattcaacgattgaatagaaaactcaatagccgac

SEQ ID NO: 151783 - DNA, 337 bp, Glycine max
  unsure (1)..(337): unsure at all n locations
gactctagcagcaagtgtagatccctgattcatggcaagctgagttactaagttgaccaaagcatcaagttttccttcaagctttttattttcagtagatgaagaagaatctgaggccaattcatgcactcctctaagaacaatagcatcattncttgcactgaattgnagggagtaggaatccattttctcaatcaaattcctagccttaataagggtcatatcaccaagagctccaccattgaaagcatcaatcatactcctctccatgttgcttagtccctcattgaaatattgaagaaagagctgctcagaaatctggtggagaagacagctt

SEQ ID NO: 151784 - DNA, 219 bp, Glycine max
  unsure (1)..(219): unsure at all n locations
ttctccaaaatcaccctcttatgggcatcccatctgaaaatggacctgggagcaaggtagngtanccaatattttagcactccctccagagaatgaagaaaagcctttagaaagatatgatcttcttggacatcaaggggccttatggaggaacaaacaatatgggactccttaagatgcttataaagatcctcacctacatagaccatgaaacttggg

SEQ ID NO: 151785 - DNA, 397 bp, Glycine max
  unsure (1)..(397): unsure at all n locations
tcctacccaaagaactctagtgagcggactcttattaatcaaaagggatnaaaagaagngatctttgatgtgtaaatataatccattctttgataatagagatgctactcacatttattattagagtattgactttcaggtcaaattagnttaaataggcaacatcaactttagaagatcccaaagcccaaccctgacataaagaccctttttgtagaccctgttaccaatcccttaatgggggctgtcccaaaagctggaagattcccaccacttggagctcatggagtaagtaaaataataagacatgatccatctatgctttactagtaatgcctctttatacttattatgactctgnttatacatttttcagccatttcaactaataatgcaa

SEQ ID NO: 151786 - DNA, 423 bp, Glycine max
  unsure (1)..(423): unsure at all n locations
cctataatatactcagcttacaaacatgagcacatgttattcgacattttgtattatgnnnannatacaaggnagaagcctttttttgtgagatttctacaaacatggcctgattgagttatgcatcttaaaagcacaacaactaatatgtacattnncttaatagcttactagttttacatgtgttcttttaagctaaaatatgctcttttcctataaaattttcaaagttaggttttattccttgcaaaaactttcatccattttttcgtcttcttaaaattataaagtcattttttgncatgtgctaaataataatgatgataatgatatttaaaaaaaaaatcatgcaacggtctttaaaaatgatgagaggntatacgcttctttcatttggtatatgatttgncacaatattatttt

SEQ ID NO: 151787 - DNA, 94 bp, Glycine max
  unsure (1)..(94): unsure at all n locations
ccttagatactcagctaacaaacttagaaatcaagtgatcatgtattccgaattataaggggagaaaacggatgcacattntatctatatacaa

SEQ ID NO: 151788 - DNA, 357 bp, Glycine max
  unsure (1)..(357): unsure at all n locations
atagctncaaggagctcattgactccaaattgctgcatagaatttcttatatnagnntggagatctacagaagatcattgaccacaaactcttgcaataagagcagatgcagattttagattcatgagaagctgagttattaagttaaccaatgcatcatgttttccctcgagctttttattcacagcagatgaagattaatccgaggccacctcatggactcctctaaagacaataacatcatttcttgcactgaattgnagggagtaggaatccatcttctcaatgaaattcctagcctcagcaagagtcatatcaccaaaggctccaccaatggcagcatcaatcatacttctc

SEQ ID NO: 151789 - DNA, 236 bp, Glycine max
  unsure (1)..(236): unsure at all n locations
tcttggattctttggcattgtggggtttaatataatcatattccgaagcaatctcaaacctaaaaccaaacttttcatgaatattcatatgaaacaaaaggtatattgattcattatgtgacaaactacttgtttccacaaaagatagttcatttaaatctcagnagatggtatcaattaaccatgacatataactaagagacaactctacctcacaaattaacttttagaattga

SEQ ID NO: 151790 - DNA, 399 bp, Glycine max
  unsure (1)..(399): unsure at all n locations
tcaagctgntcaattgctccatattgttgcacaaaaagtgcaaaagtctgnatggaggncggcagaagtgcataaaacacagagtcttgtgacaagtacagatttctgattcaaagccaactgggttaccaggttaaccaaagcatctagtttaccctcaagcttcttagtttcagctgatgaagatgtattcgaggctacttcatgcactcctctaacgacaatagcatcattttggcactaaactattgggagttggaagtcatcttctcaattaaattcctagcttcaacaagggtcatgtctcctaagactccaccactagcagcatctatcatacttctctccatattactgagtccttcataaaatattggagaagatactgctcataaatct

SEQ ID NO: 151791 - DNA, 382 bp, Glycine max
  unsure (1)..(382): unsure at all n locations
aggcatacctacaatgcaatttttttttagagattntgattctttattnnagaaacttacaactccctcttaagacaatacaggttcaaccttcaatgattaaagntgagcaagacccaagagagcatatgcaaagcataaattcattggaggtagttgtcgcaacatgccantttgcaggcgagcgatggcgaagctcacaggtgcgctttccaaaagaagaaagatgtgcaaagtcgccaccaacgtttatttgtggaaaacgtcgggaaaaccgaaagaaaccggncaaaatgaaaattctaagttcgggagttagatttacgcttgaagaagtattagcacctctcacgtttgtctcaaaagacaacagcctattttt

SEQ ID NO: 151792 - DNA, 392 bp, Glycine max
  unsure (1)..(392): unsure at all n locations
tcccatgcttatccatccagagcaaggtaatntactaatataatattgtcattttctttttagttttcatgataaattaaagggttaaaaagtaatggaaaatctaacttatttctttggatttttttcttttttttggtagagttgtctgggcaaataaagttgctctgttcaggtttcacagagaatgcttgaacctactatatgcagggtgccacaagatcaaaacaaccttgctttagaaatagtttgtgaatctatagccaacaaatagtagatcttacgatgtgttagaattttccgaataatgatcgtttgacctcttatatgtagcactgttttgaataaatctgacaaataaaattcgttttaaatattggatgtttctattc

SEQ ID NO: 151793 - DNA, 424 bp, Glycine max
  unsure (1)..(424): unsure at all n locations
tgaaacaagagccggtttaagagcttgtgataagtttgtgagtgattgtgagatcctagaggtgaaggagacatcctcaccacttgtatatntgcaatctttcatcttgttcttctctttgttcttaagaaggcttcctggtatggaactgtggctcttccctataggtacttgatgtaaatatatttctatctatttaatgatgttttgtgtgttctttgtgctatctgcttttcattccagtatgcatttaccttgatcacgtagatgcatgctttgttagggtcattcaacagtggaaactggtctgactctaaagtccttgatagtgcaaggctgagttgtcgtgctttcacgaggaatcggggtgcgataatttanttgagtatgtgtngtttaatgtggtcctaattgatttagtctt

SEQ ID NO: 151794 - DNA, 424 bp, Glycine max
  unsure (1)..(424): unsure at all n locations
gtaacctaaaattgagagaaaatgattattaaacattttttatggaagtactaagtatttgttacctatacttaacagaaaatacttattacactacaaaataaccataaattgggagagtattgtcgcaacctacccttcggcgggagggcgacgcgtgactcgcgggatgcgtgttccacgaaaggaatacgcgcggagtcgccaccaacgtttatttgaggaaaacgtcggaaaaaccggaaaagacgcgatctacgaacttttaagtgaaaggttcgggagttgtatttacgcgcggggaaggtattagcaccccacacgtccgtcacaagggacggcagcctttaatcgaatgtgcaaacatgactntgattattacgttcccttttatgtccttatattctttataccctntgtatat

SEQ ID NO: 151795 - DNA, 414 bp, Glycine max
  unsure (1)..(414): unsure at all n locations
gcttcatgatgaatcaacgatgatgcaaaggtgttntgatgataacaatgatgacaacaaaagatgatgacaaaaagctcaagagaatcaaagaacatccatctcaagaaaatctagaacaagtcaaagagttcaagaatcaagaagaattcaagactcaagaagaaagcctacaaacaagaatcaagatcaagattcaagactcaagattcaagaatgaagaaaagactcaatcaagataagtattaaaaagtttttcaaaactttgaatagcacatgagtttttgacaaaaccttttccaaagagtttttactctctggtaattgattaccatactggtgtaatcgattaccagtagcaaaatgagtttgaaaatgttttcaaactgaatttacaacgttccaaatattttc

SEQ ID NO: 151796 - DNA, 422 bp, Glycine max
  unsure (1)..(422): unsure at all n locations
ctccctctntgaacaaatacccctcagccaaatagaatccatcttgtgcctttttcccacaactctcgtaaatgggagagaaatattcatctaaagcatacaagtccgtaatgttatcaaatactaaaatttgagctcatagggagcaaaacaatgtgtgtctcctagagagggcatcagctaccacatttgtttttccctttttgtatttgataacatatggaaatttctctaggtactctacccattttgcatgccttttgtttaacttgctttgccctctaatgtacttaagtgattgatgatcactatgaatgacaaattccttggaaacaaggtaatgttcccaagtttggagggctcttattaaggcataaagctctttatcatangtggggtagttgagggtggcactatgaagt

SEQ ID NO: 151797 - DNA, 412 bp, Glycine max
  unsure (1)..(412): unsure at all n locations
agcttgaagccacagaattgcatatggtttataatatgaaagtcttgtttgtggtaataatcatgaaaggagttttttaacacaagcaatttgtatcacaatatatgtagctacttcccttgagaaaaaaattatggaaaatttattttgattttatatttacttcaatttttttggcaatggccggattgaaaaatatttaattgaataaggttgttatattgttgaatttgtcaataatacatgtgtngaatttattttgttttttttttacttgattacttagtacccttctctatattaacgtttattataaataagttgttttataactatgactaattgttcatattaaaatggttaaccacattttttagagagttaatttaatgttgttaaaatctaagccatc

SEQ ID NO: 151798 - DNA, 425 bp, Glycine max
cctcgattcattctatgtacccgtagtggtccacattgtgtctcgtgcatttatattctcgttttgtttactttttgtaccccctgttgacatgcttaagccattttgcttaagtcgtttctcgcttaacttaaaaataaaataaatttccaccgaacgtttgaattgtattatccattaactctggttaaaatcaattccgaccgttcggtcgtgccgtaaccacgttggaaatcaaaaagaggtaaaaaataatataataatcaaaaagacatcttttagtaaaataaagcggaaaatcaatcggacgttttctctttgggatttctcattcttaatcaaattgattaataactaaagtgaaactaaaggctaaaatcaattcgcctagtcaagctcgtccataaaaataggcttttgaagtt

SEQ ID NO: 151799 - DNA, 412 bp, Glycine max
ttaagtcactgctgcatgcagcttacagtatgacatcacgagcagaaactgttatttaagaaacaaaaatatcttgcacccattattgatctatgaggtgcacaaattaaagcggctttttcttgtatgagtatctatgggtctgacactttttctattaacatttctgtgacataagtgtagaactactaacactggtgtctagataatgattcttagcaactagctagtgccaatatttaatagtagacaaactgttattcactgttcatatagagacaagaagaaaatatatttgtgtcagctaaatgtaataattggttacaatatgcataatctctgacagggacctcacgatctcacttagagtttgtcttattcatatatgtagatccagagcactggctctaat

SEQ ID NO: 151800 - DNA, 424 bp, Glycine max
tcatccaaatccaccccaacacaaatcttagccgccattgattttttctcttccatttctcttactttctcagcctttttcgattacccatttggttatttcgccctaatggctcttgctccatccaaagtttccaccttctctggtttttctcccaaacccagtgttgggggtgctcataaaaacccaacttgctctgtttctctgagctttttgaatgagaaacttggaagcaaaaaccttatggtttgtgcctcaacggtgcctctcactggggtgatttttgaaccgtttgaggaggttaagaagagcgagcttgctgttccaactgctccccaagtctcgttggctcgtcagaactacgctgatgagtgtgaatctgcgactaacgagcagataaagtgagcacttctatatgtctcat

SEQ ID NO: 151801 - DNA, 390 bp, Glycine max
agcttatccgacagagccacctcaaatattatcttctaaatgaaattctcatcagcaacctgtcgtaagccttgatgtacctcccttggagcttgtaggccatggatcttcttcatcaatagagtcttttgcttcttgaattttaatggcagcggaatggagaaggagaaagatgaatggtcacgccactataagttgaagatgagtctagaagaagctcacaaccataagaagccatggataagagcttgcatgtacaagaagatgaatgaagggagaggaagaaaagagcacaaaatttagtgcttctaaagaagtctgaactttgaagtttaattctcaaatgatcaaagttgataaaatgcacacacatgacccctatatatgcct

SEQ ID NO: 151802 - DNA, 424 bp, Glycine max
  unsure (1)..(424): unsure at all n locations
ntgcggatntggtctttgccgggaaaaggatcgaagctttctgaaaaaaggcaaatttaatcattctacttggacgaatgagaaaactagggcaaatgaagagggtgagaatgaaggagaaacccatactgcgattgtcgttcctacatggaaacttcccactagctcaacaacatcattactcagccaatatcagcccttctcattacccaccacccagtcatccacaaaggccatccctaaatcaaccacaaagcctgtctaccgtacttccaatgacgaacaccacctttagcacaaaccaaaacaccaaccaagaaatgaatnttgtagcaaaaaaaagcctgtagaattcacccccattctagtgtcctatgctgacttgctcccatatctactcgataattcaataggtagccataat

SEQ ID NO: 151803 - DNA, 403 bp, Glycine max
tgcggcatgcaagcttgaggatatggggacccgtttatgtggtactacggggcgatcgggcgatggtgcaagtcgactctccacatccacaaatcacacataaatccaacatcctcagttgcccaccttccactgagctcacgtactcgcacgtagccccttattctcgttcctcacaacaccggcttcccatcaatccctccaagcttccacaacatccaaacatcatgaactatccaaaaccaagaaaacagggcagaggcagaaaactctgcccaaaacacattccaataccacaactttccttactcaaataccccagtaacattctcttccttccgattcgttaaccgttggatcgactcgagaatattaatggaggtccctaatacataatactaca

SEQ ID NO: 151804 - DNA, 416 bp, Glycine max
  unsure (1)..(416): unsure at all n locations
tgngatactctctntaagacgaaatccccttcgtgaactttttgggcgtaccttcttgttgaaagcgttcttcacccggctttgatataaccatccttggctcatggcggccaatctcttatcttctataatattcagctgatcaaagcgtgcctgggtccattccgactctttcagccctaactcaaccagaattctcaaagagggaacctccacttcaaatggaagcacaacctccatcccgtacactaatgagaatggagttgccccagttgatatgcacaccgaggttcgataaccatgcagtgtgaaagggaaaatctcgtgccaatccttgtatgacacggtcattttttgaactatcttcttgatgttcttattagcaacctcaacttcccccattcatgttgggcctg

SEQ ID NO: 151805 - DNA, 419 bp, Glycine max
agcttagaatcatggttacctcaaagaattctcgtgaaggtcagattgggcttcgttctgaaccgaaaccgtgagtcaagtttggaagattccgctccaattgaagggttcctctcggtgtggggtttcaacagagaaatacggcggttcgtggtggctactagtggctgtggtgatgtaaaagaagctttggacgttggaaatatttttggaagaaggaaggagaaagaaatggcgtttttccaaggctacacgaatcacaaaggctgacacactcaagttcttctgctctcggaaaaggaagcgtttctcacacgccggatgtcgtatcgccgatctcaacggtcaggtcgtccacaaatgtcttatgaaccttcagaccaaatctcaagaggatccaacggttaacgaatgcatga

SEQ ID NO: 151806 - DNA, 422 bp, Glycine max
aaagtatgcccgagtcattcatcgatatgagatgttgtttaagtattggcgatcagaattgccattccttggattatacggttgaaccaagctcatgcttttacaaaaaggttcatcaagtcaagctgaaatatggaagtaaccgtcttgcaaaattggggcaaaagatgaatcgagtcacatcactgcttcgtctactgccaaacatatttaggattattgatgtccttgttacttccagtttcaccttgacaaagatgtcatggaccatgttgaaaatctaaattgattcaaccccatatcctgcgtaaaaattcgcaatactttaactgtacatcattcgcatacatccatgcttttcattgagtgcattgctcattgcattctgtccttgaaaaataaaataaaataaaatataatga

SEQ ID NO: 151807 - DNA, 352 bp, Glycine max
tgccgcatgccagctagacgacacggatgaagggattcattatatgaatcgccacccacacgttgcgacgtggacgactccactcgatgcactgccggttaatcacaaagtgaatctacccccctcgatgctaacgaaattctaacacggatcccacgacatatgtgccgccaactaatattatgcaaccccaaaaggaggaatgatgttgctgaagctcggactgccctgaaaaaaacgcgcataacgaaagcaaccagaagtctctggattgaagtcacctaccctatacacgctcttattacaggagagaaatctcatcctccaatacatgagatcataagaccgcctc

SEQ ID NO: 151808 - DNA, 342 bp, Glycine max
accaagggccccttagctccatgtgggtggacattactgcccaccaagggtccaaaaccctctataatcaccttatggttatatactggccgccaatacccaagtggagactactcctgctccacaccctaagaaagattaacatacagttaattcttgggaatttgcctcctaaggaatccctatgcactcattgtcttctacaactaaaaatataattgtgctttagattactggcatcaagatgtagctggagtcagaatgatgcaataccaatattgtgagacattataatccaacacacgattatgctctaattcatttctgacctattacacgaac

SEQ ID NO: 151809 - DNA, 418 bp, Glycine max
agcttggagaggatgcgttaatggatgttatgaaagagggagagaaagagagaggggggagcacgaaattgaaggaagaaaaagggagagaagttgaactttgagttgtgtctcacaagactctcattcatcaaagttaccacaagtgttacacatgcttctatttatagactaggtagcttccttgagaatctttcttaagaaaacttccttgagaagcttctttgagaaaacttccttgagaagctagagcttatctacacacacccatctaaaaactaagctcaccttcttgagaagctagagcttagctacacacacccctctaataactaagctcacctccttgagaagagaagctagagcttatctacacacccttataatagctaagctcacccccatgagaaaatacatg

SEQ ID NO: 151810 - DNA, 427 bp, Glycine max
tgagcagcggcactaagccaccattgtgtgcaatatctgtctatttatgtgggtcacgaaaatgcaaagatggaaatgcattgaatgtgttacagatccaaaaactgttatgcagagaagaaaatacaaagttatttccaaggatataatggcaactttaaattcccaactaatgcaagtgaattgtaaacaaggaaaaaaaattatctaggccaatctccctaatgcaaaagctgacatttccctgagctgtacatcaggagactgaagcatctctatcaaaggttggacaacacctgtctgtacaatgtgaacctaaaaagaccaagggtaacaaatagtaaaaaataagggacacaaaagataatatatgatgcatctgttggaacaagtaaagctcttcacacatactcacactatgcactca

SEQ ID NO: 151811 - DNA, 420 bp, Glycine max
  unsure (1)..(420): unsure at all n locations
tcccgccagngttaatggcggcacccacgtcggaaatatatcctgcatgttatttgtttagaaacgaaccccctttggtaaattgtttgtaaaacaagccctgtacggtaaatttgccttatctgctacatggaaagctgcgtcaacctttgacaacaaagagcgtgagaaggctattgaagaatcacaagaagttcagcagattcttttaatataaccgtcgttgaaccaacaacgtagaaatctcttttagtagtcgtacctacgtgtaacaatgtgtggcttatagnttgagtttggtgtttcttaccttttttacataaaagttgaattctagcctaaaatacagataatttgttccatattcctaatggtcatgtgtttctaacatacctaatgttgttgatgacctgaacgtgt

SEQ ID NO: 151812 - DNA, 418 bp, Glycine max
  unsure (1)..(418): unsure at all n locations
agcttcttttggaccttgaacaggcaactaactcctctttcaaaaccatgctatgtgctcgcgactggtccctttcttcctttcgcaacttgagttcactattgctaccccatagagctccgcgaaatttgttccggccatactcttccttgcgagccctcttggtctcttgttcaagggctcttgcggtaattgcattctcttcccgtaacccggcacactccttccgaacgtgtgtagcggccaacttgaacttctccttggcaagttntgcctttcctaactcgcttttgagagcatggacttcttcgtcctcttccggtgcttcaaaactctctttgctgacgacttttaacttggcgagccaatctaaacctcgtatatgaactttcagccattcgtggtacccaccaatgat

SEQ ID NO: 151813 - DNA, 418 bp, Glycine max
tataatatatcgaggcgctcgaaattgaacaacggaaggtcttgagaaattcaaatggtcataacttttaactcggatgtccaattcatgcgcatcacatatagagacgctaaaaaatgaacaacggaagctctccagaagttaaaatggtcataagttttcacaaagatgtccgattcaggcttgtattatatcgagacgctcaaaattaaacatcgaaagctctcgagaaattcaaatggtcataacttttcactcggatgtccgattcaggcgcatcacatatacagacgctcgagtatgaacaaaggaagctctggagaaattcaaatggtcataactttttacactgaggtccgattcaggcttataatatatcgagtcgctcgaaattaaacatcggaagctctcgagaaat

SEQ ID NO: 151814 - DNA, 391 bp, Glycine max
  unsure (1)..(391): unsure at all n locations
gcactcattntaaatccttcatgctgtccctatatatataaaacagtcccacaatcccaagcttacaaaaccatgctcatatgtcattgaggcatttcaccgagcacttcgtgggcgcatgtttaggaatgaatagcaagagagtgggggcaatgtggcatgccccattgctttagaatgcaacataggcctagggccatcccatacaaacctctaactcacatcaatcaagcatgaaagcaaaccaaaattgccccacaaatttgagcacattcccacaatttagagaaccaaaagaagaccaaaatacaccaatggaaagctagaaagctcaagtatgagatacttacttgttggagtgagtatgagtaccaaaaatgaaagcaaaatg

SEQ ID NO: 151815 - DNA, 423 bp, Glycine max
tgcgttgctacgcctagaatggcatactggcactcattttaaatccttcatgccgagcctatatatatgaaacagtcccacaatcccaagcttacaaaaccatgctcatatgtcattgaggcatttcaccgagcacttggggggcgcatgtttaagcatgaatagcaagagagtgggggaaatgtggcatgccccattgcttcagaacgcaacataagcctagggccatgccatacaaacctctaactcacatcaatcaagcatgaaagcaaaccaaaattgccccacaaatttgagcacatctccacaatttagagcaccaaaagaagaccaaaatacaccaatggaaagctagaaagctcaaggatgagatactcacttgttggagtgagtaggagtaccaataatgatagcaaaatgcaa

SEQ ID NO: 151816 - DNA, 430 bp, Glycine max
  unsure (1)..(430): unsure at all n locations
agctntaatataataaagcagcacgacgtttattnnttcatgagaatttcaccagaagcaactgaaaggtgcttctagtttgacgtgtatttacacgtttgagatttcaaaccaaaatcgtatgacgttgattattgcgccagttacgttggtctctgcgcaagttacggaagtagttcttaggactacgttcaaagtcatctctataaatgcgaattttcctccctggagccttcattgtcttccctctttcacaacaacaacagaaaatcttcctcatcacgttccaaagacccaatacaaaagtagaaatcacgttccatagcaacaaaacaacaccagaaatcagcttccaaagcaaccaaacaacaccaaaaaccaccttttcaagcaaccagacaacaggaatagctgccagtgctacaacaac

SEQ ID NO: 151817 - DNA, 427 bp, Glycine max
  unsure (1)..(427): unsure at all n locations
tctgatgnatttggctataaggaacttggttcagagaaatctggacgtgatgcaaatggaaatatttggcgtgaattttggagagaatccttgtgtctggtcagcaaaatttgacacattttaaatgcctttcttattataatgatagtttgctgaaaatatgatcagtagcatatttctagtatcattatcactgtgtgcattcatatttattcttctgtggaattgggcacctgtttgtgaaattggtcactagtgtagcttgccaattattaatgcattaactgtagctgtagccttggcgctcatagatctgacctatagagtcttggacaacagattctttttatttcactaaaataaataccaagtatggtactatggttttcacttgcaggaaaatgggcttatgaagtttgagaaaact

SEQ ID NO: 151818 - DNA, 413 bp, Glycine max
  unsure (1)..(413): unsure at all n locations
agctngnntttgagggatgggtcactctatctnttgttgctntgggaatctggcatactcttatgaagttttgaggttttaatttaccatgatttctatcattctggagttcggatggaggatgaggatactattgtattgcatattaattccttttttaggagctttttctacaaaaggaaactattgaagccggtttaggacacctttctctctctgtggaagagattaaacaagttgtttttgatccccaaagtggacaaagtttaatttattatcaatttcatcctattcctttatgcaataccatttataaggttttgacaaaggctatagtttatagattgaagcctgttatgccaatgttgatctctgtgtttcaaattggctttattccagcatgtaccattcat

SEQ ID NO: 151819 - DNA, 420 bp, Glycine max
tgatgtattgtagaatggtaaagagactgctatggatattttcttaatgttataaggcgtttgttactttagttcttatttattctagatttggattctataaataaaaaatacagctaatttatattcaaaagaactaaaataattttcaatttttaaattaaatattatagtaaagattttgttatagcaaagattaaatcgatacttaagttttaaaaactaaaatatttactcataaaaaatatattattactttagtaggttcaataattgaatacttatttaatacattcttatcaaacatattgtgcatggatatatatgtatgttgtagtactgttttatttttctgacttaaacggtttttggtgtgtgtataatgggttacgggcccttccattgtcaagaattcggatg

SEQ ID NO: 151820 - DNA, 373 bp, Glycine max
ggagacgccacttcaagtagaagatgagtctagaagaagctcaccaccataggaagccatgggtaagagcttgaaggtagaagaagatgaatgaagggagaggcagagaaggagcacgaaattttatgtctcaaaagaggtctgaactttgaagtttaattctcaaatgatcaaagttgaaaaaatgcacacacatgacctctatttatagcctaagtgtcacacaaaattggagggaaatttgaatttcaattcaaatttcacttgaatttgaaattgaatttatggatccaaccttggcccatgggctcaaaaatctaccctaaggttcatgacaaccctcgggccttcttcaatagctctagcctaatcc

SEQ ID NO: 151821 - DNA, 427 bp, Glycine max
  unsure (1)..(427): unsure at all n locations
nnttaatttgtatggaatcttgattgagaagcttctatggaggctggatatttgatcttcaatgaggtccttcaatggtgattttcggccgtggagatgcagcagaagataaaggagaagaagtgagaggaggcgtcatccactagggaataaaccattgaaggagaagcttcaccaccaagagagtgccttggataagaagcttagaaaggaagcttcaatggaggaaaataatgagagagagagagagagagaaaaaaaaaagtgtcatgggaatgaaggaaagatagggaaagaatttgaactttgaagtgtgtctcacaagactctcattcatcaaagttaccaagagtgttacacatgcttctatntatagcctaagtagcttccttgagaagcttccttgggaagctagtgttacacccct

SEQ ID NO: 151822 - DNA, 364 bp, Glycine max
ctgcagctgcctcaagagtacagaagactttttgtctaaggaactaattccgccccggagtacgacagtcaccgctttatgagcgttgtacaccaacttctgttttgaagccatcaagggatggtcgtttctccgagagcgactcgtccagttcatggaggacgagtatactgatttccacgaggaaataaggcgccggcggtgggcaccactggttacacccatggccaagtttgatccagaaatagtccttgagttctacgccaatgcttggccaacggaggaaggcgtccgtgacatgatatcctcggttatgggtcagtggatcccgttccatgcctacgctattaaccagctcctggga

SEQ ID NO: 151823 - DNA, 412 bp, Glycine max
agcgtctcgatatattatgcgcctgaatcggacacccgcgtggaaagttatgacccttcgaaattatcgagagctcccgttgtgcaatttcgagcgtctgtatatacgatgcgcctaaatcggacatccgagttgaaagatatgaccctttgaatttttcgagagcttccgttgtgcaatgtcgagcgtctggatataccatgcgcctgaatcagaactccgggtgaatagatatgacccttcgaattacgtgagagctttcattggtacatttcgagcgtgttgatatatcatgcgccataatcagaccgctggggtgaaagttatcacccttcgaatttctcgatggcctccattgtgacatccgagcgtaactatatattatgcgcctgaatcggacacccgcgttaaa

SEQ ID NO: 151824 - DNA, 437 bp, Glycine max
acctgcagcatcaagcttaagaaaagatggctatattttccttatttccagaagggaattctatcaatagacctccaatctttaatggagagggttaccactactggaaaacccgtatgcaaatttttatgcaggcaatagatctaaatatctgcgaagccataaaaataagtccttatatacccaccacaatagaaagagtttcaatagatggtaattcatcaagtgaaagcataaccataaaaaaacctacagatagatggtctgaagaggatagaaaacgagtacaatacaacttataagccaacaacataataacatctgccctaggaatggatgaatcattcacggtttctaattgtaagagtgcttacgaaatgtgggacactcttctattaacacatgaaggaactacagatgttaaaagatctacgata

SEQ ID NO: 151825 - DNA, 414 bp, Glycine max
cgctggttacctccttcttcactacatcaagaatcactgtgttgagtcttctatgtggctgtcttactggttgagccccatcctctaaatttattcgatgcatacatgtggatgggctaataccagaaatgtccaccagggtccagcctatagccttcttatgcttcttgagaactgataacagcttctcctcttgctcatcagcaaggtaggcagatataattactggaaaacttttgctatcatccaagtaagcatattttaaatttgatggtagaggcttcaattctggtgtgggcagctggatagtggtagaaagagatggtttctcagtctgcacctcataaagaaagttagaggtatgtgtacttcctgaaacatggtgagttctatctaactctataaaatcaatct

SEQ ID NO: 151826 - DNA, 384 bp, Glycine max
  unsure (1)..(384): unsure at all n locations
caggacggntggtaccaaaatcgttgatgagtgtgtcattgtcaaacatttacctgttgttggttaaccagaccaataaatagtgtgtaactcatcaaatcacctttattactacgtttaggttcatttttatgcatatgtatatagaatatagacacacgccggatccagattcggtgcagtcatctttgcctgcattcatgcatttataattgttgggtgaagatcggacggttgagattttgaatgtgttttgagttaattgactgagataaattatgagccgtctgatctatttatgaattgctgaatgcatgaatcattcacaagtgattgccgagatctgagtataaacacacacccatggaaactctctctatttaa

SEQ ID NO: 151827 - DNA, 382 bp, Glycine max
  unsure (1)..(382): unsure at all n locations
tagtgcaacatggataggtgagacaggttctctcaagaatgcttanttatcaggggtcctctttgctacagccatgctgattgattacgacaagatcgacaatgaattgtgagatataggatatttttcctctaaatctcttttgttcatattttcctcctttgctttgcctcgggttacttgcaaaagtatagttcgatagtgttcgaatagctggcagtgattttgtgtttagaataccttcccggaccttctatatgttagaagcctaagattaccaatccgaattgatctgtcttaccagaagggttaatgctgtatcttgtatgcttaattattttatcccaactctttaaaagaatattgagtttttcaccattga

SEQ ID NO: 151828 - DNA, 401 bp, Glycine max
  unsure (1)..(401): unsure at all n locations
agcttctgnctcaagtgatgaactctctttttctgacaaagacaatacaaggatcatttcaatcaataaaaccggtttccttgactactgccaataagcaaatacagaagtgaatttcttgtaccttactgagatcctttattttgtatgagatgcaatgagcgttgctagatatggaatcttccacaatggggctcgaagattgtttttcttcaccttcagcagcattcataacattccaaatgggtttctttagaccttcacaaccccaacgatagtcaatatgcgcttcataatccggatcaggcaaaagctttccatctttcatgtaagtaccgggatagttaacttactaccactacgtgcaatcaaaacatcagaattcattacttgaatgttgc

SEQ ID NO: 151829 - DNA, 417 bp, Glycine max
  unsure (1)..(417): unsure at all n locations
nttgaattctgcccttaaaagagaaagagtgcgacttgttttatactngnnaactctatagagcatttcatcatcattgtaactatcgctgcctattataaaaaaacttagacaatctaggcctgctgcttttgaaccttttatttatccttgaagtagtgaaatttttttttaaattagagttcaactagtgaagagtgaagactgagagttttctggcagactctttgattttcctttcatttcgacggaagcctaagcgatacactgccactgaattgccatgtagaaaaattggtcatgaaacacacacacacacacactcaaaccttaatgacacacacgcacacacacacacgttttattgaaacacacaggctcacactaatgacactcacactctcattatacatagac

SEQ ID NO: 151830 - DNA, 419 bp, Glycine max
  unsure (1)..(419): unsure at all n locations
agctngtcatgcaactnttcttctatnnnctantgtattggtagatcaacatattctgttgaccaccaagacgatgcatcaaatacaacattccatgacatgtgtttcctatttgtgttggatcaatgcacctcttcccttttctttgatcatgatagccaacaaagatgcattgtattgcctttttgtcaaacctgcttctaagatgatcaggaacaaatacatagcaaacactcccaaagactcagaagtaactcacgactagtttaagattccatatctttttaaatcgagaaactgttgatggattggtaagtgcaccaattcgtcccaagtagtaaagttaaaatgaaagttcgagtgtcagattcatatgaaccttgttggtatttaggtagatgaatattttattaataaaa

SEQ ID NO: 151831 - DNA, 412 bp, Glycine max
tgctcgctaagccactcagccctgttggctgaataatcttatgctaagcgagcttgcctgctaagcccaaggcacttgtaatttctgtatgtcttgccatgcactatgtgcgccctgtcgcgctaagcgcaatttactctctattattgtaatagttggatttaagcttaacaagccttctcgctaagccatttatgtccagtagtgttgtcgcgctaagcgtaatttggtttttgttgaagaattgggcttagtgagctcgctaagccaattctacagaaaattctgatctgtgtcaactcgctaaggacgtggctatcatgctaagcgcatgaataatttttcataaggtgcgctaagcgcatctgtcgcgctaagcgcctaatctgaattttagttttatatttcagct

SEQ ID NO: 151832 - DNA, 404 bp, Glycine max
agcttctcaaggaagcttctcaaggatgtgagcttagttattagaagggtgtgtgtagctaagctctagcttctcaaggaagcttctcaaggaaatttctcaagaaagcttctcaaggaagctacctagtctataaatagaagcatgtgtaacacttgtggtaagtttgatgaatgagagtcttgtgagacacaactcaaagttcaacttctctcccccttttcctctttcaatttcgggctcccctctctctttctctctctctttcttttcctccattgaagcatcctctccaagcttcttatccaaggcacattcttggtggcgaagctccttcttccatggcttattccctagtggatggtgcctcttctcacctcttttcctttgtcttccgctgaatc

SEQ ID NO: 151833 - DNA, 407 bp, Glycine max
gtgcatagagaagaccaagatgtggagcagccaacgcattaagaggcatgagctccataagggtgaagaagtattagtctataaatcccgtctccacctctttccagaaaaattatgctctaggatgtacagtcccttaacaatggtgaaagtattcccacatggagtatttgagcccaaaagccacaacaggaacaccttccaaatcaatggtcacaaagtgtactctaggtttcttgatttcatacaaaacttgcatgatcaaattggtggcgtgaaccttgctttttacaaacctttttggcattcatccttaaccctaatttgattccccaaatgaccaattgaggattaatttatgggaaaaagtattttcaaacctagaccatatgttgattatcaaatta

SEQ ID NO: 151834 - DNA, 420 bp, Glycine max
  unsure (1)..(420): unsure at all n locations
ccttgtgactcttggcaatttcttttaaaactagtctctttttaagttgtgacttttgaaaaaatctttagaaacaagtcacttgaagaattgtgacttttggaaatgtatttttcgaaatcagtcactggtaatcgattaccattaaggtgtaatcgattacacatcaatagatgtgactcttcattttgaattttgaaaattaaaatgtttagaagctctggtaatcgattacacaagtttaaaatgatttaaaactgtttaaacacaacttgtaactcttgaaatttgaaatcttaacgttttataacactggtaattgattactaccttctggtaatcgattaccagcgagtaaaactctttggtaatgattntgtgaaaacttcttgtgctactcaatgttntgaaaaacttttt

SEQ ID NO: 151835 - DNA, 412 bp, Glycine max
agcttgaaggcaaactggatgcatttgttatttggtaacccagctggccttgaatcagaaatctgtacctgtcacaagggtttgtggtttgtgctcctctgctaaccaccatacagacctttgcccttccatgcagcaacctggagcaattgagcagcctgaagcttatgctgcaaatatttacaatagacctcctcaaccttagcagcaaaatcaaccacagcagagcaattatgacctctccagcaacaaatacaaccctggatggaggaatcaccctaacctcagatggtccagccctcaacaacaacaacaacagcctgctccttacttccaaaatgctgctggcccaagcagaccatacattccttcaccaatccaacaacagcaacaaccccatagacaaccaaca

SEQ ID NO: 151836 - DNA, 421 bp, Glycine max
  unsure (1)..(421): unsure at all n locations
ntagcttctcaaggaagttttctcaaagaagcttctcatggaagttttctcaagaaagcttataaaggaagctttctaatctataaatagaagcatgtgtaatacttgttgtaactttgatgaatgaaagtcttatgagacacacttcaaagttccacttctctccctcttttattccttcaatttcgtgctcccaccttctctctttcttttcctccattaaagcatcctcttcaagcttcttatccatggtacattcttggtggtgaagctccttcttccatggcttattccctagtggatggtgcctcccctctcccattctccattgccttccactgcatctccatggtggaaaatcaccattgaaggacctcattgaagctcaaagatccagcctcgttagaagctccacaagcat

SEQ ID NO: 151837 - DNA, 432 bp, Glycine max
agcttcaagagatcatcccctcgacaacattattggtgatatctcaaaagaggtaacaactagacattctcttaaagatttatgcaataatatggcttttgtatccatgattgaacctaaaaatataaaagaagccatagtagatgataattggatcattgccatgcaagaagaactaaaccaatttgaaagaaacaatgtgtggaaattagtagaaaaacttgaaaattatcctgtcataggaacaaaatgggtttttagaaataaattagatgaacatggtataattattagaaataaagctaggttagtagcaaaagggtataatcaagaagagggaatagattatgaagaaacatatgctcctgttgcaagattagaagccattagaatgcttttggcatatgcatccataatggactttaaacttta

SEQ ID NO: 151838 - DNA, 421 bp, Glycine max
tccatcaagtggtataagagcataagagcttcaagtgtgttctctttaaaccttcattaattgtcagctgtaccttctcctccattgttggttcttcatttttctcctcacatgtctttgtattgcgattttttgtggccgaaacctgaaccataaaattctttcaaaaacattatagtagaagaaaacctcaaaaatctagagtgacatgttcacctattgtagttttgtcatagaagtcatgtctagtcttgaaacttgtcacataagattccttatgttatgctgatttttttttcttgtttctctgtctaactcatttgttcatgagtgtatgattcttttagcctattatgtgatttgagtcacatcttgcatgttaattagtccttaacatgttcatgcataattcttagagagt

SEQ ID NO: 151839 - DNA, 427 bp, Glycine max
  unsure (1)..(427): unsure at all n locations
tcttccttccttcttgngcttatttttttccctctaagtatgtttatcaagctagcattaaaatgctagagaatgtactaagaaagttggttgttatcaattccttaatggcaatactttgttgcttgataaactaggttgttaataatttgttgaataattacttaattagtgcttgctttaattatctgtaaattttgtgctttattgcttaatgattacagcaatttctttccttcgaaatattttcctaaatgggtcagaattggctgtcgctgacttcttgttcgtgcactattcagctattctaatatattgcttttctcatgaaggatgcttttcttaactttgttcttagaatgcatatgatctttctttcctttntcttccatgcccttcctagaagataaaagctgaatgagttctc

SEQ ID NO: 151840 - DNA, 409 bp, Glycine max
  unsure (1)..(409): unsure at all n locations
agcttngatacaagggtcacatagaccanattattccacataggggacaaatacacacacacacacacacacacatacactcaccactttatccagattgacatcactgatcactgattcctgcattgntcacctacacaagaatttggaattcttaaatgggtaaattgatttgattatatgttactaaaggacaacaaggacgacttcttatttacactctatcttgtcagatgtatcttacacagcttactatattcccatgtatcataaccaaaatatgttcacctaatcactcaatgagtcagatactcttgtaagcatgctgtgaaactttntcaagtactctttgtttttattatatacattttttcctgtagagtggtgactaactataaacattgctcaa

SEQ ID NO: 151841 - DNA, 424 bp, Glycine max
  unsure (1)..(424): unsure at all n locations
ntatatgcagcagcacgattacaataacagacagctgctaatggacgggactccacattacatgacaaagcagatgtatagtattcaacagcttctgcatgccttccagcctgaaatgctgcattccctgcagtctacatatgaatagatttacacaatcctaatcaaaagcaattttcatgttacacaaaaaggacagaatgaattaaactaacaaaaacttcttagaatacaacaatgtggcacttaaattgttttctccagtctttgatgatggaagagttgtattagagaagagtatagaaataaaacaaaggaagaggatatattatcaagataaaggaaattagagcagtatcagtgtgtgtgatggatattcagatggacttgcacaaggtgtaggtgtactatagttgtgtcaatc

SEQ ID NO: 151842 - DNA, 414 bp, Glycine max
  unsure (1)..(414): unsure at all n locations
agctttattatgccctctccgctggcggtgatttcttctttggcgaaggcaagatagttattggcagtgatattattgaccaaccctccgaaaccttctaccgagatgtcttgggccacatgggcctcgttcagaacttttactagcagagcccgatgaggctcggagctcatgagtaactccaacagcgagaccctggccggggttttgttgagctgttcgataaccttgaattcgctctgctgaattatagggaggaactcgctggcttcctctagtgatacctcctttttaccatcctttttctccggaagaccttttgccggaatatctttattcgaagcgtggggtgcttcgccatctttgtcctncaccacttttccttttcccttgacgttcgcgggtttgactggt

SEQ ID NO: 151843 - DNA, 426 bp, Glycine max
  unsure (1)..(426): unsure at all n locations
atatcacaatgtgtgcatttaaaatttagatgtcgaatttttattctgcatcaattgtaatacaatttaataaaacacattttttattattcacaatgaattcaataaaagaattttgtacaaaaaaagagcacacacacaatgctttatttttttatctgactntcttcccaaaaaacaagagatatcgcagatctaataatctaatataatgactatgtatttcggtatgtttcaaattcaataaaacacatacttttcacaataattgcaatatgtttgatgacactgagtaaaaacatattcactnttagaagaaaaacacatttcatagtacaaatttaaacacaaatgacttgtggctcttataccaattgagttatatagaagtgttcccaacacttggagccggaacttatgatctat

SEQ ID NO: 151844 - DNA, 418 bp, Glycine max
  unsure (1)..(418): unsure at all n locations
agcttctaacacaagtntaggctntaacatttctactacacctaatggatcagttgctaatcctcccctatttaactttgggaataaagttgttccatcaatggagctgacggctgctgatgctccgtcaaaatactctaccaagtcaggtccactatttggtttggagaaggttccattatcaaaagagccaggtgctgatgctcctttggttaattctgggttcaacaaaaatggtggcaatgttttacaagtacctgttactttctcttcatctgttggtgaatctgctgtttttaaatttggctcttctgactcaaagccgataagctcaatcaggttagttatgtaatttttgctttctttgaaactctctcaaaagtaagtctttactataggttgattaggttcttttatc

SEQ ID NO: 151845 - DNA, 429 bp, Glycine max
tgttcttctggcaaaatgttaggaaataatggctaaatatatttttatgtagaagagtcagtgtccttgttagtagcaaaaaatatgtatcttcttaaaagatgacatttctagaaacccgaatcctatgtaaatgagtatcatagcatataaaacctttttgatggactgagtaaccaagaaaagcacatttaacagattgagctgtgagtttggtgtgttctggtggctgaagatgaacataacatacacaaccaaagatgcgaagagtggaataattggttggcttaccagatatccttaagaaaggggaatcattgtttaatgcttgagaaggcagccaatcaataaggtggacaacagttgagagaaattcgcaacaaatatgggaatgcacaaaggagcccaacattaaggtacaaacaacat

SEQ ID NO: 151846 - DNA, 414 bp, Glycine max
agcttcatgaggaatgaagattgattctttgttgttttgatgataataaaggtgatgacaaaaagctcaaaagttaagaacacttcatgataacaaagatgatgatctcaagaatcaaagaatgagttcaagattgaatcaagaacacttcgaggttcaagaggaaattcgatttcaagaatcaagaatcaagttccaagaatcaagatcaagattcaatactaaagagtccagaatcaagagaagactctatcaagataagtattaaaaaggttttttcacaaactgagtatcacatgaatttttctcaaaaaccttttacccaaagagttttactctctgggaatcgaataccaaattattgtaatcgattaccaggagcgaaaagtgtttcataaagcttttcactaaatt

SEQ ID NO: 151847 - DNA, 409 bp, Glycine max
  unsure (1)..(409): unsure at all n locations
tgaagtgagaaagngnggaagagtcagtcttgctacttttattcgtngaccacaaagtggtacctggagatatgtcacgggggtcaggagaccttggggacgtcaggtggggtgctattgcccaaaaccaagcttgaccaatcccgacccaactcgggcatagtcagtcagtgagaacctgtgatgcacctaaataggcgagctcctggcagtcaaccaataaaagaataaagaccacaaagcaaggaggcttgtgtggtggctggccagctatggatcttgagtgatatttggaatatggcctctggtaatcgattaccaagggtgtgtgatcgattacaatgcttaaaaatgaagacaggaagttaagatggcctctagtaatcgattacaagggtttgtaatcgat

SEQ ID NO: 151848 - DNA, 428 bp, Glycine max
agcttcaagaataatggcctcatcaaacttcttgttcccaaaaggaaattcaataaataggcctcctatttttaatggagagggttaccactacaggaaaacccgaatgcaaattttcattgaggcaatagacttaaacatttgggaagccatagaagttggaccttatgtacccaccatggtggctggaaatacaacaatagagaaacctagagaagagtggtctaaagaagaaagaagattagtgtagtacaatttaaaggctaaaaacatcattacctctgccctaggaatggatgaatattttagggtgtcaaattgtaagagtgctaaggatatgtgggacactctacaagttacacatgagggaacaactgatgtcaaaagatctaggataaatactctaactcatgagtatgaattattta

SEQ ID NO: 151849 - DNA, 426 bp, Glycine max
  unsure (1)..(426): unsure at all n locations
tgaaagctcanaagaagactcaaagtttcattggttgtgttatgcaatgaagaagtcagcatgctcactggatgaagagaaaaaattcaagacatgatatgtaatcaacaaataaaggataagaagaatgttgcagacatgaacatctgcacaatgaacatgacatgaagaacaacattgtttcaacacttagaaaggattttcatcaacaagatgagttcattttgggcattgtatctcgagtttcaaaaatgcaattgatctattcttgatggctatggaaattttgcataaagagctttaaatttcatgaacaagttgtggtctaaatcaacttggatcatggtcaaaattgagcatgaagttgtagacgttgatttgtccggacaacttgatatgtgtgcagtaatntaaaggtttcttgag

SEQ ID NO: 151850 - DNA, 403 bp, Glycine max
agcttgggaaacagaggaggcaacacatttttatagctcataggccgctgaagtgggctttagtcttgccgggagcaactgcaagtgtgaaacgtgattctccacctatgaagggtgcgaagagttagctatgtaacaaaatgggtgatcaatggttaaaggatcgccttgtaacctctatagaaagagatgcccccggaacaatcaccaatgatgcgatttcacctcattttcaaaacatggacaatacacgattttcatcgtaatacacgtcctcaaacaacattatttcgtattctgaatatattatactctataacttgctgtatatctcagccacactgaaatgtattgtctaaaaccggccctgcatataaacccattacacaaccctattaacaac

SEQ ID NO: 151851 - DNA, 380 bp, Glycine max
  unsure (1)..(380): unsure at all n locations
ctcacatgtattacggtnttctgataaagaaaaatctaacccctcctttggaaggaaagttgtggtattacgaggaaaatctagaaaaatacttccaatcattccaacaaaaagaagataaggtgttgttcatgctagcattaattcataatattttttgcctttatgtaaggttcttactntaacaaaaaatatgagacttcaatcaaggtcttctaatgaacatgtttctcaattgaaagaatctgtaaattgtgtgttggatattggaaatgaaactattggtgagattcatgacaaagaaaatgccattgacattccatcttatatgcttattgaaaattcacgtgatcctatgtctactattgttaatagcacat

SEQ ID NO: 151852 - DNA, 398 bp, Glycine max
agcttttcctctgggtgtgctgctggggatccttgtgttagagagaaggcgaagaaattgaagccttcattccactgtttgtgtgtgatgagtatttctctctccccagacattaatttgaaaatcccaacggtgacgatgtgcgaaaatgaattgcgagcctggtgtccaaatttcatgatagtccaacaattaatgagttagagatcgtagttttactgggacaaatttgagtgtatatgggaaaagagaaagctcagtgcgaaggatatttcttccatcgcagacattatataaaatatcccaacagtgagtgtgtgcggctataagttacaaacctcctttgcgaaattcacgatgatccaaccggtaacaagttcacgatcattgttttactg

SEQ ID NO: 151853 - DNA, 422 bp, Glycine max
  unsure (1)..(422): unsure at all n locations
cgctgtatgacttgatgatgactaatgccctttggcactattatgaggnctagcaacacatacatagctcctaatgacatccagaatcaatcctgcaataacaattactattagtaactattgtttcagtgacaatttaagggaaaaaatcaacaaaatcaaatttgcattacctgacaagagtagtctccacctagtacatagtttatcagtggtggcccacgttttggttgtactgggatgggcggtaaacgtacaggaccacatggtggttgtccctcccctagcagaatgacataggggtgggaaaccttataaaaccaacgtagatagtcaaatgtgcaagcccaatgatggagcaaccctggatgccattacatactataaaaagataacttaatgcataaatattcattctcact

SEQ ID NO: 151854 - DNA, 424 bp, Glycine max
  unsure (1)..(424): unsure at all n locations
tgtacggaccactaagaggatgtttcgaacaaattgttttatgagtaagaattgtatcagtatcactttcaagcaagttattggctgaataatattatacaaatgattttttatattctcaaagatcaacttattcctgcacatacagaggttatccagtataaccacaaaaataatagaccgatctcttccatcaacaacaaaatcaaaatttaaatgagaaatcaaccaataattaacattatgattataaaactaactctacaaatccatcacaattaaatttgtagtgactgttgaaggaatgcgaagtttttttttttttgaagaaaaagaattaggaaaagttaagttgacacaatgaaatttatatattttttattntttaataaagaagatgacacaatttctactcttacaaaaa

SEQ ID NO: 151855 - DNA, 264 bp, Glycine max
  unsure (1)..(264): unsure at all n locations
ccgcagcagcaacngcagggaaagagattatctaaaaagaaactgaactgcggacgcagcaccataaccttagatagtggcatgccatgtgtaacccgtgactcaagaatctaatgaggaacacaatacatgtggggaaggcacaaagaatgacagaataaaccagcccccgacacatgccgaacatgcctgaaaacaaatgcgtgggtagtcgcccaacatagacgagaagaaatcctgaaatcatcagaaaacgagaactac

SEQ ID NO: 151856 - DNA, 417 bp, Glycine max
tgcccgtgtattcctgtgggcctcgaagagaatattgtctatgtggccgcaagttgagcatgacccagtcacccacctggtattcaacgtcgcgccgacgcatgtccgcttgctgcttcatcaaactctgagctttaaggagtttgccgcgaatattcttgaaggtctcctccctgtcggttaatactgcatctacggcaacaatgtcagaagtgcctgcaatataatctgggatcgtgcccggcttcttcccgaatgttatctcgtagggagtggtacccgtggcaacattccaagaagtgttgtgggaccactcgatccacggtagcaatttcccccacgtcgccggtcgccggtggacgaaagcccacaaatactgctcaataactcggttcaaggcttcagtttgtccgtcgc

SEQ ID NO: 151857 - DNA, 416 bp, Glycine max
  unsure (1)..(416): unsure at all n locations
agctnttcgattcattctatgtaccttgtttggtccgcattgtgtttcgtgcatttttattctcgttttgtttactttttataccccgtgttgacgtgcttaagccattttacttaagtcatttctcacttaacttaaaaataaaatcaatttccaccgaacgtttgaattgtattatccgttaacttcggttaaaatgaattccgaccgttcggtcgtgccgtaaccacgttggaaatcaaaaagaggtaaaaaataatataataatcaaaaaaacatcttttagtaaaataaagcgaaaaatcaatcggacgttttttctctttgggatttctcattcttaatcgaattgattaataactaaagtgaaactaaggctaaaatcaactcgcctagtcaagctcgtccacaaaaat

SEQ ID NO: 151858 - DNA, 416 bp, Glycine max
tgtaggattatggggtacccatcacatgtggtactaggtggcggtcgggcgatggtgcacaacaagttttccacatccacaatgcgcgcataaacccaccatcccctgttgcccacctccaactgagctcacgtactcccacgtagcccatatcctcgtttctctcaacaccgggtccccatcaatcctcccaagcttccccaacatcaaagtaatacaacattcacacagcataagctatcacagccaagtaaaacagggcaaaggcagaaaactctgctcaaaacaccaaccaaaatcacagcttttctcacttaaagaccccagtaacaattccttcgatccaattcgttaaccgtttgatcgactccaaaattttactggaagtctatagtacatatgcctacagtttgacc

SEQ ID NO: 151859 - DNA, 445 bp, Glycine max
  unsure (1)..(445): unsure at all n locations
gatcttaagtcacctgcggcatgcagcttcctgattntaaacattattattattgattactgatatatagcttgtccagggatgtgtgatattttaacttaatttttggtcatgcttttcctagatactagtatggcataagccaattaagctagtagaacatattagttttatgtatataaggtaatagccttcttgactatttttttcctaagctttcttcgaaatataaattattctttttcctattattttaaattgcttaatatattattgctcacactcttatgctttttgataagtgccatatctagttatttttgggattaaaatattagcacttatcttttgattgtaatagtttttcttataaactacccttaaatctagttgttttatagatattgtacatttactaaagcttatgtttaaatatgaaagattc

SEQ ID NO: 151860 - DNA, 428 bp, Glycine max
tgctgaagggtttgagttttggggaagaaatggggtgattatggcttcacccttcccctttttatgttttctcgtcagacctcgctcgcccaggtgagctggccactcgtcgaggcgagctaatttttttttttagcaaaaaatcctttgcaaagttgtgttattcattgttatattttctctctaaaaatcctataattgcatataaacttaggcgaattcaggatatagttcaagaaaacaaacaagtatgaaataggaaattttaaaaagcaaagctagagatactaggctgcctcccaggagcgcttcttaaacatctttagctggacgtggggtggtgatcgattgatcatgggcctagcacctgttcgtacctgcccctaaacttggacaaagaaagtttcatcatgcaacaaatgtgaaac

SEQ ID NO: 151861 - DNA, 386 bp, Glycine max
cggtcgggcgatggtgcacaacaagttttccacatccacaatgcgcgcataaacccaccatcccctgttgcccacctccaactgagctcacgtactcccacgtagcccatatcctcgtttctctcaacaccgggtccccatcaatcctcccaagcttccccaacatcaaagtaatacaacattcaaacagcacaaactatcacagccaagaaaacagaacaaaggcagaaaactctgccaaaacaccaaccaaaatcacagcttttctcacttaaagaccccagtaacaattccttcgttccaattcgttaaccgttggatcgactccaaatttttactggaagtctctagtacataagcctacattttgaccgttgggatctact

SEQ ID NO: 151862 - DNA, 425 bp, Glycine max
tgtatagttccccaatttatggttattttgtagtgattttcgttaataaatcttgttttatggttaatgttgtctctagaacatttccattggatttaatgatgaaatctgtgcatttttaggtgaaaaagagactaagttttgaattgcaaaatgtagcagttaggctaagctcagtagttgggctaagcacatattcaccgccaagcgcagcttcagcgcgcttagtgcaaaggagaatctggcagagcatcagcatcaaatttgcatgctaagcgtgagatcagtgtgctaagcgcagtatgtgccttcagccaggctaagctcgagactggcgctaagcccaatttcacttactcacgctaagcgcgagggtggcgctaagcgcagcgtcgtgatttcaaagcctatttaaagccttcttg

SEQ ID NO: 151863 - DNA, 378 bp, Glycine max
aataaaagtaaatcaaaaataggaaaatgttttcggtattaataatgaatatttcactatattaaataaaaataaactatagagataagaattttaaaatcaaataagaaattataaaaataaattattcaaatcaaaacatataatctttattgatatggtgcatcaaaattcaaaattaaattaccttactgaaaaggaataaaaatataaaaaattaaattaaacatttgatgtaagaaaaatcatgtaaaaggagtctaactcagttaattgaatttaaatatataagctgctgtaaactctctgattttgtcttcaatccttactaataaaaaatgtcattactaaatgaaaaaaatctaaaaaatattatta

SEQ ID NO: 151864 - DNA, 379 bp, Glycine max
gaagagttactcattggtagcaaaacgaaacgacaaacattgtttgacagaaaccatattcgctatatcactcaccccacccatgacatcggatgtggtgtccactgctttatgatcgttcttactgatactttctaatccaaaaaaatcccaagaatgagttgtgcgaagtttattcattttgctctcaaacacggacaatactgattcatattctgaaacacaaattaaaacgtcattcatagcctgatcatgaaagtggcgaatgaattccatatagaatatgcttatcactctgaaacttgaaaatatacggctccaaattgtaggaggcttggagcctctccatcgtaatcgagaagcctttctcaaaatactg

SEQ ID NO: 151865 - DNA, 378 bp, Glycine max
acggaatttatctcggccatgttcctccttgcgggcccttttggtttcttgttcaagggctcttgcagtggttgcattttcctctcgtaactcggtgcactctttccgaatgtttgtagcggctgacttgaacttttctttggcgagtcttgccttccctagctctaattttagagcttggacttcttcatcttcctccggagcttcaaagttctcctcattgataactttcaacttggagagccaatctaaccctcgcgtatgaactcttagccatccatgataaccaccgatgacgccattacggatggccctaagctctttgtctttcctcaatggacttctccacaccttgtggactctttgtataaccttgag

SEQ ID NO: 151866 - DNA, 417 bp, Glycine max
aatatcctgatgagggtgttgcatatgttctctttactggactaatacatttgctgcccaagattcatggtcctgcaagtgaagatcctcataagcatcttaaggagttccatattgcttgttccaccatgaagccccttgatgtccaagaagatcatatctttctaaagacttttcctcattcactataaggagtggcaagagattggctatactaccttgctcccaggtccatttttagctgggatgaccttaagagggtgttcttggagaaattcttccctacatctaggaacactgccatcagataagacatttcaggcatcacgcaacttagtggagagagcttgtatgagtactgggaaagattaagaatatgtgtggacgctcgcctcaccaccagatctctgagcaact

SEQ ID NO: 151867 - DNA, 367 bp, Glycine max
ttacgtcttctaaaaaattaactgaatcgaaccaaggacttaaatgtcttatatttatgatcatgaataagtccaaatcaatgcttgataaaaattagtaatgtgctactactttagtgaaccaatgtttagtaatttaactctatgaaagaatctcttttgcggattgtggtgttaaatgcggaaagttgaatcacccacattctatttacgtagtttcaccacttaaaataatggatcaaactccttattatgttctgctatctatcatgttctaaaatcaaataccgatatgagagtatttttatataatgttattttcaaaaaatctgccaatcatcgtttgatttgagaacttatactgaca

SEQ ID NO: 151868 - DNA, 436 bp, Glycine max
  unsure (1)..(436): unsure at all n locations
gaatactaagcttctnttaatttaatcatcccggggtagttgtcttactttctgatcattgaatcngaaaaattaaaattgaagcctaaaatgtttcacgtttttgctgctgatatattcacctcaaagttctgcaacgatgtttcaaaccagcaagcgggcatgcaattcaggaacaaggtcagtgatgacaatgacattctgcttttcgcgcagaaatatattaaccgtctgtttatatgtccctttaaaaatgggagtggaaaattcagcattaaatttataaaaaaattgtaaaaaaagaaatccattcctaaattttccatttccagtcatacatacggtgttctaattgtttgttcttggtaataacgatcgcatgcagcaatatattggtttgntaaagaaaatttcagagatcgcgattgtaaattta

SEQ ID NO: 151869 - DNA, 380 bp, Glycine max
  unsure (1)..(380): unsure at all n locations
agctntaggtttatgggtcttctcctttcttgtatggggttcaactctttcatttatgctcggtgtgggacttcaccttacatttgtactccaacaatattggagatcattttttcaagatatagagatagatgaatttggcaaagttacaagtttcaagatgcacgatcttgttaatgatcttacaatttattgtgaaggaggtttcttacattactccatctaagagaatctatcatctctcatatcttattggggggactctttaatccaaattagttgcaacatgttatttgatgaggagtagttctaaatgttggttgattgatagtggttgtacgaaccacatgacatatgataagactctattcaaggatttg

SEQ ID NO: 151870 - DNA, 424 bp, Glycine max
tgacaatacagaatgttatggttgaaatcagaaagacttacattggaagtttagctactagataattacttgacctacatgagtcattcttactctaatcattctacgaagaagcttatctcagataaaccttcaacctctttttatgttctttcagcaacaactggtatatgaagataattaataattactgcctgtttgtgaggtttgctcataatgtgccttaccttaccatgatgtatttatgttactcttgcatgtaccccactacactcagactaatacacccttagcttagggtacaataaagtgaagaataaaatttcacatagtctacacttaaggtgtagtacttttcaaaaaaaataatcaatcaacaaagacctcataagcattcacaccacacacagggaacatcacaacc

SEQ ID NO: 151871 - DNA, 419 bp, Glycine max
agcttgacgtggtccatatgaggggggattctactcatataacacacgccgcccttcttctctgcatctttcaacgaaactttcttcttctttttcttctctttcttcatcaatttcgagttttcttcattgggtgtaattgctattacttcaatttctgtgtcttctttctctgagtctgaagcattcatcaagctgaacaaatgagatctgaacagggcagataatttttctgcaccaacatgataaaacaaggaacctcggtttaatccaaaaaatgaagcttcaggcgccaaatgggaagtaacagagagaaaatagatatgaaattgaaaaaaaaaatacacagtgatgaaaattgaaaaccccgtaattaagaagcgggtcacagtaagagctggacgttaaaaacaaaaata

SEQ ID NO: 151872 - DNA, 414 bp, Glycine max
tcatcaaactgatcattgaatagtaaatcactccctttttatcattatgatgattgacttgcttggttggaggaaccacttgcttgagcatgttttgtacaaaactgaacttggcactctaatgcttggacactgtcttgcgagatcttccatttgagatgtgtttcaaggttattcttgcatgactcattttctacaaaacaacaaacttacatacaaaaattgtcaataagatcataaaacttggtctatagtatatacaatcaaccaaagtaatgaacagaaagtagcattcaagtaactgcataattcatacccacaccacaactatatagactaacataattctaactccttgcacgcaataacaattaatttaacagtttaacattgtaattatgaagttaaataaag

SEQ ID NO: 151873 - DNA, 413 bp, Glycine max
  unsure (1)..(413): unsure at all n locations
agcttggactgtgctagagagaanaatctatgaccaaagngaacaaagagccatttctagggtaaatttgggggttgaggagtcaaattttgatttggtgaaattttaggcgtaaatccattttgaacaagtttaaattgaggttatggacttgtgtgagctgagggtttgcttcaaatttacctcattctcaatttcacttttcaaacctagaaaacccattgaattgaggggttttggacacctagattctgtgttgctgtgttttgaagcttaactttggtttagacacgattgatacatgatttgggacttgtaggatttgatttgggcaagattgtatgacgggaaatgtgtgttctcaaatcttcactttatgcagaattttgttggaaattgggcgcacaattttc

SEQ ID NO: 151874 - DNA, 420 bp, Glycine max
cgatgaacctttcttgggaaccttatgctctctttcaatatgttgaaaatgtctgcttagtttactataagatttagagacgtgaggagagataaaaagtcgatgattgtgccctttaattaaatcttctctagattcgaagattagctcttcaccatcagagttgacggtgtcatcaggctgggaatcctgatcgtctgaacttgtgtccagtgctggttctgttttaccagtggaggcatcaaccatcagacataggttggcttcttcctcattatcatcgccagacaaagaattttccaggtcctcctaagtgctcatgaggttttggacttgacaaatttcttcctcttatcctttaactcttcaaggtcaggaatatccgacctgaagtgtcatggcttcatatgactggatttc

SEQ ID NO: 151875 - DNA, 403 bp, Glycine max
  unsure (1)..(403): unsure at all n locations
agcttacaaaaacaggttgtgaggattnttttgatcctaccttgtatcgttttgtggttggtgctctacattatgctactatcacacatccaaaaattagtttctctgacaataaagttttccaatttatgagtcagccaacagaacaggattgggttgctgtcaagagaatccccgggtatctaaagggcacacttcattttgggctgaaactggaacccaatttttctacaaagcactactctgttcatgccttttgcgatgctgactgggcttcagaccttgatgatcgaagctctacctctggggctgttgtgttcttaggcccaaatcttgtctcttggtgatccaaaaagcaatctgttgtggccaggtccagtactgaggcagagtacaggagttt

SEQ ID NO: 151876 - DNA, 425 bp, Glycine max
tgtacggaccactaagaggatgtttccaacaaatagttttatgagtaagaattgtatcagtatcactttcaagcaagttattggctgaataatattatacaaatgattttttatattctcaaagatcaacttattcctgcacatacagaggttatccagtataaccacaaaaataatagaccgatctcttccatcaacaacaaaatcaaaatttaaatgagaaatcaaccaataattaacattatgattataaaactaactctacaaatccatcacaattaaatttgtagtgactgttgaaggaatgcgaagtttttttttttttgaagaaaaagaattaggaaaagttaagttgacacaatgaaatttatatattttttattttttaataaagaagatgacacaatttctactcttacaaaaat

SEQ ID NO: 151877 - DNA, 396 bp, Glycine max
agcttcaaacttgcaacaaaggtgtttatcttgtaaaaaagattcgtcttcaaactcttagaggtgactttgagcgtttgtttatggaggagtccgagtcaatttctgattatttttctcgagtattggccgtagtcaatcaacttaaaagaaatggtgaagatgttgatgaggtgaaggtcattgaaaaaatacttcgaactttaaatccaagttttgacttcattgttaccaacattgaagaaaacaaggatttaaagaccatgactattgagcaactcatgggttccttacaagcatacgaagaaaaacaaaaagagaaaaattaaacaaaaggaggctacggagcaactactacaactcaacgtaaaggaagcaaactatgcaaattacaag

SEQ ID NO: 151878 - DNA, 441 bp, Glycine max
  unsure (1)..(441): unsure at all n locations
tacggaactataaatctaagcntttttaatctattgncaatatattattgtttacttcattgtcataatagtttaaaaaccttttaaagttttattttactgaaaaacttcttattgtaaaacttttacttaattattcattcattgatcattgttatatattttactttttatgtaatatagtatagtcttaaattattatgtactccaataatagtttttagtaattataaaaaattatttgtagttattaaaatggactatgattcggagaaacacatctaatttttcttttttctttttcttaaatatatgtcataaaattttaaaatatgttgaagaatctaatgataaaaactgtgagaaacatatctaatctttcttctctttcttaacccaaatggacaaaaaatgttatgtgtatctaaatcangatntatt

SEQ ID NO: 151879 - DNA, 419 bp, Glycine max
agcttataagaacaaaattgcctcattcatttccaaatatgcatgtgaattaggaagcatcaacaagaatcaagccaaggctattgtgcaagcaatcaatggggcaaaacacaccaaatgattatgatgatggatggctcaaattctcacaaaggtaaactcatcactttcaaattgagctttcaaaactatcatgacatgtagaggagaatcaaggatttcaagtcacaaaatgtcaagaacttttattttcaaaacaattacccatttcttgaacatatcttataattcaaagaaaaacatgcaaagtcgtacatgcacacaaaattgacccaaaatattaaactaaaaattcgacgaaactaacaacattaacaaattaacacaactaacaaattaacaaaaccaacaaaactagc

SEQ ID NO: 151880 - DNA, 421 bp, Glycine max
  unsure (1)..(421): unsure at all n locations
taanaccccttgttcattactaaacaagctaaaattaatcacaatcacaagcaaggtatcctaactacatgcaagagataagaatgaaaaatagaaaagggaaagaaaatatgggttgcctcccagtaagcactcttttaatgtcactggcttgatgcatcatcctattatctaggatccaacagagttcctactttaaggaccttctcaggtctcctttcctcaatcacatgcactttaaaatagatattttggctaggtggatctttgtcctcatgaaacaaatcaaagctgatcttctatgcccatctgcagcatcttcttcctcatgtctaccacgcaacttatagtagacatgaatgggcggccaagaatgagaggaatgccaacatcctcttctatatctatgacaacgaaatca

SEQ ID NO: 151881 - DNA, 411 bp, Glycine max
  unsure (1)..(411): unsure at all n locations
atacccaccaagaataactcttttgcattnttggaactctagatacattttcctgagtgaactcatcttgctaatgaaattccgttttgaatatgttgcaaaaatgttgttcttcatgccatgttcattgtgcaaatcttcatgtctacaaaaattttcttgttttttagttgctagttacttctcatggcttgaagtttttctcttcatccagtaagcatgttgacttcgtcatttgaactttcaagcttatcatcctttctaagtgactcgtgacagcccttagtttactttaattgttgctcttaatagaacttgtcgttttttagtacacttaagcaaactcataagtatgcataaactcaaaaggcttatgatttgtgttcaaaaggtttgtcataattaaaacac

SEQ ID NO: 151882 - DNA, 428 bp, Glycine max
  unsure (1)..(428): unsure at all n locations
agctngctctaaatatacattgatgtttgtaatatgggaggagggtgtatgccatttttgttttaagagtagtgtcccacgggtaaaactaactttccaaatgtttgccttcgcaggaaatggccccgaggaagcttgcctcaaagaggtccaggaaggacaaggcagccgaaggaactagttccgctccggagtatgacagtcaccgctttaggagcgctgtacaccagcagcgcttcgaggccatcaagggatggtcgtttctccgggagcggcacgtccaactaaagacgtttaagaagcgctactaggaggcaacctagtaccttttgaatctatgcttgttatttgatcactttttataagacgacgcacctagntgctcatgatcctggggatataaataaaacaagcgcaagctcggaacg

SEQ ID NO: 151883 - DNA, 424 bp, Glycine max
  unsure (1)..(424): unsure at all n locations
tatgagaattcannaatttacaaggagaagaccaagaatttttatgatagctcgatagctaagaaggacttcatggttggacaaaaagttttattatataactctaggctcggactcatgagtggtaagttgaggtcaaagtggattggtccttttgtggtgactaatgtttttccttatggtatgattgagatcaaaagtgaatccacagataagggcttcatggtcaatggacaccggctgaaaccattcctcacaaatccctccttagtggatgtagtggtggaggagacctccttacttcaccctacttctcttccgccatgacttagggagttttctttntctgtctccttctttacttttattgtacttgtccaaatttattgattgctttgattgttcttgatcttatgattgtgct

SEQ ID NO: 151884 - DNA, 380 bp, Glycine max
tacacatacctctctaatagctaagctcacctccttgagatgagaagctagaacttagctacacaccccctataatagctaagctcacccccatgacaaaaaaacatgaaaatacaaaaaaaaaatccttactacaaagactactcaaaatgccccgaaatacaaggctaaaaccctatactactagaatggccaaaatacaaggcccaaacgaaggaaaaacctattctaatatttacaaagataagcgggcttatacttagcccatgggctcgaaatctaccctaaggctcatgagaaccctagggccttcccttggatctctagcccaatctacttggagtcttctacccaatgcccttgcgggataggattgcatc

SEQ ID NO: 151885 - DNA, 415 bp, Glycine max
  unsure (1)..(415): unsure at all n locations
cgccgccacggagttntccgactatgctcttgtgtggtttatcaagctacaaaaggagagagcaagaaatgaagagccaatggttgatacatggatggagatgaaaaagatcatgaagaagcggtatgtgccatctagttactcaagggacttgaaattcaagctccaaaaactaacccaaggcaacaagggggttgaggattatttcaaggaaatggatgtgctcatgattcaagcaaagattgaagaagatgaggaggtaactatggctcgatttcttaatggtttgactaatgatatccgtgatattgttgatctgcaggagtttgttgaaatggattatttgcttcacaaagcaatccaagtagagcaacaattaaaaaggaagggagtggcttacaggagttttaccaac

SEQ ID NO: 151886 - DNA, 405 bp, Glycine max
  unsure (1)..(405): unsure at all n locations
cttacaaatctattgtaagtccaagttcatttcgaaatanaataaaatntggacaagataagataagattggatgaaataaaatctggacgaaataaaatctagatgaaataaaatctggataagataagatttgataaaataaaattgtatgctctcttcaagtccaagcccaattccggatttaagcccaattacttataattctcctgaaattaaattaaaatcacaaaattagtcaagtaggcccaaatgataaaactgcataattaatttgacgattaaggctactcagtaattaaaatggtgacaaaaagggttaagaaataggaggaaataatgacacatcaaatcccccccccccctnccccaccctatccttttgcattcttagcaaatcaaaaac

SEQ ID NO: 151887 - DNA, 424 bp, Glycine max
  unsure (1)..(424): unsure at all n locations
ntgtcctgcattntattttcatcattcttctttacttctagtaatgattatgaatcatttcaatgtacaacctttaacactatttattcattgatagattntcttattatctatagttaagaacaaagagataataggcatcagagtgttcatgacctcatggacttcagggatgcatgggctggcttctttctgttttgcagcttctggcttgtcactttctgtgaacaagatggtatgtctataattctctataaaatagtaccatttttttagcctcatatttttttatggaaaattaactaaaaaatttcagtatcctatttccttggccatgtttgttttcacatatatactctgttgagatcattcactacattaagtctgaagctggcttccttttcttcaaggcattattctgcat

SEQ ID NO: 151888 - DNA, 405 bp, Glycine max
  unsure (1)..(405): unsure at all n locations
agcttgcttaagaatgtatatgaatttctttaattngcgcactatgtgttccattccttcaactgagaaccccattggttgggccatataaacattctcctctaaatctccattaagaaaggcagttttcacatccatcctttcgtcagacctttgaaaatgtctctttataatcaatgccatctttctaagtaaataccttagcaataagtctagccttgtaatgttcaaggttgccatgagagtcacgtttaatcttgaagacccacttacaaccaactttcttacaaccctttggtaattctacaacgtgccaaacaccattatgttccatgaaatttatctcttctttcatgacatttaaccacttctcagaattatcacaacttacagctagtgaaaaca

SEQ ID NO: 151889 - DNA, 430 bp, Glycine max
  unsure (1)..(430): unsure at all n locations
actcagctttcgtggtgaaataggtgcagccatttcccttatagttctctcacggngtggagtttgtgccatgttctcagaatgttcaaaactataatgctcaaaatcaccaataatagaatgctcaggatgctcaaaaggtacaaaatgatgtctaactaatctatgaaatgtcctatctatctcangatcaaagggttgcaagtcagatggattgcctctagtcatacactatattcagcgtgcacaactagttgccttcttatccaagtaacattgtaggtttgaactacaacaaccattaaatgatatccaaatgacttgaaattttgtgagaaaccttataaaatgatgagaagatagcacaaaaaatttcaaatgaaaattcaaagtctaactatagaatctaaaaatgataatttaagaaaaa

SEQ ID NO: 151890 - DNA, 423 bp, Glycine max
  unsure (1)..(423): unsure at all n locations
agctnggttcgaggtacttacccgttgtatatctaagaacgatgaagaacgaatgaagaacgtcgaagaacgggtgaaacctttgcgaaattcttcacggaaaacgttacggaaacgtttcggaagcgcctcggcttagattttcttcacggaaacgatttttccaagcaaatgcgaaagagagggaagtgtcaaaggggctgaacccttttcttcttcacttcctcccctatttatagcaaaataggggaggtggttgccgtccagctcgcccaggcgagctcagctcgcccatgcgagccaggttgcttcctccagaagcaatcgccttgtggaggaatattctggagggcccaagtgggcctgggtgctatctgcacccccagttttactaagtacacccccctctgctgtttttggtga

SEQ ID NO: 151891 - DNA, 421 bp, Glycine max
  unsure (1)..(421): unsure at all n locations
nggataatttgaaaattatagaataacatgaaatgtctttttttctgaccaagcaactacctatggaagttataaattatttatgttgaaatattgagaatggttttacttccaaaaataattccatgtatctactgcataaatcaattaaagttttccaaaattagtttttttaaccagttttccaaaattgatttcttaaaccgctattacactgaattccaaaattttgtaaaacaatctcaaggttgataacctaccaagatatcaaaaacaagaattcttaatgatctctggacaagaaataaactaatcaaagctgcaattcagataaaagcaaacactcttaaatgcagtactataacttcatgggcaaacgattaaggcatgatatatatcacgtgagctagtactccaaaaa

SEQ ID NO: 151892 - DNA, 407 bp, Glycine max
  unsure (1)..(407): unsure at all n locations
agcttcaaagttggttctattccccggatgcatcacatttattttgtctgtttttggtgctagtgcattttacttttccgagaattccaaaaaagtaactattgatatatactttgatactcccttgaaagaagaatagttggtatgtgtgtggtgattcaaaccaaaaataatattataatgtggagaataaggtgactttggtggccctttatttcaacgtgatggtcatatttatccgtcttaagcaccgtaagtaaccagacttctaagacacgaggattgacttgtccttcctctcatcctctctataaagaaagtgtgcttagtttggttcagnttccatggattcggggtctgttatatcttctactagggcctgctcaatcacaactggtacctatata

SEQ ID NO: 151893 - DNA, 445 bp, Glycine max
aggacctatgaaactaagctttgcattgatcgatgtaatttataataataatgcattattattacagcaagggagacaccaaacaagttttgggaaaccaattacaattagctggcagtgaagaaggtgaagatgaagatgcaaacattggaaaggatttcaatgcacaaaagggtctgaggctctttggtgtgtgtatcacctaatgaaatatatatgtgcttttacttttcttcaaacctctactccagctctaggaaattaatttcgagaatatttctaccttgttagatatatatatatgtaccacttttacacaatattgtacactacaagcttcatatcttagtaattcgtggaatgctacttgtgaataccaattggtatgcatggcaatatttccttgccccataaattaaatttcaggataataagtaaatagttt

SEQ ID NO: 151894 - DNA, 421 bp, Glycine max
agctttgcagcagattgtagtaatgacccactaacctagaattaaaataacttaatgccattaacctagggaattaaaaaaaacttaatggctgagtgtaactgaaattgtggcaaccaaaagtcacccccaacagccaacaagtcagccaccatttggtctcccaaaaggctgatgcctaggttgccaattgggcccttattacaacttgaactaaacctaactaaagcccttttagttgattaacccaaaacatatttttggtcagccaactttacaaggattgggccattatttagacaaactaaacactctaaaattgagacaaggtggtgtcatttagtcctcctccatttgggccatgatacaactcacaaccttggacttttctccttgaaacttgggcttgtattcaaatagt

SEQ ID NO: 151895 - DNA, 418 bp, Glycine max
tcggtattcaatttcaagcgtgtcgatatatttcgcgactcaatcaaacatccgagttaaaagttattgtcatttgaatttgctcagagcatcaacattcaatttcgagcgtgtcgatatattatgggactcaatctgacatccgagcaaaaagttattgtcgtttgaattagctcagagcttcagaattcaatttcgatcgtctcgatatattacgggactcaatcagatatctgagtaaaaaagttattgtcatttgaatttgctgagagcttcaacattcaatttcgagtgtctcgatgtactaccggactcaatcaaacatccgagtaaaaagttattgtcgtttgaattagctctgagcttcagaaatcaatttcgagtgtctcaatagattacgggactcaatcagacatcc

SEQ ID NO: 151896 - DNA, 414 bp, Glycine max
  unsure (1)..(414): unsure at all n locations
agcttattgattgtgataatatcactagataaaatacaacattaaaagtaatttaaacacaaaataatcaatctttatattgtgtttttcttgtcagatctcattccaagtgattttatccatgttattagggatgcacatgtttaccacaatcatgtgaggcctttgcaggagaagctccataaccagccaaaaccttttccagtatgtgtaatgtttagcacttcttttactttatattttgactcttttacttgttgaccccctaatctacttcttgtagactntggagataaatccaaaaatgaaagatatagattcttttgtggctgttgatttcaagctcataggctatgatcctcaccagaagattgacatgaagctggctgtctaaaatctggggattctcactcc

SEQ ID NO: 151897 - DNA, 422 bp, Glycine max
  unsure (1)..(422): unsure at all n locations
ntaggatcaaaatcttttctctctttgtctctcaattgttcttcatttttcttcctcttttcactttttttcttccttttttcttgtacaaattttgtgtcttttccattagtgatgatcatggaaggctaaacacttaaatccaaggatccactccaagcaaggatgaatttgtgttctagtttagtattgttggacaaatggcctcaataacttaagatgggggatttttaatccccttttaaatgatatatgataggctcaaaatgtagaagaagaagcaacaattaaattaatcaatattctttaaacgtgcaagacaaaaatcaattgcaataaaataaatgagataagggaagagagaattgcaaactcgatttatattggttcggccacttcctgtgcctacatctagtcctcaa

SEQ ID NO: 151898 - DNA, 428 bp, Glycine max
tgtcatgtcccttgatatatttgagggactcatggtcattatggtatgacaaaccccttgcgataaaggtatgttgccatgttatcacggtccgcactaaggaatacaactccttatcataagtcgaataattaagagtagagaccaattaacttttcacgtaaaataagcaattggatggccttcttgcaacaacacaagtcctaatcacaacatttgaagcatcacactcaattttaaaagattattgaaagtttggcaacacaagtatggggggcattagttagcttgtgcttaagaacattgaaagctacttcttgtatctctccccatttgaaaccaacatttttcttgagcacttcattgagaggtgctgccaatgtgctaaaatccttcacaaatcgtctataaaaacttgctaagccatg

SEQ ID NO: 151899 - DNA, 394 bp, Glycine max
tttgatgataacaaagatgatgaaaaaggtgatgacaaaaagctcaaaggtcaatcaaagaatgagttcaagatgtttaagatagaatcaagaacacttcaagattcaagaggaaagttgaagaacacttcaagattcaagaggaaagttgaagaacacttcaagattcaagaggaaagttgatttcaagaatcaagaatcaagattcaaggatcaagcttccaagaatcaagatcaagattcaagactcaagattcaagaatcaagagaagacttaatcaagataagtatgaaaaggttttttcaaaaactgagtagcacatggattttctcaaaacatgtttaccaaagagtttttactctctggtaatcgattaccaaattattgtaatcg

SEQ ID NO: 151900 - DNA, 429 bp, Glycine max
  unsure (1)..(429): unsure at all n locations
tccacaacatccaagcaattcanaatccaaacatcatgatctatccaaaatcaagaaaacagggcagaggcaaagaactctgcccaaaacacattccaataccacaactttctctactcaaatacccagtaacattntctttgttccgcttcgttaaccgttggatcgacccgaaacttttactggaggtccctagtacataggtctacattttgaccgttgggatcgcctagaaaatgtccataataaaaaatacacaacattttctgcacaagcacaattttctgctgcacaaaatttgacagctttttgctgcataaattgggcagatttcgaaatccctcttaccctcatccaattttgcctaaattggatcctacaagtcctaaatcatgtataaatcanatctaaaccaaagacaagcttcag

SEQ ID NO: 151901 - DNA, 410 bp, Glycine max
  unsure (1)..(410): unsure at all n locations
tggaattgcgaaagcccctctctatcattaggattagtacctgacatctcaaacaaacaaatcaaatgtaacaagacaattatagttgttgtttgaatacctcacccactcaagtgtatcacacaattatggcttttctctaatgaaacactcttgccttttaccactctaattccccttgagttcttaggcaattcaagagattatggccacaacaaagaacaattcaccaatatgtgtaaggtaaggctagagagacaaggaaaaggttaaccaagaaaaaggataacaatgcttttaggcacaaatgaagaaaataaaattcagaatntaggaattcaagtaacaatccttcatgcaaccaatatattaccttaaagagatttttttttaaagttcttcaagcatga

SEQ ID NO: 151902 - DNA, 322 bp, Glycine max
atattgattaggctgatcatggttctggttatggtgggtgattaagacgtgaccgatagctgtgtcgttggatccgacaagagactcggatgagctatgactgggcatggctctggatgactccggtaacggtggcccttgtgtggtgcaaactattgaaatactacttcagtactcattgacataagttctgtgttgggagcatattcactggccttctattgagcgacggatttgactccacttgtggctgttttcgacagtgtaggccgtcttttgatggcgcaatcactgaaatgttacttgacctctggtatactta

SEQ ID NO: 151903 - DNA, 368 bp, Glycine max
agcttggactgtgctagagagaataacaaatgttcaaagtgaataaagagccatttctagggcaaaattgggtgttgaggggtcaaattttgattcggtggaatttaggtgtaaattcaatctgagcaagtataacttgaggttatgggcttgtgtgaggtgagagtttgctttgaatttacctcattctaaatttcacctttcaaacctacaaaagccattgaatggaggggtgttggacacctagattctgcgttgctgtgctttaaagcttgaatctggtttagacatgattgatacatgattcgggacttgtaagaattgatctgggcaagattggatgggaggaagtgtgattttcgaaatct

SEQ ID NO: 151904 - DNA, 427 bp, Glycine max
  unsure (1)..(427): unsure at all n locations
ntaacctcatcgnctctcacagtctatagatttgggagctcttccagtcgatggtcccattactgcttcccctaagctctctgtcctttcttcacgccgcatcccatgccttgcgaactccttggagtaccctcgcgttgtggtcactgaaaccccgtgcgatgaaaggcgtgatctgatggcactcctctcatggggtagccaagctgtcttatggcgaggccgggattataattaatacaaccccttgttccatcaatggaacatttggacatccttcgcatgaagatagaatcctgattcttccttccttctagcgagggaacaaattaacggacgcccctgcatgctatccaagagttggtgccagattggctttactttctcgacgcacgaacggtaaccttgtagcggatagacgggccta

SEQ ID NO: 151905 - DNA, 421 bp, Glycine max
  unsure (1)..(421): unsure at all n locations
agctngaggtagagctagctgtgtattgtcttatatgnctataacacaatacgtgtaacttgagagaagttagtggaacttagtgttttgccaaggactggacatagtattagtggtagagacgaaccagtgcaacttttcgtgtttaatttttttgtgtgctttcctactgcttttaactgacctagggtctgaatttgtttttaggcttttgaaaacatcttgagttttacgtgtttatttttcatcatctaaacgggtttttcttaagatctattatctgttttacaaagcttcttcttcgaatgaaaaattttgtttgcttgtggaaaggttttaaatattactaaatatacaattcaaccctcttcatgtgatatttgcctttacaatgcattatccttctatcttaacatgatta

SEQ ID NO: 151906 - DNA, 424 bp, Glycine max
  unsure (1)..(424): unsure at all n locations
ctggtattgngtgtctaagtgataacagccagccgttttttttggtcgnacctacttcactccgaccgctgagcggtaagttacaatattgttttcagctgccattgtttgttgttcgtgttgtcctcaataaaataggtttcattcatgcatgcctggtgtatatgatattatcaatttgttgacattgcgagtttgtgtttgtttaaaccctaaatttacttagttttaagtagaaacccctttcatcgtttccaagcttagtgcagaaaattcttcatcctgtatggctgcagcagattctttaatctccctatggcacttggtatgtggattgtggagcaccattcctagttttaacatgttgagagtcttctgagtcttccttgcgttgcccagtgaggcgatgagcagcagtaacatc

SEQ ID NO: 151907 - DNA, 419 bp, Glycine max
agcttccaacttcttggcagaacctttcttctcaaccaagttcggtccacacccacaagatattaccgtatcacaaatatttaagaaaaaaaatctttcaaatcctcctctaatagtgaattttctgtagcactttatgcaaatacatcttccaagttctaagtcagattctagaagaaatgccatgatattgttcacagtaataaatatccagagtgagaagaccacttatcaagcatctttgaatgctaataatactgctactgtttaccaaaaaacacgaagagcaaatccatactcatcctttgtatatgattatttccttatgtaaggttctttcgtgtcaggaaacaaacctgagttgatcactcgacttccaatcatattgaatgactaaatctgaccaaaccaggagatta

SEQ ID NO: 151908 - DNA, 414 bp, Glycine max
tgtaactcctcaagcattggccctaagatttgaggtgtttcattgatcttttgtcgcatgttataggtgtaaaatatcaccagctttatcgataattgatatctgtcgaggaatctaactaatcaacattaggagagtttctcttttcaaccaagattttcatccacaaggtgttttttttatctacaaagttttgaacctgaaatcttatttaagcaatccaaaccaattccagttgaactggcgtaatgttcatgttgaatatattcatagcttgatacctccaataataataataatatcaacaacaacaaataaaggattacctgttctatgagagatctgttgggtggggtatggtcttcctctccgtgcaataaggacaaacaatgaggaactcaaggccaacggaga

SEQ ID NO: 151909 - DNA, 385 bp, Glycine max
  unsure (1)..(385): unsure at all n locations
agcttntaaaattgccccatgtgtggttgtttttgncaatgntaggattcacaagcgattctcctcaaatttcagccagcccgcatcaattagactttgcaccttacgcttcagggtcatacaatgctcaatggaatgccccgaggctcttccatgatatgcacatgttgcgttcgagtcgtatcctcggaaaaatggaggttgaggaaacctagcaggggttatggcaaccattgaattgtcgagtagatatgggagcaagttagcatatgacaccggaattttggggtgaatcctacaggctttttgctgcaaaattcctttttggttttcgctaagggtggtgtttgggcattggttgtgtggtaagtggcgtttgtggttg

SEQ ID NO: 151910 - DNA, 425 bp, Glycine max
  unsure (1)..(425): unsure at all n locations
ntgatgatatggtcttcaccgacgaaaggaacaaagtgtttctaaaaagaggcaaatctgatcatcatgctttgataaatgccaaaaaaaaactagggcaaatgaagagggtgagagtgagggagaagcccatgctgtgactgccattcctatacaaccaagtttcccaccaacccaacaatgtcattactcagtcaataacaaaccttctccttacccaccgcccagttatccacaaaggcaatccctaaatcaaccacaaagtctgtctaccgcacttccaatgtgtcgcaacgtgccctttgcgggcgagcgagggtgaggctcacgggtgcgctttccaaaggaggaaagatgcgcggagtcgccaccaacgtttatttgtgggaaacgtcggaaaaaccgaaggaaactggtcaaaatga

SEQ ID NO: 151911 - DNA, 400 bp, Glycine max
  unsure (1)..(400): unsure at all n locations
agctcgncatgcaacatgggttctatttcttttgtatngggagatcaacatattctgttgaccaccaagacgatgcatcaaatacaacattccatgacatgtgtttcctatttgtgttggatcaatgcacctcttcccttttgtttgatcatgatagccaacaaacatgcattgtattgcctttttgtcaaacctgcttctaagatgatcaggaacaaatacataacatacactcccaaagactcagaagtaacgccccactagctcaagattccatatctttttcaatctataaactgctgatggattggtaagcgcaccaattcctcccaagtatttaaatataaatgacagttctagtgccagattcatattaaccttgttggtgttatgtagatga

SEQ ID NO: 151912 - DNA, 423 bp, Glycine max
  unsure (1)..(423): unsure at all n locations
tgctcgctaagccactcagccctgttggctgaataagcctatgctaagcgagcttgcctgctaagcccaaggcacttgtaatttctgtatgtcttgccatgcactaagtgcgccctgtcgcgctaagcgcaatttactctctatttttgtaattgttggatttaggcttagcaagccttctcgctaagccatttatgtccagtagtgttgtcgcgctaagcgtaatttggtttttgttgaggaattgggcttagtgagctcgctaagccaattctacagaaaattctgatctgtgtcaactcgctaaggacgtggctatcatgctaagcgcatgaataatttttcataaggtgcgctaagcgcatctgtcgcgctaagcgcctaatctgaatnttagttttatttttcagcttgtcatttcaa

SEQ ID NO: 151913 - DNA, 426 bp, Glycine max
  unsure (1)..(426): unsure at all n locations
ttcatacttgtttacttgagcatctggccatagatcatattttgcacataactatcaaagtttgctatgtctataaacttatcttgaaattcttagtgcatagaggatcactattttcgtatattacaagaggattcgttaatggtctgccttaccactcgaatatacaactntattagtaacttagctccttggcattgttgatattgcaaagaatttataacaatctgactcgaagaaaatatctagctatattataattataacattttaatatctagcattcttctcatccaaaccaagaataagtaacatcatgaaaggaagctaagaaaaaccaagtgacctctttatgttcggcacattggaggtcaggtcattagtaaatcatcacttaatttgataaaaacaacctggtaaaatatt

SEQ ID NO: 151914 - DNA, 419 bp, Glycine max
agcttcaggttgctcattgactctatgttgttgcaaagaaggacaaagatctaaatgatgatctacagaagaacatagaccacagactcttgcatcaggtgtagatttctgattcatggcaagctgggttactaggttgaccaaggcatcaagttttccttcaagctttttattttcagtagatgaagatgaatctgtggccacctcatggactcctttaagaacaatagcatcatttcttgcactgaattgttgggagttggaaaacatcttctcaatcaaattcctagcttcagcaggggtcatatcaccaagagctccaccactggctagcatcaatcatacttctctccatgttgctaagtccctcatagaaatattgaagaaggagttgcttataaatctggtggtgaggacaa

SEQ ID NO: 151915 - DNA, 415 bp, Glycine max
  unsure (1)..(415): unsure at all n locations
agcttcttagtttccgatgatgcagatgagtttgtggctacctcatgcactcctctaatgactatagcatcatttctggcgctaaactgttgggagttggaagccatcttctcaataaaattcctggcttcagtaggggtcatgtctccaagggctccaccactggcagcatctatcatacttttctccatgttactgagtccttcataaaaatattggagaagaagctgctcagaaatctggtggtgagggcaactggcgcatagttttttaaatctctcctagtattcatataggctatctccactgagttgcctaatgcctgaaatatcctttntgatggccgtgatcttggaagcagggaaatttttttctaagaatactctcttgaggtcatcctagctcgtgatggacc

SEQ ID NO: 151916 - DNA, 421 bp, Glycine max
  unsure (1)..(421): unsure at all n locations
tgagatgaggaagtgttgaagggtgaaacttcctgctnttattgttgaccacagagtggtacctggagatatgtcgtgggggtcaggagaccttggggacgtcaggtggggtgctattgcccaaaaccaagcttgaccaatcccgacccaacccgggcatagtcggtcagtgagaacctgtgatgtacctaaacaggcgagctcctggcagtcaacagataaaaggaacaaagaccacaaagcaaggaggcttgtggtggctggccagctgtgaaacttgagtgatatgtgggttgtggctctggtaatcgattaccaagggtgggtaattgattacaaggcttaaaaatgaagacagtgggctaagattgtctctggtaatcgattaccaggggatgtaatcgattaccaggcttgaaaa

SEQ ID NO: 151917 - DNA, 372 bp, Glycine max
cactcgtctgtagaagcatgttggcaacgtaagtatatatagaacatgtttggattatcgtttgagaggcaccaaacgtccgtttgcgtgttccaatgcataaaacagagaagttactacacccttggataaaaaaaacatgggttacatttaacagtacggtaacccaaaacacataatttatgcaaaatcacctcacttttagagaaaaacgcataagctactcttggtagcatctaattggacacagatcaggtctcacaaacgagaatctaaacacactctaaggctttgtttgtttatgtgtttagtgaaatagttttgagactcatacaaacacatactgatatctgattgttttgtattcctgac

SEQ ID NO: 151918 - DNA, 399 bp, Glycine max
atgtttttttgatggcagtggtcctagatgcagggaagaatttctccaagaacaccctcttatggtcatcccagctgaaaatggacctgggagcaaggtagtgtagccaatattttgccactccctccagagaatgaggaaaagcctttagaaagatatgatcttcttggacatcagggggcttcatggtggaacaaacaatatggaactccttaagatgcttataaggatcttcacctacaagaccatgaaacttgggcagcaaatgtattagtccagtcttgagaacatatggaacaccctcatcaggatattgaatgcacaagctttcataagtgaaatcaagtgcaaccatctccctaagagtcctctcacgaggtggaggttgagccatgttct

SEQ ID NO: 151919 - DNA, 427 bp, Glycine max
tgtaattcgtgttaagggaggtgaataataatacgcagattttcactttctctctttttctctctttctttctctctctctctctctctctgggtgggaggacccttgggcctcgaataccaagcatagcattggtgctttcattgagcaaccatggcggaagcaactcactctagggtttcagcagaccggattgaggatgcaatcgcgaaactctcagcttcacaactagcaatgaacacaaagatcgacgacctcctccaacgaatgaatcaattagaggttggccagcaaccaccgcaatcattgtcgtcgtcttcagtaggacaaacaccgcaaatgcataacgcagtccaccgcatgaagctggacgttccaaggtttgatggttcggatccaacaggatggacattcaagataacacaat

SEQ ID NO: 151920 - DNA, 360 bp, Glycine max
aacctactattttatgacttattttggtttcttgacatgtctgattgctatttttgctctaaaaatgaaggtgatttgattttatgatgaaaattctccttacaaaattgagacattttgttgtattttttgctcctaagcatgacagtataaatcattgctcttgaatattaagtggctgtgtgaatgttttaaatgtttttttttgggtggatttttaaatttttaaagtatttattgaatatatatatgtgttggatgttgttcaacattgttttaatattgtttgagactatgtacgaggaacaaatttcttgtggtcatggttgaacacaaaagcataaaaggtctaatttaatt

SEQ ID NO: 151921 - DNA, 297 bp, Glycine max
ggtaatcaaagctatttgagacacctttgcatgtgatccatgcatattaggtgtcctaacatgtgatgatatggatcacgtcagtattcgccgttatagctatgaaacttattgccgacgacaatcagattacttaatttttatgtgaactctttgagctaacgcacgctctaaatagagctggtggaaagtctgcgaactagggggctgaggctgcattgactgctctcagatgactacttgatattacgactcacgatgtcactatccactagacatctatatgaccctgcttaa

SEQ ID NO: 151922 - DNA, 418 bp, Glycine max
  unsure (1)..(418): unsure at all n locations
ctgcagctacttcnaacttctcggattttttttatgttcatacatcttaaaagagaaacacatttgggattctttggtcatgactataactttgcatataatctttataatctcgacaacaacttttctgttgatgcagaggctgttcaacgtgctgctactattgcagaagcagagggtgctagtcaaatagaacctactcatttggagattattctccctcagttacttttagatttttaaagcatttgaaatacttaaatgtagcttctacttctccctatcatcaatgtagtagaaaggtcattaagatttgttggtccgaagctataccatcgaaagagaaaagggctgggatgaaaactgtggagtacctttactcgtttctttctattgctttctaacttgtacggctcga

SEQ ID NO: 151923 - DNA, 424 bp, Glycine max
aaaactagcttatgtgactggaacaagggttgcagagaggctttttgtgcctggaaattcgattcactttagatatagtaaatttgtttattctgaataatcagttttttttatctatatgaattaaaaataagtaccaaaagatttataatattttatgcactctatttaatcaagtgaaccaaactttctttataacaattgtttaaaagagaaactttgtaataacatattgattaatatgaaaaaatttcgttaaaagtggataaagattagagtcagtaaattgattgatcgaagttatacgtgatataacattagttattatacttactaatcagtctaagaacttgtgattaaattccaacataaatattatgagattacactatagtgtagtcatgttgataaaccaaaaaatata

SEQ ID NO: 151924 - DNA, 421 bp, Glycine max
  unsure (1)..(421): unsure at all n locations
agcttcactactcctgtgtattcttctctttctctcctcattctctctatcctttcttcatcttcataactcattcttctcatttgctcaccaagtttaatcatctcctccatgaccttgcgttttttggagatagtggagtagcatctccacttgtagaagccatacctacaagaaaagttagtgcacaagtaaaaaaaaatagaataggacctcaccacttaacttagtgtttcactcaagttcactcgtgtatcactgtttcacggctttttcttttatagtatgcactttttccttttaccactcttgcttctttgtaattcttatgtagaactttcaagctcaaaatcaagaagtgttcaatgtgaaatatgtcacanatcaaaactcaactcaagaagccaagaaaagaaatact

SEQ ID NO: 151925 - DNA, 423 bp, Glycine max
  unsure (1)..(423): unsure at all n locations
tcagaccaaagcaactcanaatctaggtatctaatttctttcaatttagnggattttcaaggtttgagaagtgaaaatgagaatggggtaattttggagcaaactctcatcctcacacaagtctataacattaatctaaactcgctcaaactggttttacgacgaanactctaccgaatcaaaatttgactcctcaacacccaatttaccctagaaatggctcttgccctcactttggtcattcattttcctcctttgcacaacccaagctttcccacaatgctaattgacatttcacactaggattaactcactttaatctccaattaccactaaatccagatttagcttttcaaatccttaaagcatcacacttttgcactcatatcactacattctcactgtttaaccctaggttaactc

SEQ ID NO: 151926 - DNA, 426 bp, Glycine max
agcttatacaaagagtccacaaggcgtgtgtatttctccgttaaggaaagataaagaacttaggggcatccgtaatggcatcatcggtggttatcatgaatggctgaaagttcgtacacgagggttagattggctctccaaattgaatgttatcaacgaggagaacttcgaagctccggaagaggatgaagaagtatgagctctaaaaatagaactaggaaaaacaagacttgccaaagaaaaattcaagttagtcgctatggacgtccggaaagagtgtgtcgggttacgagaagaaaatgcagctatcgcaagagcccttgaacaagaaaccaagaaggctcgcaaggaagagcatggccgagacaaattccgtggagctttgtggggcagcaacaatgagctcaagtttcacagggaagagag

SEQ ID NO: 151927 - DNA, 425 bp, Glycine max
tatgcgcatatttccttacaaacgttctcttgcactttttttctattaaccgaaaaaaaatgcacccatatacaatcaaggcagcttcgttacctagattatttacacgtacttccaaggtgtatttgttacttacatcacacacatctccttggctaaattcacatacatgcatactcaaagcattttggggtaccaaaaattgcacatgtgcatatcttggtatttctaatacctatacatacacaaacttcatgatgaatcttgactatctacacaataaggtgctacatttcatgctcttttcaagtttttgctacctaaagccgcatgcaaattcaagtatattttcctttgctgactaaaattgtattcaaattaaaaggtatacattctctggtaatgtatcttctttacataacatg

SEQ ID NO: 151928 - DNA, 418 bp, Glycine max
  unsure (1)..(418): unsure at all n locations
agcttaatgatagccgcaacagatatgctctaagcgggaccataaatttcaaaaatttcactaagtatgtgggcttagcgagctaggctcgcttagcccaatgattgccgcaaggaaatgagcttagcccagataggctgggcttagcgcgcggctttcaacaaaaaattgactaagttacctgggcttagcaagttagccccgttaagccacaggtatctgatcaggaagatgaatgttcatccacaaaagatgaactcgcttagtgtagtaggcgcgcttagcgagttcgtctgaaaatgcaaatattcaagcaattttgatgaacccgcttagcgcagcatgcgcgcttagcggatccatcgcgttttccagaaaaaacacagaanacgaagtttgttttcttctctttttttga

SEQ ID NO: 151929 - DNA, 422 bp, Glycine max
tctagagaaagctacatgaagctgcctcggtaaaaactctgaccagcctctattaaccgttggatcttctcgaaatttggtctgcaacttcacaagacacttgtccatgatcttaccgttggatctttgagaacatgtccagagtgtgctagaagcctcttaatgaagcttctggaggaagcctcttaatgaagcttctagagaaaactacatgaagctgcctcggtaaaaacgctgccccgccttcgttaaccgttgcatctttttgaaacttcttcaagacacttgtccaggatctgaccgttgggatctttgagaagatgtctggagtgtgctagaagctttcgttcccaagagcatctcttatttaagcatttcaacctttgctttcgggtagcttaggaaaaatgtcatttcttcgt

SEQ ID NO: 151930 - DNA, 398 bp, Glycine max
  unsure (1)..(398): unsure at all n locations
agcttgtgctcgtttattttaaattcctatgatcatgagcaactagctgtgtcctattatgaaaagtgatcaaataacaagcatagattcaaaaggtactaggttgcctcctagtagcgcttctttaacgtctttagctggacgccttatgacttgttggtcacggacctagtacttcgcttacctttggctttggacttggtcgcctactggtcggccatgtgtcgtatgcaacactctaacctttntatggatgagctaaggtgaactttagaggtggtggcggtgtgtctattgcccgctaccggccatcccaatgctgctgtggtgtttcgccctgcgcctgcctgcggacgcagtacttcttgatgaaagctcgatcagtaaggggcctgatg

SEQ ID NO: 151931 - DNA, 421 bp, Glycine max
tatgctacagtagcgaggccactaactgattggttaaattaagaagcattctattggattgatgccactgagcaggccttcatcaaacttaaacaggccattacattagccccgtattggcactacccgactttactcaaccttttgtgttagaaatagatgcatctgggattggagtaggggttgtgttgagattgatccctaaaatgcaaaaaaaaaaaaaaattgcttacaccagggaattgttcgctataataataacattggctaaattcaggcattatctgttgggccagaaatttgtcataaaaacatattagaaaagtttgaaaagtctcttggataaatcactacaaactcctaaacaacaatcatggttgcataaattcattggttatgattttcgaattgaatacaagcc

SEQ ID NO: 151932 - DNA, 404 bp, Glycine max
  unsure (1)..(404): unsure at all n locations
agcttcatgtaagatgtaacccatcttgtgattggattatatatatgattagtacattcaaaatgcaacttgaaggcaggatatgcctagtatttcttgccctgcaataattaagaaacataaatattgttataaaaaaaacataaatattataaccctcataaagaaaattgactctagtctttattttctccatttcaagtgacagaagcttaagacgagtttggatttgtctggaccaaaataaacagttattcaggaatcatcaagggaagaaatagcaacaatatgaatgataggttaaatattatgcatgtgatgacaactgttattgcctttaatataataaacttacttctggcgttaagaacaacctgcgtgacataaatcttgnatatgatact

SEQ ID NO: 151933 - DNA, 414 bp, Glycine max
tccttcatcaaattcaagattaatggtcactcatattatggtcccaaagggaaaaattcccatggcaagaacaaaaacacgaggtggaacaacaacagcagatagaagaagaaaaagaagaaaaaaagcgtgagcagttccagaatcagaagaagccttcagcatcgaattttcagtttccaaagcgagtttcgccttgggcgcaggcaataaacccgagcagtgcactgttagactctgaatccgatgattccgaggacgaggaggacaatgaagatgtcaaaggtaaagcgttgcaacacaactctattggttctgttcgtgaagaaagaaagggaatggcgagtgaggtttcttcgaatgaagcagaaagagtaaatggggagaggaaaaagagaagaagcaattcagagt

SEQ ID NO: 151934 - DNA, 421 bp, Glycine max
  unsure (1)..(421): unsure at all n locations
agcttatcatttcctgccaatttataagttactatttcaaaacttgataataaccttcatgaataatgactntttgaaacagaatcataaatgtcaaagtttatagcaattcaaagcaaaagggttaacaaaactactatcaactttataaataaaattggaataatacaacattcttcacatccctaatagaagagggagtctacttagactcagtgaggacaccccaaagtacacatacatacatgtaaactgtaaacattcaaacaattatccattttcatatcattttctcataacactcattattttcataatttcttccaagtaaaatagttatgttctcacttctcattataatttgataaaatccaaagcatcaataacaccattgcacagaatagttctacataccataatg

SEQ ID NO: 151935 - DNA, 418 bp, Glycine max
  unsure (1)..(418): unsure at all n locations
ataaaactaagcttgagccattcaacgacataacttggacttgtattttganngagtcccgcaatatatcgagacgctcgaactggaataccgaatctctgagataattcaaacgacaataactttgtagtctgatgtctgattcactctcgtaatatatcgaaacgctcgatattgaaagttgaagctcttagcaacttcaaactacaataactttttactcgggtgtctgattcatcccagtaatatatcgaaacgctcgatattgaatgttgaagctctgagcaacttcaaacaacaataactttttactcggatgtctgattgagacccgtaatatatccagacgctcgaaattgaataccgaagctctgagcaaattcaaacgacaataactttttactcggaagtcagattg

SEQ ID NO: 151936 - DNA, 418 bp, Glycine max
agcttccaagaatcaagatcatgtattattatcaagattcaagaatcaagatcaagattcaagaatcaagagaagaattaatcaagataagtatgaaattttttttttgaaaactgagtagcacatggatttttctcaaaacatgtttaccaaagagtttttactctctgataatcgattaccagattgttgtaatcgattactagtagcaaaatgtttttgaaaaagttttcaactgaatttacaacgttccaattgatttcaaaaagttgtaatcgattacaatgttttggtaatcgattaccagtgtgctagaacgttgaaattcaaattcaaatgtgaagagtcacattctttcacaaaaaagctttgtgtaatcaattacactgatttggaatcgattaccagtgatagtttc

SEQ ID NO: 151937 - DNA, 383 bp, Glycine max
tattttgtgcgctaagcgagctgtctcaattttcaactttttatttcttcaagtttttgcatcaattttcttccaaaatatttgtaattctccttttttttttaatcctgttggtcaagaatttaaatgatattaaaatcctcgttagttcattcaaaacaacagtaaaataaagaaattttaatcattcttagtcaaatttaactatcaattaaattcaaattttataattatcaaccttgatacaaacacatatatcatgtgtctttaatctttattacgggctaattacaaacttttctaacatcatgatgaatggaatgaggtaagattatatataaataaatggtaatgagtatcctaataataatgattaagaaaat

SEQ ID NO: 151938 - DNA, 413 bp, Glycine max
ctgctcttggagggattgatggctgccttcattaagcagtatcaatacaacactgacatggctcctgatagagcccaattgtagaatattagcaagaaggagcatgagtcctttaaagagtatgcccagaggtggaggaacctggcagcacaagtagcgccctctatgatggaaagagaaatgataaccatgatagtggacacactgccagtgttctattatgaaaagatgatgggctacatgccctttagcttcgtagatttggtatttgcaggcgagaggattggggtatgcttgagaagggggaagtttgattatgccgctcccgccagcacaagcaataggagattcggagcgagcagggccaagaagaaggaaggagacacccatgctgtaacttcagcttctacatg

SEQ ID NO: 151939 - DNA, 426 bp, Glycine max
  unsure (1)..(426): unsure at all n locations
tgttcctgagtggcccactccaccaagtataagaaaaatttgtgtcttccatgacttaacaaacttttataaaaggtttgtcccatatttttctatacttgtagcaccactcattgagttggtgagaaaccatgttccttcatgggaagattcccaggaaatgggttttcagaccttaccttacttcaacataccaaacaccactaatacatatgtttttgttcttgttacaggtgttgagggaaggatcccagggtatgaagaacctcaagatttgaggtcaaatcctttccaaggtggagggaatgatgtaatcctaccccgcaagggcattggatagaagactccaagtagattgggccagagatccaagggaaggccctanggttctcatgagccttanggtagatttcgagcccatgggct

SEQ ID NO: 151940 - DNA, 415 bp, Glycine max
  unsure (1)..(415): unsure at all n locations
tgcagcttgactattcaacgacaaaactttttcttggatgtctgattgagtctcttcatatatcgagacgctcgaaattgaatgttgaatctttgagccaattcaaccgacaataactttttattcggaagtctgatagagtcccgtaatatatcaagacgctcgaaattgaatgttgaacctctgagcaaatgcaaacgacaataatttttttctcgaatgtctgattgagtcccgtaatatattgagacgctcgaaattgaatgtggaatctcttagccatttcaaaggacaataacgttttactcggatgtctgattgagtcccgtcatatatcgagacgctcgaaattgaatgttgaagctctgagccaattcaaacgacgataactttntacttggatgtctgattgagt

SEQ ID NO: 151941 - DNA, 424 bp, Glycine max
tcaacattcaatttcgagcgtctcgatatatgacgggactcaatcatacattcgagtaaaaagttattgtcgtttgaattggctcagagcttcaacattcaatttcgagggtctcgatatattacgggactcaatcacacatctgagtaaaaagttattgtcgtttgaattggctcagaggttcaacattcaatttcgagcgtctcgatatattacgggactcaatcagacatccgagtaaaaagttattgtcgtttgaattggctcagagcttcaacattcaatttcgagggtctcgatatattacgggactcaatcagacatccgagtaaaaagttattgtcgtttgaattggctcagagcttcaacattcaatttcgagcgtctcgatatattacgggactcaatcagacattcgagtaaa

SEQ ID NO: 151942 - DNA, 422 bp, Glycine max
  unsure (1)..(422): unsure at all n locations
agctntattcaagacaaagaaattaaagatattcaaaatggatgatcaagacagtctctagagtcttaggaagggtatattaaataggaagggaattccaattgaagtagcaaaaggtttagccaagaaatttaaattaaaaagttttttcaagagatttactctctggtaatcgattaccagaggatgtaatcgattaccagtggccaaaaatgatttacaacagctattaaaatttgaattcaaaatttgcactgtaatcgattacacatatatggtaatcgattaccaacagttactgaacgttttaattcaaattttaaagcttgtaatcgattacacatatactgtaatcgattaccagaggagattttcagaaaatattctcaacagtcacatctttttaatttgattctaaaatg

SEQ ID NO: 151943 - DNA, 407 bp, Glycine max
atttagaaatgtaacttaattaatttatctatattcagaaataaaatacttcatagaaattcaattattgaaagtaatcgagttatatttgaggggaaaaaatattgcgaatttctgtactaattgattttcttaaaagtatggtgtaaattaaagtttcggggccaaggtttaatttattcttttggttttatggcctaccaacccaatcgtgccaagtccaagttcgtttggcactaaagttgggtttaatttatgcgtaaacttcatctcccaaatttcaaagggtaaccttcagttgaagttgaaacagatatatagagagaaagctactttgttcctttttccttaacattaccattatatgctgtgtgtaatcctgctatgtatatgtcatgactaacttg

SEQ ID NO: 151944 - DNA, 417 bp, Glycine max
tgataacacgcagagactaatttcgtcttctgcgaccttcttcaatcgcggccgacaagcccgttgacacatggagatttacgttatcttccgcgctcacaagatctgtcatactgacttttgagtcacgctgacgggcgtaaatacctgagtggttattcgtataaactttttgctgtctgtaagacgaaaagcctgataacacgcagagactaacgtcgtcttctgcgaccttcgtcaatcgcggccgacaagccggtgacacatggagaattaccgtatttttcgcgcttacaagaactggcatactggcttttgaagcaagccttacggccggaattccccaatgggtattccgattaaattttttgctgtctgtaagacgaaaagcctgataacacgcagagactaacgtcg

SEQ ID NO: 151945 - DNA, 161 bp, Glycine max
cccaaacacccaacaccgctggacacaacccaagaacaacaacaaccaaaacccaaacacacccaacagaaaccccaaccacccccccacacgaaaaaacaacccacacggccccgacccccaaaaaacaaaagcacagcccagccgaaacagattcccca

SEQ ID NO: 151946 - DNA, 172 bp, Glycine max
  unsure (1)..(172): unsure at all n locations
gtatattattttcttctcatgaagtgcactagacgtgcctgatatattacctcatgggcttacttctctagatatgatattgcgctctatttttatcacgactggtcntgtaacttgcattctattcagatacacatctattttgcactgatactgcctaacgaaggcaacc

SEQ ID NO: 151947 - DNA, 428 bp, Glycine max
  unsure (1)..(428): unsure at all n locations
ttaaaaacccaccaagaattcataatctacaacaccatcttatttcatagctntaaaatccttggttgaaaaaaaaaaaaaaaagaagcaatatttacaaatgacaaagtcaaacatgcatctaggcacatcacgtacacccattcaaaacatagaaacactagttttttaaaaatattcacaaccatgctttccgtcacgaccgcaacggtatcacaattacaattatggctacatcggccgtattaatctgcaattttctataatgtcaaaggatcacgatgaaatcgcgaccccgaccataatttagaatcttagaaacaatattgttgcagtgacaaataaagaattgctgacagaaaagcaaaaagaaacaaaaaaataaataccagaaggggttctggaactgtgagctgcttctactttag

SEQ ID NO: 151948 - DNA, 368 bp, Glycine max
ggctgatcattagaaccaatgaactcagagacaatctccttggacagaagctgctctcgaatgaaatgacaatcaatctctatatgcttggtcctctcatggaagactgggtttgaggcaatatgaagagcagccagattatcacaatacaacttcatttgcaactcttcacaaaacctcaattcttgaagaaattgtttgatccacatgagctcacatgtaaccatagccatagatcgatactcagcttctgcactagaccgagcgacaacagtttgtttcttactattccaagagattagatttcctccaatgaagacacaataacctgatgtagatctcctatccatgggacatccagcccaatc

SEQ ID NO: 151949 - DNA, 423 bp, Glycine max
tcttatccaaggctcatcttggtggtgaagctccttctttcatggcttattccctagtggatggcgcctcctctcacctcttctcctttgtcttccgctacatctccatggtggaaaatcaccattaaaggacctcattgaagctcaaagatccagcctccatagaagccccacaagcaagcttccatcacctcggttttctttaacagcgtgggacacccttttcagcacaaggtccccctcattcaacttgtgggggcgcaccttcttgttgaacgcgttctttatcctttgttgatacaggcgcctatggctcatgggcgtcaaacgcttaccttcaataaggttgagttggtcgtagcgtgtttgagcccactctgattcttctaggcccgattctgctagtatcctctgggaagggac

SEQ ID NO: 151950 - DNA, 385 bp, Glycine max
agcttgaaggtgtgtagcccaccatcttttcatagtagaatactggtaatgcatctactatcattgttatcatttttttctccgtcattgaggtgccacttgagctgccagttctctcacctttgggcgtattctttgaaagatctgtgcccattttgcacatgttatgtagttgcatcctatccggaaccatatcaaaattgtactgatactgcctaacgaaggcaaccattaggtccttccaagaatggactcaagaaggctccaagttagtgtaccaagtagcagctactccagtaagactttcttggaagaaatgtatcaacagttcctcatcttttgcgtatgcccccatctttcgacaacacatctttagatggttctt

SEQ ID NO: 151951 - DNA, 422 bp, Glycine max
  unsure (1)..(422): unsure at all n locations
ntctccactaagttgcctgatgcctgaaatgtcttttcttatggtagtggtcctagatgcagggaagaatttctccaagaacaccctcttaaggtcatcccaactgaaaatggacctgggagcaaggtagtatagccaatcttttgccactccctccagagaataaggaaaagcctttagaaagatatgatcttcttggacatcagggggcttcatggtggaacaaacaatatggaactccttaagatgcttatgaggatcttcacctacaagaccatgaaacttgggcagcaaatgtattagtccagtcttgagagcatatggaacaccctcatcaagatattgaatgcacaagctttcgtaagtgaaatcaggtgcagccatctccctatgagtcctttcatgaagtggaagttgagccg

SEQ ID NO: 151952 - DNA, 420 bp, Glycine max
agcttgctcacgttgcttgcaccgaatatcttgtgcacattggcgaatttctgaggctcttctggtgggaaatatggcgcgaaaatgcaatccggcatgcatttccttctcaggaacttgcaggcagcacagggagagttagagtagctagatgaggccatgatcttcactgcagtaatgccaattaagaatcaaacacgtacaactaaaataagtattttttttcaataaatatttaaataaattgacgcgatactctcagaaacgttggaataagtacttatgattgattatagtctttaatttttatagcagcaactaggaaataattcattggatcgagagttagagtagctagatgaggccatgatcttcactgcacttataccaattaagaatcacacacgtacaataaaatca

SEQ ID NO: 151953 - DNA, 423 bp, Glycine max
tgtccttctattgttacactctccccacactgcatgttctgcgttggaaaaaaaataaataatattatgcaaatgctccaaatgaatgtgtcacgtttctttttccattctcacaaagttatgttggatcttatcacccaaaaagaaaagaaaggaaaaagttaagttggatcatggtatgcataattgaatcaattgggcaaaaattgacaacgcgacatgtgatcaataatgttttgttaaactatgaaaaagaaaggttttgttaaccggggcatagggagttctgctttcagaatctactactattttttctgatttcagaaacagaaccataaaggctacaaacaaacacagctagttaaccatacagcttgcttcaattcctcatctcatatggacccatcagccatctcacataat

SEQ ID NO: 151954 - DNA, 266 bp, Glycine max
  unsure (1)..(266): unsure at all n locations
ggagttggaagccatcttctcaatcaaattcctagcctcagtangggtcatatcaccaagagctccaccactggcagcatcaatcatactcctatccatgttgctaagtccctcatagaaatattgaagaagaagttgctcagaaatctggtggtgaagatagcttgcacacaatttcttgaatctttcctagtactcatacaagctctctccactaagtttcctgatgcctaanatgtcttttctgatggcagtggtcctagatg

SEQ ID NO: 151955 - DNA, 375 bp, Glycine max
  unsure (1)..(375): unsure at all n locations
ctaagcttctatggagaataggtntagtcatatctagtccaaagagtttgtgttctcagtgatgtgatgcanttgaacaggtgtttatggtagtcttgacacgatgttacctttttcatagatgttttgtgtgttactatttaggaaggctacatgaaatctttgtcttgtaacttcctcaagtgagggcttcttccatggttcccacatagccttccaggtggaacctaggggtttgaactttgagaggtttatgggagatggagttggacacttgttgtttactagaatggtggacatatgtggtattgaggagtaatgatggttgataacacttttagaggtgtatgatccctatgattgttgaggtgggcc

SEQ ID NO: 151956 - DNA, 174 bp, Glycine max
taaagccacgatccaagcttgagaaaaccctacacggaccgaacatagcccgacagcgagaacctgagatactcctaaactcgcgacctgctgacaagctagagagaggaggagcagataccacactgcttagaggctagtggtggcagaacatttgggatgtgcgagtgatag

SEQ ID NO: 151957 - DNA, 334 bp, Glycine max
gccaatagaaacaaacctatacaaattatcgaatcccagatttctaaagatgtagaaaaaagtattagaaaaaacaaataccattgttagattttgtaacgcgcacattattttatatatcatttggtaaacaaaatttaaatctgcaatatctggggaattttttttttgtattaaataagtaaaaaattctactcatgaaaaacacacacttttgaagttttgtagttgaaataaaaaaactattgcgcccatatctcatctaatgtccgctcttgatattgaagttttcaaaaaaaaaatcatcgacttttggataaccacttgacaattc

SEQ ID NO: 151958 - DNA, 464 bp, Glycine max
  unsure (1)..(464): unsure at all n locations
aatactcaagccttctccctattntgctataaatagggcgaggaatgaagaatgtttttgttcagccttcttggcacttcgtattctcttgaaattgctgaggaaaattgtatccgtgaagaaaatccaagccaaggcgcttccgtaacatttccgtaacgctctcatgggtaattatgcgaagattttcaaccgttcttcgacattcatcggtcgttcttcgatattcttcggtcttcaaccggtaattaccccaaaccgagcttttcaattcattctatgtacccgtggtgggccccatgtgtctacggtacttttatgtcgtggttcatttactttccgtaccctcttttgacgcgcttctatctattatttaagtcacttctcgcctcatcaaaatatacaacaagtgttcaccgatcatttgacttagaatatccagtagattctattaaaatgaaatc

SEQ ID NO: 151959 - DNA, 340 bp, Glycine max
taccggatgacgccggcactcatctcggctccttacggttgtgatgcctcagcatggtggacaatcaaccttagaggacctcattgaagctgaaagatccggcctccatacaggccgcacatgccatctttcgttccgtggtatcagagcacatgtacttatattgcgcgctacttagtcctgacagtaatatggtggcggcacctggcacaccattgctgatacttcatctctatctccaagtatgctctctcatggagtgagataaatcgctgaaacatgatgcttcagagtgtgcgccgcgtagactggatatagaagccaaataggactctctatg

SEQ ID NO: 151960 - DNA, 422 bp, Glycine max
  unsure (1)..(422): unsure at all n locations
ctcaggttcggcnagcggaccatcactcagtattttttttgatncgccgcaacgaaggcgcttggctcatgtaagcattgcttancgcgcggcttctaacaaaaatttgactatattacctgtgcttagcgattcatcactcgcttagccacaggcatctcagcaagaggatgagtgctcatcctcaaaagatgaactcgctcagcgtggtaggcgcacttagcgagttcttctgagaatgcttatattcaatgaatactgatgaactcacttgtcgcatcatgctgtctgagcgagttcatcgtttttctcagaacaatgganaaaacaccaattcttctcttcacttgtcaagcctctataatgcagatcatacatgcagaccatcccaataatctatatgggttctaccctatagctca

SEQ ID NO: 151961 - DNA, 324 bp, Glycine max
  unsure (1)..(324): unsure at all n locations
ctctggattctcttattttagaagataacgaataacattacttatatgattggaggtcagctaatgctgtgtttctttctttctactcgatcttgcttatcaacttaatttacaacttacaaatgataacttgattcacgtgactcaattcttgtcacatcaaatttngcatagtctggaaagcaaaattctgcaggtttaattaaatgtgttacaacgaaatatacatacttttaaattaattatagccatatagcgccatatgtatttctagatatctatattgaacgctgcacgttactttaaatacttcattntattctc

SEQ ID NO: 151962 - DNA, 445 bp, Glycine max
  unsure (1)..(445): unsure at all n locations
gcgataacacatgttcctctataaacagaatatgtcccatcctcttacgaaagatagcatgcttcgcaaggaattaagaatctgatggagacgcgttctcttgctagagataaacttccctgctgttggacgttttgtttggtattcaaaagttcctctgaatgggacaactcaacttgcctaaagccttactttntatttattgttaatggtagtattataattacaaacacgccttagtaatttatcaaactatatcatttcaatttgcgagtgatcgtattcaatttagctaaaatgcatattatcataagtttaaatatgggtatataacgttttaacagataaggatgagtgtaaaaagttgttatccatgtaagtataagtctaaatacggtgttntcttcattgaacatttgnaaatagataccgtatactatataaa

SEQ ID NO: 151963 - DNA, 443 bp, Glycine max
agctttttatgactgttgaagtggcgacatattattgtttcatcttaccctaggaaaagttacctgaaaaagatatacctgcatgcacaccattagccacaacataaaacgagaggcattttgtttataaatcttgcagtgttctgggcatgccagattccccatatcacatgacagatagcagatatcaagacatctctaatctggctactctagctcatcagataaagattgatgatggaagagaattaaaactaacagcctaagggaggaaagaactgagggccaaagaccaaagcctcttagcaaaaatgcactcaaagaatacatgatctgcggtctccatattgctaccacaaaggctgaacatggagacagagatgcaaccccttctgttgaaactagaatcagtggtgaatttattatgaatgagcctccacagc

SEQ ID NO: 151964 - DNA, 472 bp, Glycine max
  unsure (1)..(472): unsure at all n locations
gcagttctaccatcttgagggtcaaataggncttgttaattttataaccttgtacttgaataattgggctatgatattgggctttgctttgtgtaattagattaattaggtagattagatgggcctaatcaaggcccatcccttccttctaagtattcactctatatattagtggaaattagttagttagttagctactttattttgtaaaaaacaaatttagttacttcttgtgcaagctttaggatcaaactcatttttctctttntctctcattttctcttcattcttcttcctctattcacttttgttttttcctttctctagcacaaatttcatggcttttccattggtgatgatcatggaaggctaaacacttaatcaatccaaggatccactcatagcaagggtgaatttgagttctgggtctgtatttcaaatctctgagaatgtcatcttttcttcaacctat

SEQ ID NO: 151965 - DNA, 451 bp, Glycine max
  unsure (1)..(451): unsure at all n locations
agcttgcctgtccgatgcagtcgtaatgatggtcctagttatgttggggaacggttacaaacccgggatgggtttaggcaaagacaacggcggcataactagcttgataaacgccaaaggaaatcgtgggaagtatgggttaggctataagcccactcaggcagatataaagagaagcatcgcgggaaggaagagcggtagtcaaaactcgcggttgagacaagaaggtggaggaagcccacccttccacataagtaggagctttataagcgcgggtctgggggacgaaggtcaagtggtcgcgatatacgaagatggtgttccgagtacattggatttggtacgaccatgccctcctgatttccagctgggaaatngacgagtggaagaacgccccggcatttatgcgacgagcataatgtaaacctttacggttntanaagctctatag

SEQ ID NO: 151966 - DNA, 414 bp, Glycine max
  unsure (1)..(414): unsure at all n locations
actcagcttggaagnggtgnttcaccttctcgctaagccaatctttttgcttatcgagcgtccactaagcgcaacactcctgtgctaagcgcgaggaagaatccagaagaagatgagctgtacaggttcgctaagcgcacctgtcgcaacctacccttttgcgggtgagcgaggcaaggctcacgggtgcgtcttccataggaggaaaatgcgcggagtcgccaccaacgtttattgaaaggaaaatgttagaaaaaccaaaggaaaccggtcatgaagaatattccagattcgggagttatctttacgtttgaggaaggtattagcacctctcacgtttgtcccaaaggacaacaaccttagattagaattatgtgaaattatgtatctaaacttttatttcttttttatttt

SEQ ID NO: 151967 - DNA, 400 bp, Glycine max
  unsure (1)..(400): unsure at all n locations
tcaccttanatggtggcacagtaagttggaaatatttcaagcaagctacggtggcagattcagtaactgaggcaaagtatataatggtaagtgaggctgataaggacattgtttggatgaaaaagttcatctatgaacttggtgtggttccttcaataggaggactggttccactattgtgtaacaatactggaactatcactcaagcaaaagaaccaaaatcacatcaaaagtccaaacattttttacaaagatatcactcgattagagagatcattggacatggngacgttaataatgaaatagtagttggaaggagaatgcatcaaattcattcaccaatgcacttggcatataggatcttgacaagcacaagtgggaagtatggatgatgttcatg

SEQ ID NO: 151968 - DNA, 431 bp, Glycine max
  unsure (1)..(431): unsure at all n locations
tctcttctttctcctttattgagtntcagagagtgtgtgtgtgttcttgtgtgctgcacttccattggtttgctgtgtatttgncttccataattcattcctggtaagaggttttcttaaataagatttatatattctgatttataatttccgttgttaatattataaaaataatacattacttagtattaataggtattgtaaatctaggttaattaggattaatatatattgtaaggttaggctagttacaatgctgcttttaaattttatgtattaatagatatttgaaggttaagttattcttaatttttatgtattaatagatatctgaaggttaggctagttaggttggtttgctgatatatttttagatattatatatgtgatataatattattagctctagaaatattagacacaggttatat

SEQ ID NO: 151969 - DNA, 463 bp, Glycine max
  unsure (1)..(463): unsure at all n locations
agcttcttatccaaggctcatcttggtggtgaagctccttcttccatggcttattccctagaggatggcgcctcccttctcctcttctcctttgccttccgctgcatctccatggagaaaaatcaccattgaaggacctcattgaagctcaaagatccagcctccatagaagcttcacaagcaagcttccatcaagtggtaatcagagcacaagagcttcaagtaggtgctccttaaacctccattaattttntttctataccttctcttccattgttgtttcttcattnttctccatgtatctcctcacatgtcttgttctaaatgttgctaacatgattctttagagtctccaccgattaaactcgctatagaaagtagatttgattgtctatgagtcaaatttcttgttcttgctcttgaaccatgaattgtgttgagtttaggttcctttgagttttgc

SEQ ID NO: 151970 - DNA, 391 bp, Glycine max
  unsure (1)..(391): unsure at all n locations
atatatgtccccttatcggacatccgcgagagaattttttttcattcgaancncncgagagctngcgttggtcaatttcgagcgtctagatgagttatgtccctgaatcggacatctgtgtgaaacgttatgaccattctattttctcgagagcttccgtcgttcaatttcgatcgtcttgatatattatgttccccaatcggacatgcgcgtgaaaacttatgaccattcaaatttctcggagagcttcccgggctcaatatcgagcgtctagatgaattatgtccccgaatcgaccatctgtgtgaaaagttatgaccatacaaatatctcgagagcttccgctgtcaatttcgagcgactcatcataatatgtacccgaatcgaacat

SEQ ID NO: 151971 - DNA, 361 bp, Glycine max
  unsure (1)..(361): unsure at all n locations
acaagcatgcgtcgcagtggtgggaactttgatgaatgacattcttgagagacacaactcatagatcaacaactctgcctgtatgtgccttcaaaatcgtgcggccccccctctctttctctccatcattcttgttctccatagaagcatccgtccaagcatcttatccaaggctcatttagatggtgaagccctctcttccatgggtaattcnctaaaggagggcgcctcctctcacctctagtcccttggcgtccgctgcatntccatggtgaaaaatcacccttgaatgacctcattgaagctcaaagatccagcctccgcacaagctgctggtgctagctatcgtcaatgagggaga

SEQ ID NO: 151972 - DNA, 388 bp, Glycine max
  unsure (1)..(388): unsure at all n locations
tgaaccctcaacacacctttatataagagaaaaaagttacaccaacaagaacaaaaacccctctcaagtcgaagaacaagtaaaaatcactgttcctttactctgtcacaggggctgtcctttacaaatacatttattacagataagctcaatgtctaatctatgcaatagtaaagattcctaccttggattctagcttttctttaggcaggatacattggtctttaactcttgcttgtctttngtaatggaacatcttcttcatcttggatatttccagaacaaaaaatgtcagatgagtcttccattgagagaatagtagaagggaaaggagggagttgttgtccatggcatccgctggcttcataaatctccctgtcttttttct

SEQ ID NO: 151973 - DNA, 437 bp, Glycine max
  unsure (1)..(437): unsure at all n locations
tacttatgctctgcctcgaatttgatggatgaaaagcagcttgttgcgcactttgtttattacaacacgctggtttggcataaaaggatgggtcattttcgacatggcgctntgctctatttgaggaagaatgatcttgtacaacggctgcctgaattggaagaaaaatcacctgtatgtgctgcttgtcaatatggaaaacaaatgaggttgtcttttcccanaggcaaatcttggagagcaacaagcaagctacaattagtacatacagatgtcggaggacctcagaaaacctcatctctgaatggcagtaagtactatattgcttttattgatgacttttcaagaatgtgttggatttatttcatgaaaaacaaaactgaggttgccatcatagtttacaagtttaaagcatggtgtaaaaatcaaagtgaaag

SEQ ID NO: 151974 - DNA, 400 bp, Glycine max
  unsure (1)..(400): unsure at all n locations
ataccttcacttaagaagtcatggtgatgagttgatcgaatctaacaagaatagtacattaataatcacctatagaatgagtaacaagggtccaatttttgaaaaattctataagtgtcttgaggcatgtaaggctgcttttgtaacaacatgtagaccttngattgggttagatggatgttttctgaaaagttattatggtggccattttgtgacaaccattgggaaagatggaaataaccaaatgattcctattgcatatgtagtagtcgaggctgaaaccatagactcatgattatggtttattgacttgttactaaaagacttggatgggattactgaanaaaagtgggctcttatctctgaccaacanaaggtaatatntctaaatacttgtgac

SEQ ID NO: 151975 - DNA, 485 bp, Glycine max
  unsure (1)..(485): unsure at all n locations
tcaacgtcacttttgaccatgaccatagtgtgctnntttggactgatatctttangaagctatatatagatctctagactttgtaattnttttaatcttttgttcacttttatcttcttatgaatttaagagaaccttgagggttttttggacctatgaagtggggacaacatcgttaagacataatgtgatcattgctcctacttattggtatctttatgtttatctcatataagattgctagttatgctttgatcatgagtgcctagtccccctagtccgatggttatgatgtaacttttcaaacgtactcttctccttgttcttaatggaattctacattgtttcatgttaattagttctcttacttgtttntaatggaattgaccagtctactacttaatcaattgcatagtagtgattatcaacatgtaattggtagatctaggtagagaatgttntgcaccacattgcatgatcaaact

SEQ ID NO: 151976 - DNA, 355 bp, Glycine max
gctgaaagaggaagtgtgaaggggaatctttttgcttttttgttgacccagagtgcacctggagaatgtcgcggggtcacgagaccttgggacgtaggtgtgggctattgccaaaccaagcttgaccaatccgaccaacccggcatagtctgcagtagaacctgtgatgtacctaagcatgcgagctctgcagtcaacagataaaggaacaagaccacaagcaggaggcttgggtggtggccactgtaaacttgatgaatgtgagattggtctctggaatcgataccaaggtgggtatcgatacaagcttaaaagaagacggggctaatggcttggaatcattccagggatgtat

SEQ ID NO: 151977 - DNA, 428 bp, Glycine max
  unsure (1)..(428): unsure at all n locations
taagcttctgttctcaattacgagcgtctcgatatattacgagactcattcggtcatcctagtaaaaagctattgccgcttgatttttctcagagcttcagttttaaattccgagcgtctcgatataatatgggacacaaccggacattcgagtcaaatgttattgtccattgaattctctgagtgcttctgttttcaaattcgagcatcccgatattttacggggctgtatccgacatccgagttataagctattgtcgtttgatttttcttagagcttcccttttcaattactagcgtctcgatatactacgggacacaatcggacatccgagtcaaaagttattgccgtntgaatttgctcagagcttctgttttcaatatacgagcgcctcgatatattacgggactcaatcggacatccgact

SEQ ID NO: 151978 - DNA, 349 bp, Glycine max
agcatgggcaacacttgtgggaactatgatgaatgagagtcttgtgagacacaactcaaagttcaacttctctccctttatcttccttcaatttcgtgctcccccctctctctttctctccatctttcttttcctccattgaagcatacttccaagcttcttatccaaagctcatcttgagggtgaagctcttttttccatggcttattccttaatggatggcgccttctctcacctcttctcctttgtcttccgctgcatctccatggtgaaaaatcaccattgaaggacctcattgatgctcaaagatccagcattcgtagaagctccacaagctagccttcatcaa

SEQ ID NO: 151979 - DNA, 334 bp, Glycine max
  unsure (1)..(334): unsure at all n locations
ctcgcccagtattatgatcagccgttgaggtgcttcatctttggggacttccagctatcaccaatggtggaagaatttgaagagatcctaggatgtcctctagggggaaggaaaccatacctcttctcanggttctacccctcattggccagaatttctaaaaaaagtccaaatctcggcgcaggaatttgaccgccaaaggcaagtcgaaaatggggtggttggaataccgaacaaatatttggaggtaaaagcaagaatcttggcagataaaggcgagtggaccccattcatagatattctcacactgttgattnntcgggggggggggggg

SEQ ID NO: 151980 - DNA, 460 bp, Glycine max
  unsure (1)..(460): unsure at all n locations
tctagccaaacggacttaccttgacttaattcctttgatattctttttgagccttgntaccctttccttatttggaagctcactacaagccttaagtgaaaaaccatgatatcaccatatccttaaggaattttggagctttggaattgtttttgggaataagtgtgggggtttttgtttcattggataacatattttgttggccatgcttcatgatatattttgagccatacttgatgtacattgcatattggttaaatgttggacatgctgaatatgatgctgtttctcaaaggctacagagtacaaaaaaaatattaaaaaaaaaacattaaataaacaaaaaaaaaattgaataagaaaaagaaaagcacagcagtaaagttgtgtgaataagatagtaaatgacaaaagaatgatgagactccttggtctactctttatgtttaaaatntatctt

SEQ ID NO: 151981 - DNA, 439 bp, Glycine max
  unsure (1)..(439): unsure at all n locations
agcttccaagaatcaagattaagattcattatttatttattcaagaatcaagagaagaattaatcaagaaagtatgaaaaagttctttttaaaacaaactgagtagcacatggatttttctcaaaacttgtttaccaaagagtttttactctctggtaatcgattaccagattgttgtaatcgattatcagtagaaaaatgtttttgaaaaagtcttcaactgaatttggaacgttccaattgatttcaaaatgttgtagtcgattacaatgttntggtaatcaattaccagtgtgcttgaacgttgaaattcaaattcaaatgtgaagagtcacattctttcacaaaaaaagcttgtgtaatcgattacacntgattggtaatcgattaccaatgatatgttctgaacagatcanaagatgcaactcttcaaatagtt

SEQ ID NO: 151982 - DNA, 408 bp, Glycine max
  unsure (1)..(408): unsure at all n locations
actgatgattacagncgtaagatatggatatacttccttggtgaatagtctgaagcttttattacctttaagaattaaaaaaatcttgttgaaaaagagacgagttctgataagcataagcataagccacacatcaccaaggtatacacccgtaaacagcgagcaagagaagaaataaccatggaccaccagcagcagggcacacaacacccaaggggtgcaaaccacccaacagttacgacccacccaaagggtgaagggtcagaagatgtgaatcaatgggacatgacacaacaccaaggggtgcaaaccacccaatagttacaacccacccaaagggtgcagggtcagaagatatgaatcaaggggacatgacctttgggaacagtcacaaccaaccattatgat

SEQ ID NO: 151983 - DNA, 277 bp, Glycine max
ttaaagctaagcacatatgccaaacataaaatatgacgaattacatttgcacgaggcattatagcctagcaaaaatgacgagaatcatgaaactggccaaatacaggctataggcccaagcggagaaggacgaacgcccaagtggagaaggacaaaaccctcgagtggagaagggtgaaggcccaagtggagaaggatgaacgcccagaggcacagacactatcaagactactaattgttgctgaaggcccaaactaatttgaaggcccaagtaaaa

SEQ ID NO: 151984 - DNA, 154 bp, Glycine max
actcatgctcggcgactatggcgccttccggaagagtgcgtgcttgcgattgttattttacggattccggaagaacagatcttccgtgtatgctccgaaacacctcttgcggatgaccatctccgtgggtctggaagcactctccggaagaccc

SEQ ID NO: 151985 - DNA, 467 bp, Glycine max
agcttacagctaatcaaccctattgtttctttttcattcaaggttcaacacggaaaaaattatcattcatgctcatcccaccacaggaatctactgaaatttacaaactgagatgagagtcttcatgcatcaaggagcaaaaatgaaagtatagagcacatcaaggagcgaatttcacataaaatcatgtaaaaccacatctcttgaatggagaactaaattccacgaaagttcatgctccataacatagataactaccatccaaataggcattagaaaagcacatttaatcttttacatctcagaaaaatattgaattaatttgtagaattaaataattgaacaaactaactatagtgtttacacaaaatgacctcacaatgctgtgaccaaataaaaaattgaatgcaacgtgcattgtttatgcacagaataactatcaacaattgttgaacatgctaaatact

SEQ ID NO: 151986 - DNA, 409 bp, Glycine max
  unsure (1)..(409): unsure at all n locations
ctaattggaacttaaataaatgtagtaaccactctatgtttttttctagnctcaaggctctgaaatagggtagctctcattccttctgataataataataataataaaccatcatcatagtgtcaaaagaaacgaccagagattagtgtctagctttacctggcgtgatgtgcggatttgattagagtgggtgaatctcccaacgacataatttatgaaataaatggtaggcgtcaacgaagaatggcgaaaatacgatatacactttcgtattatgtcagctaacaaaacaatttaatgtgtgataaatacgttgagcaaaagaattcttaatggtacacaaaattgagctactttcttggatctatttgtctgtcagacatatncttccattatttctccttctcaa

SEQ ID NO: 151987 - DNA, 413 bp, Glycine max
  unsure (1)..(413): unsure at all n locations
ataccgaatgtcacatgcttattcatggtttaacctttaatcccataantggggctgcatctgggcgagtttttgagctatatcaaggtctttcgatgtcacttgcaacttgatgcaaccttgcaatttaaacccttggcttatgcactgtaaacataacacttcactgcctctatcacaccctaccttgatagttgatactagncagcaatatcttgctatctttctctctttgtttaccccattcgttgtaggaatcggcagtcttttgtttaagagtttatattaaatgcaccattntgtaagacatttttgtactatcatccattcatgcggtgctatgttgtcaattgttatgatcgaatgatacagtgacaattgtttacatcgacatagagcctcgtactattctt

SEQ ID NO: 151988 - DNA, 277 bp, Glycine max
gaatatgctgataccgacctttttttttttgaagccagacagcgaggatcttgaatgagtttgatgcgggcacaccacgaggcattaattgtgaaacctgtcaaatctctcggagagtatcccagacactaccacacagcctggaaaatcgactaaattgaccttctgggggcgcatgcatggcgttaccaaactggaggggcactcagaggagacctagcaaatctcctttacatgattacacgtgctaacttccattactcctgattacaacgga

SEQ ID NO: 151989 - DNA, 356 bp, Glycine max
  unsure (1)..(356): unsure at all n locations
cacccatatgggcagtagttgctggttgctcaatgttcgtcatcatctctgtattaattgaacacggaattcatncacttggaaagggacgtactaggtgttcatcctttatttttggtttattacttgtagtaactacaattaatcaatttccttccacacacactttctaattatagtggtttcaaaaatgacataagaaggccaagaatgaagccttggagaaaatcaaatcggttaagcagcataatcggaacgagggcaaagtttttttgttctttttcttttaanactcgctgcanattataattacatatatgtatatgggtgttggttttgccaaattaatgttatta

SEQ ID NO: 151990 - DNA, 490 bp, Glycine max
tatatattactcaagcttctagccaaatggacttaccttgaattaattcctttgatagccctttttagccttgtttccctttccttgttttgaagctcactacaagccttaagtgaaaaaccatgatattaccatatccttaaggaattttggagctttggaattgttttgggaataagtgtggggggtttttgtttcattggacaacttgttttgttggctatgcttcatgatgtattttgggccatacttgatgtacattgtatattggttaaatgttggacatgctgaatgaaatgttgtttctcaaaggcaaaatataaaaaataaaattcgaaaaaaaaataaagaaaaaaaaaagcaagtgagtcgagtgaataagatcttatatggcacaagaatgatgacactcttggttctactcttcatgattaatttttatctttacttctttatattttcttattttgtattcttaatatgcacttat

SEQ ID NO: 151991 - DNA, 233 bp, Glycine max
gtatatagctaatggctaattttcttgtttaatctatgaggttagccattccaaaatcacattttaggaagaaaacaacatggccagataatgaagggcacaaaatagatgcccctcaaagttctgtcacctttgtttatcaaaccaaagtagcagaattattacgaagtataacaatttcatggtgcaaggatcctacagatcattttcttttcatgagcgtcgacaacact

SEQ ID NO: 151992 - DNA, 328 bp, Glycine max
acaatttcttcagaaaaaaaaaagaaatattaggttgatatttcacaacaataatcacacacaagcataaaatatatctctaccagcagacaacattaaaaaaatttaaattcaacaaataaaaatcctttgcaactataaatttaattcacatcccattattgaaattatgctctttactatatatgctcaagcttcaagatatgtgaacccaatctattcatctacaaaacaagagatacgcatacatatatcatatatacatacacacacacacacacacatatatatatataggtcaataaaatacctcatcaacgacagcata

SEQ ID NO: 151993 - DNA, 464 bp, Glycine max
  unsure (1)..(464): unsure at all n locations
ctcttcgtcttcttcgattanggaggtgacttggtcctcaaaatccaagtgctaacattggtgctttcattgcaatggctgacgcgacccactcccaaactttccctacatttaccataccaaagtttgtgaggaattctttatttaaaaagcaaaaatgtgtataaattagtttgagacannaaaaaggaaagtacccgatgacaatagaggtatctagcaccaagttgaaagcttaagtcataaaaatgtatcttatgcatctcaatggatctaanatgaggcaactatgatgcanatttctcacccatgattaccttttgtttcttctgcagttcctcagatataatatattcccatttcttttgggcctcctccttggagtctctgagccaatctagtataggtcttgtgagacaatagtagacggatccctcaaatcaggacataatacatcctacaaa

SEQ ID NO: 151994 - DNA, 465 bp, Glycine max
  unsure (1)..(465): unsure at all n locations
ntgtgagacagngaccattntagctgacaggcttattagctttgatgcataccacttaacttcatggttcatgcaataatttataggtgtatggagcctaactaagcatgtatttatgcgttccttgctattagtcctttgcagattatagaccaaagctttatttacaaagatctgattgatttaagtatgacagcactaaatggtgcccttcttgtgccattgaataatctgttttgccactcttatagcgcaaaattatttactctgtccagtctaatttgatgggaacacctatttttatctttcattttcattggcataatatgaacttgacattagtatattattgctattatacttgacagaaaaagataactngaattgtttatctaatacaaagaaatagaataccaagtcttcaattgttattatgctattataattgatatcagacattttatt

SEQ ID NO: 151995 - DNA, 422 bp, Glycine max
  unsure (1)..(422): unsure at all n locations
ctgcagctttatactctagtgatggggcgcgttctttcttttacctncaacaggaactaagagttgcctacaccttcttcacagtgaagtgtgtagcctctctccatcatttggccaatgcttagaagattctcttcagttctagaatgttctaccatattcatacacattattagtctagattgttctaccatattcatacacactatagttctaggatattctaccatnttcatatatattatatttaagaatattctagaaatttgtagcaatttcaacagcttctacttatcagaatcataattgtgtgccactttccatcacattctcacacaccagagggaaaaaactggactagcacttggtcctgaaatctttagtgccagctaaaaccatatagcctcaaattctaaataata

SEQ ID NO: 151996 - DNA, 234 bp, Glycine max
gccctccttgcgaaaactttcttgagaagctagaggtgagctacactctctctttctctaactaaactcacctgcgtgagaagcttctctaagaagatgcctaaagaaactagaagctatcttcgcataccttgctaatagctgagctcacccttctgagatgagaacctagagcttatcttcccaccctctattatatttaagcgcacccccctgacatattggacatgaaaa

SEQ ID NO: 151997 - DNA, 399 bp, Glycine max
gaatgtatctcttttatcttagagagagtgattctcctaagctcttgagtgattcaagaacaccctggctatatcaaagggctttcacatcctttgtctgttgccctcgccggaaagagtgattctttccttccaccatttcatcttcaaccttgttctttccaaccacaattccagaaaatccaatgttggccagaattatctcctaaccataactctcactttactcgctcaaattaagtggttcttgatcctaaattgaaattcaaaacaagagctttcacctcggtttggaatcacatcatttggagccatgtaacttgagttatagccatttctatatttctgtccagtcaccacttaacctacgttttaccattctcattcctccttttatgc

SEQ ID NO: 151998 - DNA, 427 bp, Glycine max
  unsure (1)..(427): unsure at all n locations
ttctctagagaagagacaaataatagttgtcaacaaatataccttaacattcataagagcagtgaatgattgaattggtgagtctataactcgagaagcacacatggacatatcccaaagcttcaatgtgttatctatggatgaagagactatgctcatggtgtctacaaacttgatgtagctcacagtcttatcatgtccaaccattatacaagaggcactttcagattgcgaagatcatagtaatatatctgatgatctgctgaacgaaatgcaaggaaatgagcaaaatcaacgggaaactgaacacaacacacattngactctgttttgatggtaccaacactaactccctgcaataaaagcacatgtgagggaaacaatccatcatgcgtctagattaaacacataaaacatgcaaaagaat

SEQ ID NO: 151999 - DNA, 462 bp, Glycine max
  unsure (1)..(462): unsure at all n locations
agcttgcatacaagtagtagtcggattttcttccttcatcagntaaactatccccgggttatttgctcatgattgcccatgcatggaaaggcttcttgtgttttactgatttcatatggcttatactcatttcataaattaacaaatatctagaaattttgttaatgaaagtccgatgacattttaaatccaatgtacatcattccacatgagacaaagctattgatataaggagtaagcactacatagtataacctatgatacaaagctattgatataaggagtaagcactacacattgtgctatgaggagcacttcatggaacaagagagaattgcaataaaattccattcttagcatgtaagtcacttttctgatccattctatgttagtatcacatcacaacgtagtctgtaatacagatgaataggaaaacaggtaacttaatttcccatatgctac

SEQ ID NO: 152000 - DNA, 449 bp, Glycine max
tagtcgccaacaacaatgagcatgttcggatgatggttattgattgaaattgaggctgggtatgaaagtgtgcatgcaaatgcatttgaaagtgaaccttgcattgaaaatgaagataatgaggaagatgataatgagcatgttgaatatgtggatggcgacaacgacatgatatttgaacactattttgctaaaatagttcatgaagagtgtaacgacataaatagctttggtgatgtgtatatagttgacatggacaatgtaacattgatgtcttagaaaggttggaatttgttgatcttgaaatcgcatatcaattctatatgtggtacgaaagattgaatgatttttctatactaataattatgtggctagaaatagaatgggggaaatagtacaacatacatgtgcttgctcttgtgctgtgttatgcctaaaaatatgatgaa

SEQ ID NO: 152001 - DNA, 448 bp, Glycine max
  unsure (1)..(448): unsure at all n locations
gcttanggaatcatctcctgatgataattttttctttcaaaaagaaaatcttacattataaatatttctatttagggatcccatgctgaggtgctcgagcaagagattcttaaactcaggaatgattngctcaaggtacgccttacctttcaagtttctatacactgtgcagagatagagccattaaaattcattctaaagcattcaaattaactctatttttttttgtgtgttaattaattatctgttcaatgttcatattccactgtacagtatgaaatggagcgtgggaagcttgaaatggaactgcaagaggagaggaaatcacgtgatcaatggattagggagcaacggatgaaaattgaaaattctcgcactactatatctttctcagattgtaggacaaacgacagtcaggtacaccttattcacctgaaattatcgttac

SEQ ID NO: 152002 - DNA, 311 bp, Glycine max
agttttgtgtgagagagtgaaatgaacatagctacaattgagagagtgacataattatacggataaatagtcacttttatctttgaatgtgtagttcgctgacaaatgcgtctcttgatgatgaaaatataaaatctattccttaaaagtgtaaaaagtgcgacaaatatatgtggatgttaactatcgtatgtcattgttaataaaatagtctatgtggcatagagggacgaatttgtcactacaatgatttcaacgtggtattctgactagattggacaaaaatgtctatataatacaatttttggacg

SEQ ID NO: 152003 - DNA, 472 bp, Glycine max
tgtgtagcattatctactacagaagttgaatatatcgctgctattttttgctgtgctcaaagttgctagatgaaacatctagaagactttggagctaatccttgatcatattcctttaaaacgggagaacagaagtgtgatcattgtaactacaaatcatgtcatgcattctataaccgaatatatagagataaaacatccttttcttagagatgatgtttcaaagggtgattgctgcatggagtgtattgatagagagcatcaactagcaaacatcttcactagaccactcgctagagataagttcttctaatgggaatttaagtgttcgagggcccaggtggatgactttgtgttcccagagcaaaagaaatgaccgttgtatgagaagtttggttctggcctggacgatgacgatcctagaattagcatcttgttgctttgctagtgcgacgacctgtggtaccataat

SEQ ID NO: 152004 - DNA, 394 bp, Glycine max
  unsure (1)..(394): unsure at all n locations
agcttttgtgtgggatacccaatgtgatctttttttcaaacccttaaggaaagattgacgaccgctccagtgctagttttgcctaacccaagaaaaccatttgaggtgtattgtgatgcataaaagatgggtttcaaaggagtgttgatgcaaaatggccaagtagtggcctatgcttctagacaacttaagactcatgagaggaattatcccacccatgatctggagttggctgttgtggtttttgcccttaagatgtggaggcattantctgttggctctaagtttgaggtgtttagtgatcataagagccttaagtacttgtttagtcagaaagagttaaacatgcgtcaaaggagatggttacgagttcttaaagattatgatattgatc

SEQ ID NO: 152005 - DNA, 282 bp, Glycine max
gagtccgatatgtgtctacctccgattatcgctcctccattatgggggtccacctggccgcagatccttcccttttggcgtgttcttgaagatccgccaccttttgccacttttgtattgcatcttccggaccatatagaatgtctgacctgttatgaagcaccattagtcttccaaatggctcagaagtcctagtatttaccggcgacagtgtctatagactttcagaaaatgatacagttctatctttgcttgcccctttcacagtcatttaatgtctgg

SEQ ID NO: 152006 - DNA, 455 bp, Glycine max
  unsure (1)..(455): unsure at all n locations
tactcaagcttacagcagatttagtaatgacccactaacctatatttattatatcttaatgccattaacctagggaattaaaaaaaacttaatggctgagtgtaactgaaattgtggcaaccaaaagtcacccccaacagccaacaagtcagccaccatttggtctcccaaaaggctgatgcctatgttgccaattgggcccttattacaacttgaactaaacctaactaaagcccttttaattgattaacccaaaacatatttttggtcagccaactttacaaggattgggccattatttagacaaactaaacactctaaaaatcgagacaaagtggtgtcatttagtcctcctccatttgggccatgatacaactcacaaccttggacttttctccttgacactngggcttgtatcaaatagtatggacaacacttgttgaagagcttccttt

SEQ ID NO: 152007 - DNA, 432 bp, Glycine max
agcttgaaattgaacaacggaagttctcgagtatactaaatggtcataacttatcacacagacgtccgattcaggcgcataatatatcgagacgctcgaaattgaacaacgtatggtgtcgagaaattcaaatggtcataacttgtcacacggaagtccgattcaggcgcataatatatcgagacgctcgaaattgaacatcgcaagctctcgagaaattccaatggtcataacttttcacacggaagtccgattcaggcgcataatatatcgagacgctcgaaattgaacaacggaagctctcgagaaactcagatggtcataacttatcacacggacgtccgattcaggcgcataatatatcgagacgctggaaattgaacaacgaaagctctcgagatactcatatggtcataacttgtcacacggaag

SEQ ID NO: 152008 - DNA, 475 bp, Glycine max
  unsure (1)..(475): unsure at all n locations
tganantgaacaacggaagctctcgagaaattcttatgatcataacttttcaaacgaaagtccgattcaggtgcataatatatcgggaagctcgaaattgaacaacggaagctcttgagaaattcaaatggtcataacttatcacacagaagtccgattcaggcgcataatatatctagacactcgaaattgaacaacggaagctctcgagaaattcatattgttataacttatcacacggaagtccgattcagacgcataatatatcgagacgctcgaaattgaacaacggaagcacttgagatattcaaatggtcataacttatcacacggaggttcgattccggtggatagtatatcgagaagctcataattgaacaacgaaagctctcaagaaattcatatgctcatcacttatcccaaggaagtccgattccggcgcatgatatatctagacactcganattgaacaatg

SEQ ID NO: 152009 - DNA, 390 bp, Glycine max
aaaagtgaaatattaaatgagataaatttgaaacagactctcacctcacacaaattcatagcattagtctaaacttgctcagactgaatttacacctaaaattccacctaatcaaaaattgactcctcaacacccaagtttgccctagaaatggactttggttcactatgggcctgtgtattactctatagctcaacgcaacctagtcaacatgtacaaaatgacgatctaagctattattaactaactttaacgcccatttaccacaggaattcagaattaatctttccactctcgaagtctcactgaatattcactgataacctcacattctcactttctaaccatgacgtatttctacctttaaccctacaaattctcacaacaata

SEQ ID NO: 152010 - DNA, 327 bp, Glycine max
cgtcagttgtggaaattataatgtatgctcgggtttgtactcaaccagacgtaggatttgtggctagaatgtttgaatgatatcgaatagccctagaatctaactttggaaagatgcaaagaaagttctaagatacttaattatgaggaacaaaggaccacatctttacatatagaactttagatcattatggtagttgaatatagtgtgtggtcagatgctacaattcacgctaatagggtgcaaaatttatcttgaggctcggaatctttgacaatattgctaggttgctgaaaatgcattgggataactctgtatcaatgcttt

SEQ ID NO: 152011 - DNA, 305 bp, Glycine max
  unsure (1)..(305): unsure at all n locations
ctaaactgctcaactgttttaccacaanatctaccaatcagatttgacttccaacacccattttaccctagaaaggctcttgcctcactttgtcatttgtttttctctctaccacagnccaagctttctcataagtcctaaatgacaattcaagctaggattaactcactttaaccaccaaataccactatatccagaattggccttccaactctcaaagactcactctttttccactcataataccatgttctcaccttctaaccctaggttaactctaccctacatctctaacgagtttccat

SEQ ID NO: 152012 - DNA, 506 bp, Glycine max
  unsure (1)..(506): unsure at all n locations
acactacttaatactcaagctggcaatgtctaggttgtagttatcaatagcagcaaatagtgttcttctattatgatgtggntgggttaagcgatcagtgtggtggctgctgatcactataagaaacacattgcaccattattctgagttgtgataatatgcggcgaaattgcagctgaatatgagcaaaattgcagaggataacgcaactatttcctattagcactttgatcccttcgttttctggctagagtctgatagcctacaccctaattttgaatgcatttgttgtgtgaaggcagataagtaattgcgaatatgatagcagaggagctgctggttatttccaagatgcaaaaagtagtgttgatgtataattttgggtaagtaattcactctagtagtacacattttgcttttaatgtagtctttagtgttgtgaatgctacatctatatatatttacacgcttggattctgtacaggtttatggaacattgatacaca

SEQ ID NO: 152013 - DNA, 454 bp, Glycine max
  unsure (1)..(454): unsure at all n locations
agctngttacanatgaagaactttaaagtcttgtttactgctcctcagcccaaatgaaggagaacaccaatggtaaatagaaataatgctagggcagcaaagttcacaaaattgggtggggtgtggacttttcaaatgatggtggcattgttggttatgaccagtaatactattttaagttcttaggtggttgcattattggagtaaaaagtatttgaagttgttaaatctgatatggcataataggacccaccaactggagttaagaaccaaagggtccagctttggagatgctctagcacatgttgtaaaatctatgaattaattaaatcagctctaactaatatcattagaaatttcaaatatgaagtagtacacgcacatcatttgtacttctgcaaggaaatctcatttggacccttcgaanattaaaacttctatcaatcaagtaaca

SEQ ID NO: 152014 - DNA, 458 bp, Glycine max
  unsure (1)..(458): unsure at all n locations
tcccgaagccgagtgtcttgttttctatatgaccaatgtgactagctgttaatgttgcgtcatagttgtgctatgtgatctacctttggtctcatctctttaccttacaatatagtcgatgctatcattaccctttttcaatatacagaattagcagcatgcgcacatatctaatccaagaaatatcaccactaatagtcagactataatccattaccaatgaaatgcctcatatccgatctattccatcttctaattctattgtagtcctctgtagatataaaataagcgcntgggtctccgattcaacataaatctatagtgtagtctataattcactcaattctgcctttagtcattttcgacatgcagaactatcaacatgctaagagatcttgattctgcaaagccaggatcaacagacgacgtcttatgcctcagaagcgacatgatcatgc

SEQ ID NO: 152015 - DNA, 341 bp, Glycine max
agctttgaggatatcagcatcagtgcaagctctatttgtgatattccaacaagccatcgagacagctaagagtgccaagggtgctcctcctatggctaaaccagaagcaagtcccctataatatgcatttcctacaaagaaacctgcagctgcggaagctgagtgagtgccaaggccaatggcatctctcgccgaaagaaattcatcagagttgttaccatggaggaggttcttaacctgatcactgatcctatcatgaaccatccaacacctattatcttcttgtagcaatggagggaacagaagagctttcccacttgacaaatccctttccaccttga

SEQ ID NO: 152016 - DNA, 436 bp, Glycine max
  unsure (1)..(436): unsure at all n locations
ctaagctcgtatcatgcgacgcaatgcatgcagggtcaacagatagctatatctgtttatgaccatcattccgctattccagttaattacacgccataatggtgcaataccattgtataaaaggagatcatattcatgaataaagcagagaaaaccattttccagcaatagtttatcgtagatatccttctcttacctctcgctcatatcaatcttggaatggtattattaagatcagttacgcgccggctgtgcggngcatctcccattgataaattaagaatcttctccaaggactccccccgcgaaaatatagaacaaaaaacaacatacgacattgccaataaagtgagtaaaatttgtgcacgccaagcattccacagccacagtgacgacgccatatatatttcgagtgagacctgatantcaaatcgta

SEQ ID NO: 152017 - DNA, 384 bp, Glycine max
  unsure (1)..(384): unsure at all n locations
acttcttcttctagattaccatttagaaatgatggtntcacatccatctgatgtaacttatagtcaaaatgagctactaatatcataattactcggaaaaaagctttcttagatacaagagaaaatgtctctatatagtcgattccttctctttgagtgaatccttgggcaacaaagtcttttttatgtctcttaatgttgccttgtgagtctttctttgttttaaagacccatctacatccaatgacttttacaccattagacaactcgacgagatcccagacttggttagatgccataaaatccatctcatcttttatagtattgcaccacaagcttgattccttacaactcatggcctgtgaaaatgattacgatcattgc

SEQ ID NO: 152018 - DNA, 480 bp, Glycine max
  unsure (1)..(480): unsure at all n locations
tcaatcggcatactccacacntagattgtgatgggattatttatttcatactccacacaaacagattgtgaagacaaaaattgggcaagtttctgtggatcgaatgttactagccaataggaccattttatttggcttagtgagagaggtcttttacattataccacaattttaaaacaataatcacaggaaataacaagttataatataaaaagaatagtttttttagtaacatctgngaaatttgtttaagctagttggaattctggtggcagattgaaaacaaggctctcttccaaggtcttttgaaccttcatccaaaattatttaacctttatcattttattttttgctgttgntgcacattgtggatgtctctgtcaatccaagctatccatagtctccaaacttatcaattagcagtggttaacacattggttntgtttctcaagtgaaatagtgttatggtgcgtgaactca

SEQ ID NO: 152019 - DNA, 466 bp, Glycine max
  unsure (1)..(466): unsure at all n locations
agctggtgtnttgctggattgaaagaatgtgtatattttctactgattactgtaaaaactgagaagatgatcaattcaatagatggagacaacaatataactgctaaaatgtcagagaaaatttgccaaaagccacatactaatgctcctttttgtagtctcttaaaagacttcatctatatcttccactgaccagaaaggttcagcttaacatctagaagaaataggaggctccttagagagggtgatgtggaactccattgctcacaacaaaattcaagtgtcattctcaaatttgtaaatatggttaaggattttccattatgtgcaaacaatttcaaggacagcatggtccataccaacttgcaaattcatgtacagcagtattcttaaactaaaagggtttgggaggtggagtgtggaatatctntctgatgtaattaattacttctcagtcaacacaaac

SEQ ID NO: 152020 - DNA, 474 bp, Glycine max
  unsure (1)..(474): unsure at all n locations
ttctccccaattntctataaatagggggagaagtgaagtgtttttggttcagccccttaggcacttctctttctttcgaatntgcttagaaaaattgtttccgtgaagaaaatccaagccgaggcgcttccgtaacgtttccgtgaggaatttcgcgaaggttttcgaccgttcttcgacgttcttcatttgttcttcatcgttcttcggtcttcaacgggtaagtacctcaaaccaagcttttcaattcattctatgtacccgtggtggtccacacttggtttcatgtatttttattctcgtttcatttactttntatacccccttttgacgtgcttaagccattttatttaagtcatttctcgcttaacctacaaataaaataaattttcactgatcgtttgaattgtattactccgtaacttcggttaanatgaattccgaccgttcggtcgtgccgtaaccacgttggaa

SEQ ID NO: 152021 - DNA, 450 bp, Glycine max
  unsure (1)..(450): unsure at all n locations
agcttccaccttcatcaaccataaggctacattactctctaagcaagagagttagccactgctgctgtaaagaactacggcaatgggggcatttcatttggggagcgccaattgatctcctttgctagctgccacgctatggttttcaaaacctgtagagaaatggaagggccctattgtgattatcttgaaggaaaaatgagaaagcaagtgnttttggcaagaccggttntgccgaacacaccgttaaggtcgaagctagaagaataatgggtgacttggctgggacgtttcaagcccaaaacagtgattttctatgcctttagaagtgaatgctttttgataaataattaatttaaggaacttttgttgggttttgaactcatatgaatgccttntctggatgcattaaaaccccttattggagctgaagcaatagaatcaactttg

SEQ ID NO: 152022 - DNA, 470 bp, Glycine max
cgatgaaaagaaaagactcttgtctaagatcacaaattatattctctaatcaatctcccatttctacatcaacctgcttaatttaggatccatttgcatgttcgtcaattcaccatgtcaatccatgttgtataattcttcttaatcccatcacaaagaagatgttctcatatgtcgtctactacttgttgtctcccattcaaacagttaatacaaggacaaaatatttctcaacctcatccagtcgagttctttctaggaaaaattccaagaactcttcaacccctttctcatacgtagggcttatgcaacttgcattcatccaacttcgatccatctttacttgttttttagtcatttaaagttattccatccatgaatattgcactgtttttcaaaagaggtgtggctctatcccattcaagaagatatttctttatagtagactcatgcgtgtaggttaagtctct

SEQ ID NO: 152023 - DNA, 370 bp, Glycine max
gatcttaagcaccgcggctgcagctataaaagacataccagctttattaactttccatgacccaatattgggcccagacacagtatacacaccctgtccaccatgcataccctatttcgtccgggaccttgctgatacatgcacctttcttggccttggaggtgcttggccccatcattagcaattgtaaattcaggaatgccggaaaccaaaaatttgatgccaatcgtaattccggaccaccgaatcaaggaacatcgtgctaataaggagtccgacattccgagtcaaagggatatatgaatcccaggttctacattcggaaaaacagttcgtacaatcgaagttcgactttcaaaagatccaaaaa

SEQ ID NO: 152024 - DNA, 470 bp, Glycine max
tcatgaagaatcaagattgattcaaagatgtgttgatgatatctttttatgatgaccaaggtgatgacaagaagctcaaaggtcaatcaaagaatgagttgaagatgttcaagatagaatcaagaacacttcaagattcaagaggaaagttgatttcaagaatcaagaataaagattcaaggatcaagcttccacgaatcaagatcaagattcacgaatcatgagaagactcaatcaagataagtattaaaaagttttttcaaaaactgagtagcacatgaatttttctcaaaaccttctaccagagagtttttactctctggtaatcgattaccaaattattgtaatcgattaccagtagcagaatggatttgaaaaagtattcaattgaatttaccacgttccaatggatttcgaaaagctataatcgactacaatgtattggaatcgataccagggccttgaacgtg

SEQ ID NO: 152025 - DNA, 416 bp, Glycine max
  unsure (1)..(416): unsure at all n locations
agcttattatctgagtttgagaatggaacatgttttatatatttgtntaacaaactataaatatgatgaaacctactctgagcaagtagccaagtatacatttatattagtgtaaatggaaccaaaacgtaccaaaaaaaaaatatgttcactacttcactatggaaacaatgcacatgttgaagactaatcatcagagctctccatttaatactgaaaattaagtactgcttatattttgtaaggccttgtagaaaggatcaaactcaacctctttgctgtgaataagaataattggggccttagatggatttagcataagatattacaaaacccacgcagccaccctacccacctngggcctgttatcggataagactgtgtacatttaatccttactccctgtggaccaccac

SEQ ID NO: 152026 - DNA, 479 bp, Glycine max
  unsure (1)..(479): unsure at all n locations
tggtgcaaacataaattcatgtctattgcctgatttatatttttttgctaatcttatacatgttttttggctttagcctgcaaagtggtctttcaagtcacacacagttctaaagagcagtgaacaggcaccgaggtatatgttctgtgactgttaatttcgctcttaattgttttttttacttcatatactgagttacagaaaagcagcacacagtgttccttgcatggctactttttacccaataaaaagcacggaaaacatgttctattctctttctttntcttcttcttgaatatgaatttcagtaatgcatgatgctggttttctcacatacttattactggtatggtagaaagcctgcttagatgaacgtggtggtgaatatagagccttgtctctggctttcactattctccaccactatttnttttttggagntatgcagtatcatttcttgtatatcgtaactgggatac

SEQ ID NO: 152027 - DNA, 407 bp, Glycine max
  unsure (1)..(407): unsure at all n locations
agctnttactgatttcagaaatcatttatcttttacaagttcatcccagaaaagtagtggaggcggcaatggatctatatatagataacttttaattattaaaaaaaatgagaaggatataagtaacaaattatataagaataaatgttgttttttttttttttcatgatgttatcggaggtagtaaagtatatatttaccttgtagatgactaattnttattcttaatcacatctttatcaataagacttgaatttaaattttttttaagagattcaagttaagttttattgagatcaacaatatatatatatatatatatatattaaatattggttaaggatcacaaagttataaatgattaatctggaaacatgatttagaatatatttgaaaaaaacttatat

SEQ ID NO: 152028 - DNA, 474 bp, Glycine max
  unsure (1)..(474): unsure at all n locations
actcagctttatggaatctgggtccaaatcccagtataacatatttatattagatatgataaagncataaagggtgtcagaaagtcagctgcatctctcccattaaagccatcataaatttcacagaaaagccactcatcttcagaacaaactgcttgaactctatcttcaccagcagctcctccagcaactggaacttccatgccattaagaaaaccttcacttctggaaggagcactcatggacgtgaacgtacaagggtcatattcaagcatattacttggagtggatgggctgcaacttaggtttgacaaactactattcacagaagatgataacatgtccaactttggaaaacttggtgaagagggtaccctacgaaatgatttangagagtccaaaatcggaaggatttgtcttctnctattacaccattgcagatgttngtgttggcaagtgtagcatttgcactta

SEQ ID NO: 152029 - DNA, 414 bp, Glycine max
  unsure (1)..(414): unsure at all n locations
atggaactagtctctttcaatggtagaggcctaagggggatggccaaaggaaaagttatccanaaaaatcttccaaaagaagttaaattcatatgcctcccaaagagtggtagtttcattcatgctcctcaaacaccttaaacattgtatgcatataaggccctaaaattgaaggtaacataaaacattcaaaatgcaacatcctcaaatcataggaacacttgtgtgtgtgtgtatgtgtgaacaggacttgagtgtacaaatgtgtatataacacgatgcaggtgtgccattatttctgcagttaagtgattntaattagattttcttacctgtatgaatacggaggcgtgagatgactggtagcaagcaaactcatgccaccaaaagacccagacatatgatgacggtgac

SEQ ID NO: 152030 - DNA, 477 bp, Glycine max
  unsure (1)..(477): unsure at all n locations
ctgccgaggtaaatggctaataatattgcttctgataaatatttctattctcagtccaattttctatcagtatatctgtttgaaaagaaattacaattgtcattgcaatttactattaatatgtatttcgtattttgaagtctgatgtttgttttactgcttatgtgctgcatatactatatataattaaacattctgcttattctaagtttggtggtagataatgtgtcatgtacataatataaaatgacttggaatgcttattgttgtatcagctttggcttcactttggaacttgcggaaaccctataatgttgcattccctcctgagtcattcctattagtatntttaagtttgtttccttttttttacctttntatttactgcaacaattttttaatgagagtttctatagtgctcctaattnggagggggtttgatattgttaatttntaaccaattaaattacatgtcat

SEQ ID NO: 152031 - DNA, 277 bp, Glycine max
  unsure (1)..(277): unsure at all n locations
ctcgtcggggttctacaatgattcccaatacaatactaatcgcgcattaactcgtcacctttacaaggtcttatagtcgtgtgattatacattcatatctctcaactcaatgcacacatatattataagtcaatacatactcaatntacacacacactcggtctcaatcacaatggtataatcccaaagtagcatgttatcatacctcatgaatcatatatactttacctatgaactttgtaatacacacaactactncaattttttcaaaatcatt

SEQ ID NO: 152032 - DNA, 435 bp, Glycine max
  unsure (1)..(435): unsure at all n locations
cactcctctataanactcactgcttacggctcgttgttgctcgtccgcctacggatgggagaaagagatgatctcgactaggagtcacacggaatctagcggatcttttctaagccaggaagatgcctctgctgaagtatcatgtattggggtttcaaactgagatgtgacttcatagtaaaaagtgttgtaccagatcgaaagaatcctgtagcaaacgggattgatctacttccttgctgctaagaacgtccctggtatctcttgctgattcctaattccaggaggagagtcgctcagccaactaaagctaatactactcataaccaattctcgttcaattggtggcatttatgaaaatttaagatattcttaggaagaaataaattttgatactaggtatgcgaacagccatgtgattttcttattaatata

SEQ ID NO: 152033 - DNA, 202 bp, Glycine max
aacggcgcacaagacgcggaaactttaggagagcaaggagaccccacgacccaccacccccccggaagacccaacgaaccaccccagccccgagccagaacgaccacaaagacaacccggacaagaccagcatgcaccaacagcgaacaccagaacgaacaacgaacacacaaaaaacaacggcaccaagagaggcagacgc

SEQ ID NO: 152034 - DNA, 477 bp, Glycine max
  unsure (1)..(477): unsure at all n locations
tcccgtatccgtacttggaaggattagattacagccttcctaatcattatcngtataactccgacatggctgccgatcgcactcagctgcataatatgttcaagagagaaggcgaatcctttaaagaatacgcacagcgttggagagacctatcggaacatgtggctcctcccatggttgagagagagatgatcaccatgatggtagacactctgccagtgttctactatgagaatctagtaggttacatgccgtccagcttcgcggacctagtgttcgccggtgaaagaatcgaggtatgattgaaaagaggaatgtttgattacatttcctccacgagtgcgattgccaaaagaatcggagcaacgtgggcaaaaaggaaggaaggagatgcccatgccgtctctgtaacacccgtgtgggtaaacgcccgctacatctcatgtacccatcagacgcgcaacatacccgagcttt

SEQ ID NO: 152035 - DNA, 251 bp, Glycine max
tcgagctcctacagcctagggaaaacctgatataccaatcccaaggaacttggagcttggaacgatcgggaaaagggggggggctttgatcatcggacaacttgaatgtggctatgctcatatgaatacgggcatactcgagacattgatattggttaaagcggacatgtgaatgaaaagtgcctccaaggctaagaaaaaaaagagaaaaaaaaaatcgaaaaaaaaaccggaggaaaaaaacgaagaag

SEQ ID NO: 152036 - DNA, 390 bp, Glycine max
gctcgtacctcatcactctcttccgaagcttttttctatcgtccctcacagtctttagatctgggagccaatccaatccttgtgctcggactctcatccacttatgatagccgccgatgatcccattactgcttcccctaagctctttgtcctttcttcacgccgcataccatgccttgtgaactccttggagtaccctcgcgttgtggtcactaaaaccccgtgcgatgaaaggtgtgagtctttcctctaatggcgctcctctcatggggtatccaagctgtcttatggcgagaacgggattataatatataccaccccttgttcccatcaagggaacattcggacatccttcgcatgaagatagaatcttgactctttcttccttct

SEQ ID NO: 152037 - DNA, 378 bp, Glycine max
  unsure (1)..(378): unsure at all n locations
ctcattgagtccagattgctttttttttgacatanagccgaacggggacctgcccaggatcgtagtccacaaactacttgcgcgggtgcctatgttgattaacgcctcatggcatgttgagatacttggttgacgctagcatcccacttatgctcatgtttttaatattctacagaggaagaagaactcgtggccacctcatggactgttctaaggataatagcatcatttcttgctctgaattgttgggagttggaagccatcttctcaatcaaattcctagcctcagcaggggtcatatcaccaagggctccaccactagcagtatcaatcatacttctctccatgctcagaaatctggtggtgaggacaacttgc

SEQ ID NO: 152038 - DNA, 444 bp, Glycine max
  unsure (1)..(444): unsure at all n locations
cattataagctgctatgcgcgnggttgggagacacatgtcgagcgttcgcttttttttattatgatcttccgagtactctggatttggtacgaccatgccctcctgatttccagctgagaaattggcgagtggaggaactccccgccatttacgcaacaagcataatgtaaacctttacggttttaaaagctctatacgtgggcctaggctgtagagtctttccttttgctacagctttgtgtgttttgattatgaatttataatacaaggatctttcttcatctgttcctggtctctacccattctcattcatttgcatgtatacttctatttctgaaacggcagatccgatgacgagtcccccgaaggtactaatacctgagacccgtctatcgacttctagcaagatatgaatcaaacggaagatgaaggacatgatgatg

SEQ ID NO: 152039 - DNA, 415 bp, Glycine max
  unsure (1)..(415): unsure at all n locations
ccgtatagacaccatccatgttcggtagcataatccgtttggtttttgtcttttgggacacggtgatgtaattcccacagttgggcctacattttgcctttaaggaagtgaagtatataaaattagagaagggaggttggagataagtttcaatggcgcacacccatggctcatatttatagcacgctaagagattcaaatttcgtgccaatccaagaacatatatgagaggtcccattttataagatatatatattcgtgaccccttttattgtaaccattttagcaattaaaattgaaataataattgatcaagtcaaactcgtatctagccatctttttcaacccaatattcaaatacaaaatcatacatgtgtgctnctcttctttcatcaaaattttcatattatttata

SEQ ID NO: 152040 - DNA, 466 bp, Glycine max
  unsure (1)..(466): unsure at all n locations
cgagatgacgaagtgtngaagggtgaaacttcctgctattagtttgaccacagagnggtacctgagagatatgtcctgggggtcaagacaccttgaggacgtcaggtgggtgtgctattgcccaaaaccaagcttgaccaatcccgacccaacccgggcataagcggtcagtgagaacctgtgatgtacctaagcaggcgagctcctgacatgtctacagataacaggatgacactaccacatagcaaggaggctcgtggcggctggccagctatgaattctgtgtaatatgtggatggtggcctctggtaatcgattaccaagggtgggtaatcgattacaatgcttaagagtgaggacaggaggctaagatggtctctggtaatcgattaccaacgggtgtaatcgagtaccaagctnggagacgaagtcatgaaacttagggagcctctggttatcgattacc

SEQ ID NO: 152041 - DNA, 471 bp, Glycine max
  unsure (1)..(471): unsure at all n locations
ggacctctgagtcacctgcggcatgcaagcttcttatccaaagctgagctgggcggtttatcttttcttccatggcttattccctagtggatggcgcctcccttctcctcttctcctttgccttccgctgcatctccatggtgaaaaatcaccattgaaggacctcattgaagctcatagatccagtctccatagaangttcacaagcaagctctcatcaccataacttcgacaatgggaagagatctcaagaaggttccccaacacttaaatgctataagtgtaatcaacccggtcacataaaggcacactgccctacaaatgaatcatggctagaaaagaatgagaagaaaagtcttgaagaaagaacatccattaaggcgtatattgcttgggatgacaatgactcatccgatggtcctgtgaaggagatcaaccttctatcaacgactatgaaagtgatgagacatc

SEQ ID NO: 152042 - DNA, 486 bp, Glycine max
  unsure (1)..(486): unsure at all n locations
actcagctgccttgcccttgaatattaagggactcatggnttcttttttgacaaactccttgggataaaggtagtgttgccatgttttcaaagcacgtactaatgcatacaactccttatcataagttgaatagttaagggtaggaccacgtaacttttcaccaatataagcaattggatgaccttcttgcatcaacacagccccaatcccaacatttgaagcatcacactcaatttcaaaagatttttgaaagtttggcaacgcaagtataggggcattagttagcttttgcttaagaacatcgaaagacttttcttgtttctccccccatttgaaaccaacatttttcttgagcacttcattgagaggtgctgccaatgtgctaaaatccttcacaaataatctataagaacttgctaagccatgaaaactcctcacctcggtcacgaacttaagtgtaggncattcttgaatagccctaacct

SEQ ID NO: 152043 - DNA, 456 bp, Glycine max
  unsure (1)..(456): unsure at all n locations
agcttctatataagctgaaccattgtattatttactcaagnngagnnnnattcagaaaattagagtttatctcttttatcttagtgagagtgattctcctaaattcttgagtgattcaagaacaccctggctgtatcaaaggactttcacaacctttgtgtgttgccctcgctggaaagagtgattctttccttcctatcatctccacccttggtctttcaaaccacaattccagaaaatccacctctgcccaaaattatctcgtgaacataactcccattttacacactcaaattaagtgattcttgagcctaaattgaatttcaaaacgagacctttcacctcgttttggaatcacctcatttggagccctgtagctctcgttattgccatttctatatttctgtccagccaccacttaacctgacgtttaccatcccattcatccattatatg

SEQ ID NO: 152044 - DNA, 348 bp, Glycine max
agcttctcgtatgttatgcgtctgaatcggtcatgcgagtttaatttttttccattctaattgcccgagagcttgcgttgttcaatttctagcatctcgatacgctatgtgcctgaatcggacatgcgagtgaaaagttatgaccatttgaatttcttgagagcttccgctgttaaatttctagcgtctggatacgctatgcgcctacatcgaacatgcgagtgaaaagttatgaccattgtaatgttctaagagattccgttggtgaatttcgagcgtctcgatatgttatgtgcctgaatcggacatgcgcatataaagttatgaccatctttaatcctcgggagc

SEQ ID NO: 152045 - DNA, 287 bp, Glycine max
aaaagtcgtatctagtcaagggctgagagaccatacaagtttcctaacgatttctaattatgtgggtcattaaatctatcatatgctgacaatagccgagaaacccatgaattttcttcggggcggaggaagtgtcccccatcgccttggccctggctaacaatcggggaagttcttgactcccgttcaaggcaagagcaaactgatccatccacatggttgcctcttggtgtaaagagtcgatcacccttcctctaacctctttttccgcgaatacttgggcatac

SEQ ID NO: 152046 - DNA, 415 bp, Glycine max
tagctacacacccctataatagctaagctcacccccattatttatttcatgataatacaaaaaaaatcctactacaaagactactcaaaatgccctgaaatacaaggctaaaaccctatactactagaatggccaaaatacaaggcccaaaataagaaaacaacctattctactatttacaaagaagagtggacccaaccttggcccatgggctcaaaaatctaccctaaggttcatgagaaccctaaggccttctttatcaactctagcccaatcctcttggagcctcttgctcatggctctggtaactggtcctttcctaaggaggattgcatcacaatgccttaatggtttctctcttttcaaaagaatcgaaagatagtttaatggtccaatgccttaaatgacctttcat

SEQ ID NO: 152047 - DNA, 449 bp, Glycine max
  unsure (1)..(449): unsure at all n locations
ntcaactggaatttcaacgttccaattgatgtctattggtgtaatcgattccaagatatttgtaatcgattaacagtgtgtttgaacgttgaaattcaaattcaattgtgaagagtcgcatcctttcataaaaagccttgtgtaatcaattacaaggatttggtaatcaattaccagtgacaagttttgaataaaaaccaaaagatgtaactcttccaatggttctcaggttcttctaaaggttataactcttctaatggttttcttgaccagacatgaagagtctataaaagcaagaccttagcttgcattctaagaacattcagaacaatcattatcctttacaacttgttgaatctctntgaacttcttcttcttcttcctttgccaaaagctttctaaagttttctggttgccaaaccttganaacaaagtgtactattcatctt

SEQ ID NO: 152048 - DNA, 423 bp, Glycine max
  unsure (1)..(423): unsure at all n locations
agcttctacttatgtggcagggctgttcttctttaccttcttgnctccaacgcgaactntgaccattgttcttccttcccgcgatgcttcttttcgtgtccgcctgagtgggcttatagcctaaaccatacttcccacgatttccttgggtatttatcaggctagttatgccgccgttgttttttcctaaacccatcccgggttcataaccgttccccaacataactcgggccatcattaccgctgcatcggacagacaaggctgcccaaagagggagtccacggaggaaatgctgaccacctcaaaagactggaaagcagtttctaacgattcttctgcggcttccacataaggcatggaggatgggcagcttaccaagatatcttcctcgcctgacacgatgaccaagtgcccctccacta

SEQ ID NO: 152049 - DNA, 477 bp, Glycine max
  unsure (1)..(477): unsure at all n locations
actcagcttatatatatcgaggcgctcaanattgaacaacattatctctttagaattcaaatggtcataactcttaactcggatgtccaattcatgcgcatcacatatagagacgctaaaaaatgaacaacggaagctctccagaagttaaaatggtcataagttttcacactgatgtccgattcaggcttatattatatcgagacgctcaaaattaaacatcggaagctctcgagaaattcaaatggtcataacttttcactcggatgtccgattcaggcgcatcacatatacagacgctcgaaaatgaacaaaggaagctcttgagacattcaaatggtcataacattttacactgaggtccgattcaagcttataatatatcgagtctctcgaaattaaacatcggaagctctcgagaaattcatatggtcataacttntcacacggatgtccgattcaggcgcataatatgtc

SEQ ID NO: 152050 - DNA, 308 bp, Glycine max
tcatcgccatccaaccgagcgttgtcttctaattcctgccatgcaacactgatccacgataatgatgcatactgttgtcgtcgtcgtctctttgattaatgaacgatggactgtattgactcgaacctctttcacggatcggcatgtgcatattttcaatacataacttttggatctcttctacaagtgaagcttataagcgcattctgtcgcacatacgtgcccgagacttaagctcctctacatacagtggtccgttacttttttccttagagtacgccattatctgacgccacacttatgaaagt

SEQ ID NO: 152051 - DNA, 422 bp, Glycine max
  unsure (1)..(422): unsure at all n locations
gatttgaaaaggcctatgactcaatctcatgggtttttttggattatatgctgcaaagaatgggtttttgccacaaatggagacactggatgtctgcctgtctcaagtcaactagcatttctattcttatcaatggcagctctacaaaagaatttgctcctactaaaggttngaggcaaggggatcctttagcccccttactctttaatatagttggagaacgcatcacaggattgatgagggaagcagttcagaagaacttatatagaagctatatggctggaaagaaaaaggaacccattaatatnttgcagtatgcggatgacacagtttttgtgggtgaggctgagtgggagaatgttattgttntgaaggctatgctcaggggatttgaattggcctcacgtctgaagattaattat

SEQ ID NO: 152052 - DNA, 484 bp, Glycine max
  unsure (1)..(484): unsure at all n locations
actcaagctggcatactgataatctgagttggcagtgagatcctttcttccttgtggctgctggagcagagcaggtcttaaaaagaagtgttctatcaaacagaccacactgggaacgggcacttcttttactcaggattttgcaaccgtgatgagttcaagggggtgaatcgtgaaacagtttcctcattttaaatgtgtagaagaaaatctttatccttatagataaaacgtattttattctttaaaagttgataatgtatgtagctgtttttctttttaaaaatcaccgcattgaataaaaatatatattcttttgtttattcataacttaaatgaaaaaaaaatagttaaatatgatgcaatactcacaagtctattatcatcattagtttgttaacctttgccctaatgataatgttttacggcaacaattaaggaattggcagttnttattgaaaaatataatatttaatgctatcaa

SEQ ID NO: 152053 - DNA, 466 bp, Glycine max
  unsure (1)..(466): unsure at all n locations
agcttgtcattgaaactggttcgaattaatctatgtatctcactnataataaacagaattggagagatccaggactcctagccacaatactaactccctactgaataactcctctcagcctctcttcctatttataggcaacatgccttatctatttcttctaactcagcttaactaaggctctcaactaacagacctatcagtactccccccctaaacattcaacttgtactcaaggtgatggcttgtggatgttgaaataaagtcccttttgtgttctagacttctagttatttgaaacaggatgtcctaatagaaccgtaatttattcagtattttcctctgcttcccttgacataaatatgtctgcaacgtctcttatgatgatgtctntcacatcaatgtttcagagtttcacagataagaagtcatttgaagtttgaacgactaagttatgctataaata

SEQ ID NO: 152054 - DNA, 478 bp, Glycine max
  unsure (1)..(478): unsure at all n locations
ggatcacatatatattcgccatgcatatatcataattattttttttatgccattcttttaattaagaataagccaaaaatttacttccatgtccaattcatttattctctccatcatgataaaattataaaacataattctggaagaagaaaaaacctcagttaaaattatcgaacaaattttctggctgtgataggttaatctaagtctttatctcgcgtgttcagctacaattatttggattatatacatactccacgatgaaaaacgacacaccgtaaaatacttaaatttcaagacaagagggtgataatatatcggatattcaacacttatatagatggcctattataaataattccatcacctattgagaatatgtctaatatctntagttcaattagaaaaaaatacattaatttctttaagaatttgatgtttgtctaaactcttagaatatgtagacgttctattcata

SEQ ID NO: 152055 - DNA, 461 bp, Glycine max
  unsure (1)..(461): unsure at all n locations
agcttgnggagggtgactctgctagatctgatctctttctatgtaagnggaaacattatctttcttttttaaagaactaatcttctcatgataattaactatttcccccctctgccaccttgccactcctatttcttattattcaattctcctcctttagaatttttaagttaaattagtttttctttctcgacttgatgttttaattttttattcaaaattttaaattatgatcttttaaattatttaaaatggatgtaattttatcctcttttgcctaaattaaactaatgatattaaaaaatatatgttttatcatcatttaatataagacgatgttaaactttcatcacatatgatttatccatgatgattatttaatctagataatacaattatattgaattaattcaagcaactaagaggattaagttatcttgataaaaattaaaagaatatat

SEQ ID NO: 152056 - DNA, 384 bp, Glycine max
  unsure (1)..(384): unsure at all n locations
agctgaagaattcttcagacatgtagaaccgttttatattgacaacccagnaggttcaaacgtgactcatgtgtntgttgatcaactaccgggactaaacacacttggcatagctttggctccgcatagattttgcaccaaagggtgtgaacgctccccacactcaccctcgcggaactgatatccttatagtccttgagggtactctttatgttggatctgtgacttccaatcaagatggaaatcgcctcttcaccaaagtgctgaacaagggtgatgtgtgtgtgttcccaattggtctgatacatttccaactgaatgtgggatatggcaatgctgttgccattggtggccttatcagtcaaaatccaggagctatcacta

SEQ ID NO: 152057 - DNA, 452 bp, Glycine max
  unsure (1)..(452): unsure at all n locations
cctatgaaactcagcttataacccattttctcccctttggaacattattttctcttatgcanggnaaaaacaacacaatagcattcatttaagtcaatataacatggaaacactataaccaaatataatccaaacattcataaggtaaataaataatccatacattcataagtcaaaccacatttaatcctaagcataaatggctagtaccaaatattgaaaggtaatgaacattcagataactaaaagatatagccaaatacacggcttataatgaacgataataataatctaaaaactaagaaggtggtggtggtggtggaagatcgaagctctgacgaatataagtcacattctcttcaagttgagtgatgcgggtatccatgccgtcaaagcgaacatcaaagaattgaatcgttcacaacataagtgcggaggcaccgtaactctga

SEQ ID NO: 152058 - DNA, 458 bp, Glycine max
  unsure (1)..(458): unsure at all n locations
agcttgtanggttaaagtctcacgattgtcatttgttgatgcaacaattgtntagccgggctatacgagacatcttgccaaacaaagtcaggttagccataactcacccgtgtttttcttccatgccatatctagcaaagtcattgatcttatcaagtttgatgagctgaaaaatgaggccgcaattatactgtgccagttggagatgtatttcccccctgctttctttgacatcatgattcacttgattgtgcatctggtcagagaaatcaaatgttgtggtcctgtttatttgcagtggatgtacccggttgggcgatacatgaagatcttaaaagagtatacaaagaatctatatcatccagaagcatctattggtgagcagtacattgcagaagaagctcattgaattttttcagaatacattgagaagggctaaactttggccttctaagtct

SEQ ID NO: 152059 - DNA, 403 bp, Glycine max
  unsure (1)..(403): unsure at all n locations
gcacgtatagtcaagtgcatggaccatatcgnactcttgtgttcatctataatgggtccagttgaaacgtgatacctaaaagcactttggagaaattaccattcaatgcttcccatctaaagccgagttcaatggtggttcctgccttcgacggtacccgccgagaggttaggggagagatctatctcccagtacagataagccctcacacctgtcaagttaccttccaaataatggatattaaccccccctacagctgtctgttgaggcgtccgtggatccactcagtgggagttgttccctctacactccaccaaaagatgaaatttctagtggaagggcatctggtcatcatatcaagcgaggaagacatcttggtgagctgcccatcctctatgcctta

SEQ ID NO: 152060 - DNA, 442 bp, Glycine max
  unsure (1)..(442): unsure at all n locations
agctngtgaatcgatacacttatttggtttctattaccaagggtngnttctgaaaaatctaaagatgtaactcttcaaaaaggttttgattttttcaaatgggttctaagtttttctaaaagttataactcttctgaatggccttcttgaccagacatgaagagtctataaaagcaaggctntgttttgtatttttaatcaatcattccaatcttgaacactnttccaattcattcaaacaatcctttacaagcctagaatctctttgaacttcttcttcttcttcttctttgtaccaaaagctttctgaagttttctggttttccaaaacttgaaaacttgtgctattcatcttttcattctcttctccctttgccaaaaagaattcgccaaggaactaaccgctgaattctttntgngtctctcttctctctttttcaaa

SEQ ID NO: 152061 - DNA, 449 bp, Glycine max
ttcacgagttcaagattctcatttatgacagttgatctttgttttccatgctcgggttctgcgatatttcaaccactaatgcgagtctcgatttttcatgatttgggagtcccctgcaggctcatttggcgcatgataattgatgtccatagatagtgttttcaaggtgcatcccaaggcatgcttggagattctatcaaggactttggacaccatccgtagctatagggtccttaagccaattcttgatgaagggttcaaagttcaaccagtgaccccagacttgctatttctcttcaaggggactccatctgaagcatggttgaatgagttgaagagagggaagaaagaccctgctcagattctctctatagatctatcaacttcatatactcgcagttgtacaatatggtgggctacctaacataatttgtagcatgaaccttatc

SEQ ID NO: 152062 - DNA, 301 bp, Glycine max
  unsure (1)..(301): unsure at all n locations
acacatgcttctatttatagactaggtagcttccttgagaagctttcttgagaaaacttcctagagaaacttctttgagaaaacttccttgaaaagctagagcttagctacacacacccatctaanaactaagctcacctccttgagaagctagagcttagctacacacccctataatagctaagcttacccccatgacaaaatacatgagaatacaaaaaaaaatcctgctacaaagactactcaaaatgccctgaaatacaaggctaaaaccctatactactagaatggccaaaataca

SEQ ID NO: 152063 - DNA, 475 bp, Glycine max
  unsure (1)..(475): unsure at all n locations
ntatatacacttcatagcnnttgattgttgaaagatcccaactagtttattgtctagtagctgggacgctntacatgagattgttactgtgtagagagagagtgtggggaccacaaacactttctgcagcatatctttagaaaagtacaacttgccagtgtcaccttgtgctcaaagttgactttcagcatacaaatcaaatataacgttaacaacataagacaaaaggaattaagaatttcaagacatgacaatttaaatcttatctttcgtgtgctatggcacaaattgcttattgagtctatggacgttactttctaatgattactttcaatacttgaggatngagtaactattccattacctttgtactatgagtcaaatgctaaagcacatgtcttcttaggactggatgttgagatagtatcgtccaatgactgatactntagctattatccagactnttcttggtcat

SEQ ID NO: 152064 - DNA, 335 bp, Glycine max
  unsure (1)..(335): unsure at all n locations
catgttagccatcgtcagccagtaccaagaagaattaaatctagccacggcccatgagcacaaagtggcgggcgagtatgcccgagtgtacgcggaanaggaggctagaggaagagggtgagatgaaggagaaacccatgctgcgattgtcgttcctacatggaaacttcccaccagccaaacaatgtcattactcatccaataacaacccttctccttacccaccacccagttatccacaaagtccatccctaaatcaaccacaaaacccaccttccacacaaccaatgctaaacaccacctttagcacgaaccanaacaccaaccaagaaatg

SEQ ID NO: 152065 - DNA, 458 bp, Glycine max
  unsure (1)..(458): unsure at all n locations
cgattcattctatgtacccgtagtggtccacattgggttnncgtcatttttattctcgntttgtttactttgtataccccctcttgacgtgcttaagccattttacttaagtcatttctcgcttaacttagaaataaaatgaatttccaccgaacgttggaattgtattatccgttaacttcggctaaaataaattccgaccgttcggtcgtgctgtaaccatgttggaaatcaaaaagaggtaaaaaataatataataatcaaaaagacatcttttagtaaaataaagcggaaaatcaatcggacgttttctctttgggatttctcattcttaatcgaattgattaataactaaagtgaaactaaaggctaaaatcaattcgcctagtcaagctcgtccataaaaatagcgctttgaaagttgtcatttcattttctcactaagtaaaatggatcat

SEQ ID NO: 152066 - DNA, 390 bp, Glycine max
  unsure (1)..(390): unsure at all n locations
gagctgaaacttgtgcttccatctgacaatangccatggttgatgggctggaatcacttgacaaacttgcttaatttgtaatggatttatgtntgtaaagtaccattaaaatcttgtacatgctcattattatggcgctcttctctatatcaaaatattgttttggactattttttttccccataagctaatccaattcattggattcccattaggcaaatttccccagatggggcacttttaaaaactaattccccaaatggggtagttttgaaagaatttacccaaggggactgtttttcacgtaccatgcatgcagtacgaagcaaaccgccattgtcaatggcgggttcactgcggagagcacatgtggcgaagaaatcgctagta

SEQ ID NO: 152067 - DNA, 426 bp, Glycine max
gacactatgatactcagcttgcaagtgcgggaagcttaggttggcgtcgtcgaggttatgtattttggcttattcttcgacttagagtagtagcagatgttctggaactcgatggacagggggggggggggtaagtgttctcgaaccacgtgggttccttcatggactggaatttgtccaacgccttgaggcggaattttaacatccactggaactcccctttcagggatgggatcagatccagagcaagaacgttcgacaatggtgattttgacgatgacaatgggttcaacatcgtgcggagacaagagtgacatcacatagagttatggtgaggagatgacagaaactacattaccatacaacatatgagcatgataagtatataatcgagaaccaaaatatttaaaggcattcaaatttcaa

SEQ ID NO: 152068 - DNA, 453 bp, Glycine max
  unsure (1)..(453): unsure at all n locations
tgcaagctctgagaagattctgagagcaccctttttttattattcaccccccttctagaatgttctggatgaagtttcctgagtgcacccncatgtntgataaattcacttcccactttgtgtttctggctgttttctttttgaaaggtcccgaaactttacggatcccatgacaatgggtattaaacattttgaagtggtcaaacagatgtcgcatgccgacaaacaatggtccccagacgaaattagtgtatgacaacaccttagctaacatcggctgaaaaataatcctgcccgatattggctaaaaaatagctctggctaatgttgactggaaaacctagttaacgttggctganaagctagtcatgaccgatgtcagtagaataaatctagtcaacatcgggcaaaacaccatttgtcgacatcaacatgaaaaacttggatgacaat

SEQ ID NO: 152069 - DNA, 447 bp, Glycine max
  unsure (1)..(447): unsure at all n locations
ntattcaagacaaagaaattaaagatattcaagatggatgatctttattttctctagagtcttaggaagggtatattaaataggaagggaattcctaattgaagtagcaaaaggtttggccaaaaatttaagttaaaaagtctttttcaagagatttactctctggtaatcgattaccagaggatgtaatcgattactagtggccaataatgatttacaacagctattaaaatctgaattcaaaatttgcactgtgtaatcgattacacatatatggtaatcgattaccagcagttattgaacgctgtaattcaaattataaagcttgtaatcgattacacacatactgtaatcgattaccagaggagattttcatacaatattctcaacagtcacatcttttcatctggttcttgattggccatcaaaggcctatatatatgtgac

SEQ ID NO: 152070 - DNA, 414 bp, Glycine max
  unsure (1)..(414): unsure at all n locations
actcagcttgtgggaaagataagtttccgttcatacgagtagcgcagggttgtccactcttcttctatgtttaccattgttgtttgaggttatgaatttgactctcctgctgaactcattccaatgtgccttgctggagtgcctaaacatggtgccctcccagcttcatcctaacagatgggcaatggtgagggcctttgaggtcttgtgtccttttttcaacatttgacccagcatgcctgtgttcctttacttcttccagatgaagctgatagagaagatataatgngtgtcacttaatagtgtatctaagaagatgtttaagtttgaatcgaatggtgttcacagagttcatgatcatttcttcagggtaaggcgaacaatgtcattgctgatgggttggcattgatgttc

SEQ ID NO: 152071 - DNA, 416 bp, Glycine max
taccaagaaatgctactcttaaaacaaaaatggcatacaacctccttcaataaacacaaacatcaatgtatatttagagcatactcatacacatacttccttatgaacattcactcgcacaagatattcttctacctaagaaaaatgcacccatgcacaatcaaggcaccttcgttacctagattatttatatgtacttccaaggtgtatttgctacctacatcacatgcacttccttggctaaatttacatacatgcatactcaaagcattttggctaccaaaaattgcacacgtgcatattctggtatttctaatacctatgcatatacaaactttgtgatgaatcttggctatctacacaataaggtgctacatttcatgctttatcaagtgttttgctacctaaagccgatg

SEQ ID NO: 152072 - DNA, 462 bp, Glycine max
  unsure (1)..(462): unsure at all n locations
tatcatcctttctgagtgactcatgacaaccctgagttacnttaattattgntatttatagaacttgtctttattaaatacacttaagaaaactcatcaatagacataaactcaaaaggcttatgatttctatttagaaggtttgtcataatccaagggttttagactcaacaacaaaaaaatccaaattaaaaccactaacaattgatattgttaaaactagaaagaaatataaaaaaggatactaacatcatcaacttctatatcctttatcacttttttgggataacattatgtcctccttcaatcttgttgagcttgaaaaagaaaacaagtacattcaaatatctaattatcatgaatatattattaacagtgttaatgtaattaccttccatgttgaatcanaaccaatcatggagacacatncatgccttcaaaagatattgggatgtactctac

SEQ ID NO: 152073 - DNA, 383 bp, Glycine max
tctcctttatcttaatgagagtgattctgccaaattcttgagtgactcaagaacaccacgggtgtatcagaggactttcacaacctctgagtgttgccttacctggaaagagagattctatccttcctttcatcttcacccttgttctcttaaaccacaatcccagaaaatccacctctgcccaaaattatctcgaggccataactcccgttttacacactcaaattaagcgactcttgagcctaaattgaatatcagaacgagacctctcacctcgttgcggaatcatctcattaggagtgctgtaccttcatttattgccatctctatatttctgtccacccccacttaacctacattatacactccatacatccatttat

SEQ ID NO: 152074 - DNA, 322 bp, Glycine max
tcaacgactaactgaaccatcttatttcacccacctctcgcacctccctatgctagaacaagttaatatctgaagactattaatcttttgtagcagacgttatcaagattaagttctgtatgtatagactagcgcacctactatatctgcgttagcctcttgccataggtcttctcgtattaggaagactcttgattttctttaactgcgggcgatgccccgtttattaatatatcatttcgggcgtacgtataacttacatgtatttttccacgatatgcatgctatctcacatatttagggaacttctttaaatatatgt

SEQ ID NO: 152075 - DNA, 473 bp, Glycine max
  unsure (1)..(473): unsure at all n locations
gggacctctgagtcacctgggctgcagcttaagaagaggtaccttcctatacttcttgcttgtttacacaaatacatatccttgtatctctccatgtacctctaactctaagctcttgaactatatattatatgggttttgccttacagaattcaaaggtctcttcattntaagtttgaatatagtatgtttttggtcatgcctaaaaaactaataattaatatgtttttcatctttatgatttggttaacttttgattatgtcacatatgtgaaagaaatgtgaaattagcatttttataccaaattattnttctcaaatctgacctttgttattaacacattaatattttatattatcttaacatgattgtttcttagttaaaagacatgcagataaagaaaataatgtagaatgtgtttattttattttatgagtaaagaaagaagcatataaagatataaaatttatta

SEQ ID NO: 152076 - DNA, 472 bp, Glycine max
  unsure (1)..(472): unsure at all n locations
tatcttactctcaaatgtacttatgaaatccttcccctttatcnttacacacccttagttggtacatagtatccccctatggcactatctctaagctttctcctaactagctacttaattgagcagttgaggtatcggtttcttaatttttacctaaactacttgaatatatatatagtatcctttctacttgcccagttcatcactcgagttacattagttaattacctaattataatacctaatctacctttaggaaaacactcatttataacaattatgagtaggaaaaacacggatagaaaaaattcagatagacatgtgttttctttctcatcacatcaacactggtccacgtntaagccaatacagatatttataattaacttcttggacttacatgcaactctatttgcattatgaattagagaaggacttccacgtataatggtatatcggatggtaattatgt

SEQ ID NO: 152077 - DNA, 399 bp, Glycine max
  unsure (1)..(399): unsure at all n locations
ataaaggaaccaaattatacggcataatttttactaactattatatcattctataactctcaactgaattatattttcttaaaacttattgttggattgaaagttttttcacatacattatataatcatntgttgtctcattcatatagatcaaaattaatgtaatttaaatattttaaaatatacaaaaatatgaatttaattattttctttgtttttgttcaatataaatgttttggataacataaagttgtggagatgaagaaaaggatgcttcaattattatttatgatcaagcggtgaacttcataaaatacattatatatcacaaagccaataagagtggcaatgttttatgaaactataagcgtgaaaataaattaaattgtgcactagaat

SEQ ID NO: 152078 - DNA, 419 bp, Glycine max
  unsure (1)..(419): unsure at all n locations
gaaaaagaatgccatgaatatgaagagatgacaatttaaagatattcatgagatgacaatttagagagtgatcaaagactttcaaatcgatttccactgaatttatcaatagacagatcaagatatcttaatgttgaaagttttccaaatcatctagaaagggcaccaccaattgagttgttgtaaaaatctagcatgtcaatatttttaaaaactccaatttaatccgtcaaattgggttattntatcatctagggacaaattttttctgtttttttttctcatgtgggtacttttcaaatcatgccccaaaagtgaataagtggtattataatatttaagttacaagtcgtaatatgactntnntttttttttaacttaaatcgtanaaatatttatgcctncttttttttattact

SEQ ID NO: 152079 - DNA, 471 bp, Glycine max
cgaatatcttgatttgagtaatgcaaacctatccaatatttttcattggctacacactctccaatctcttccttctttgacccacctatatttgttagaatgcacactccctcactataatgaaccatccttgctcaacttctcatctctgcaaactatcgatctttccggtactagttattcccctgcctttgacttctcttgttgaacttgatttatcaaataatcaacttgaaggaaccattcgaacttctttgggaaatttgacttgtcttgttgaacttgatttatcagctaatcaacttgaaggaaccattccaacttctttgggaaatttgacttctcttgttaaacttcaattatcacgtaatcaacttgaaggaaccattccaacttctttgggagatgtgacttctctggttagacttgatttgtcatataatcaacttgaaagaaccattccaacttctt

SEQ ID NO: 152080 - DNA, 380 bp, Glycine max
atccccacaaaaaataattcatcatcttgtgtagctcatcttccagagaggaaggaacgagtaaaacagtgatacaataggtgggaatagattgagcaacagactttattatgatttatttaccaacttctgacaagttcttggaggtccaatggttgatatgcctcctaagtctttccttgatgaaaccaaaaaccttctttcttatttctccaatgattgatggaaaacctatggtatttgcccgagccaatggtcttgttactcccaaaagtgcataaatggagtgtctagtactatagggaatggtggaattgtaaaaaattctaatctctgaaaattattaattgagcagatgttctcccatatgtgtcaagaat

SEQ ID NO: 152081 - DNA, 389 bp, Glycine max
  unsure (1)..(389): unsure at all n locations
acatgaacactttaacttaaacatggagtggtccttccttctcaacccgaatcctaccttccacacattctgatgtcacattggacagagcccaggtaatctatggcatcattatgaagaaggatatgaatgggggtacctcaatttccaccagatctctcttactgcacaacatgattcatctagacttggattcacagccttgatcactgctctgtgcaatgctaggggagtccaatcagattctagatccctaaagagctngagccctgccattaactnggcatatattaagaagagctgttggaatctagatgatccaatagtggcatttagaggatcaaggaagaccaggggtaagagatcagagcaccactagagacagcagc

SEQ ID NO: 152082 - DNA, 450 bp, Glycine max
  unsure (1)..(450): unsure at all n locations
tcttagtttcagatgatgcggctgagtttgtagctacctcatgctctcctctaatgactatagcatcatttgtggcgctaaactgctgggagttggaagccatcttctcaattaaatntctggcttcagcaggagtcatgtctccaagggctccaccactggtagcatctatcatacttctctccatattactgagtccttcataaaaatattggagaagcagctgctctgaaatctgatggtgagggcaactggcacatagttttttaaatctctcccagtattcatataggctctctgcactgagttgtctaatacctgagatatccttcctgatggttgtggtcctggaagcagggaaatgtttcctaagaatactctcttaaggtcatcccagctcgtgatggaccttggagcaaggtaatgcagccagtccttcgtcactccctc

SEQ ID NO: 152083 - DNA, 302 bp, Glycine max
  unsure (1)..(302): unsure at all n locations
aaccttacctaactttttatgattccatttaactacaacattacaagataagaaaaaatatagatactcttcattcaccttggcatctacaataactcaacttatatgacaagaaatgaggtngaaatggactcacaggcacagaataaacacttcaacaggtcatgatcttattgtatggtcctgaacactgtacacataagtgaaatggcaagttactagtgctcattccatggagagacaaagccttcacatcttttatgatcctaggattggattttacacatgtatgtagttgtagt

SEQ ID NO: 152084 - DNA, 394 bp, Glycine max
  unsure (1)..(394): unsure at all n locations
agcttcattatgattcttgattcacgcatgttcacgttggttttttgtacttggtgatatatgatttctatcaatacctttttgcatgtcattataactattatatttagatagcctntctcactacaaagtcaatgtagtattgggacatcaatatgcagaccttgatgttgaagattctatttggatgtgagtcgtccaatatgcanaccctgattctcataagcttactcataaggtaacgatgactcatgcctaagattacactgactcatgccttcataatcaaataacccttttataattcccgggtgtatatactccaacgaaaagacgaaggaaataattgcaactgcttgtagatgcaaatgcctctggtgtnttgatgatgatc

SEQ ID NO: 152085 - DNA, 481 bp, Glycine max
  unsure (1)..(481): unsure at all n locations
ttaagtgacctgagcatgcagcttatacctattgttgagacttaccatatttagttgtttagttgnctaatcaacccctgaaccttattcctagaatttgtttatggatcaacgactttcttcatgacgtttaacccaaaaaaactagtttgactttggcgtgcccctcattaatatagtaacattctaaagttgaatagagatcattcacgaggcacggcttccactttaacgtggcttaggctgttcgccaacctaattaatcaagatatgtttgcatagtagtttcatctgcatgtacttaacccaaattctttaatgtaaacatacagcattgactgtgtatcatattgacttccaacaattccgctagcgggacttaggatnttttaaacaaaatatcataagttatctaaataaattatatttaacacatttcatgttattctaaatctgtacacatggtatagccggtgccgcc

SEQ ID NO: 152086 - DNA, 451 bp, Glycine max
tctctgagaaaactaccttgagaagctagagcgtagctactttatctttctcataactaagctcacctcctggagaagcttccttaagaagatgcctaaagaagctagagcttatctacacatacctgtctaatagctaagctcacctccttgagatgagaagctagagcttagctacacacccactataatagctaagctcacccccatgacaaaaaacatgacaattaaataaaagtccttattacaaagacaactcaaaaggccccgaaatacaaggctaaaaccctatactactagaatggccaaaatacaaggcctagacgaaggacaaacctattctaatatttacaaagataagcgggctcatacttagcccatgggctcgataactaccctaaggctcatgagaaccctagggcacttccttggatctctagcctattctact

SEQ ID NO: 152087 - DNA, 397 bp, Glycine max
  unsure (1)..(397): unsure at all n locations
caggcgagcaggggtgcttcctccagaagcaacagccttctggaggaatcttctgaagggcccaagtgggccttggtgctatctgcacccccatttttactaagtacaccccctacctttttttggtgattcttttttcgtaaagttacggaaacttacgaatttcgtaacgatactggttttctttccgtaatgttacggaaccttgtggattacataatcatccccttnttgacttacggaatattacggaacctcactaattgtgcaacgatgcttccatttgattttcggtgtgtcacggaaccttacagatngtgcatcaatattttcttttgttttccggcatgtcccggaatttacaaattgcctaatgatgggtgccaagcacctcaca

SEQ ID NO: 152088 - DNA, 330 bp, Glycine max
  unsure (1)..(330): unsure at all n locations
tgtccaccgtagtctttgccttgattaatagcatantatgttatttatgaccatttccagaagcactggctttcaacctctgaagggtattaatagtgttagagtatgtgggttctactttatgtgttgtgcttattgggccttaagcccacttctgcttttgtactgtatctattagcaaatcaatgagaaccaaatagaaatagaaatttgaccattaaccattaccaccaaaaactgacagtagaatcattcaaattaatctgaaaagttggcgatattaccagtctggcaaaaacaattagcaatgagcttatcaagacagagttt

SEQ ID NO: 152089 - DNA, 187 bp, Glycine max
  unsure (1)..(187): unsure at all n locations
ttaagtcacctgcngctgcagctnntgccagtagctgatttaatttattaattacatataactgataaatcaccgggtgcagagtggatagcattttgcaaagacaataatatccagctggtgtggtaatttaagcacaccttgtcaatattatntgttcctgcgccttgaaataaaatgatgataa

SEQ ID NO: 152090 - DNA, 331 bp, Glycine max
acggaccttaaaactcagcttatataccaaatatacgataatgaaaccgggccaaaggcattttgtccagtcttgcgccaatttgatcatattgttccattaggtgcctcggatttgctaaaaaggtagcaattgcggcaaattcacttgccgcatctttatcatcattttatttcaaggcgcaggaacaaataatattgacaacgtgtgcttaaattaccacaccagctggatattattgtctttgcaaaatgctatccactctgcacccggtgatttatcagttattatgtaattaatatgactaaaatcagctaactggacaaaagct

SEQ ID NO: 152091 - DNA, 460 bp, Glycine max
  unsure (1)..(460): unsure at all n locations
gctngctgactttgggatggccaagcacgttattttgtaaattccncttctattatatactggttcttgtctctattcatatcccgaaagagaatgcttctctcgttgtaccattattttggatttccaagtatgatatgattatctttacactgttaaaacattccggtgggtatttgcattacaaaatgcaatcattaagataaaaggaccaaatttattgttttggaaatttcttatcttgaattnttattacccattacagccattggagtatatcgggtacatcttctaatttccttggctgaatatgtatcttgtgctttaatgcttacctgtaaatttgtgacatgtagaaaagtggtgtgtctccaagttctgtatgttatntaatttggaatttttatgacatatatctatgggttctttcgaaatttactaggtggtntcacgaatacca

SEQ ID NO: 152092 - DNA, 450 bp, Glycine max
tgtcatcagagtataagacagcctaagcctgatgcgactcttttttctatccaacaattatcttgaaatctaatgccaactttgtaagtctaaacatgtttaggaaatattataatatctcattttgcctattttcatgataaagaaagatgtttacaaaataatttacatgtttggaaacagtttaaatttagaaaaacaaaatttcttaaaaaataagctgttttttttaatctaaaaatttgtaacttatgtttatttgtcaataattattttttctttcttaaaccgtttcatactcttctgccgtgaaaagatgttatcttaaaatcatttttagcaacttatcaaacatttttattattataacaatattgaaaaatttactctttatctatccaacacatatgtatcgttataaacattccattcctgtaacataaacaaatc

SEQ ID NO: 152093 - DNA, 451 bp, Glycine max
  unsure (1)..(451): unsure at all n locations
ccttagagtcacctgcngcatgcaagcatgncctatagggataaggattttttatttgtcgancacaagattagtttccaagttgaacctcactatcattccccacccaaaacctcataaacttcaatggctatatgagcaagggaaaatgataggtaacctacacgtgaaggtacctttctccattgggacatataaggatgaatttaactgtgatatagttcccatggaggtagggcatattctcttaggaaggtcatgacaatttgataggaagatcattaacaatgacctaactaatgagaatgccttcacccatctaggcactacatatgtgttgcatcctcatacaccttcacatgtgtcatacactaatttcgtcaaagactctattcgatgatcttttattcttgctgtcgattaccatgcaaacgccattatagtgcaaata

SEQ ID NO: 152094 - DNA, 451 bp, Glycine max
  unsure (1)..(451): unsure at all n locations
ttatagaaactcangcttcataagtaaacnctctgttcctatgagaagaatacgctcnctnttgtcaggaccaangncttatgcgacctcattttatttgaattttacccactaaaaaacaatagacaggtatgcatgtggataaacacgatgtacatgggcgtgattaagatagacatgaccgccaacaataaacaataacacgaaagaagttgaaagaacatcacggaaaaaacaaattttaagtatacacactcttgaaaacatttcacttatcaaaaactaaaggcttccaatttcctaaagtgctcttgtgtttgggattgcaagattaccttatctaataatgcaatgttgctaacaatccaatcttttaacatgataactgtaggcaattgaccagcctttgaacctaagacctaagttcctaacgaacattactcatgagaat

SEQ ID NO: 152095 - DNA, 463 bp, Glycine max
  unsure (1)..(463): unsure at all n locations
agcttcngggttttgcatgcanttggttgttattttatttaattggtggattgggtattccataattatttttttgtgtgtgtgctaaatgaattggctcaatgtgatggcttaaaaaatgggttgcctttgaaaaatggtttttgtttttttttttttgagattgctgatttttatgccacgttaacaaagttntgtgttaatggaactcgtggccaaagtatgttgttccctcaacgttttattcctccctttgaggttttgaggcaagaaaaactgtcattaggaattgatatgtatcatatctcatagattcatttgcacttntgtagccactcatggtcttttaagcagggtaatctataatatgatgccaaaaggcaacagttatatgaatattaccatccattagtgttttcgccgactatcggacttgaagagtaaacaaagctcatggaagagt

SEQ ID NO: 152096 - DNA, 481 bp, Glycine max
accataatataactagctttaaacaagataattgagactttgctcttgttcttgttaactcactggagattatgggtatcttcctaagcatctgagatggatctattggaaaagatttcctttaaaatacatgcctaaaaacttttttcttggaggtgtaattgcgattgatttaaaacacagcaatcttagactagtctggaaagaaccccaggtatatattatatacatgacaatttcttttaaaactgagctaaactacacaagtaattgttgccacttaccactgtttcattttttattctcttgtctatatttttgtcaaaaaaaaaatttcattgtaagttttgccgtggctgaaaatcctcaatcttagtcattctaagtacttgacagaaacccctgactcttcaaatataccaagtcttgataagctcattctcaaagattgtccaagtttgtgcaatgtacaccagtccat

SEQ ID NO: 152097 - DNA, 452 bp, Glycine max
  unsure (1)..(452): unsure at all n locations
ctcgacccggatccttagagtcacctgcggctgcagcttaaattgaatcnaatgttattatctgtggcaatcaataccatcatgtgaatcgatacacagtgtanaatttgaattcaaattataatagctngtataaatcatntttgccactggtaatcgattacatcctcgagtaatcgattaccagagagtagatctcttgaaaaagacatttttgcttaaatttcttggccaaaccttttgttgtttcaatttggaattctcttcctaaaacactagagatcttcttgatgttgtatcttgtattctgggatttttgccttgaattaaacttgagaagcgcattttcataaggcatcaaaacatcatgatcatatggcatcatcaaaacatcaaaggcaaagtctttgcttctacaatctcccccttttttatgatcgacatttaatttt

SEQ ID NO: 152098 - DNA, 341 bp, Glycine max
  unsure (1)..(341): unsure at all n locations
tcttagtttcagatgatgcagatgggtttgtagctacctcatacactcctctaatgactatggcatcatttctggcgctaaactgctgggagttggaggccatcttctcaattaaatttctggcttcagcaggagtcgtgtctccaagggctccaccactggcagcatctatcataattctctccatattactgagtccttcataaaaatattggagaagaactgttctgaaatctgatggtggaggcaactggcacatagtttcttaaatctcttccagtactcattcaggctctctccactgagtngtctaatacctgagatatccttcctgatggttg

SEQ ID NO: 152099 - DNA, 458 bp, Glycine max
  unsure (1)..(458): unsure at all n locations
agctntaactngagtcatcaaatgattataatatgtgaccatggcacgaatttcaagagactgatttccttttatgcataacaaatttctttcattcaattctcttcatctttctaaaagtttttgttcaatactttctctttcaagaaaagttccttgaccaaaaacttgtgctattctttttctttattccttctctcttgtcaaaagattgaaaggactaaccgcctgagaattcttttgtttcttcctttctccctcttaacaaaagatttcaaatgactaaccacttgaaatatcttttgtttcttacaaaagatttcaaaggaataaccatctgagatatcttttttccttttcccttanacaaaagatttcaaaggactaaccgcttgagatatcttntggttccccatacaaagattcaagggactaaccgcctaagaattctttgtctt

SEQ ID NO: 152100 - DNA, 429 bp, Glycine max
  unsure (1)..(429): unsure at all n locations
tggangggatgatggggacccggtgctgagaggatctatgtttagggctacgtgggagtacgtgagctcagttgaaggtgggcaactgaggatagtggattcatgtgtgatttgtggatgtggagagatgatttataccatcgcccgatcgccacctattaccacatatgacgggtaccccataatcctacaagcttgaagtgagaaagtgtggaagagtcagtcttcctacttttattcgttgaccacaaagtggtaccttgagatatgtcacgggggtcaggagaccttgtggacgtcaggtggggtgctattgcccaaaaccaagcttgaccaatcccgacccaacttcggcatagtcagtcagtgagaacctgtgatgtacctaaatatgcgagctcctggctgtcnaccaatataagaataaag

SEQ ID NO: 152101 - DNA, 460 bp, Glycine max
agcttataaatatatttacatgtatcaaatatatatataattaataataacaataataataaatgtatcattagataaatatttatttaaatatatatatatatatatatatatatatatatatatatatatatatatatatataagcacataaaataattaaatgtactaaaaacattaacatgaatatactaaaatataaatgtgagtttaataatatatatatatatagaagtaattctacatgtatatatataatttgaatgattaaatgcattaaatataaaataataagaacatgctaaatatatccttagataaaaataaaatatatatgtataatatatgtacataacaaccaagagtttatatacatatatacatatatcctaaatgcattccaacgaagccatgaaaacccaacaatgagaaacgaaagtgtgatctcaagcactacacg

SEQ ID NO: 152102 - DNA, 372 bp, Glycine max
  unsure (1)..(372): unsure at all n locations
cctctaatgactatggcatcatttctggcgctaaactgctgggagttggaggccatcttctcaattaaatttctggcttcaacaggagtcatgtctcccagggctccaccactggcagcatctatcatacttctctccatattactaaatccttcataaaaatattggagaagaagctgttctgaaatctgatggtgggggcaactggcacatagtttcttaaatctctcccagtactcatacaggctctctccactgnagtatctaatacctgagatatccttcctgatggctgtggtcctggaacacggaaaaaatttctagaatactctcttaggcatcccaactctgatggacctggagcaggtatac

SEQ ID NO: 152103 - DNA, 433 bp, Glycine max
  unsure (1)..(433): unsure at all n locations
ctctatgggatangttagtctatctagtcccagagttgtgtctcagtgatgngatgcatttgaacagggtnttatggtagtcttgacacgatgttacctttttcatagatagtttgtgtgttactatttaggaaggctacatgaaatctttgtctttgaacttcctcaaatgagggcttcttccatggttcccacatagccttccangtggaacctangggtttgaactttgagaggtttatgggagatggagttggacacttgttgtttactagaatggtggacatatgtggtattgaggagtaaagagggttgaaatcactcttagaggtgttagatccctttgatttgtgaggtgggcctatttctttntgagttanggctttatntagatgagtatcccttatctttcttcgtcttggacctcaactat

SEQ ID NO: 152104 - DNA, 397 bp, Glycine max
aactcagcttgtcccgtatttgtctagtaggcggaggagacgagaatgaatgttttcacccttcttggcacttcgaactctcttgaaagggctgatgaacaccgcttccgcgaagaaaatccacaccaaagcgcttccgtatcattctctgaacgttttcatgggtaattatgcgaagattttcaaccgttcttcgacattcatcgatcgttcttcgatattcttcggtcttcaaccggtaattaccccataccgagctcttcaattcattctatgtacccgtggtggcccccatatgattcgtgtactattattactcgtacattacttgccgaccctatttgacggcttcaccattattagggcttactgcctatcagcaataagtgatgccacc

SEQ ID NO: 152105 - DNA, 407 bp, Glycine max
cttgggggtaaaaattcaaatcaaaaatcttgaatgtaatctaggacatgagaaaaaagcctaaaatactatcggacctacctctgacgagaaatctgttgtctatttaaattcactggaggagaaaatggtggatctcttactgcaagaagaaaatttttagagacaacgctcaaaggttttttggttacgaaacggggatgcaaacactaagtatgtccatttccaggcgtcggccaaaaagtgaataaactaaattcacaggcttaacgatgagggtggagtttgcgtggaagaccacatagtgttgtgtccgtggtgaatgagtatatccagaatctgtattctacattctataatgattctgggccgagaatgacggggttcatcctcatatatgtgataat

SEQ ID NO: 152106 - DNA, 483 bp, Glycine max
  unsure (1)..(483): unsure at all n locations
aactcaagcctagcatgtctcctcgcgtgatgcccgtatactcgtaatccgttttgtccacgtaacgcgagatcgtgtgaattttaagctaccttagactaagtgcgtgattgtcgccatactcactaagcccatatgctgccgtgctcagcgcgtgatcacattgtcatactcactaagccgagaaggttcacttagtatgaggtcacgtgaattttaagctaccttagacttataaaagaagtaggaagcaaaaaaaaaaaaaatacaccgaaacaccttaacattgcatcaaaggtcattagatatgttaggtcctaacacatttaaattttgaatntatcttctacttttccctttaactttccactttcaattctttatctttggcttgaaaaataggttggcacccaatctaagtataaacaaagtctatgtggactcgacactcgaaccttcgtttaacttattacttggaataat

SEQ ID NO: 152107 - DNA, 410 bp, Glycine max
  unsure (1)..(410): unsure at all n locations
agctngtcgacccatgatgcctgagcttgctattaacgcgtctttaaaccatttaagatgactttattggtagcttctacttgaccattctactgtggatgctccacggatgtgaagatcaaccttatgtcgtaactatcacagaattacttaacattggtgtagttgaatagtgtgtcattgtcaactattaaattattggggaccccaaatctacataggatatatttccataagaacttctttacctttttctgcaaaaattttggccactggtttggcctccacccacttgctaaaatagttaggttccactatcaagtatttcaattggcacatgccaatcgacaataggccgaacatgttgataccccacttgtggaaaagccaaggggaagacaataaatgca

SEQ ID NO: 152108 - DNA, 464 bp, Glycine max
  unsure (1)..(464): unsure at all n locations
ntgatctaccaccaccaccgccaccatcatcttagttttttattatgttaatattattagtactttgatttctagccgtgtatttggctatattattatgacatttgaacaatttagtatttcttttatttgcatagtatgattgaacaattatgaattatgttatatgactcatgtggttttatatatttgatctattcatgtttcttgcttcatgattggtttagattttttcaatgaatgtcttgtgaatgattagtaatgtatgtatgttttatatttggtgcgcactttggctntntgttgatgccaaagcgggagagaaataggaatcanatcaagaactcacataagtaattaacttaatttcaagtaagcataaactcaaaaacaaagggggagaatatggagaataaagtgagtgatcgactangaaaaagaatgtgtatgtgtttcttgatttc

SEQ ID NO: 152109 - DNA, 400 bp, Glycine max
  unsure (1)..(400): unsure at all n locations
taccataccatatgatataacacaaatacattcataaataataaccttattttgaattatgaaaaattcaaacttaccagtcatggaggattccaataagaccgcgatcaagaaccacaggaagtgtgttgggagcataagatgagaccacattcatgacccacaagggatcattgatcaaggctgcagcaaaagctccatatactgtattcatgtccatgacatttctaaccttgtagtgccaagatcaagcagcaacttcttgtaatgctgaatgcgctttttcacttgccattgtcatgactgaaagtactagtactagaaccatgaacagttgtgatcctttcaggggtagcaagcaaccgctcacgccacttanggatgtatgtgagacctgatt

SEQ ID NO: 152110 - DNA, 451 bp, Glycine max
  unsure (1)..(451): unsure at all n locations
attccaaacatacagaggcttcagaagagaaaaatttctttttggcaataaatagtcctcttcattggcagcttctgtctctggaccatcatattcttcatcaatatcttcataatcaacagcgtcttcagcttttacatcacagtctaagattaaaaagaatcacagttagtaaactattttacaggggagggaaaagagatggcttattttgcaaccaatgcttcatttcatcaaattcatactattttacagacagctaatgccttcgatgtgaattagctntatcaaatgaaatttccaaggataaagaaatgttagagcagaagggtcaagaatcctcccaacagaaaataacaataacaaaataactgaagatcagcctgaaatactctcaaaaccctctgtanatctgtcanagaacctcaatgaatanatatgagatccaatc

SEQ ID NO: 152111 - DNA, 390 bp, Glycine max
  unsure (1)..(390): unsure at all n locations
gctgcngactataccatggaccgaacactgccgtgtttctgnctaagcccggattcaaagcgggctgcagcaccggctccgcttccctaattgtactggaggcgttatccgaggctttatcctctatggttttctggagttttaacatgacctccgagatggaagccatttgatctcttaaggccgatagatcggccttcatctgttcctgcacgccctcttcattatccatttttctggatcgagtgttataagggtgccctggtgttttcttagttatgatgaaattcctaaagaaataaacaacggtgagtatgccaccaaaacatgagtatgcanatggatgataggagcacttgtatccaccccaacgttttttagaaacatgat

SEQ ID NO: 152112 - DNA, 457 bp, Glycine max
  unsure (1)..(457): unsure at all n locations
taagctggttcagactacccgtgaagagcgaaaacgttattaatgttgattaacgncaaagaacgggggaaacgcttgctaaattccttacggaaaacgttacgaaaacgtttcggaagcgcctcggcttagattttcttcacggaaacaatttttccaagcaaattcgaaagagagagaagtgcctaagtggttgaacccttttccttctcacttcctccnctatttatagcaaaatatgggaggtggttgctgcccagctcgcccaggcgagccaggttgcttcctccagaagcaacagccttctggaggaatattctagagggcccaagtgggcttgggtggctattgcacccccatatttactatgttcacccccctctgcttttttctggcgattctcttttcgtaaagtaccgaaacttacgaatatcgtaacgatacttggtttcttttc

SEQ ID NO: 152113 - DNA, 341 bp, Glycine max
gctctgatatcaattacgagccttccatctattacggactccatcggacatacgagtaaaaagttatcggcgattgaatacgctcacagctcatgtgtctaacttcgagcgtctcgatatattacctgatgaggacatgaccaatagcaatggcaaggatccacttgaaggacttggatgacctatgacaagggctatagcaaggatagccatcgaagctcttcgacaagcgctggccatactatatgaatacaagcccagctttcaatgagaaaagtccaaggttgtgagttgtatcatgtgccaaaaggaagaggactaaatgacaccactttgtctca

SEQ ID NO: 152114 - DNA, 425 bp, Glycine max
  unsure (1)..(425): unsure at all n locations
tactaagcttcttttgaattcggcatctcgaaatacggactttatcgacatccgagaaaaagtattatcgttgaattgatacaagcttctgttttaatttcgacgtctcgatatattccaggactcaatccggcatccgagtaaaaagttattgtcctttgaatttgctaggagcttctgttttcaatttcgagcgtatcgatatattaggggactcaatcggacatccgagtaaaaaattattgtcgtttgaatttgatatgggcttccgttttcaatttcgagcgtgtcgatatattacaagacataatcggagtaccgagtaagaagttattggtgtttgcattaggtacgagcttccgttntcaattttgaagatctcgatatattacgggaatcaatcagacatccgagaaagaagttat

SEQ ID NO: 152115 - DNA, 392 bp, Glycine max
  unsure (1)..(392): unsure at all n locations
ntntggtggngagcaataaggttcctgtggatgttctttatacactgacgatacgatattctttggagaagcatctatggccaatgtcaaaattgtgaaggttactctcatgagttttgagctggtttctggattgagaattaattttgctaagagcaaatttggagctgttggtcaatctgaggagtggtgtcttcatgctgcaaactacctcaattgtgctttgctccaatttcctttctgctatttaagtattccgattggtgtcaatcccaaaagaaaggtggtgtgggatcctataattaggaaatttgaggatagacagaacatgtggaagatgggtagggctgaccaaatcctgttctcggaagatgcttgggctgaggatggga

SEQ ID NO: 152116 - DNA, 417 bp, Glycine max
  unsure (1)..(417): unsure at all n locations
catcagcttgtggtggactgactttttttatggcganacctgtatcaatgccggaaaacccaatgcactattggacttctcacggaccaccgggtgtctcggtggtgcaatacctacaaactagtggatggcatctaagataaggtaccccatatggacattgatctgggtcatgatgttatataccaactgacatttgcgtagcgtgagatcaaagttatggtcactggaatagatgttattgagcaggagcgtcatccaaatatgagttagagaggtcatgctagtgcgcatgatccgcacccgcctccttgctactcttcatgcaaaatcatgttccggggagcaataaaacttacttatggcctcttcttcaaaaccatagaattgagttttctctcaatgacttgcatattg

SEQ ID NO: 152117 - DNA, 425 bp, Glycine max
  unsure (1)..(425): unsure at all n locations
tgaagaganaaatatatttccggatctcatgtttctattctaaagaaaggtacataagaataaattaattatcacttcactttatctaaatttaaaacggaaaaggttaaagagaaagaaatatattttgtatagttgaaaagaaaggaaatatttttgtaagattatatcgtaacctagttttgttatttttattatttttttggtcggcagtaagtttagtgaaaaaagcagaagcaaatttcacaaaaaaaaaagaacgaaaaaaaaaaacagaagcaaaattggttaaaaagcttaccttgataagggtatagatggtaattccctaaaaattaaagaacaaaatagacgtaagacaaaactgaggaagttgatcatggtatattntattagtaatgaaatcatgtaactttttttttttc

SEQ ID NO: 152118 - DNA, 371 bp, Glycine max
gtagacattcttaactcgacttgggtattaatatttaaaataaacgtcatcatattcaaagatgaataaattgttgatttgagtagtactaatagatttaatttctctaagtaatgtttccttttaaatcctatgcacagaaaaaaatattattgataaaaaaaatcactaaatgtgattagtcagttttttaacgaaaattaatcatctaattaataaataaataagacgttggcttatgcacataagactaacaatccatttattttaagcttatataaaaaatagtctttaataaaaaattcatttttctgttttttatggatctgtcgggttgtcacacgagataaggatccattattctaacttat

SEQ ID NO: 152119 - DNA, 295 bp, Glycine max
atctcgatctttatggaaagcttaaacaatattcgatatttctctgtgaagattgattcctttcaagtgattcagataatatcgagttcaaagttgatctgaacgtggtgtacccataacattatcattgactcattggaacattgctttggggatatctaaagatatcaatatgacatgggactaatgccattctatttctcttacatctctctgagtgaagtcttatgttattaccttaggttaagttaaaatgaacctaggttgaaatcgcattgaaaaatgttgctcagtc

SEQ ID NO: 152120 - DNA, 436 bp, Glycine max
  unsure (1)..(436): unsure at all n locations
ccatttgtgtcatggatatgtttctagaatctctacccgaatacctgagaaagaatgttaagaaatgtcggcttgcaaaatcccggaagtgcataaaatggattccacacaactttacttttcgatacctcatatctaaggatatggtaaaatgattactttgcagcgttacttcttactgtggcaagtgatgtgcatttgtttgatctatgtaattctttttgtacaaagtagaaacggtacggcgaaatacaatattgcagagtgatacattattgttatgtcattgtggtacctgtaattgcaactctgtaaataatctttgttgctactgtgcttgcactcgctaatcccacagcacatgcatatgtttggtgaattgctaacatgttgcgcattatanactattnnatgtgagttaaagacaaaacaaatg

SEQ ID NO: 152121 - DNA, 247 bp, Glycine max
ttctagaatcgaattagcctagatgcctgagtgtcatatcttttgattcagggatatgagggtataggcttgctttcttatatcacattataagccgctagccataaagttatcccaatgttctaactaaaggcatttgcaagccctttgagccaaacacgtgtgtttcttgttactacattaccctaggatgatagcttcctatcttacgttaggagaggaaagcacagggattttggtggggaat

SEQ ID NO: 152122 - DNA, 199 bp, Glycine max
  unsure (1)..(199): unsure at all n locations
tgcatgactctaatgcatacctgatgcacntgcagatatctgctaaactggtcctgcatgcacctatgtggacactcttgagttactattttatggagctgggatgctagggctcacgagtgactatctatataccaagaccacccgatgtacacataatctggtcttttatacattagagcattattgcgagtccatt

SEQ ID NO: 152123 - DNA, 481 bp, Glycine max
  unsure (1)..(481): unsure at all n locations
actcagcttgcagtgaaatcgantactcgactgaggacgcacatcttgtaagtttactctagaatcagaaggtatggtcaaaagagtattctatatgaaatatatctcgatacgagtcctcgaactatagagtatcaacattgctaagaacaagaaatcgcgaacaaccatactatctatgcaattaaggcaaaacaccatactactaacatacctagaattataaggttcttataataagtatacaacgtacatataagaagtatgaatttaatagttaataaggatgtattaaagaatcacaaacttcaactaccgcattcacgactacacacaaaataaagtgagttaagtagtcatgcgtttacacatcaagacatactcatccaagacatatatatggttcanaaggttttcacaacacttatccacacatcaagatagaaataagtttattaacaacatacacgtaagaagataa

SEQ ID NO: 152124 - DNA, 449 bp, Glycine max
  unsure (1)..(449): unsure at all n locations
gcaagcttcanatacttgtgtgatcaattacaatatattctgttttgattgaaacaaagagttttaaccactcgagaaaatttctaacttcagaacctttcttcgtactcttacatgataatgcaggatacgcttatgagatgatgacgactaagatgcaacgcaaaatacaacaatcaatacaaatgccactctagagagttgagcatgtaaaagacaaaacttcttcaagctgtcaagcctaagacttcatgtggttcctctatctctaacacttataacactaagcaggctttcttttggtctcctttcaatgttatgacttgcatctcattgatgaggaacttcatggccaagtgaactatcgaaatcacaactctcagggcattcaatggtggtctgggccagatggtgttgtacgatgattgtagcattaccacaatgaactt

SEQ ID NO: 152125 - DNA, 459 bp, Glycine max
  unsure (1)..(459): unsure at all n locations
actctnnttctctcaactattcttcattctgctntttttttccgctttntctcttccttttccttgcaaatatttcgtggcttttaactgttgatgatcatggaaagctaaacactcaatcaatccaagaatccactccaagcaagggtgaatttgagttctagtttagtatttctaatctttgtgaatgttcatctttttcttcaatcctatttttgattttcatgattatgattatgcttagtattgaaaatggattaggttacggattcatttcctaatttcaaaatttaataacagattgtttggatgattntcctacctaatttgggatttcaaacaatntanggattcattattagaaaatacactttcaacatcggttatttacgacattctacattgattntaaaaccgatgttgaaagtaccgatgtngaatgtattattgttaacatcg

SEQ ID NO: 152126 - DNA, 412 bp, Glycine max
  unsure (1)..(412): unsure at all n locations
agcttaaagtatgcccgagtcattcatccctatgagatgttgntgaagaattggcaatcagaattgccattccttggattataaggttgaaccaagctcatgcttttacaaaaaggttcatcaagtcaagttgaaatacggaagtaaccgtcttgcaaaattggggcaaaagatgaatcgagtcacatcactgcttcgtctattgccaaacatatttaggattgttgatgtccgtgttacttccagtttcaccttgacaaagatgtcatggaccatgttgaaaatctaaattgattcaaccccatatcctgcgtaaacattcgcaatacttcaactgtacatcattcgcatacatccatgcttttctttggttgcattgctcattgcattctttccttgaagaataaaataa

SEQ ID NO: 152127 - DNA, 441 bp, Glycine max
  unsure (1)..(441): unsure at all n locations
acaacgcggccgaatgaactgtctcaccccggtgntctacagtcaccgctttaggagcgttgtacaccatcagcgcttcgaagccatcaagggatggtcgtttctccgggagcgacgcgtccagctcagggacgacgagtatactgattttcatgaggaaataaggcgccggcggtgggcaccactggttactcctatggccaagtttgatccataaatagtccttgaattttatgccaatgcttggccaacagaagagggcgtgcgtgacatgagatcctgcgttaggggtcagtggatcccgttcgatgccgacgctatcagccagctcctgagatatccgatggtgttggaagagggccatgaatgcgagtatggccagatgaggaaccggtctgatgggttcgatgaggaggccatcgcccagctgctatgtatacc

SEQ ID NO: 152128 - DNA, 397 bp, Glycine max
ttatttaacgcacgggttcttatgaataggtaaaatataataatccattcaactttttggttgaaaataaatttattaattggatgatgttttatgatattgatcaatataaattaaaagaataaaatacacccatccatttgttctaaaaatctaaaatatttatttaattgatgaaagatggcttttgtgacgacttgtaaacttccaaatatgtaaaatgttaatgttaaacaagataaataagatttttttaattaaataactaattcaagaaaaagttttaatctaacctgcaagcactaggaaattataattatacttgtcttggatgttccacatgaatgaaatttatttaaaaagaaatgatatagattaaagcaatgagtcaaataat

SEQ ID NO: 152129 - DNA, 443 bp, Glycine max
  unsure (1)..(443): unsure at all n locations
tgtacacacncgatctttcattgattcctacttctactctttcattcttcacgccccggagacaaccttcacatcataaccttaacagtgctcactaaggatgatcatcttatcatttaacctctagttatattgaacacacaccagacagctgactccaagctagaagtccttgttcaatggcaaggattatcatcggatgatacttcatggaaagactggacccaacttcaaactgattaccaccttgaggacaaggtgcttttggaaggcatatggaatgatagcaacacagaanaaccagaagcaacaaaagcacgaccacaaaggatgagcagggccccaacttaccttatagatttcctataaccgtttctgctgagctggctatcaagggagcaactctngatcttgtctgccattangaatatnttctctctttc

SEQ ID NO: 152130 - DNA, 449 bp, Glycine max
  unsure (1)..(449): unsure at all n locations
agctggngatgcgtgtatacattcctggataccgtgcatccatggcatcaatacgactgtcgaatgagtcaaagcactcactaacgaaggtgtggagtccatccaacctgtcaagaatgttgtgcataaaagatgaagaatcatctccctgggaggtggtgatggagaacggtcttctgcggcctatgctggtgcgtccttcttcacccaagaaccattcctctctttgtagtatccaaaagaggagaccacatttgcaccaatagagaaagatctcttgactttaacaaagggctcagagtcaagaatatgtttgtagaacaaggtgatcaaatgaggatatgaaagtcgatcatttgatcacaatgccttatgcatgcgatatctcacaagatgggcccaatcaattngacaaccagttaagagaacccacataattatcaattctt

SEQ ID NO: 152131 - DNA, 461 bp, Glycine max
  unsure (1)..(461): unsure at all n locations
taacgtatcacanagagtgtgccgntagcatacctctctttggttattgtaattngagnnntttagttnttctaagcacttangaagtatgtcttgcattgtgcattatgtaaaagacaaacttatgtttctttcatttttctgtttagtgaataactcttttaccagtatgggatttgaagtgctattacatggtttgtaggatggcaaattggtgtagaaaatgtatatatttaaaaccaaaattggaaaagctggcagcagaatattatccaaggtgagcttgtgttttgtttttctttnttttactaacatgcataactagaataatttcatagcatatcattcatttataggtgggtgaaccaatggaaaatccagattggtgatttcattgacccattatgagagattttcctttataccccgtacatccattaccattgattgaaagttctctg

SEQ ID NO: 152132 - DNA, 387 bp, Glycine max
  unsure (1)..(387): unsure at all n locations
ttgaatntgaatntcaacgactaagggcactggtaatcgattaccaaaacattgtaatcgattacagccttttgaaaataattggaacgttgtaaattcagtttgagaactttttcaaactcattgttctactggtaatcgattacaacaatatggtaatcgattaccagagagtaaaaactctttggtaaaaggttttttcaaaaactcatgtgctattcaaagttttgaaaaaactttttaatacttatcttgattgagtcttctctttattctcgaatcttgagtcttgaatcttgagcttgattcttgagatcttgaaccttgaatcttgattcttggctctagactttcttcttgagtctcgaattcttcttgattcttatc

SEQ ID NO: 152133 - DNA, 488 bp, Glycine max
  unsure (1)..(488): unsure at all n locations
gacacttagaaactaagctatntgagagaaaatggaagatcttattcttagctntctttggtactactccacactccatttggagttctagagtatcctatagtccctgcacaaggcagacaggtcaagtaagcacaaaaatccaaaaataagccacaattatcgattaagctcaatcatttgcctaagaccaaaactaagttaaagtgggaaaataagggtcaaatagatgtcaattgagctaagaagaatataaaaatattaaactacaaatgctcaatcaatgaggaatctaataaagtagacaactctcaatacagagctatgattggatcactactatatctaattgcatccataccatacatactattgcagtgttggactgtgtgctagatttcaacaagacccaaggaagattcaattaactgctggtaaaaggatatntagatatgtaatcggaactcctaatcttggtctttacttta

SEQ ID NO: 152134 - DNA, 431 bp, Glycine max
  unsure (1)..(431): unsure at all n locations
tatatagccacccttattggggattttctttcattaaantaaaatttaaaatttacatttataggtagcatatgcctataatcctcaaggacgacaccaaatatagatacatcatcctttgttgaagaattctatgtactatcattntacaatctatctcaaagctcacattctacattcctattcctatgatcgattaaaaaagtaaatatatttactgtcctagaaacataaaaaaaattaatttttactatacaaagtaagattattaaaagaagaatattataagaagaattattttaaattgattctcaatgttgactttctccttcatgtcaagatcacgcacaaagaatgattgggaagtacctaaattttattcatcanacccgtgacttgggagctctcatctacagtgaatntaaatcaat

SEQ ID NO: 152135 - DNA, 465 bp, Glycine max
  unsure (1)..(465): unsure at all n locations
tgcttctagagtttcttcagtagtatttcatgttttaatttggaagttattcattagattattatttggtacataagaagaataagtcttgcttctaacaaatttttttaatttatttccaaagaagaattagtctaggaagtataaatcataacaagtaagttttaatattggctaaaatatgtttttcgtccctataaatattgaaatgtttggaatccatcgctgtaaaattttgagtctttttttcatcctcgaaaaattaaaatctattactttttagcccaaatgtaggttcgggtaaatccgaacttacgtatcactttntcatttgttccattaatgacaatgagggtaggtctaggggttaacaactaccacaaaatgtaggagaacaaatccacaaatntgtaaatctctctcaccttacctncttcttccttactttcttcatctctatgtcac

SEQ ID NO: 152136 - DNA, 421 bp, Glycine max
agcttgaggataactttttgttagattcttttttgacaataaaaaatacttgtaactctgttgaaagttaacggaaaattggtgaggtgtcaagatatggatgtagtctcaatggtaaaaacgaaccgctataaaatctttgaggtctttctcttttttccttttcttttaactaactttgagttttggttttgcctttgtaaaatttgtttgttaaaatctgtttaagagttttcgtcgattgtcatatcaattggataaaactttgcttttaaagtatttacattatcacacaataattaggtttgccaaaagtttgctaaattctttaaaatcacaattcaatcctccctactaaagagaacggatgatgttgtacttataaaaaattgtggtgtaataccaagtgattattagtaat

SEQ ID NO: 152137 - DNA, 323 bp, Glycine max
tcgtccgtagagcacgcattctagaccaagcttttatcttacaagagtattggaacaacacatacgtgacctgaacctaatccgccgatcgctcattcaagactaagactcaatgcttcttccatgaacacctaatgaaacgatgcatttgccattgcatgagtcagctaactgtgcatacgaacgggagatcggaccaagagcctacgcaatctaagcactgaaggaagcgttgaacactatataccgagcactttgataggagggaatacagcagcttgttctacagatcccaacaaagtgttggcatcatacagaaaccc

SEQ ID NO: 152138 - DNA, 398 bp, Glycine max
  unsure (1)..(398): unsure at all n locations
gcagctgaggatatgggttctatatatgggactaagggcgacgggcgatgccaaataactcttcacttcaaaataaacatgaacccacatcccagtgcccacttaactgagctacgtactccacgtagcccttacctcgtcctctagcacgggccccatcaacccctcaagcttcacaatatccaaaaattaatttccaaacatatgaactaccctaaccaagaaacagggcagaggcagaanactctgcccaaacatattcacatattacagctttccttactcaaatactccagtaacattctcttcattccgaattgttaaccgttggatcgacgtcgaaaatttactggaggttcctagtacaataaatctacatttgaccgatgggatctggt

SEQ ID NO: 152139 - DNA, 466 bp, Glycine max
  unsure (1)..(466): unsure at all n locations
ntnntgagataaaaatcacagctntagtgtgttcttcctatttctccgcatacaacatgccaaanaatatattgaaccattacaccaccaaaaaatgacgaaaacacaaaaagctgggtataggaagcaatgaacacgttggagaaggctcangaacacaaaaaaatttaaacttttgtattgcgagaagtcagaaaacaaaataaaggtagaacacccaaaaaaatttaagcttttgtgtttatgaacctgtactcatggagttgctgagataaaaatcgcagctntaatgtgttcttccaccttctctgcataaaatatgccaaanaataaacacacgtcttctatcattgtagttcaagagagagaaagagaagaagaagaagaagaagaagaagaagaagaagaagaaaaagtgagaagtgagagaaaaaggtcagcgcacaaatgaaaaaaaaacatatgg

SEQ ID NO: 152140 - DNA, 426 bp, Glycine max
agcttcttatacaagcaattcttggtggtgaagctccttcttcctaggcttattccctagaggatggagcctcccctctcctcttctcctttgccttctgctgcatctccatggtgaaaaatcaccattgaaggacctcattggagctcaaagatccagcctccatagaatcttcacaagcaagcttccatcagctgtcttactggtttaacctcaccctctaaatttatccgatgcatacatgtggatgggctaataccaccaatgtccaccagggtccaacctataaccttcttatgcttcttgagaactgataacaacttctcctcttgctcattaaccagggaggcagatataattactggagaactttgttatcattcaaataagcatatcttaaatttgatggcataggcttcattctgg

SEQ ID NO: 152141 - DNA, 442 bp, Glycine max
  unsure (1)..(442): unsure at all n locations
tcattaagaggcttcctcgagaagcttcctcgtggctttcttgataaactagattcttatctacccacacccccctattaactaaattaacctccttaaaaatagttacggataaaatagcacaacaaatataatcaaacatcaaacataattactaataatatatagatatatattagggtgttacattataagagtgaccaagttggatattcctggaggcagaaataaagcggttaaagaattttaagcatccctagagatttcttagaatctttatttatccacgattaatgcattgatggtgtccatgtttcatactttatattgcatggaaatagtataaactntgttagtagtttttcatgaggaanaatatttgtactttggggcatgccactcngnttgaacttccttggactcaagctaataccataggggg

SEQ ID NO: 152142 - DNA, 229 bp, Glycine max
acttaaatataaaggtatggcaaactgattttgcaacaaattataggacgttacacaacacctctgcctattttgggctaatacttcctacttaaggttacttttttgtcctctttccttcaggttccttttctactctaacgtttgccctttctttcttttctctgaaatttttctattttttacctaccctttgggacctgctggccaactttgttggctgaaaact

SEQ ID NO: 152143 - DNA, 350 bp, Glycine max
  unsure (1)..(350): unsure at all n locations
gaacaaaaacaacttaatggcttagtgctactgaaattgtggcaaccaaaagtcacccccaactgccaacaagaacacctccatctggtcttccagaatgctgatgcctatgttgccaattgggcccttattacaacttgaactaaacccttttagttgattaacccaaaacatatttttggtcagccaactttacacggattggtgccattattagacaaacataacactctcatattgaaataaagcggttcatttagaccttctcattnaggccatgaacaacttacaactcttgactcttctccttgaaacttgtgcttgtgttcaaataatatggacaacacttg

SEQ ID NO: 152144 - DNA, 377 bp, Glycine max
tgggtaaactcaattgtggcatattcatgtcattagacaatggtggcataccccatggtcttgtagtagaaaatagtggggttgttgtagctgacactaaattatgttgtggtaaagaagtttcaacattaattgtcaggacttgtgaacgcattgagtctcttccacttacattgataggttcattatgtggctgactagctcccataaccatttcgttatttacctcataggatgggcttgttcgattttttttccactgctgaccttattattattagaaatgtctcgcccaattattggtagtgttgttatcgctactgacttcttagacatattgctgtccttctactcaattttaataacataccattcta

SEQ ID NO: 152145 - DNA, 407 bp, Glycine max
  unsure (1)..(407): unsure at all n locations
actaagcttgaagatatggggatccatacatgtggactatgttgggtttggcgatggtgcaagtcaactctccacatccacagatcacacataaacccaccatccccagttgcccaccttcactgagctcacatactcctacgtagcccttatcctcgttcctctcaacactgggtccccatcaatctctccaagcttccacaacatccaagcaattcaacatcccaaacatcatgaactatcaaaaccaaggaaaacagggcagaggcagaaaactctgcccaacacaaaccaatatcacaacttttctcacttaanaaccccagtaacattctcctcgttccaattcgttaaccggtggatcgactcgaaaantttactggaagtctctagcacataagtctaca

SEQ ID NO: 152146 - DNA, 365 bp, Glycine max
cgctgcagctttatgcggtggcaatacagattttcatttatgttctcactgtatgttctacagtcgattttgcctaaatttctgattgacataacatattattcatggatatgatgattaatgcttactttctttctatacattctaagccgctagccaaaatgttatcccaatgtatattattcttgccatttgcaagccctttgagccaaacacttgatattttgttacaacactaacctaggataaaagtgttctaccttaccttacgttaggaaatcaaaggcatactgatggggatttctatcattgggtggctaatgagatgtaaatactctgtttctaatatgggtattaagggataa

SEQ ID NO: 152147 - DNA, 354 bp, Glycine max
  unsure (1)..(354): unsure at all n locations
aaaatgatgattggagatttatgcaaactggtcatgcatgcacctatgtggacactcaagtgtcaaatttttatggtcatgtgatgctagggctcacgattcacttcgctctatattaaatcaacccaatgtttccaaaatatgttcttttatccatttgtgcattcatccaagtccatttcgggcgtccgggaaaatttcacagcattcacccttcacgtgtagacacatttgtcanaaattggttatgatcaatgaattctttttcaaagaaaagatggaaatcatctctgttcataagcatgctcagtgttcagctagacaacttattatcctttgatccacttattcttt

SEQ ID NO: 152148 - DNA, 421 bp, Glycine max
tgcaagcttcattgtcaatctgtgcagaagcagattactctcttaacgaatgagacgaagagaaaatccagcaaggcaattgagccatctaataatgttctgaaccgtggattaacaatgatagtggactggtcaaaactgtgaccaactccattgcgagcctctttgaataagcttaagcttagaactaatagtacttttattaatatcatgctgggaagaggaagagatcgaaaaattggcgtggacaaaagataattattagtatttttattttaaacttaaataattttttcgtatctacaaaataaaagagttttggtttcggcatttagtctttcttttaactttaatatctaacaaaaaaatttaatttgaaaaactacctattgcacaatgattgactacttaataataattt

SEQ ID NO: 152149 - DNA, 429 bp, Glycine max
ttttctcttatctttgcatctagaccttcatgactaccgtgctttagattaattgattatacctttatgcttcatcatggtgagcatcactttgaaattggaactacattataataatatacaatttataatataattagattccattatatataattaaaaccaaaaatcacctctacctgacacactcttataatgttttttccaagaaaataatcaaaacaaaaaagaattttcagacatagaagactacagaaatatataaaaatatggtctagctgagtcttcccagtccttggaggcccctgaaagagagttggttaggctcgattacaatttttagacatgatataaatggacaatacaacctcttttctggtagtaaaaaaaatacaaagtttaactcaatggcctagctttcaagaaatc

SEQ ID NO: 152150 - DNA, 390 bp, Glycine max
  unsure (1)..(390): unsure at all n locations
gtaattatgcngaccaaaagatatttttaattaattacaaagtaatcgtattatatgcatataccgataaaaactgtgttgagaatttctagttaaaaaaaaatgaaaagcgagatttttactctaaaaattaaagacatttgatttatagaactatcttaatttttttgaaaaatttatctgtcctttattacaggactctttttaaattggcttgaatattattttttattaaatacctatttacaatcctttaatataaattataaatgttatgttgcaatgctttctctctcttattaataatatacatattattctcaatccacacacttaatatttaaattaaaattattgtgtgcggaaaactgttaactaatctaattaatt

SEQ ID NO: 152151 - DNA, 447 bp, Glycine max
  unsure (1)..(447): unsure at all n locations
ctcacgcacttaatcgaagagtaattattatcgacctcttagtcattccctangctattaggtatttctaataactggatgggtgtcatttcaataatcaccaccaataaaagagtaaagcgagtaagtaaaaccttattatgcatcaaaatagcacaaccaggctccaactgatccttatcaacgaaagacaggattccgacatagtactcaggcccaacggaggaggagacaatagcgtgattctcgtcgatgagctcttcgaggtttccgacgctcatgggagagcctcggagatcatcgaccttggatctgtcttcctcggccttctcctcctgcggcttgagtcgctcctgattcgccacgaactcctcctccatcagaaggtagtccttgatccgctccagcttcagaagccgcagtntgcacttcgtcaccggagtcact

SEQ ID NO: 152152 - DNA, 428 bp, Glycine max
  unsure (1)..(428): unsure at all n locations
ctcataagcattacaaacagnatttgatgtgctttcacttataggatcaatcactatagtgatacgatcatagcctttattaatgtatttaattaagtattcgattgaggtactcctggtgcaccattcaatattaatgtgagcttggtacctcagcaacaaccgtggatgataaggaatgacactatgggtatcaatagagacaccacctttaattgatggttgcccatattctattctttcgtatgtagtaaatccatcttgttcaataattgtttgtcgttggaattttctgggggtatacctagaacacttttcattattcatgcatggagaatatntattggttgatccacaatgaccatgaatcatgtgagttttaccaatcatgcaagtgttatcaattgggcatggatctctgcaaatat

SEQ ID NO: 152153 - DNA, 367 bp, Glycine max
  unsure (1)..(367): unsure at all n locations
tcatctagccaagattatacaaaggtgttacaagagaaactaacggtttctaattatgtgggccatcaaatctatcatgtgttgacagtaattgattagcccatgaatctcctcgggggccgaacacacttcggccatggcttttgctttggctaataaacgcgggaggtcttgacttccattcaaggcaaggcgaacctatccatccacatagtcgcttcttgatgcaatgcatcaatcaccctccctcttgcttctttntcggcgacacttgtgcaaaatcctccgctagcttatgttcatgggccacagactggttcaactcttccttggatagccctatgatagctaacatgctttgcttcgt

SEQ ID NO: 152154 - DNA, 476 bp, Glycine max
  unsure (1)..(476): unsure at all n locations
tcccgtatccgtacttggaaggatctgattatcttctttctaangcagtatcantacaattctgatatggctcctgaccgtactcaactgcagaatatgtttaagaaagagggtgaaacctttaaagaatatgcgcagcgatggagggatttcgcggcacaagtagctcctcccatggttgagagagagatgatcaccatgatggtagacactctgccagtgttctactatgagaagctagtgggttacatgccgtccagctttgcggatctggtgtttgccggggaaagaatcgaggttggattgaagagaggaaagttngattacgtttcctccacaaacgtgaacgccaaaagaatcggtgcaacaggggcaaaaaggaaagaatgagatgcccatgtcgtctcttcaacacccgcgtgggtcataccccagcanacacctcatggtacccatcagttcgcgcaacatcaccc

SEQ ID NO: 152155 - DNA, 400 bp, Glycine max
  unsure (1)..(400): unsure at all n locations
catgcaagcttgtagggttaaagactcacgatatttatttgttcatgcaacaattggtagccgtggctatactagacatcttgtcaaacaaagtcaggttcacgattactcgcctgtgcttattcttccatgctatgtgtagcaaaatgactgatccaattatgtttgatgagttggaaaatgaggccgcaattatactctaccaggtggagatgtattttcccctgctttctttgacatcatagattcactgtgattgtgcatcctggtcagagaaatcaaatgttgaggtcctgtgtatctacagnggatgtactccggtgagcgatatatgaagatcttagatgggtatacaagagatactatatctgttcggaagcacttattgttgttatggtca

SEQ ID NO: 152156 - DNA, 465 bp, Glycine max
  unsure (1)..(465): unsure at all n locations
ntagaataaaactctctctctatcttttctctcaactattcttcatctttcttcatctcttcaactctgttcttctcttttcaagctaaatttttgttattcttccattggtggtgactatggaaggctaaaaaactaatcaatcctangatctagttcaagcaatgaggaatttgagttctagttaagtatttcgaattctattatgaatgttcatccttttctccaattctattttcatattcgtgattctgaatgtatttaggattggaaatgaattatgttattgattaatttcctaattcaaatctaatcatagattaattggatgatctttcaatctgattnttgatttcaatgtaattagggattagttcgattgaattataatgagaatcaataaactntcttaatatgatcaacatctgtagcaaactgtgataattcaaaattgctcgaatatgt

SEQ ID NO: 152157 - DNA, 420 bp, Glycine max
agcttctgttttcaattacgagcgtctccatttattactggcctcaatccgacatcggagtaaaaagatattgtcgctagaatatgctcacagcttctgttctgaattttgagagtctcgatatactacggaacacaatcggacatctcagtaaaaagttattgtcgtttgaatttgctcagagcttctgttcttaattacgagagtctcgatatattaccggattcattccgacatccaagtaaaacagtttttgccggttgaatttgctgcaaacattcgttgtctattacgagcgtctagatatattactggattcattcggacatccgagtaaaaaattattgcctctttattttgctcagagcttctgttatcaatttcgagcatgttgatatattacaggactcaatcggacat

SEQ ID NO: 152158 - DNA, 468 bp, Glycine max
  unsure (1)..(468): unsure at all n locations
actaagctgtgcaattcaacgacataactgtatctcagattccgaatgatttccgtagnatatctagacgctcgaaattcagaacaaaagctctgagcaaattcaaacgaaaataactttttactcgtatgtccgattgtttcccgtagtatatcgagaccctcgtaattgaaaccagaagcccgtagcaaactcaaacggcaataaattttaactcggatgtccgaatgaatcccatgatatatcgaggcgatcgtaattgaaaacagaagctatgagcaaattcaaatgacaataactttttactcggatgtcggatngagtcccgtaatatatcgagacgctcgtaattgataacagaagctctaagcatattctaacgacaatatacttttactcggatgtcggattgtttttcgtgtatatcaagacngctcgtattganatcggaagctcgtagcaaattca

SEQ ID NO: 152159 - DNA, 434 bp, Glycine max
  unsure (1)..(434): unsure at all n locations
catgcagcatcaatgagaaagggtttttcttatngggacgngacgaagaaaatgataattatatgaaaatgtattgagaggaatgggaactgaaaatataaaaccccacatgttatgaagaaattaggcaccaagtccttaacggaatgatgcttgcacactgtaaccaatggtgcacattcttggttagtgcgactttttttagaaagttttaatatataagcatatgaaacattaccactgtattcacaaaccaagagataaactaaactttttaataaaataaaaaacaatttgtgagctctctgtattcgatgcccaagctaaccttcctgaacttaaatagagagagaaagcttggtctccgaggaaaatggaagttcttttatttctgcctctggtcactaacatggatggtacaattttgtcccctc

SEQ ID NO: 152160 - DNA, 461 bp, Glycine max
  unsure (1)..(461): unsure at all n locations
tgtcaatggtactgatntagatccattaagaatgaatctttagcaagagattgaggaataaagaatgataaggagaattggtgtgcaaaatatgaacaaaatgtgctcaatttataagttgaaaatatttattttttttaaaaaacagtctactgtaaatagactgaaaggcaatgacaatttttttgaatgccaatgttcagtgctccaatgttcatttcaacgttcaattttaattttttattttttattcttcaccctcacccttacctttntctcccaatcagaccgttggcttcccctctgcccttcctcttntntttctctntctcatntttctcttctcttctcttggggacccttcttcttcctttntccctttcttctttnttctcttaatctctccagagatcgttctcttacctttcccttctttttttctcttctctctcacggacatt

SEQ ID NO: 152161 - DNA, 432 bp, Glycine max
tgcaagctttttacatagtacgcctttgcttgaccttctttatgcttaaaaacagaaacattaggcgtaagcaaaagatcaagaggagttagtgggctaaaaccataaacaacttcgaaaggagaacaattagtggtgctatgaacagctctattgtaagcaaattcaacatggggtaaacaagcattccaagttgttaagttcttcctcaaaactgtcctaagcaaagttcccaaagtcctattaacaacttccgtttgcccatcggtttgtgggtgacaagtggttgaaaataacaatttagtgcccaacttgctccacaaagtcctccaaatatggcttaggaacttagagtgcctattactaacaatgctccttggaaaccatggagtctcacaatctccttgaaaacaaatcagcacatgggaagca

SEQ ID NO: 152162 - DNA, 465 bp, Glycine max
  unsure (1)..(465): unsure at all n locations
ngaccaggaattacttgtatgggtaggatgttgaattcttgttgttcctggtgcggagatgatggtacagcgggtgaaccanaagcggaagtttcttttggtgaggtagccatggaaaagcagagcgtttggaatgatttcgtaaatttcagaaggctattgggaaatgctggtaaaaacacgaatgccaagcagatattaaattgaatgaagaatgtagagggtcgtgtgaagcaacggtcgaattttccttggttcagtagtgaacgtgctattaatgttaagtgattcgtttgggcacgttcagattgctgtagttgctataattcctctagcacacaaatgcccagcttgcccctcagtttttcaactgatttgcatccaaagcctttgtgaaaatatctgctatttgttcctcagtgtcaacatgcttcagtgtgatcactttattatcaacaagatctc

SEQ ID NO: 152163 - DNA, 397 bp, Glycine max
  unsure (1)..(397): unsure at all n locations
agctntatcccttgaaaattgatgatttgatatttgccctggattcagctatggactactttccttagcacccttatgttcaatacgttcgataaataaatattttttttttgctatatgcatgagagtttcaatgctagttgtcacacaaatgtgtgacaccctctaccccacacatatattctaataaaggaataaaaattcaaatattaattaaaagtatggttaaaatattcttaaatacaagcctttcagatgggtaaaaggctcacattcactttcttctacatcatattcaaacttgtccatataaataataaagtcatatcggctcaaagaacgccatctaagtctcatacaattaatatagaactcatattctaatgtcacatcttat

SEQ ID NO: 152164 - DNA, 447 bp, Glycine max
  unsure (1)..(447): unsure at all n locations
taatcaattgaaaattgacggtgtgagattttccctgttctctactangggcaattntcattggcacccttaatcatgttcaatttgttggtaagtttaagtcttttaatccaaaaaaggtaacttagttaccatgtgagagtaatttggataaatgaaaatagttttggttgttatatgcatgagtatttcgatgcttgtttgcaacaatgtattataaaaaagtacctaccacatagagagtggctatgcaatttggaatgcatcaagaagtttcagattgtgtaattgcattgtctggcaccaaagctattgcattgaanaactactgcatatcgaanattgctntaaaaaattgcaaacaatattacttggcaaaaagcagtctnagctactctgtcatatggacctatgatcaaagcaatacaatggtatgatgtgatgtgc

SEQ ID NO: 152165 - DNA, 445 bp, Glycine max
  unsure (1)..(445): unsure at all n locations
gcttcttggcaatcctcattccagcgatcagttttggttttgcgtaagagcttgaacaacggctcacaaatggcggtgagctgtgatatgaatctggcaatataattcaagcgtcctaggaaacctcggacttgcctctctgtacggggttctggcatctcaaggatagccttcaccttttcggggtctacctctatccctttctggcttacaatgaaaccaagtaatttccctgatttgaccccaaaggtacacttagcggggttcaaccttaattgatatttcttaagcctttcgaacaacttccgcaggttgacaaggtgttcttcctcggatttagatntagcaattatgtcgtccacatagacctcgatctcttgatgcatcatatcatggaacaaagctaccatggcccgttgataagttgccccggcattcttgagtc

SEQ ID NO: 152166 - DNA, 488 bp, Glycine max
  unsure (1)..(488): unsure at all n locations
ctcagcttattaagagggctttagcacactccagatatcttctcatagatcccaacggtcagatcatggacaattttcttgtgaagttgcagaccaaatatcgagaagatccaacggttaacgaaggctgggaagcgtttttaccgaggtagcttcatgtagctttctctagaagcttcattaagaggcttcctccagaagcttcctcgtggcttctttgagaagctttctcaagaggcttctttgagaagttagatccttatctatccaaacccctctattaactaaattaacttccttaaaaataattatggatgaaaataacgcaacaaataatcaaacatcaaacataattactaataatatatatatatatatatatatatatatcagggggttacaccttccttcataatagtcacgaagttcttcacttatgctcttacaagagtcatgactactatatgtggcatgtgtntcttttctta

SEQ ID NO: 152167 - DNA, 319 bp, Glycine max
  unsure (1)..(319): unsure at all n locations
aaagaatgtgactcttcatatttgtatntgaatttcaacgttcacgcacactggtaatcgattaccaaaacattgtaatcgattacagcattttgaaatcaattggaacgctgtaaattcagttgaaagctttntgaaaaccattttgctactagtagtcgattacaaaaatctggtaatcaattaccagagagtaaaaactctttggtaaacatgttttgagaaaaatccatgtgctactcagtttttgaaaaaactctttcatacttatcttaattaattcttctcttgattcttgaatcttgagtcttgaatcttg

SEQ ID NO: 152168 - DNA, 470 bp, Glycine max
  unsure (1)..(470): unsure at all n locations
ctcagcttaacatcagatcacttncagggtactggaactacttcttatggacttgatggggcctatgcaagttgaaagccttggaggaaagaggtatgcctatgttgttgtggatgatttctccagatttacctgggtcaactttatcagagagaaatcagacacctttgaagtattcaaagagttgagtctaagacttcaaagagaaaaagactgtgtcatcaagagaattaggagtgaccatggcagggagtttgaaaacagcaagtttactgaattctgcacatctgaaggcatcactcatgagttctctgcagccattacaccacaacaaaatggcatagttgaaaggaaaaacaggactntgcaagaagctgctagggtcatgcttcatgccaaagaacttccctataatctctgggctgaagccatgaacacagcatgctatatccacaacagagtcacactta

SEQ ID NO: 152169 - DNA, 383 bp, Glycine max
tagaaatatgaaattaaaattgcaattatcacgaaattctgcgccccattgtatgtgattcacttgacaaaatatgcccatattaataaactttattttcatcacagagttccgaatctattcaaagcatatcttacgtactggtcagcaatgctcaaatgaaaattaattctacaccttcaaatattatgacatctcacgatctaatttacaaaaaagaatttaatcaatacaactaaaattaatattaatctcaagagaatggtggagtaaaataagaaaggatctcatatctgatgagtctatagttcaaatccatctttttagtgatatatatgataacttacttctatatgtgaggcttcgtctaaaaatttacctac

SEQ ID NO: 152170 - DNA, 413 bp, Glycine max
  unsure (1)..(413): unsure at all n locations
gctatcaagagtgtcccagcaattgcaatttaaattgacttgacttggaactcaatttttctgcaaacatgagttattttatttttctacttcatatctttgtttaaattacacatagaaatgaaataacattacacatgcatgtattgtcttgaaaccttcacggcaaatccttctttttaatgcattntttcaactgtcaaggtaaaacactatcttagtgtatggactgagttgctctctgaaatttaatttaaaaatgtaacatcttataattntaatatccacaagtcaagaagtactagacggaaattataagtcttgttcaaagagaatngcataatggttgaattttcatgttctcttatgttataaacgaattanatatgttcgtagttcatcatagatcatta

SEQ ID NO: 152171 - DNA, 407 bp, Glycine max
  unsure (1)..(407): unsure at all n locations
agcttgganatattaaagcccagtgtctttggtaccactatgccagtaatttacactaggattggagttaaagcatganaatattaaagctcaatgtctttaggaccactacgtggatggttgacactaggatttgagctgaggcataataatgttaaagcttggtgtcatttggatcattgtggtgccaatgatcgacagcaaagttggagccgaaacattattgaagtttggtgtttgatgtgccatcattttcttctattttctaaaccctntttgcaccattttaattactgattggtcttaattatcaattaattaggcagttttattattcgggctcatttagctaatttgatgttgttaatctaatttcaggaattaatgaaacattgggcttaatccgg

SEQ ID NO: 152172 - DNA, 427 bp, Glycine max
  unsure (1)..(427): unsure at all n locations
tcgattacacacatacctgaatcgattaccagatgagntttttctaaaacattctcaacagtcacatctttttatctgtntcttaaatggccatcaaaggcttatatatatgtgacttgagacacgaatttaacaagagttttcaagaacaaaaagggcttatcctcttaaaaagaaaaatagttttatcctcttacaaattccttggccaatacacttgtgattcaataaagaattatttgagcgctcaaattgttgaatctatctcttccaagagagatttcttcttctcttcttctttattctgaaaagggattaagagaccgatggtctcttgttgtgaaagaattctaaacacaaaggaaggatcgtccttatgtgtttagaacttgttaaaaggaattacaagatagtggaactctcaagc

SEQ ID NO: 152173 - DNA, 438 bp, Glycine max
cagcttcagacaacttgttgtaatcaatgactataactctgttatcgattaaaataaagaattctctgcttctgaagaattttttctaacttcaaaacttttcttcacactaaccatgatgatgcatgatgcactgcgcacatcaaatgccccatgacgcatctacctggatatcaaccagtacggatgcctctcatgggagctaggtatcacaacctacacgttataactccttcaatcttttagacatacaagccgatcccaatgtggcccccgtatttcccactacgcgaagccctatatacttatagttgcttagtagaagtcaatatttgaatttcatatatgctctctccctcaagctcattgatgagtgcgtttaacaccttattttgggagcaattagcttagcttttctttatgattcttggtgataat

SEQ ID NO: 152174 - DNA, 481 bp, Glycine max
  unsure (1)..(481): unsure at all n locations
tagccacagaggggatggaccttntcaagtcttngggagtatcaataataatgcctataggttgaaccttccaagagagtatggagtcagcaccacttttaatatttctaatttaattccttctgtaggtggagctgatatagaggaggaggaaccaacagatttgaggtcaaatcctcttcaagggggaggggatgatgcaatcctccctangaaaggactagttaccaaagccatgagcaagaggctccaagaggattcggctagagctgatgcgctttccaaaggaggaaagatgcgcagagtcgccaccaacgttgttttgtggataacgtcggataaaccgaatgaaaccggtcaaaatgaaaattctaagttcgagagttgtatttacatttgaagaaggtattatcacctctcacgtttgtctcanaggacaacaacctatttttagaattgtganatcgtataccttaacttt

SEQ ID NO: 152175 - DNA, 442 bp, Glycine max
  unsure (1)..(442): unsure at all n locations
gcaagcttntggatacatactaacaaacactaacttatgcttaatgactaacagaaagattgggggtgcccctaacttcctaacaccctgatactaaccctatcttcgtcccggacgagtcacgcactccactctgcatggcttcttttgtaatccttcaaatatgctggagtggacttctccctatgtggccttactctcgtttcttcttgcaccccccttgctatcggcacctcctccacatccttttccgtaacactcccgtgcccttcaagcaacaccttgtcctcaaggtggtgggtgctcttcaaagttgtccattcctcccataaggtctcttctggtggtaatccacgccattgaaccagtaccatatgcttgggccctgtcttctatggaatgaccttagacgccacaatggccaggggtgtgacaacatgat

SEQ ID NO: 152176 - DNA, 356 bp, Glycine max
  unsure (1)..(356): unsure at all n locations
gggagtaaatgaatgcacattttatctatatacaattgtttgttgcttgcttgaatcttgatttcaggtattgtattgtcatcatcaaaaagggggagattgtagatgcaattggctctgatgtnttgatgatgatcatgatgatgtgttgcaattgatgcaaatgggctcttcaagattaaaattcaagacaatacttcaagattacaagtcacaacatcaagatgatcactagaatattaggaagggaattcctaatngaattagcaaaggtctggccaagtgatctaaaataaaaagtgtgtctcaaaaggtttactctctggtaatcgattaccagatgatgtaatcgatta

SEQ ID NO: 152177 - DNA, 440 bp, Glycine max
agcttacccaccatgtactaggaagtttcttttttattaaaaaacggaaaagccagagttaaattctaaatctacaagagtgtctatgaaagttacgagaatgtctatggaagttacgagagttaactttgactagctccttgtcccaaccagctttgcatacaaattcctcacttgctctactataaaaccctccatttatagttgatgatcctccaagaactgtttctcttaaaggaaacccttggaactaagccactaccaattgtacgaggaatgacatatattctgcttggtgaatatggtgcatacctttaatacatccagtattataaatgcaccttcaaaatttaacttccactaatattaacattgggtttgattgatttctaattgtctaacatttctaaaaaatacacatttaaactaaactgttcaaa

SEQ ID NO: 152178 - DNA, 405 bp, Glycine max
  unsure (1)..(405): unsure at all n locations
cggcgatggtgcanaacaattctccacatccacaaatcacatataaacccaccatcccctgttgtccaccttcaacttagctcacgtactcccacgtagcccttatcctcgtttctcttaacatcgggtccccatcaatcctcccaagcttccacaacatccaagtaatttaacattcaatcatcacaaactaacacagccaagaaaacagggcaaaggcagataactctgcccaaaacacaaaccaatatcacaacttttcacattcaaataccccagtaacattctcttcgttccagttcgttaaccgttggatcgactcgaaaatttactggaagctatagacataagatacatttgaccgtgggactgttgcaatgtcagaaccctatgtctacctttcac

SEQ ID NO: 152179 - DNA, 415 bp, Glycine max
  unsure (1)..(415): unsure at all n locations
agcttnttatccaaggctcatctaggttggtttgcttcttcttccatggcttattccttagtggatggcgcctcctatcacctcttctcctttgtcttccgctgcttctccatggtggagaatcaccattaaaagacctcattgaagctcatagatccagcctccatagaagccctacaagcaagcttcgatcagatcggttagtttttcttaaggattggatgcaatttttgtacccttatgcatcccttctgatattatatatgtgtgaatcttttctactcattattggcgatttcattctacttgtaatgcttgcttctatttgatcactagtgtcatggaattggattttgagtgaggctagaaagcaatcttagaagttgaatggaatgactttactctctacattatg

SEQ ID NO: 152180 - DNA, 434 bp, Glycine max
  unsure (1)..(434): unsure at all n locations
tataagaacgaaatngcctaaatcattgccaaatatgcatgtgaatnttcttgcaatcaatggggcaaaacacaccaaaagattatgatgatggatggctcgaattctcacaaaaggtaaacttatcactttcaaattgagctttcaaaactatcatgacatgtaaaggaaaaacaagggattcaagtcacaaaatgtcaagagacttttattttcagaacaattacccattacttgaacatatcctataattcaaagacaaacatgcaaatttaacacaacaaaactaacaaaattaaactagaacccaacaaaactaacaaaattaaactaatttaacacgactaacataaccataaccaaagaacacactcccccccatacttatacaacacattgtcctcaatgtggcacaacttaaagattaatagcat

SEQ ID NO: 152181 - DNA, 442 bp, Glycine max
  unsure (1)..(442): unsure at all n locations
agctnttctatctcaatcaacttgtctattgactaacaattctaattgcaagttcacattcttgttccttctttgtctaacatacatacttgctcaatcttatgaaaagaaacacaaactccatcataatcatgcattcaaaccaaaatcaattcatacaccaattttcacaaaaagataaaagtgtttcactaccttatcatcaaaatcaagtcaaactgttccatatgcttcaggataagcataccaactaaccataaataaaaacatcagtgtatataaacattaaccaaaatcactaaaaactaatgtacttaaactataatcataataataacaatccaaaaagcataatcagaaatttagaattcttgtgactggtcctatgtgtcttgtgtctgaacatccttctcatctgtcaggtgaagtactggagtagctg

SEQ ID NO: 152182 - DNA, 204 bp, Glycine max
  unsure (1)..(204): unsure at all n locations
atcatagattcaagggttcatagatcttcaagaatcagagatcnaagattctaagaatcatagagaagggcttgaatcaagatagagtatgaaagaatttttctcaanaaattgagtagcacatgatttttctcacaacatgtttaacaaagagtgtttactctctagtaatcgattaccagattgttgtaatcgattaccagt

SEQ ID NO: 152183 - DNA, 398 bp, Glycine max
  unsure (1)..(398): unsure at all n locations
ttgangctattgatgagtatgttgttggtcaacttaaggaatttgagggaaaaaagttggtctttactaccaaggaaggcctaaaacaagtagtaatccgtatgcacctataatatatagggactttcaagaatgaagattggctgcttaacttctaccataccctcagaaaaggtaaaaaatgttgatattntagctgaacgtgaagcgtcttggtctcaacatgttttaatgttggagcactttcccatgttcaaatgcttctcttggaagctgtaaattctgctagttgtgctgcctatattgattatgctgaatgaacaaaaaagatgacacaatatttttattatcattatttataaaatccattatattttataattaacatatataaaaaa

SEQ ID NO: 152184 - DNA, 387 bp, Glycine max
  unsure (1)..(387): unsure at all n locations
tttccaaagtggtcttcggcattacattttaactcgattctttgtcgataagtacctttgcgaccacgtggtccatacatctcaccgacacatgtagaaccttggtgtgtcctttcccctcaacgggaatctcttctttcataaacgcgatgtagtttgtggtggttatatgattaacgatgccttcgaaacccttcactgagatatcatgtgctacatggccatcgttaagaaccttcatcaacagcgcacgatgaggctcggagtttatgagtagttctagcaaagagatccttgctggagttttattcagttgctcgactaccttaaanctcgctttgtggatgaagcgganngaactcatgggcctcttcaagtcacgggttt

SEQ ID NO: 152185 - DNA, 328 bp, Glycine max
  unsure (1)..(328): unsure at all n locations
ttcctcctggatgctattagcagcggcatatttactatgaacacccccctgcctttatgtggagaatttttttgatagaggtacggaaacttacgacgtttgcaacgatacttggttttttttcgtaatgttacggaaccttgctgtatacataaacatcncctttttgactgacggaatgttacggaacctcactaattgtgcaacgatgcgttcatttgatttctggtgtgggacggaaccttacggattgtgcattaatattgttttttgttttccgcatggcccgaagttcacaatttcctaatgatgggaggcagcacctaca

SEQ ID NO: 152186 - DNA, 414 bp, Glycine max
tatctccctccttgaaccctgtggacctgtacaactcctcctaccttattcctatcttgacataatctggtctttgttagtcaaagagcattttacacctatccacccttccataaccatttgtcaagtgtagctgattgatgttcttatgacgaacaatatattaaaatctttatgcaagtccgatagaatctgacaatgaacaaaacagaaaatacacatcataattattgtcaaagaaagtacagtgcatacaaatgcatgatttacaatagcaacaaccacataattaataacattagtaaagttaaagatggtgactcacaagatactgattattgtgtcgttaggcagaatatctctgaatttgtcattaatccacaccaaaatctttcaattaactgaaattcacta

SEQ ID NO: 152187 - DNA, 435 bp, Glycine max
  unsure (1)..(435): unsure at all n locations
ctctcacggagtagatcgctcagtggtatgtttttctatccaagnttgatatagtctatgtcacccacaaggagataaagggaagcaccttggcggactatttggctcagtagcgtctcaatgattatcaacccatgtatcccgagttccctgatgaggacatcatggcctcatttgatgagaagctagacaaggacagggacaagtggatcgtgtggtttgatggggcgacaaatgttctaggccatggcgtcggggcaacattggtctctccggacaatcaatgtatacctttcacagccaggctggggttcgactgcaccaataacatggctgaatactaagcatgcgctctgggcgtccaggtagcaattgacttcaacgtcaagctactcaaggtgtacggagactcagtgctggtgattcaccaattga

SEQ ID NO: 152188 - DNA, 423 bp, Glycine max
  unsure (1)..(423): unsure at all n locations
tctagtgtattattccccctctcataatacaggtcacagattaattaattccttcaacttttggaatttctagttcatgaaccgaaaatcctatgaccacagtttataaaaaagaagaaaaaaacacgtctaattataattattatattcaattataatttatttatttattaaatatgatcataattatgaaaatatttaaattatgacctactgggtttctgttaatataacagagtaggcatcaagtatttaatccaagttttatgggctggtgggtcaacgcacaaagcttgtgttatangaagcttatggtgtatttaatccaagtcagaaaataaaaaatattaattatttttcaacagtatttntctcattgaatattgttgctcctaaatattaattaattcgaaactataatat

SEQ ID NO: 152189 - DNA, 169 bp, Glycine max
tgactaacaaagattcaacactgaccaaaatatgcgggccaaaagcagggggcgactttaaggaaaatgatcctgtgtggacacacagataatatccggagcaccatccagcgggaccatcactggaatacctataaccaatgcagttttgtaaaatgttaaaaaaact

SEQ ID NO: 152190 - DNA, 418 bp, Glycine max
agcttggttcgaggtacttacccgttgaagatcgattaacgatgaagaacgaatgaagaacgtcgaagaacggttgaaacctttgcgaaattcttcacggaaaacgttacggaaacgtttcggaagcgcctcggcttaaattttcttcacggaaacgattttttcaagcaaattcgaaagagagagaagtgccaaaggggctgaaccccttccttcttcatttcctcccctatttatagacaaataggggaggtgggtgccgcccagctcgcccaggcgagctcagctcgcccaggcgagccaggttgcttcctccagaagcaacagcctattggaggaatattctggagggcccaagtgggcctgggtgctatttgcacccccatttttactaagtacaccccctctgctgtttttt

SEQ ID NO: 152191 - DNA, 445 bp, Glycine max
  unsure (1)..(445): unsure at all n locations
agcttcaggtcatgtttatacattggacgtttattgtcaagcaactgacttaaaaaatataacgttttatatctattgtattgaccaccaatataaaaagttctaatttatgtcaaataattaatagatctgatggaaaggatataattctttcctttaaaataattgagagattaaattaaaccttttaataattgagggatcaaattaagtcttaatataattaagggatcaatagtatgattaagcctaaatttaatgtacatagagataaggccaagtctcattacagtacacttattaacatctcaaatcatcttatactgntttagggattagaaatgctaaaaaaatattatctaatatacttttttgaatacactctgttttattgcttgaaatttatcaaagaaatggcatatcgtataggtcccacataaataat

SEQ ID NO: 152192 - DNA, 479 bp, Glycine max
  unsure (1)..(479): unsure at all n locations
tcatccaactcanacatggaaagaagacagtatataccttgcatcttatatttctcaaacattatcatccatattggcgattgaaaaaatcttttgatggaactcangaaaatgaaagcgccctgaatccattagctggcaaagaagtttatgattgagtaaaggacttcataactatctttgggaagacacaaaaaaaaccatcatttgatgcaaacatatggaagaaaaggtcaatattctttaatcttccatattggtccgatcttgatgttagacattgaatagacgtcatgcatgtggagaaaaatgtttgtgctactttaattgacactcttcataacattaaaggcaagaaaaaggatggtttgaagtgtcgtcaagacttggttggcatgggtatacaagaccggttgcattctatctcacaaggctcgcgatcatatctaccctcagcatgttacacaatgttaacaaaa

SEQ ID NO: 152193 - DNA, 448 bp, Glycine max
  unsure (1)..(448): unsure at all n locations
agctatgaccaaattgcaattgcagttttttctttgtagactcggcgaagaatttggtctgccacactcaagatgatggcactatgtgctttgtcgagcaagatcttcttttctttaccttacatcttcacatcaagattggttccaccattctgagcatcttcaagaccttgatgcataagaagagccttcatctttaattgccaaagactgaaatcattatgtcctgtgaatttctcgacttcatactttgcagatgccatggatgttcggtccacgctctccgcaccaagttgttatgcagagtatcacataaataatacacaaaaatcttagaatttatttaatcagatgagtctcaggatacaaggagctnttcttgagagatttgataaagaatcactcacacactatacagtggttgagctatttataaatggaccactca

SEQ ID NO: 152194 - DNA, 466 bp, Glycine max
  unsure (1)..(466): unsure at all n locations
actcagcttagaatttgatgcataacagatgaatgttaaaatattcctttcgaanaaaccaaaaatcaaatatatcattatttcatcttcattctttcaaataggaaactaggagtttcataattnttccttatttcatgctaaatnttgatctgtggaagcacatttgagaaaagtattagttttcctaaatacacctgttaacctgagagttttttttttattaatagaatgacagtgtgcctttaaacgcctttaaattattaacaagaactagtataacatgctatacttaggtttaatcaatggatcatagcctaaaacctccattagctgaagcaggacatgtcacactttagaactagtaattatcttacacttataacacacactatccatgggtcaatagttaggctaacccattatattcttctacttattctatgtgagcactttcaagaatatc

SEQ ID NO: 152195 - DNA, 449 bp, Glycine max
agcttcaagaaaggcccaactcatgtccattttctgatttcaggcttaaataggtggctgtgtttgtgctagcgcgcttatcacgactatggaccgctcaacacgcattagtggatttcggcttatcacgtgcttttctcgctcagtggatggactgaagcggtgcgctcagcgggatgacccttcactcatcgaacatgcacaactcatccttcttctagattcttcctcgcactcaaccgaggagtgttgcgctcagcggatggctcgctaagccagtagattggcttagcgagaggatgaaaatcaacacttcacaaacttgcctaattaacctgaaattgagaggaaatgattattaaacacacaaaattgaaatactaagtatttattacctatctttaacaaaaagtatttatgacacttacaagataaccgggagttggaag

SEQ ID NO: 152196 - DNA, 424 bp, Glycine max
  unsure (1)..(424): unsure at all n locations
tagctccaaacgcgaaggtggaggacacatgatcagctctangcaatgtcattcatggtgctccgaaaaagggggagaatggagaatctccttgagggtccccacttaggcaatcatgaaacatggctccaaactcgaaggtggaggacacatgaacagcgctaggcaataacattcatggggctccgaaatagggggagaatggaggattgccttgagggaccgcacttatgcaatcatgaatcatagctccaaactcgaaagtggaggacacatgaacagcgctagcaaataacattcatggtgctccgaanaaggtggagaatggagaattgccttgagggtccgcacttangcaatcatgaaacatagctccaaatcgaaggtggagcacacatgaacagcgctgggcaataacattcat

SEQ ID NO: 152197 - DNA, 367 bp, Glycine max
  unsure (1)..(367): unsure at all n locations
tgtgacactattatctatgtgnatgtgtagcgagtcatcttatgtgcaatcttgttattgtaatagacttactgacggaactagttctatttttttaattgctgtgtgttgaattttaggttctttaagtttcgtcaagcgtttactatgttcagaaataactcgtttttggtatgtataaacttttacttgtatttaggtcacatgaatgtgttcttataaattatttagtaagtatatattgtatgattatgattaaatgatgcatcagtagcttcacagtttaggaaaataactctgttctatgttattttttacaatagttcacttctgaaattcaacttgctagttaaatttacaattgatc

SEQ ID NO: 152198 - DNA, 443 bp, Glycine max
  unsure (1)..(443): unsure at all n locations
tgcatattcagcctgacgagggatcgagagtttattattttanggnacaacataaaatacaagagcacgattgattagagaaatatatttctatgcatcagcttgtttgttaaaaagacccaacatatctacctactgctatcattttatttaccttagcatttatagtttttagcatacaagtttagtttaaattttgtttgaaattatcacttatacatgttctctcaacaatgctttgattctaaacctaattcaggctaacattagttccttgtgttcgatacttggattcatccgttctaaacctaatccagtaaacccccattgaaatttcctcgagacataaatgcacaaaaggtaactgcagtgtggattcatcattgtggatcatacaactctattgcaccataatgtcgaactttcttgatgacgaaatgtct

SEQ ID NO: 152199 - DNA, 440 bp, Glycine max
  unsure (1)..(440): unsure at all n locations
agcttgaatgctctattcaatggagttgacaagaatatcttcagactaatcaacacatgcacagtggccaaagatgcatgggagatcctgaaaaccactcatgaaggaacctccaaagtgaagatgtccagattgcaactattggctacaaaattcgaaaatctgaagatgaaggaggaagaatgtattcatgacttccacatgaacattcttgaaattgccaatgcttgcactgccttgggagagaggatgacagatgaaaagctggtgagaaagatcctcagatccttgcctaagagatttgacatgaaagtcactgcaatagaggaggcccaagacatttgcaacatgagagtagatgaactcattggttcccttcaaacctttgagctangactctcggatagggctgaaaagaaagcaagaatctggcttccgtg

SEQ ID NO: 152200 - DNA, 456 bp, Glycine max
  unsure (1)..(456): unsure at all n locations
tcanagaagtttatacaagaacataaaggataagggaattcgatgaattggaaaacacaacttttgcgcaaaagattaataggcctaactctctaaaaacattccccattggattcgccaactgtcgcaacctaccctttggcgggagggtgacgcgagggctcacaggtgcgtcttccaagggaggaaggcacgcggagtcgtcaccaacatttatttgaggaaaacgttggaaaaaccggaaaggtgtagtctacgaactttaatttgcgaaaggtccgggagttgtttttacgcacggtgaaggtattagcacctcacatgttcgtcacaagggacggcagcctttaaccaagtgtgcaatatcatgtctttgatttgattntttcccttctttgcgttcttatggtcttttatgccttctggattttatctttctggggcgacagggtattt

SEQ ID NO: 152201 - DNA, 395 bp, Glycine max
  unsure (1)..(395): unsure at all n locations
ctcagcttggcatacagtcaaattacaattgaagatattattgttctttccgaattcatgagggttgatgttttttttttggttaagaattgaactttgatctattaagtttataacgacttgcacattgcccaaccgagttagacatctttgatgggtaatgaccaccaacgaaaattgtttcttcataacaaatttctcagtttaatatgatcttgtcgttttgctttcttttgttaagaaacgaatcanggcctctactgaaattgcattgacgggttaccaaattataaattgagcttagctttattttaattcaaaaacttgagttgattgcataataatcaaaatcttaatcacgtccgagttgaattttgccttaccatctaaaacat

SEQ ID NO: 152202 - DNA, 384 bp, Glycine max
ctctgccaccattgtgactgaaccggcacaatctaacaattcactcactggttgagacaacatgaagttggtggaagataggtaaattaatgaatcacataattatattgcagaatcaataaaccatgttgatccacaacaatcattgtaatagtacacttgtacataaccgcgtgtaaactagtaaatataaagtgattttcttttggaaggctgccatgtttgctggggctggaaacatagcttgactcaatgatttattcattatcttttttccagattgaatgttatcattctaattgaattatgcatatttccttttgtgattaaattcattcttccttgcattgaaattaaaagagaaaaactgaaataatattggat

SEQ ID NO: 152203 - DNA, 390 bp, Glycine max
  unsure (1)..(390): unsure at all n locations
tgttctttntataaaatgagatattctggactcatttctttatctaaaaatcttggggtggatccaagtgctccgatcatccatttgtatactcatgttttggtggcatactcaccgttgtttatttctttaggaatttcatcataactaagaaaacaccaaggcacccctataacacttgatccagaaaaatggataatgaagagggcgtgcaggaacagatgaaggccgatctatcgaccttaaaagatcaaatggcttccatctcggaggtcatgttaaaactccagaaaaccatagaggataaagccaccgcaaccgcctccagtacagttagggaagcggagccggtgctgcagcccgccttgaatccgagcctagacagaaaca

SEQ ID NO: 152204 - DNA, 433 bp, Glycine max
  unsure (1)..(433): unsure at all n locations
agcttctgatatacttaatgctcctctctttgctgcaaaatggttaacctatgctntagagaagtcaggtcaaccttcatgagaataagctaattacaatactttttattttctctttgtgcagccggacaggaaaggtttataacacttactagttcatattacaaaggagctcaaggaataattatgggtatgttgtatttccaaattttctcctttacttgttgtcttttcaggtagctatcccatgaatgtgatgttcacatcttttattgtttgtttaaagtttggtatcttgttaagctgtaaatcatgcaacatggtattatgtagtttatacttatttctattgtatccctttcaaatttattttataagaatatagcaatatagtctggtgcatgaggcatcattttgttaaataacacattta

SEQ ID NO: 152205 - DNA, 437 bp, Glycine max
  unsure (1)..(437): unsure at all n locations
tatatgcaatgtggtaccatatcaatgataaatgactgttgggtgcttangagtacataacaagacataccacacaatgagtatgtcaggtcactctcactaagtaaaatcacaaggtgaccagtcaaggtcactctgttttgcgagaatgctccaaccatataggatcaacatagacttaaaggagcactcacaccaagtctctttacccctaaggcctagacttcgaaaaatccgttaaggcctcaccttcctgattcaggtccaaccccttaaccaatttttgcacgcagatactgctaatgaattatacaatacccatgacctcacactcgtgttacaaacacgtttaacacactacactacaatttaacactntaggttcctaactaggaatcctacactntccctttaacactgtgcataaacacttttct

SEQ ID NO: 152206 - DNA, 392 bp, Glycine max
  unsure (1)..(392): unsure at all n locations
gttttttataaattgaaangcgctctatcacaggcccctgttcttgcattgccggatcttaacttaccctttcaggaggataccgacgcttccggggttggaatgggggcaatgctttcacaactaggcctccccattgctgtttatagcaaaccattcactgctaatcttctaaaggcatctaccaatgtgcgtgagctatttgcctcaagcggctgtaaacatggcggaatatctcttgagcttcgtttatctttgtcacagatcataagagccttaaggaattgcttactcaggctgttcaaacccctgaacaacatacttatctagctcgattaatggggtatgaataccaaattgtgtatcgctccgtcagtcattatcaggccccc

SEQ ID NO: 152207 - DNA, 470 bp, Glycine max
  unsure (1)..(470): unsure at all n locations
actcagctgacgatttggtgcatcgggaacaattcactttatagtggtgtccaantggtattcctaatttcaacttacctattggaagtgacatcatggcagttaggtcccagcttttcattgtggattcagtcaccaaacatacttaaatatgttggactatctaacacggggaatttcgattctattcccacttggttctgggaagcacattctcaggttttgtatttaaacctctctcataatcatatccgtggtgagcttgtgactacaataaaaaatccaatatctatccaaactgttgatctaagcacaaatcacttatgtggtanattaccctatctttcaaatgatgtgtatgacttagacctttcaaccaattcattctctgaatccatgcaagatnttttatgtaacaatcaggacangccaatgcanttagaatttctcaatcttgcatccaataatct

SEQ ID NO: 152208 - DNA, 407 bp, Glycine max
atgcaagcttgacaaccgaagaaaaccgtgttgacctacttttcaggaggtcagggtatgtggctggaattcaattaatattattgttgctgcgctcattgggttttgcaagaagctctgattgttatcatatgattgaaaacttttatgcataaaattggttacaatgctttatattttgagggtaatcatatatgctagtgaatggtggctgcctttatgaaacaatatgatatttatgagaaaccaaaccgataagttaaagctattttacttattcttacaacttgatttatttgttctgtacttctcacttccatattgttggtgtctgctcaagcatatattgacattgtgacaccctctaccccgacatatatatatatatatatatatatatatatatt

SEQ ID NO: 152209 - DNA, 415 bp, Glycine max
  unsure (1)..(415): unsure at all n locations
tcatgggccattntgggatagacaagacccttgtcttactcaaagaaaagttttattggccccatatgaagaaagatgtccttaagcattcactacaagaaaaatgacctaagcctacgggcgcnncttttctacagacattaattagtgtagataaatctcaaaaatacttctacctacaagagactaatgtatgtaaaactcaaccatttgtaccaaccattatttggtgtaagtaaattcattaaaactggaaaaagacttctacctacaattacattgtgtatgtaaaactccaaaatacttgtgcatatggttgattagtgtaggtgaaacgcatnaaggatactatcttgccaaacacagtgtaggcaaattctaaaaactatacctacactacatgatgtagataaac

SEQ ID NO: 152210 - DNA, 421 bp, Glycine max
agcttctctctttctctcctcttttcaaaaacccaagcttgaagacccatagttaaggggaagcttaacctttcttttgaatcctatgattgagtaaatgcttgaatatgacttgtggattgtatggaagttgtgctttattattattatttttgttttcaaagttaatgttttggtgtgcttggggatgattgggaaccaaaagttgcattagaaggaattgtttatactaaactcgaaaaactacaaaattgcaatgggcaacttaagcacgagtaaaagtaagcttaagcacgacgagcttaagtgcgatttcactcatgcctaagcaccaaaaccaaagaagaagagattgaactctagatttcgcacttaaacaagaatagcggcacttaagcgtcagacctactataacttgaat

SEQ ID NO: 152211 - DNA, 383 bp, Glycine max
  unsure (1)..(383): unsure at all n locations
ggctctccttctgtgtccagcatcttgggatgttcccagcctttgatgacagttttccaggttctgctatccagtgatttgaggaaggccaccattcttgctttccaatattcatagttgcttccatcgagaattggtggtctgttcactggtccgccttctttctccatgttcatcagaatttatctccctagatctcactctgtgatttcgagtgttggctctgataccaattgaaattctgataccacgggacagatgtcgtacaggatgtcacgacatcacgcttcagaacatgcagattatatgtgtccgtatgaacagattanacaagtaaataacacaagagaattgttacccagttcgtgctacctacctacatc

SEQ ID NO: 152212 - DNA, 429 bp, Glycine max
  unsure (1)..(429): unsure at all n locations
caagctttggaaatggtgatgatgcctttgcctctgtattatcattaacaaattctgcaaaaaggaccgaaaaagaagaaagacaaaggattcaagaagggcaaagttgatttaaaggatatttgtaattactacaaagaatctggtcattggaagaaagaatgtcctaagaaaatcaaggaagattctattgcagccattgttcaaagtgatttctcattagaagatgatttggtactctcggttgttgatcaacaacaacatcactttgaacaatgagtattggacttaggttgttcttatgatatgagtccacaccgaaattggtttgtgataaatgagaagaaatctgggtgtaatgttctgatgggtggcaatgctccttgcaagacagttgggataggttctatacaaatcanaatgcatgat

SEQ ID NO: 152213 - DNA, 471 bp, Glycine max
  unsure (1)..(471): unsure at all n locations
aactcagcttcatagttgttgcatntcagtattactgtctcttatagaagaatgttatgcatatctngcattggatactngcttcattgttgtagaactgttggcattgtgcttcttcaatgttaaaaagaatttttgatttgaccattgactttgtcatatcaacaataataatcttctcatccttagttagttgactagcatatggatgtctaactactgacttagtcaatgcatgattataactcccacatattaaattcaccacccatccttcacctccctccattagttttgctcgcagcttgaaggggcacccatattttttattatcagtaattgtacgtactaaatctttcatgtatgccctatantttccactccttgcacaaccaattaaaatatgaggtccttcctctanttctagtatntatgtctaacctcataatcattgccataaaaccaatatca

SEQ ID NO: 152214 - DNA, 416 bp, Glycine max
agctttaatgatatggtcttcaccaaagaattgatcttaatgggtctaaaaagaggcaaatctgatcatcatgctttgataaatgcaaaaaaaaaaaactatggcaaatgaagagggtgagaatgaaggagaggaccatgctgtgactgccattcctatacagccaagtttcccaccaacccaacaatgttattactcatccaataaacaaaccttcttcttacccaccgcccagttatccacaaaggccatccctaaaatcaaccacaaagcctacctaccgcacttccaatgacaaacaccacctttagctgttaccaaaacaccaaccaagaaatgaattttgcggcgagaaagccctataattcactccaattccagtgtcctatgctgacttgctcccatatctacttgat

SEQ ID NO: 152215 - DNA, 381 bp, Glycine max
  unsure (1)..(381): unsure at all n locations
actaacttgaccaaatctactaccataaccttgaccatttgagtttgtaacccttaccctcggaagcaaagaaagaaaagaaaggaaattcccaatcaaagagtgggagaaagcaaaaggaaaataaaggaaatttccaattcaagagaaagcnaaaagaaaagaaagaaaattcccaaccaaagaatgggagaaagtaaaaaagggaaaggaaagaaggttcttgatcaaagaaactagaagaaatgtgcagaaaggtcttttgaccagacaatatctgaacaatacagaattgtcaccaaatgaacaaaagaaagaaaaggaaaccatgacctatagtggtcttctccctctgattaccaaccaaaatcctgtgcgtcg

SEQ ID NO: 152216 - DNA, 436 bp, Glycine max
  unsure (1)..(436): unsure at all n locations
agctacntatccaaagctcatcatggtggtatactccttcttccatggcttattccctagtagatggcgcctcctcttacctcttcttcttttcttccgctgcatcttcatggtggaaaatcaccattaaaggacctcattgaagctcaaagatccagccttcataaaagccccacaagcaagcttccatcaagtggtaatcagagcacaagagcttcaaggaggtgctccttaaacctccattaattttttgctttaccttctcttccattgttgattcttcattattctccatgtatctcctcacatgtcttgtgataaatgtttttaacatgattctttatagtttccactgattaaacttgctatagaagctaaattagattttctatggttctagattcttggtcttgttcttgaaccatgaattgtgttg

SEQ ID NO: 152217 - DNA, 425 bp, Glycine max
  unsure (1)..(425): unsure at all n locations
tacggaactatgaaactcagcttnagggacacccatttctaggcctgcttctttcaacaaatttntcttttacactgtactgaccgtcctttacacgcaataacataaatgaagttttcctctactaccagatatgtatcagacctcataanactacaacaaaccgttttatggcaaccgttcgagccactgcaacacagcatctcgggttgaaagacctacaatgaaccccacatataattttacacaatcatactttaccaaacgactanattatcaacatgattacctgagaagataaaagcgttgacaataacatgtcttattacacacaatgtgtcatttcaaatcatataacttttaacccgatgtatacccattgatctgcatttaataacatagtatacgaatcacattcactaaaa

SEQ ID NO: 152218 - DNA, 441 bp, Glycine max
  unsure (1)..(441): unsure at all n locations
agcttcaaaactaactactgatgatttttttttcgatcgctaaacaaatatatttattaataaaagggcacgagaaattcatacaccataatgtcagtgtgcgcactcacaccataaacataaaatgatgagtgtgcgttctaattatcaagcaatatataatataatagtatgtacgtaatatattaccactcaatgagaaaaaccaaactacttacaattgcttttattttgtaagtgaaccttataattggtacttctagacgattaaaacgtaaacacaatcatatatatatgtaacatcccaaaatatatattctataggtctgaaagttctctatgatataaactatatatatttataacatttcatatttaattgaatccttctattattaccgccangatcaatgtctaaatattctaaatacatatatttat

SEQ ID NO: 152219 - DNA, 339 bp, Glycine max
aatctgcacctgttgcaagagtctgtggtctatgttcttctgcagatcaccatacagatctttgtccttctttgcagcaatctggagtcaatgagcaacttgaagcttatgctgcaaacatttataatagaccccctcagtagcaaaaccaacaacagcagaataattatgacctttcaagcaatagatacaatccaggttggaggaatcatccaaatctgagatggacaagtcctccacatcaacaacaacatgtgcctcccttctagaatgctgctggtccaagcaagccatatgatccgcctccaatgcagcaacaacaaagacaacaagcaactt

SEQ ID NO: 152220 - DNA, 426 bp, Glycine max
  unsure (1)..(426): unsure at all n locations
agctnctggtatatataggccgtttttaatctatgtaatggtatatctaaacggacatatgtcctctcttaagcttatgtctgaagaaaatggacgttggggcattaaatgtgtgcattaaatgcatgtactgcttcatgttgagaaaccactctttgtcgttggcatgttgaacactacaacaagaaatcacttccttttacgtcaaagaaggtttgtgcaatagaactcttcttttaatggcgtgaatcatgtatgttttgatgatgtcgaaaagaaatcactctattgtcatcatctaagaaggggaaaatgtgaatgtatgtatacatgattttgatgatgtcaaagaagaatcaaacaaggccatttcaaaaggataagcactgcttccagattaatacaagaattgttcaacaaacaaag

SEQ ID NO: 152221 - DNA, 365 bp, Glycine max
agctagagattaaacaatcccatgtagcattggtagtacaattttaggtgctagggcccatgaatcaatttttgtacaaattggtaggattaaattacgttgtgtaatgtgtttaattggacggttgaattgtgccctactactatatgttgccgcgaaactcgctcactgtgtcgaaacacgtaatcataacacgaatatagcattcttaatcgactcgaattggccgaacacaggtacaactcgatgatgcttgtcttcgatgccaagcttgattgtcgactttttgaattaatcagtgttcgttgggagaaatcaacttccacttgtccactttggtttggagtgggtggtcctgacatgct

SEQ ID NO: 152222 - DNA, 452 bp, Glycine max
  unsure (1)..(452): unsure at all n locations
taagtcacctgcggcatgcaagcntgggctacttacaaggggctcctttttctcttgggaaagtttgattttggggaagaatggggtgaaaatggcttcacccccaccaatttcaattttttnttgcaaaaaagatcctttgcaaaattgcgttattcattggtatattttctctctaaaaatcctatatttgcatataaaattaggcgaattcaggatataattcaagataatgaacaagtacaaaacatgatattaaagagcaaagttagaaatactaggctgcctactaagagtgctttcttaatgtctttagctagacgtagggtgatgatcgatcgatcactggcctaacacctgttcgtacctgcccctaaggtggaacaaagaaattggcatcatgcaacaaatgtgaaacaatactacaagatgcttgcattacctttcgctca

SEQ ID NO: 152223 - DNA, 448 bp, Glycine max
  unsure (1)..(448): unsure at all n locations
cgcttgaagaaaccttgtagtgaggccaacaacaacaatgtctgctcctcatcagagaatttatcatctgcattcaacagttgacttactagccgattgaacttgttgatgtggtcatggagatctccttccatctctattntgagttgatacaactccatcttcaaacataggagattggttaacgactttgacgcatagatattctcgagcttctcccacaaggccttcggtgttgtctccttcagtacattgtgttttatcttgggagcaagggctaaccgaatcgtgctcataacccttctttggatcttagtccactcggtttcatttatagaagccgacctctcatcttctagcgctggatcaagaccttactgcatcaaaaggtcttgaataataactttccaaatcataagatgtatttttccgttaacaaccgtatctc

SEQ ID NO: 152224 - DNA, 406 bp, Glycine max
  unsure (1)..(406): unsure at all n locations
agctntaggagaaaccatgtaaacttatgttgttcctaaacaaaaatcaattgagggagcctcgccaagtgtccccatcgaaattgaaaaacctttattcaaacctttcaaagttagtgagaaggctaaacggaaaattagggaacttagaaaaactaaatccttaactgaaggcgtaggtgacaatcatagtgaattactaaacaagattggtagtttacttaaggtcattccaaatactccccaagcctcggaaaatacttctaaaatggtaacaagaagtacctccaaattaattaatgttattaatgaagatagtgaccaaaactcagataacacaactgagataggatcagtatcaaaaaagagtataaatccaattaatttccaaaactggagaacaccc

SEQ ID NO: 152225 - DNA, 423 bp, Glycine max
tgtctcagcatttatgcgagacaaagaccaacatgttatccatcgtcagcaaataccaagaagaattaaatctagccacgacccacgagcataaagtggtggacgagtatgcccgagtgtacgcggaaaagaaggctagaggaagggtgatcaactcgttacatcaagaggcaacaatgtggatggaccgatttgctcttaccttgaacgggagtcaagaacttccccaattgctagccaaggccaaagcaatggcggacacctactccgcccccgaggagatcaacggacttctcagctattgtcagcatatgatagacttaatggcccatataattagaaaccgctaggaagtttgtattgtcgctcagatgttgactagttataactctctgaataaaatgagtttataccatgttttac

SEQ ID NO: 152226 - DNA, 441 bp, Glycine max
  unsure (1)..(441): unsure at all n locations
agcttggcaatgtagggcaggggatatacgttcttggggcacaactttttgaggatggagtctgcagtgaacatgccccatttcccatnggccttctctaccatgacaacattggccaaccaggtcgagtatttgacctctctgatgaactgggctttgagcaacctgttaatcttttccctaaccaccattcacagctcttctcccatttttctttatttttttttttgtgagattgggttggcttgagggcaaatgaccaatttgtggcaaatgaagctaagatggatgcttgtcatattacatgggttccatacaaaaaaatctacgttccttcataggacttcgactatatgtctgctacttatgactggtgagatcttctgtgaactatgtgcattgttccggtttatagccccacatgttccttgatgagctctt

SEQ ID NO: 152227 - DNA, 452 bp, Glycine max
  unsure (1)..(452): unsure at all n locations
gtattatgtattaacgattataacacatatatatctatattaatcgncaatataaattaggaattaatagttcacataataaaattaaattcaaggaaatcaatatattaagattcaacgataaatacttttaatgcatttgtagtttaattatttattaacgtcttttaattgaaaataatatagtttgatttaatatatacatgtgtttgtgccatgtaaatattaatattgtgtgatgtttatatgattcatgaggtgtgataacatgttgctttgggataacattatgattgagattgagtgtatgtgataaatngagtatgtgttgaattgtaagatacatgtgtattgagattttgtatgcattgagttgtgagctatggactgtataatcacacaactgtaagacactttacggagatgaagtaatgcgcaacgagtcttatgat

SEQ ID NO: 152228 - DNA, 430 bp, Glycine max
  unsure (1)..(430): unsure at all n locations
agctttgttataaatcaaatcaatatttgtttccttaaannattatctatgtaaaagagacccttttagttttcataattatttttatccaatacttaattttttacaagaataatcaatattattcaatcaacattaagcataatataatgcttataaattatcatttaagtactattttattaattgattaatttttaatattgtaactattaattttttaatgtgcatattttatatcttaatatgtattatttaactatcgctaaaataaatattctttaatttttctaaatctgtagtgttcttttcggttgtcatgtatcatgcaatacaagaaatatttgttagttctctccaaaatttatttatttctgaccaagtaattggagatattggacggtgcaaacaatgaaacaatatgattata

SEQ ID NO: 152229 - DNA, 460 bp, Glycine max
  unsure (1)..(460): unsure at all n locations
tcacaaatctccagccaagcatagctcagttttttgagtttgacattggcatttggcacatggctagcggctattgactaactttgtaatgtgaaggctctgccaagagaaacataactgaaaccatgtggtttaagtagtgctagtcatctcttgttaattattatatctgatctgttgctaatttaattatttttcccgtgcttatcttccattagtgcaatgcagcacacaacgaaacattttagcatatgccaacctgngttgttgtcgcacgtgcttcattgttcatttgttcagcacatttcactatcattttatgatattattcctaatcaaattccccctctccacgcacattattactataataccatagtaccacaggaaatatcttcatgcanatacaactctatcttttgattgctatggangatacgaacacattatatgctatacg

SEQ ID NO: 152230 - DNA, 441 bp, Glycine max
  unsure (1)..(441): unsure at all n locations
gcttggctntgaggacttgctacaatggctcatcatgtcttctatcgaacccttcttcataggctggaggagaacccatcaattggtctacggtcattgagtctaaatccttagactcttcaatagcacaaaccacataatcaaatttagcgattaaggagcgaaggatcttcttcaccacacgaacatcttgcatatgttctccataacgcttcatttggttcacaatagccaaannnttgttgccaaaatctgagatagattcagattccttcatatgcaatgattcaaactctctacgtagagtttgtaggcgcaccatttttaccttatcaacatctttaagggagggtgtcaaaatctcccatgcttctttggatgtgggtgcatttgacatcaacttgaacataactttatccaaaccnnnatgaatgaaagtaa

SEQ ID NO: 152231 - DNA, 474 bp, Glycine max
  unsure (1)..(474): unsure at all n locations
tgtgccgtttgcttattagtattagggttttaaattttttttccattttcatattgngacccaaattgctattntgtgtttcagattgggatatatgaagataatgacaatgtaaggcaggacgagattgttgcactcagaggccaaattgccactgaaattaaagtgtttagcgccttttatgataaactcaaagagggtgctcatttctttntcttttgtatttattaacttttagaagaaatggagatttcttaccctaatttattgtgttccctatgatgtaataatttaccatgaatttatttgtatttcatattttatattgaatattanggaactcttgggattgtgctatggcgtgtaattntggttggtgtcaagacacttggnngaggaatgttcactgatgataataaaaagtgggttggctacttatgcaatatgttgttcattcatgtaattactcaattg

SEQ ID NO: 152232 - DNA, 304 bp, Glycine max
agttttaatttataaaagaaattaatttattttgtccttattattttcttgatataatacttttagaaaaagtttagtcaagagtgaccggtatatacttgtgcatttgcatacaattgcccgtatttcgaagacacgacgaatttcacttcacttcgttgaggcgaattgattctcatggatattataacttacaggagagtcgcctttatcattcaaaatgacttgcaagaacacatgtcataagacacacaaatgacggagatagaaagttgccgtatcttaaagtttgagaatggggctt

SEQ ID NO: 152233 - DNA, 393 bp, Glycine max
gacacacatagatacacaaacacacacacatagagacaaacacacagacacaaacacgaacacacacacacacacacataaagatacacacacacacacacacagagtcacacacacataaagacacagacaaagacacaaaaacactgagccacagacacacacagagacgcacacacatagacacacacactgagtcagaaacacacacatacacaaacacactcacacagatggacagacacacacacacataaagagacgaacacacacacacacacacacacacacacacacagattaagagacaaccacagacacacacactcacacacacacagataaagagacatacacacacacacacacagacacacacacacacacacacac

SEQ ID NO: 152234 - DNA, 397 bp, Glycine max
agcttctccatgtgacttctttaccctgagcgagtgttgcccactgagcgtctgcgccatgctgagcgcgtatgccacgttgagcgagagtcttcagatcttcaacttctctctcaagctgtactctgtgtttttgcagcacatataacaccaaagcactataaatttaccagtttaaacacctattggacaaaaatttaaatgatgttaaaattctaattattcgcataaaaagaagcaataaaatagaggaagtataacaattgttatatgacttacttacaaaatatatctatgcacaacaattatcacacaactatattcacctcatctcctgttatctacactatctcagttgtatatgccattggtgtacaacaagctcacagatattcat

SEQ ID NO: 152235 - DNA, 482 bp, Glycine max
  unsure (1)..(482): unsure at all n locations
actcagctacaatgaaaaagaaattagaggtataagctttagcacctttatgctttttatcttgctatgctagggaagcaatgttggagattattggccaaccaagatactatggtttcaaaagtgctcaaaactaaatattttcttcaagggaaatttttggaggccaacctangtcatatataatccgagttattgttggcgtattatctatgcttcaagtaatagtctaaggaatgtataaagtggaatattggcttctatcaatctttggttttagccttggttaaaatcatcacaaaattcctatgttacaactcctactccccacggccttgagacactaactgttgtggatcttatagatcatcaaagacatgagtggcaagctggttttattgaagtaacattcaatcattcagatgcacatgctattcaatctattcctctcattaattcatctgataatgataggttgatct

SEQ ID NO: 152236 - DNA, 435 bp, Glycine max
  unsure (1)..(435): unsure at all n locations
gcttgcattgngatatagtaaggccagctcggtcggttcatggnttgggatcgcctgagaccaagttcttttcagtatgacatgtctacatcatttgaccttgtcaaataatgtttttttttaatattatgtttatatgttgtttgtgttgttgttgatgatacttgggttgggttttgttttaaacttttaatgatgatttgaggtgcaggttgaacgaggacatgattgaaacacttttcatggtaaataatcataataatctcaaggagggttttggtgttgcgattagagataataataatcctcggcgtcaaatggttcattctgcttctccaatgcccttggaaaatagggtgcttgaccctaagaagtctcaaaacattgccattttgcttatggcgctgaatgtgaccatagatgaagttgggatgc

SEQ ID NO: 152237 - DNA, 427 bp, Glycine max
  unsure (1)..(427): unsure at all n locations
cgaaaacttataactcaaattaataaattgtgggtcatggcatcagtgatcacagggaattatacaagtatctcaccacaatttcaggttccaatcatgttcgtacctgaacagtcctactaaacctgtttcaccagatcccgatgttgcgtatttgcttttacaagctatgttggcccattaaaaagttaaagcgtttaatccatgtgccatgaaaaaagcttgtaaacttgtatccttttttcccctcccatgaaagatggtaaagatacaaagggcaattggaaaatattcttcaatcaaataaaggaaaaacagatggacagaatgtttttttggtgggtaatgagccangacanagtgcatagataactttgcttttatatttcttgtgattcgttccaagttcagtggaaggcctaatctc

SEQ ID NO: 152238 - DNA, 289 bp, Glycine max
agcttgtccgataatgggagacaaaccacttgtgttactatgtggcagacgggcgatggtgcgatactattttacacacccacaaagaacgtataacccaccatccactgttgcgaacctacaacagagctaacgaacgaccacggaagacttattcttgttactatcaacgccaggtccccattaattctactcagcgttcacaacaaacagatgattccacatccagtggtgataagactaacccaccaagctacataaggcattatgagcagaactctacccaaaa

SEQ ID NO: 152239 - DNA, 342 bp, Glycine max
aacatctaagaggctcatgtatcagctactcagtctctgttccggtcatacatttagagctgtaattacagttctattctatcgcacctatattggggctgctatatggcttctaattgtcactgttcacacctcgtatggttatcaaacttgttcatacaccctccactatgtgtatcttatacacttttcttacttacatacgcaaccacccacaggatcacatgcatatatattgtctatgataacaaacagtgcgtgaccttctgatctcaatccactaaccgtgcatatttatggcatgcaagttaaggccactccatctgtaccgcttactcacat

SEQ ID NO: 152240 - DNA, 292 bp, Glycine max
  unsure (1)..(292): unsure at all n locations
tactaacncancataaagcttgttgaatcataatgctgttatacaatgcactttggtatcaaattcgcagcataaatgaatgagttaggtgatcttaccctactacaaagaagctgtggccatcaacgtgccatgactacacagtgtcttcagtgttctcaaacacaaccctctttaaagcctcggaaatcggcttccatgacagaagtatgaatgtagccaccactaccagtggggtagtcacggatacttcctacggagaacaccccttggatcttgtactaatcaccca

SEQ ID NO: 152241 - DNA, 427 bp, Glycine max
  unsure (1)..(427): unsure at all n locations
gacactatgaaactaagctattcgcggaacttgggaagaccggcatgtttccctggttgcgtnnccttcgctgaaacggcattagcatcaaaagaaacgaccaaatcagaacaaaaaaaaaattctcagctccagctattagaaacaaaattaagctcgtaaagcaacacanatcacaagattccaccaaatctacgaaacgcgaataaagaanatcctcaattagaaaaaatcaagactgataacctatttactctcttcgcgtgattattaccgataacctatttatttctgtttcctcaatttacgtcgttatcagaacggaaattaaataaataaaaaaaaggaaaatagcttaatggatntgatgagataaaaagncacgaataaacgaattggaaaaagaaaaaaaaagtgagggggaaag

SEQ ID NO: 152242 - DNA, 437 bp, Glycine max
agcttcgatgttaacagtgcaatggataagatagcgcgaaagggtacacaaagaataagagagcgtgagagggtaaacggagaagaagagagcgcgagcaaaataggtcgcgtcaaatataatttaaaatgtcagttcaacatcggttttcaataaaacactgatgttaacaaattgatgtgaacgttaacatcggttttattcaaaaaaccgatgttaactgatgatatgttaacatcgattttttaaaaaccgatgttaaggaatacacattatttacaattatgccaccgcgtttacgttaacatcggttttgtcaaaaaccgatgttaatccgccgatgttaaatctggtttttctaatagtgatttttggtatgtctagcttctttttttttttttggcttgacatgttaaacacggctaaaaagtggacac

SEQ ID NO: 152243 - DNA, 439 bp, Glycine max
tatagaatatataataaaataacaatgacaattgaagattctatacatgtttcctttggtgagtctaattccattcttccaaggaagggatttttagatgatatttcagattccttagaagatacacatattcatggaaatgactctaaagaaaaagatgaaggaagcaatgaagattctcaagataatgaagttagagcaaataatgaacttccaagagaatggaaagcctcaagagatcatcccctcgacaacattattggtgatatatcaaaaggggtaacaactagacattctcttaaagatttatgcaataatatggcttttgtatctatgattgaacctaaaaatatacagcacttggttcgccagcaggcggccaacccaccggggcaggtgcagatacatgactgtctctaccagctcagcctcagtcagc

SEQ ID NO: 152244 - DNA, 359 bp, Glycine max
tacttactgatataaaatattaactgattaaagaaaccactatatgttgcaaaaaaaaagacagactgtttctcattagtcttttccaaggttaaagatacataaagtatatgagagaaatgataacaaaacaaaacaaggggagctcaaatcaacaaatttcatttcattccttaaaatgtatttgcatgctaatacttggcccacttttaatatagccctttgttaattatagacacttgtccataattgaagataaaacaggctggcatggaacgaaaccgattaacattggagaaattaaaaaaaaaccgcagaaatggtggtaatgaaaaatgaacattgttcaaattgtccat

SEQ ID NO: 152245 - DNA, 467 bp, Glycine max
  unsure (1)..(467): unsure at all n locations
ngaagagaaattcagaaactagtatgcgagtgttaagtgctagatcatgtaanagggcactattcaaatccccttctagtgatcaattgatccactccacttaagtgaatccctattctatattataatgttcatcatattacatataatatatatatatatgaaatttatattgaccaccttgtcgatgaagtatttgactatcaaataatgaacgcttactttangtatagttagatttgtttgaatctgacctatgaagacaatgctaactactaatacaattgcccttcgaccttcaaacacatcaatgattgatggaaaaaatcttcacggagaagatcggtaagaaccctaaggtttacattgataacattgtcactaaaatagaaaaaaaaatgataaaccatgtcacatacctccaagaaatctttgatcgagatagaaagttcaacgtgtgtctaact

SEQ ID NO: 152246 - DNA, 289 bp, Glycine max
  unsure (1)..(289): unsure at all n locations
gacccgcggcatgcaagcttgcctgaaagaggtcgcttgatggatttgcggnccatagaaccactaccgctcccgtgtatgatatccacccatttaagaacgctgaacactcatcaagattagaggccaccaaggggtggtcatttcttcgggatcaacacgttcatcttacggacgattagtatgccgattatccggatgagatagtttacctgaggtggacatcacatggttccctctaggcctagttcacccacacatatacctaaatttatgccaatgcttgcct

SEQ ID NO: 152247 - DNA, 382 bp, Glycine max
  unsure (1)..(382): unsure at all n locations
tccttaatcacctcattaagaactagtatgtcatgtattatgtgtctgntttttatgaaagctgtctgcctctcatcaataagaccagatatcacttgtctcaatctatttgctaataacttagctatcaccttgtacatacatccaatcaaggagattggtctgtagtcatcaaatgactgggggtgtttggttttgggaattagagctatgaaagaagcattattgcctctagggaagctgccatgcacatggaattcatctacaaatcttctgaagtcagttttcagcatttcccanaattctttaatgaatttgaagttgaagccatcaggtccaggacatttgtccccatcacaactccacactgcttctttgatct

SEQ ID NO: 152248 - DNA, 451 bp, Glycine max
  unsure (1)..(451): unsure at all n locations
ntgtactactaaggagngaaccttacagtgntactctgngcatcnnganggggagtnagagttgaggtatcactntcttctttcatagcattgacactggtgatgtttgagctttgagacttatagagcctatgtctaggtggataaccatgctttctgtaacactcatcaatagtgtggttattaagaccacaatgtgtacaaatcttgttttgtttttcctcttgagttccctttgccagaattgctttgattgcctcttcctcctctagaagtataattcaaagggaagccatttttcctataacacctatcaatggtgtgattgtctttgccatagtaggtgcaagaaaatcccgagtttgatgagttagtgtttgctgcattgatcagactagtccctcctattgtttcacagctatggatctatctttcttgttgagctacatat

SEQ ID NO: 152249 - DNA, 398 bp, Glycine max
  unsure (1)..(398): unsure at all n locations
ttaaaactaagctcttaactccctatagacattctactgnatttctagnggaacngcacttctgaccagatccaccacctaatattgaccatgcattacaaaaacaaatcaacaatctaaaaatcttatgacacaaaatgattataagacaacatataaaattaaggcacaagctttatatgaaaagaaataattggtatctttagtaatgagcaaatgttatgatttatcttattactatttatatcnttgggacaaaacttagaagctgttccttaaacgtgtttggtattgtttttcaatcagaattggagtttcactntagtaatttgcattaaaaatcaagataggttagtgaggtgaccaaggaactacatctaaaattttcatatttcaag

SEQ ID NO: 152250 - DNA, 449 bp, Glycine max
  unsure (1)..(449): unsure at all n locations
agctntgacttgagtcatcaagagatgataaatatgtgatcatgacatgagtgtcaaaaacaatttattcatcaatcatcaatcatctttgaataatctatctttcaatctttcttcaacctcatctctcaacatctttcaatcaatctttcaatatctttctacaaaattttatgattaatttctcttcatctttctaaaagttttttatcaacactttctcttccaagaaaagttcttttttcaaaaacttgtgctattcatcttttttattctcttctccctctgccaaaagaacgaaggactaaccgcctgaattcttttgtgtctctcttctcctttacaaaagattcataggactaaccgcctgagaattctgtgtcccaacacataggaggatacatcctttgtggtacaagtaagaggtacatcctactgtggattgtata

SEQ ID NO: 152251 - DNA, 362 bp, Glycine max
  unsure (1)..(362): unsure at all n locations
tctggcgcttaactgctgagatgtggaaaccatcctctctattaaatttcttgcttcagcacgagtcatgtctccaagggctccaccactggcagcatctatcatacttctctgcatatactgagtccctcataaaaatattggaaaagaagctgctctgaaatctgatggtgggggcgactggcacatagtttgttaaatctctcccagtactcatataggccgctctcactgaggtgtctaatacctgagatatcctncctgatggctgtggtgcctgaagcagggaaatatttatcttaaaatactctcttaatgtcatccaactcgtgaggaccctggagcaaggatatatccgttct

SEQ ID NO: 152252 - DNA, 431 bp, Glycine max
  unsure (1)..(431): unsure at all n locations
caagctttaaaccttgtacaagaatgaagctctgattccacttgttagacaagtggcctcagatatcttaagaagggggggttgaattaagatattccaaactgtttcccctaattaaaaatctatttcactttttactcaagttatgaattcccttaatgacaatcttcttaaatattaattcaaatgaaacaatttgaatatgaatataaagcaataataaataaaaggagattaagggaagagaaaatgcaaactcagttttatactggttcggccacacccttgtgcctacgtccagtccccaagcaacccgcttgagagttccactatcttgtanattccttttacaagttctaaacacacaaggacaatccttcctttgtgttagagatcctttcaacaagagactcacagtcttttaatccctt

SEQ ID NO: 152253 - DNA, 451 bp, Glycine max
  unsure (1)..(451): unsure at all n locations
actcactctatgcatgaagctaaccacatgtggactctcaaccatctctttgtgcatgatttaactatctatttaatgttatgttgatattattggtctttttntgagttattatcatgtctatggtttgatcatctattctcatttaatgttttgggatttagacattgggaaatgttcacattctaagaacttgaaaagaacatctaggggatccatatctatggataaaatggcattgtttagccagatttatgcatctctgcttgtaatgcaattntttttaatataactcttaagggattangagcgatattatgtgatttangctctgttacttgagggatcatgattataatacgttagtggatgtgggtaataattagtttaatatttgtcagaccctaatttcgtctgaggactatcatttgtcaacgttttggttcttgct

SEQ ID NO: 152254 - DNA, 444 bp, Glycine max
agcttaactccttgagataagaagctagagtttatttacacaccccctataatagctaagctcacccccattccaaaatacatgaaaatacaaaaaaaaagtccctactacaaagactactcaaaatgccctgaaatacaaggctaaaaccctatactactacaatggccaaaatacaaggcccaaaagaagggaaaatctattctaaaatttacaaagaagagtggatcaaaccttgacccatgggctcaaaaatataccttaaggttcatgagaaccctagggccttctttagtagctctagcacaatcctcttggagcctcttgctcatggctttggtaactggtcccttcctagagaggattgcatcatcccctcccccttgaaaaggatttgacctcaaatctattggttcctcttcctcatatcagatccacctacaa

SEQ ID NO: 152255 - DNA, 440 bp, Glycine max
  unsure (1)..(440): unsure at all n locations
gctggaagaagagtggaaatggtgccttccttcctcttgaccagcttgtgaagaagaggaagaatgagccactttggtgagttttggagtctaaatgaacttatagaagaagcttaaagcatgttccattgaattattgtgtaggcttatcttaatcactcaattttgaaccatgaatgacccatgatcagccatggaaaatgtgtacatcactaccaaatgtggtgcgcttcactnttgaaaattttacttaaaagggctaaagtagagttttgccaaaaaaatgaaaattctacttttactaaaaatggtaaattctacctatatgcctngattactatgatagtctctctaggattatgtgtaaccaaagtgaacctcacacaaagctaaattacactgccactcaatgtacaacgcaattntgtacaaatggaatt

SEQ ID NO: 152256 - DNA, 432 bp, Glycine max
agcttgtaagattatggggtacccatcacatgtggtactaggtggcggtcgggcgatggtgcgaaacgattttccacatccacaaatcacgtataacccaccatcccctgttgcccacctccaactgagctcacgtactcccacgtaacccttatccttgttcctctcaacgccgggtccccatcaatcctcccaagcttccacaacatccaggtaattccacatccaatcatcatagactaacaaaaccaagcaaaatagggcaaaggcagaaaactctacccaaaacacaactcaaaatcacaggctttcacatacaaataccccagtaacaatatctgcgttccaattcgttaaacgttggatcgactcgaatattatactggaagtctctagtacataagtctacattattaccagtgggatctggta

SEQ ID NO: 152257 - DNA, 451 bp, Glycine max
  unsure (1)..(451): unsure at all n locations
tgaccaaatcgaacatctaattggatcatgtatcagctaatatagctatgtttcgggtcatacattntttgctttaattacggttctattctatcacaaaaatataggggctgctatttngcattctaattttactcttcacacctcttattattttcaaacattntaaaacaccctcccctatttctatcttaaacacttttctcacttccctccccaaccacccccaaaataacatgcatagttattgtctttgttaacaaacagtgtgtgaccttatgatcacaaaccacaaaccgtacataataaaggcaggcaagtaatggccatctcatatgtatngcttattaagaataattgttgtactttaatgaccagctaccaaaatgtggtccgttgaaaatgcttctactcctttttgttcttacaatacatatatcgtctgcgtgtt

SEQ ID NO: 152258 - DNA, 420 bp, Glycine max
ctaaatcttgagaacttgtgcaattcatcttttcattctgtcgcaatgtgcccttttgcgggcgtgcgaggcgaggctcacaggtgcgctttcccaaaggaggaaagatgcgcggagtctccaccaacgtttatttgtggaaaacatcggataaaccgaaggaaaccggtcaaaatgaaaaatctaagttcgggagttgtatttacgtttgaggaaggtattagcacctctcacgtttgtctcataggacaacagcctatcttttagaattgaggaaattgtgctaccttaacttttatttctttttattttgtgaggtcgacaaaagcggggctattgctcctacgtaccctccatcgaagaggaaatcaaacctacgttgttctttcttatgcgggaatcaagtgattcttttactta

SEQ ID NO: 152259 - DNA, 467 bp, Glycine max
  unsure (1)..(467): unsure at all n locations
ntgcganaagctntccgctgaagctgacccatcaactgttctatctcttttagactggtgattcctaggctcttgaccttgacttgatagaacctctttttaagtgaaggcgtttgacttgatcccatgttttactaaagtgaaacaaaatcttgtgcgaatcanaactccaacatctatcatgggtggaatggatgaatgcatgaagaaatgaatatgacatagatgcaatttatgaatacgggagcccgtgaaattgtctccttcttagatacaacgtcttggggtagcacagtgcccgacgtatgtatttaagaaggtgacacgaacccttcgttggtttgccaaagagaggggatcaagacggaacccatgcataatgtatatgcganaggcacaacacacggatgtacatagtacgacaatattcacaaacanatattatgcaaagggacatgacacttatg

SEQ ID NO: 152260 - DNA, 412 bp, Glycine max
  unsure (1)..(412): unsure at all n locations
agcttggaaagtacattgaaaaccgtgtaatgttctttctgggntatgagcctacacatgccgactagagataggtcgccttaaaaaggaaagaaagaatcctatcccatttacaaaagcggcgaccacagatggagagggtccttatctgccacattagcaatagctttgtctgcgcgaggtggatgcatgagaatcaggttactgtgctagatgaagaaaccaatcaagagcagcaaagttgggtgtagtcgtgctccccaggttcaaatagaagaattagctattcatggagcgacccgagatttgtgtgtcaaatccaacgtaatctaatagtttgaaccctattgctgggcctacgctttagggtctgcttcttttattgcgcatacctcttcttttaaatgttctg

SEQ ID NO: 152261 - DNA, 479 bp, Glycine max
  unsure (1)..(479): unsure at all n locations
gacactatgatactaagctttaagagaccactctagtgaatgtttcaagagaatgncttcttgttacaaacattgaacacaagggaccaatgttccttgggttcattgcaagaagcaagatttgcttcttggttgatcactagatacaaaagaccaacgtcttttgggttcattgcaagaagtgggtataacttcttggttgttatcactggacacaagggactaacgttccttgnggttcattgcaagaagtgggaataacttcttagttgtaatcattgaacacaaaagagggaagtcctttatggttcattgcttgtaaaggattttacaaggatagtggaaatctcaagcgggttgcttgtggactagacgtangcacgggttgtggccaaaccagtataaatccgggtttgcattctctctttccttaatctcttttactttctggtgtggttatatttctttaagtttacttc

SEQ ID NO: 152262 - DNA, 388 bp, Glycine max
  unsure (1)..(388): unsure at all n locations
aaaagaggtcatgttgtccatggacactattgcacaagtcacagggtgcattagaaaaggaagcacaactaggaaggttgggagaaaacatgagatccacatcctaaaggcatttatgggaaaaacttcaaggaagcagatgggaagaagaaggtacgatataaccttttgtgtgaagttgccaaaatatggtccaacatcactcaaaagagtttaatgcacaaaatgggttcaaaagagtatgtgtctaacctacancaaattgtgctattccatttgatggacgagatttctntactaagggacatgaagacctcgagaggagtggatgacatcctctatgttgccctcatcaatcaattcctatangaatacatgggcatttcgt

SEQ ID NO: 152263 - DNA, 272 bp, Glycine max
agcttgcattcgctgctgttctagataaaggttgcatgtatttgcatcccaaacatcatgttcatattatgctatagatttctctttgtataccaatttcccaaatcttatgccctatcttttgagtttaagatgagaggcccctctcaaaagtcaacctctcggctttctcataaggtgaagccctttggaactagtacctattggattgcttcatatgactcagagtcctcgcttttacctttcttatgactcagaatcctcacttttac

SEQ ID NO: 152264 - DNA, 394 bp, Glycine max
  unsure (1)..(394): unsure at all n locations
ngacatcagatgttagtaatgacccacttacctagaatttaaagaacttaatgccattaacctagagaattatagaacttaatggctgactgtaactgaaattgtggcaaccaacagtcacccccaacagccatgaagtcagcccccatttggtctcccaaaaggttgatgcctatgttgccaattgggcccttattacaacttgaactaaacctaactaaagcccttgtagttgattaacccacaacatattttttgtcagccaactgtacaaggattggtccattatttagactaactatacactctaaaattgagacacagtggtgccatttagtacttctccatgtgggccatgatacaactcacaaccttggactgttctcctctaaac

SEQ ID NO: 152265 - DNA, 421 bp, Glycine max
caccgagcatgcagctatgcactcaacatgtggccttaattaccaactaacaccgccgcggcagtgtaaggaattcttgcaccccgaatacaaagacctatctgaataaagcgtgcctgaatcatacataggggcgtgtgcttgctgaaaagactcttgtccatgatcacgaatcatatgctctaagcgaactcccattgccgatccaccatgccatatccacatggggtaatgtatcttaattccatcacacaacacatggtcatggatgtcaatcagcacatgtcagctctcgctccaacaaatgatgccaagacagaaatatctttcgtcactcatcacggggactgtttctgaagcaaaatggcaaaactgatcaacgcccttctcatattaggggtgaagcaactattgtcatcca

SEQ ID NO: 152266 - DNA, 373 bp, Glycine max
  unsure (1)..(373): unsure at all n locations
caggtacaatcccggatggaggaatcatcccaaccttagatggtcgaatccttcacaacagcagcaacaacaatagccttattntcaaaatgttgttggcccaagcagaccatacgttcctccaccaatccagcaccaacaacaacagcaacagccccagaaacaacaaatagttgaggcccctccgcaacccttccttgaagaacttgtgaggaaaatgactatgcaaaacatgtagtttcaacaagagaccagagcctncattcagagcttaactaatcagatgagatagttggctacacaattaaatcaacaacagtctcagaattctaatagaatgccttctcaatctgtgcagaatcccacaaatgtg

SEQ ID NO: 152267 - DNA, 416 bp, Glycine max
  unsure (1)..(416): unsure at all n locations
ctgcagctattgagcacaaagtgtttctttaatcacgacctagacgccctgcatcttttattcatatgatgtaatgtacgcctctcaatatattagatctcaaaaactatttctaattggtttgcgttctactactaatatcttcagggtcgaggattgctgctgtctcgccttcctgaccctgaanaatatgctacgaacgcgactgcttcctcgaataaccatccttgaaagcatacatttgtgcaaatactaaattgtttttcacttgggtggcggagggggttagcattctgataccacgttaacgccttgcccaaccttgctagagttctaatccatccttcatatctatgtttagaggaaaggtactgcccctccgtgactaaaaatatattgatcacccctgcttcatt

SEQ ID NO: 152268 - DNA, 439 bp, Glycine max
  unsure (1)..(439): unsure at all n locations
gctagtttatccacttttttatatcttcccatttacaaacttgggagtttactcaataatgatccaaaaacactttttccaataatttagttttctcattgaatttcaatgcatttggttatatgaattaataaaggagaataaatgaaataagaaaaaaattattgtttgatttgtaaatgaaactgaaatgaaataaatgtttttaataagttctaatattgttttaagcaaaagtgtgggcaacaaaaggatatactttttagaataaaacatacatttttttaatttgtcagtatatctctatgagcatttaatttgcaataatttgntctttaaagatatctaagttatttctattaaaaaaggatatctaaggtatttaatgaacatacctcttctttttcttattcactanatangaagaaaacaaatactc

SEQ ID NO: 152269 - DNA, 284 bp, Glycine max
  unsure (1)..(284): unsure at all n locations
agcttctagccaaatggacttaccttgaatatattccttngatagcccttctgagccttgtttccctttccttgttgtgaagctcactacaagccttaagtgataaaccatgatattaccatatccttaaggaattttggagctttggaattgttttgggaataagtgtgggggggggtttgtttcattgcacaacttggtttagtggctatgcttcatgatgtattttgggccatacttgatgtacattggatattggttaaatggtggacatgctgaatgaa

SEQ ID NO: 152270 - DNA, 453 bp, Glycine max
  unsure (1)..(453): unsure at all n locations
agctttaagatcaaacatatttctctgtttttntctcaataggtcttcattcttcttcctttattcactttcgttattccttcctcttctataaatttcgtggcttttccattggtgatgatcatgaaaggctaaacacttaatcaatccaaggatccactccaatcaaggctgaatttgagttcttgtttagtatttctaatctttatgaatgttcatcttttcttcaatcctattctcaattttcatgattatgattatgcttaggattgaaaatgaattaattatggattcatttcctaatttttaaatttaatcacagaattattgaatgattgtccaacctcaattgcgattttaaacaatttagggattgattcgattgaactatctataatgcatttgaatgaactttcacactctgaacatcattcgtagtaactggtataattc

SEQ ID NO: 152271 - DNA, 450 bp, Glycine max
tgtaaataaatcactgcatattgtgcagtccctatcatccttcataggaatgtagaagagagtaggcttgcaaacaaggttccaatttggataaaagtgtaaaactacttattaattagaattttatgaatcattgtttggaatattgaagaaaaaagacaacctgacaaccatctgccctgaatgaactaaaatcatggcatccaacaagaactctgcatgcttcctgcatggatatcatcaataacttgaatagctgcaagattgagaatctagtaagtataatgagctgttaactaacttgcatatctggaagactaagctcctcatgtacatgccatgctcgatctttctcgaatgttgacaaatgctctggcccataaagcaaccgatagaagtatctgaatagtagttccaaataactatcaattactgcatatggtcataaac

SEQ ID NO: 152272 - DNA, 480 bp, Glycine max
  unsure (1)..(480): unsure at all n locations
cagcatgcaagctttcaaattgatgttcacaaccacagtaatagtttctatcaatacactatctcttcttggccgaaattcattgaaatcacaagtaacacataattttgtaattcttaatgaactacagctaacagtgagttaaagaagaatgtgttgataagattcatttcattttagtaaggacaaacaagtagatgcaatccctaaggtgtttgcggtgttgttctcaaatcaaaataggagtttcacctgcgtaaccattaaatgtcaacctagattatcgaggtaaaactccaattctaatcggacaatagctgctatatatagctgctatatcacctacagaactgtatctaatcttcgtccatttagtaaatataacaaaacatggtngaaccgaagcaaagagaatcagtanaatggaataaattgaaactgcgaaagatgaaccacccaactcacttctataccacatgt

SEQ ID NO: 152273 - DNA, 489 bp, Glycine max
  unsure (1)..(489): unsure at all n locations
cacctgangcatgcaagcttgcttcgcctaaacaatctaaaatgggagttgaataactcttttagaattccccatttggacaccatcttagcgttgtatttgtgctcgctcttgtttgatccagtccctattgacagaacaagaaaaccattatactccaaagggttattacttatttgtcacttctctaattgcacataaaatctgcacatatatataagaagaagctaattaaatcttcacattagaaaaaatgcttgacagttattatatattttgtgtcgagaatctcaccggattattagcagccacactgccatcaataagggtgaattcttttatcacttttccttgttcatcttgtttagaaaataatgagccggcaaaaatattggagccgccgaagtggctatgcanatatctgacggcagtacatctaacgttggctccgttgccatctgcacaagatgcatgtttcatatctacaaa

SEQ ID NO: 152274 - DNA, 375 bp, Glycine max
taactgttactgggattacgcagagaaagaatcgattttgtgttttgaggaccacagccacacaatctgtcatatacaccattgttgttgcttttttaaaaatttctacattaaaaaaacctatgacataatattttacagaaatacatgtgttataacaaaacataaatacctaactacatgtgtattttacttttagaaatccttttgaaagtaaatatgaaaaaatggttacagaaatatttttacatgacaattttttgtgtacaaagttagataattacaataaactaagatcatgacactacaacatattattttactatgctaatttacaggataaaacaacctgtctggaataattatttgttaata

SEQ ID NO: 152275 - DNA, 361 bp, Glycine max
agcttctagttgacggcgaagttcctccatgaaagtgagacatggtacagggtcattagagaagaaggggcgtgctctggaagacgtgacaaagcatctgcagcttgattttgagcaccagaccaatggattatttgatagtcgtagcccattaacctcgtcaaattagtgtgttgctccggcgtctgaattacctgagtaagcaactctttgaggctccgatggttagtgatgatgatgaagtggtggccaagcaaatattggcgccacttcttgaaggccgtggttattgcaaacaactcacgcacataagtggacgcgttgaggagtttttttgaaatggcttactgagaaagccaag

SEQ ID NO: 152276 - DNA, 421 bp, Glycine max
agcttgttcggaagtcactaattttttatccttctggaaaggcctttatggaattatgcaaatattcttctggaaatgtctttctgaagcgaaaaaaaaatgtctttcaaaaaggcctttctagaagtacatttgcatacttttggaaaggtcttttcagaagatactaatttttttatacttctgaaaaaaccttctagagtcccaacacatgtcgccattgcagttgttagagaatgtgttgatggcggctgtgtctgaagggaaggggctggtggaaggggtccgtggtggtgcatgaatatttgtgtccattcaagtctgttttggggctacaagaagcaaaaaggtggtgcaagaagtaaaatctgccactgagttgggtaactagtataatcttgggccacccccattacacaat

SEQ ID NO: 152277 - DNA, 322 bp, Glycine max
  unsure (1)..(322): unsure at all n locations
agcttcatgatgatgaatcaagtcgtnttgatgatgacaaaaagcccaaaagaatgatgtcaagattgagtcaacaagttcaagatcaagattaaagaaaagacatcaagaagaatcaagattcaagagaagatgaattcaatattcaaaagaagaaaccaaaaaacaacaagttaagacttcacaggggaagtattgaaaaagatttttcaaaaaccaaacatagcacaattttgttttacaagaaaagttttctcaaatttttctaagttaccagagtatttactctctggtaatcgattgtcagcttcctggaatcgat

SEQ ID NO: 152278 - DNA, 455 bp, Glycine max
taatccttccctccttaagggctttctaaatatctttctgaaacactaaacaattggaagcattatgactataagagttgtgccatttgcaatattttttgtcttgtatctcatcagctgaaggaattttatgaccatccatcaatcgaatttgctaatccttcaatagatagtacataatatgactgcctttaaaatgtcaaatgagtattcaaacttctcatttgtggaattagaagttcttgctttcgctgttttcaatgctagacaagagtaaggcttttcacctggcaattttggatgccatgatcttagcttccccttgaatagaaatagtagtgtattcatcagaatcaacaattgactccagttgtggtccacgacccttgttttcctgtatttgttctttatctatgatgagttgctccacccttgtagctttataggctaactga

SEQ ID NO: 152279 - DNA, 353 bp, Glycine max
  unsure (1)..(353): unsure at all n locations
nnagcttaatgtagacatgaacttaatgtttcctaaatttgcattggtatgtctcttagatgactgaaaataatatgcaaggaagcgaccatctcgatatttttaactgaatcatcttaaacttacaaggtgttagaggatattgatgatgaagatcaagctataattctattatgttcctggccaaaatcatatgaagaatttgttgattctaccattcttggagaaaataatatagcgcttggttagcatatgcattctctgttttcattttctgaaaactattttcattttcaaaagattaaaattctgaaaatatatttgatttgacttcttgtgcgctctgatttttg

SEQ ID NO: 152280 - DNA, 460 bp, Glycine max
  unsure (1)..(460): unsure at all n locations
tgttagcctataggttntaatttaattattatttagtttgttttgctactcaatagtcaatattttgaatgaagaactggagcttttagtatctgttagagagtttgaacacacaaacttgaagatttaatcaaaagaattctggaattaatcctgaatttgtagttcagattacagagcactaattctggcataaactctaacaaggagtctcctccttctaacaaacttaagtaatttttaacttgcaatgaatcagaaatctaccattcatcctatgtaagaagtacacacataacttccatataacatgccttatggctgtcctacagttactaaacacacattactgccacacaacaaatcacataactgtcatcagaatcattacatttcaaaattctctattttagacacatgataattatctgctttcgaaaataattacctttgttcatag

SEQ ID NO: 152281 - DNA, 460 bp, Glycine max
  unsure (1)..(460): unsure at all n locations
agctntaatgagaccaatctttatgaattatccatatgagtnatataatggaagaaaacctaacatttcacatcttcatgtgtttggatgtaaatgttttatgctaaacaatggcaaagataatttangaaagtttgacactaaatccgacgaaggtatttttcttggctattaattgaaaagtaaagcatttagaatttataacaaaagaactatgattattgaagaatccattcatgttgcttttgatgaatctaatgcaattttgccaagaaacgatgtactagatgatatttcaaaatcattagaagaaatgcatattcatggagaatatcacacaggcaaaggagatggaaataatgaagaatttcacattgatgaaataataatagatgctgatcttgcgagagagtggagagctactagatatcatcctcttgacagcattattgctgatata

SEQ ID NO: 152282 - DNA, 447 bp, Glycine max
  unsure (1)..(447): unsure at all n locations
ccttagtctcatatgaagcagctgagtgggtgtctttctcattctctccntcaatgaataaggcatcatttctggcgctaaactgctgagagttggaagccatcttctcaattaaatttctggcttcagcaggatacatgtctccaatggctccaccactggcagcatctatcatacttctctccatattactgagtccttcatataaatattggagaagaagctgctccgaaatctgatggtgagggcaactggcacatattttttntaatcactcccagtactcatacatggtctctccactgagttgtctaatacactgaaaatctttcctgatggctgtggtcctggaagcatggaaaattttctctaataatactctctgaatgcatccaatctcgtgatgtgaccttgagcaagttatacatacagtcctttgtcacaccc

SEQ ID NO: 152283 - DNA, 466 bp, Glycine max
  unsure (1)..(466): unsure at all n locations
agcttgcaatattgcaatctttatgtctctacaaccccttagcaactgcaatngaagcagcatctgccgcattttcccacaattctcttaatcaaaaggcaacaacaacaaccacaacttaaaactatgcacattcaatacgcgtcaaacaaaactcaccatcaaacttgtcattctgtgcagcaaccattgccgagccctcgagctgtccccaaaagccagacaaagaaatctaaacaattaaacaaacgtgtacactaaaaaccaaatttataaacacaagtacacgagtgtgacaccttgcaagacaagagcttgatgcaacatacatcaggttgctcttccactttcaccaacaacacaggacaaacctcaaggttgaagaacttgaacctataaacataacacctaaacgtgtgttcgtttacccgctcaatcctctccgcgtacaacaccgaatactgac

SEQ ID NO: 152284 - DNA, 448 bp, Glycine max
  unsure (1)..(448): unsure at all n locations
tgtaggattatggggtatccatcacatgtggtactatgtggcggtcaggcgatggtgcacaacaagttgtccacatccacaaagcgcgcataaacccaccatcccctgttgcccacctccaactgagctcacgtactcccacgtagcccatatcctcgtttctgtcaacaccgggtccacatcaatcctgccaagcttccacaacatccaagcaaaacaacactcaaacagcacaagctatgacaaccaatcaaaacagatcaaaggcagaaaactctgccaaaacaccaaccaaatcacaactttgctcacttaaagaccccagttacaattccttcgttccggttcattaaccgttggatcgactcgaaacttttactggaagactntagtacataatcctacattgtgaccgttgggatctactagaaaacatccataactcatt

SEQ ID NO: 152285 - DNA, 450 bp, Glycine max
  unsure (1)..(450): unsure at all n locations
agcttatataatataataacaaanaatgttattcanaacattatttaccttcatcatctgaaaccatttcattcaatacaatagcaaattcaacaacaaatttatagctcatggaacctataaaaacacattacaagtattagtttgttgaacaaacacaaatatcaatttaacaacatatatgaataaaacattaaagcctctaaagtatcccattgaagtcgactacgatgtgggtttaatatttgtccaccggtgctaaatgcggattctggagctacagtagataccagaataactaatatatccttagcaattgcttgaagtgttggatacttgacaccattaaacttccaccacatcaaaatatcaaagtcaacaactcttggtaaacctcttctaatagtggccaactctgattaacatagaacttctnagccttttttcata

SEQ ID NO: 152286 - DNA, 410 bp, Glycine max
agcttgaagaaacatccttcgatgactctattcttttctcagttacttgacctcattgatgaggttgaccatcgctattctttcaaaactctaacatcgtgttgcaattctaccaccactcttccggtattaaatgtaacctttagttaatactagagatcatacttaaaacatgcttgtaaatgaaaaactacaactaatactttttttaaaaaaagaattaaaacacttttttaaccttgaaaaagaggggtattagcctagatccttgctatccaaggtgtggtctggaggtggaaacactctcacatgcattgctgacgtgtgaggaaatcaagagatggtggttagcatgtcctcttacaacaagggtggaggagaatgaggaaattgacatatcggaacggata

SEQ ID NO: 152287 - DNA, 449 bp, Glycine max
  unsure (1)..(449): unsure at all n locations
gattaaccgaattaatggactattctctttggtggatgagaaaaataactcgcggaatatagggaatggaggaaatggaacatgttcgggaactatggctggattcataacttataatagcacgaggacagtgacatgagaaccatatgctaaaggtcaaacacaagtgacttcatcagtgggtatcgctacaatgaactctagaaccaatccttcctttaaagggaggggttttaggagtttgacagatgctgaagtgctatattaaaaagccaaggggttatgttntacgtgtgacgaaaaatttggtcctggtcatatctgtcataataaacagttgcaagttctattgttgaatgacggtatggatgaagagtctacatagcaagaatcaaaagcggaagatgagatagagatgaatgctctacaattgtcaatttacagaattt

SEQ ID NO: 152288 - DNA, 283 bp, Glycine max
  unsure (1)..(283): unsure at all n locations
agcttctagccaaatggactcaccttgaataatncttttgatagccctcttgagccttgtgtccctttccttgttatgaagctcactacaaaccttaagtgaaaaaccatgatattaccatatccttaaggaattttggagctttggaattgttttgggaataagtgtggggggggttttgtttgattgcacaacttgttttgttggctatgctccatgatgtatattgggccatacttgatgtacattgtatattggctaaatgtaggacatgctgaatgaa

SEQ ID NO: 152289 - DNA, 372 bp, Glycine max
  unsure (1)..(372): unsure at all n locations
gaacatagaccacagactcttgcaacacgtgcatatttctgattcatggcaagctgagttacttggttgaccaatgcatcaagttgtccctcatgctttttattttcaatagatgaagatgaatctgtggacacctcatggactcctctaaggacaatagcatcatttcttgcactgaattgttgggagttggaagccatcttatcaatcaaattcctagcctcaacatgggtcatatcaccaatagctacaccactggcagcatcaatcatactactctccatattgaagaatgagtngctcagatatctggtggtgaggacaaatcgcacacaatttcttgaatctttctcaatactcatacatactctc

SEQ ID NO: 152290 - DNA, 468 bp, Glycine max
agcttatttagtagcttatttttcatattgtatctcaagtctctactaggaaataagggttttacatcggttatttaagactttcaacatcggttattaatcgatgttgaaagtaccgatgttaaagtaatatcattaacattggttgttcaaaactgatgttaactaataaatacaacatcagttatttaaataaccgatattatatgataagaattttgaaaaaagaaagttataaatttacatatcaacatcgattatttaaataattgatgttaactggcactaacaacatcgattatttaaataaccgatgttaactggcactaataacatcgttaactggcactaacaacatcggttattcccctagtgtgcataaacaattaccataaactatacttggatttatcagttaaagaccaccataaccaataaattacgctaaatatgatgtttatagatatt

SEQ ID NO: 152291 - DNA, 463 bp, Glycine max
tggactaatccatttgctgccaaagtgtcatggtctttcttgtgaatatccacacaagaatctgaaggagtctcatgtagtgtgttccaccatgtgatcacatgacattcatgaagattatgtgaagatgaaggcatttccattctttctggatggtgtggctaaggactagttgtaccttcaaccagatactatcaacacttggacatatatgaagagaggattcttagagaaattcttccctgcatccagaatagcatccatccaaaaagaaatttgtggaataaggcatcaacctggagagacattatatgagtaccgtgagagattcaacatgttgtgtgctacctgtcctcaccatcaaatcaataaacaattgttgatccagtattgttatgaatggctggtcgtaatggaaaaaagcatgattgatgcagttaatatatgagctgtaatggataaa

SEQ ID NO: 152292 - DNA, 353 bp, Glycine max
  unsure (1)..(353): unsure at all n locations
agcttanggatggaacacttacttcttgtttatgatttaaagcgcaaaacggaatcaaaaaatgcgaaaaaggatgaccttatggctgcaaactcgtcaatcccgtgggtatggcttttgaaaagggggaaaagaagtttttgaatgcaaaaacgccccccctttcgtcattcttataatttggtgcaggggtggctcgcccaggcgagctaacctgcacatttttttttttttttttttttttttttttgaggggaacattaaccatgtcccctcccttcttatggattagcatcttgcctaacttgaacttacttaagttagaattatgcgttgattacctatatttttac

SEQ ID NO: 152293 - DNA, 448 bp, Glycine max
actatatagccattttcataaacttctttatcacctttcaaagagcatcaattcccacttacacacaaatggaaattaaagtaacaatggccctccaaaggcatcacctctcgttactttttatcatgttttcttttgttgcttgtcataacaccgtgctatttgatgatggtagtacgttcaaggactttatcaaacaaaagagtacagatgttttgagcttaaagaaatttgtcaagttgggtgacatttcttcttcgcttaaaacggttaacgtcaatgattatggagctcgtggagatggcaaaactgatgacactcatgtacatatttttgccattaccaaattaatgtcacatgcatattatcattgacacttcattaaaatgtaagtatagttgttgtctaataaaaatgtgttagtatggtaagccctataatatttttt

SEQ ID NO: 152294 - DNA, 352 bp, Glycine max
  unsure (1)..(352): unsure at all n locations
catgcaagcttcatcgagctgtagagaccaatccttccttgattaagcaattcttnttgctaaaatggtcttaacttgcgtgttagaaactctagcttacccattggtctaagggtggtaaggtgaggctaccttgtgtttgacactgtactgtggaggacttttatgagttgagcattacaaaaatgagatcctctgtcactgattactactctgggtgtgccaaaccttgagaagatattcttttttaggaagcaaataatggtttttgcatcaacatgttgaactgttactacttccacccactttgttacatagtccacaaccaatataatatatttatgtgagtaag

SEQ ID NO: 152295 - DNA, 297 bp, Glycine max
cgagcataacaaggtatctctccattaatcaacactttatgtgcctttcctttagatttcatgttaatgccgttagaacttgtaaaatgctactatcttgggtgtctagtgtgtgaaaacatgttcgatacgttggggattccgtctgggttgattcggaagccattgaaagtgaaaactcctttatcaaagctttgcatggctgtggaactaaagtgaatagctgctcttgcttaagtgagatgacctgtatgggaaaatgggccactgagttttaagcttaagtgtggttggaac

SEQ ID NO: 152296 - DNA, 277 bp, Glycine max
atatatatatatatatatatcaacaactacactaaaggtacttttgaaataacacaaatgaaaaaatcatttattcctatatttataactgttaaatacaaataaaaattaacagttaatgctcttatatcttcttatttcaaaattcacacttatcccctcgatatttttcactcgatatgttctatgtatgtaggggaggaataaaataattttcacatagatcatattgtttctccactcaccttagaaggaagtttcaatggtctcattcgtt

SEQ ID NO: 152297 - DNA, 210 bp, Glycine max
agaaaaaacggggaaaccggaaggggaacgcacagagggaccagcggggaaaaacaaggaaccggcgcaggacaaaaaaaaggagaagaacaccgacaaaactggaaggacccgcaagaacgcgaagcaaacaccaaaagaagagctaccaccgacaagcgaaccaaaaggaaacaacgggacaaaacgaagggagaaaagaagggccac

SEQ ID NO: 152298 - DNA, 338 bp, Glycine max
tatccccaaacatccccgtattaactgaatgacaaccatcatatgggctcgttcgcgatttgtttttcccaaaagataattatctgaactcatcggctgaatgtatctcactatactcgaacctaagataaccctacaccagaattataatgtactttaaattagggggatttttaattcagtttactcaaacttattcgtaactcctaggccgtctcaaattcatctgatttaaggtgactctgaaatataaacctcgctcccacattatatcccatcatttaattgtacttactcctaagtctatacctatatagacaatctgaactggctggaga

SEQ ID NO: 152299 - DNA, 433 bp, Glycine max
  unsure (1)..(433): unsure at all n locations
gctggccacatcaagtttgtacaagacacatcgggttgcttttcatgcnnnaaanncaacaatggcagatccatagtttacaatgcagtggcagcatatggaatagtcacagatgaccaatagctatctcaagaatctcaagaactggttcacttttcaccatatctatacaaggcactgctggccttaatacaacagccgtcgaccgggaactcagcatccattaaacctcaggttgcctctatttcatcttgtaccaataacgacacaacaggtataattttgtctggcatataagccaattctaactcctggatcttagattcaggagccacagatcatgtttcttcttgtaaacaaatgttcattcatatcatgaaattaaccccatcacggttaaactactatatggtcaacttgtccatgccaccca

SEQ ID NO: 152300 - DNA, 444 bp, Glycine max
  unsure (1)..(444): unsure at all n locations
agcttgagcaatcagacttattttttntgattcggatggcgatgtgtcccgtatatatcgagagctcgtaatcgaaaacagaagcactgagctaattgaaacgacaataactgtttactcggatgtccagatgtgtcccgcactatatcgagacgctcgaaattgaaaactgaagctctgagaaaaatcaaacgactattactttatactcggatgttcgattgagtcccgttatatatcgagacgctcgtaattgaaaatataagctctgactaaattcaaacgactatatactttgactcggatgtccgattgagtcccgtaatatatcaagacgctcgttattganaacataagctcttagcaaattcatacgacaataactgtttactcggatgaccgcatgagtcctgtataatatctagacgcttgttattgataaca

SEQ ID NO: 152301 - DNA, 418 bp, Glycine max
  unsure (1)..(418): unsure at all n locations
tctgttntcaatacaagacgtgagatatattttggttctctatcggacatccgagtnnaaaggtattgtcgtttgaatatgctcagagcttcagttgtcaatttcgagcgtctcgatatattatacaggactcaatcggacatccgtgtgaagagatattgccagttgaatttgctcagagcttgccgtctaaattacaagcgtctcgatatattacgggactcaatcggacatgcgagtaataagttattgtcgtgtgaatttgcttagagcttctgtttaaatttagagcgtctcgatatactactggacacaatcggacatccgagtaaaaagttattgtcgcgagaatttgctaagagcttgtgttttcaattacgagcgtctcgatatattacgggactcaatcagacatccg

SEQ ID NO: 152302 - DNA, 453 bp, Glycine max
  unsure (1)..(453): unsure at all n locations
agccttccactctcttggaagtatttnatttgtcttgactnctactggaagatcttcattgcttccttctccttttcctttagaatcttgtccatgaatgtgcatttgttctaaagattctgcaatatcatctaaaatatcctttcttggagaaatagcattatactcatcaaaggaaacatgaatcgattcttcaattgtcattgctctcttattataaattctataagctttactatgcaaagaataaccaaagaaaattccttcatctgacttagcatcaaattttcctaagttttcttttccattgtttaatacaaaacatttgcaaccaataacatgaagatgtgaaatgtttggtcttctaccattgaatacttcatatggagttttctttacaatgggtcttattaaagctctattcatgatatagcatgcagtattaacgacttc

SEQ ID NO: 152303 - DNA, 281 bp, Glycine max
ctagctcctcaaggatattgtctcactaaagctgatcaaggaagctctctcaaagaaagctattaatgaattttctccaaaacttatgaggaagctacctagtgataaattaatcatgtgtacacttgtcgtacttgatgaatgaagtctatgataacacttcaagttcacttgtctcctctttattcttaatttcggctccccatgattcttctttctgatatagcatctttaagcttcttaccaagcaatcttgtgtgaactcctctcctgcttttcct

SEQ ID NO: 152304 - DNA, 461 bp, Glycine max
  unsure (1)..(461): unsure at all n locations
agctagcgggttcgttccactctgctatttaaaacttatantcnaacaaaaactcaactgttgtgagatttgtttaagtttttggtgatttgtgtgtgggaataatggaatgtactttggcagattaagcctccttcttctccggagggtcgatttacgcaaatattgtccgtgggaattggagggtctgctcttggaccacattttgttgcagaagcattggcacctgataatcctccactcaaggtatctttctagctctattgttcgagaaattattacatggtccgggtctggaacagcatggtcccaaataatttttacttgacatgtaggcgagtgttattaatactttcattgtaaattgacaaaactcaattaagtaacatgtaaaaattggttgggactacagggtctagctcacttgatgagaatgtggctgattattggatcccctgacc

SEQ ID NO: 152305 - DNA, 272 bp, Glycine max
  unsure (1)..(272): unsure at all n locations
aaaaataaaataaaaaaaagggtgtgacctgcgcgaaaaaacacngacgggaagaaaaaaattgtgtgaccgaaaaggagaagagagaacacggaagcaggggaggaaggaaccagaccgaaaacaaggaagcacggaacaaaggggaaatgcgaagcaaaaggaaaaaaggggcccacaaaaaaagaagacccccaaaagcggcaccaaaacaaggcaccgaaagagggaaacggaaacaaaaacagaggaaaaagaagtgagaaaaaaaa

SEQ ID NO: 152306 - DNA, 400 bp, Glycine max
  unsure (1)..(400): unsure at all n locations
agcttataatatatctatactctcnanattaaacatcggaaactctcgggatattcaaatagtcataactattcacacggttgtccgattcgggcgcataatatgtcgagaggctcggaattgaacaacggaagctcttgagaaattcaagtggtataacttttcactcggatgtccgattcaggcatatcacatatcgagacgctcaaatatgaacaacggaagctcctgagaaattcaaatggtcattacttttcacacggatgttcgattcaggcttatgatatattcatacgctcgaaattaaacctcggacaccttttcgaaatgcaaatcgtcataacttttcacactgatgtccgattcacgttattatatattgatacactctaaattaaac

SEQ ID NO: 152307 - DNA, 345 bp, Glycine max
gtgcacaacaagttttccacataatcaatgcgcgcataaaatcaccatcccctgttgcccacctccaactgagatcacgtactcccacgtagcccatatactcgtttctctgaacaccgggtacccttcaattctcccatgcgtccacaacatacaagcaaaacaacattcacacagctcaagctatctcaggaaatcaaaacagagcaaatgcagagaactctgccaaaacaccaaccaaaaatcacagctgtgcccactgaaagacaccagtgacaattccttcgatccaatgtgttaaccgttggatcgactccaaaattgttctggaagtctatagagcat

SEQ ID NO: 152308 - DNA, 452 bp, Glycine max
  unsure (1)..(452): unsure at all n locations
agcttgtaaatggatatagatctaanatttaagngnganaagggaatttattgtatggaaaccttcttgtgaagagaatctatatctgtagagtaaaaaaaaacagagatcttttagttgttgaaagtgtagcaagtggctgacaaaggttgttacaaggggaatagttggtctatctgagcctaggtgtgaagtctagtggtttgttggtccaacagtggctggttgtgtttgtgaaacctcctcttgaagagtaaggactggacgtaactcaaggttagggtgaaccagtataaaaatcattgtgcatcatcttcttcctctttctctcaactaatattaatttgtacaatgttcactgcttcttgttatcactaaagcataatactccgttgacaaatactcttacaactaaaccctattgttttatcgaagtcctcttagctaaacat

SEQ ID NO: 152309 - DNA, 454 bp, Glycine max
  unsure (1)..(454): unsure at all n locations
ntgtanggatatggggtacacatcacatgtggttctatttggcggncaggcgatggagcacaacaagttttgcacatacacatatcgcgcataaacccaccatcccctgttgcccacctacaactgagctcacgtactcccacgtagcccatatcctggcttctctcatcaccgggtccccatcaatcctcccaagctgtcccaacatccaagtaactcaacattcaaacagcacaaactatcacagccaagaaaacagagcagaggcagataaatctgccaaacaccaaccgaaatcacagcttgtctcacttaaagaccctagtaacaattccttcgttccaattcgttaaccgttggatcgactccaaaattgtactggaagtctctagtgcataagcctgcattgtgaccgttgggatctactagaaaacatccagaactcactctgcac

SEQ ID NO: 152310 - DNA, 404 bp, Glycine max
  unsure (1)..(404): unsure at all n locations
agctngttctgttccctttaggaatgcttatangaaagaaaaattacaaagctatgaacttcaaaatgacctaataaatatccctacaaatatccattattctttgtcttttgtggtaagccaaaatatccattcacatctacatcttcaatgttgtaaatctagcatttatatatgatgttgactcaataaggaattcagtacctatgagcaaaggaaataagcaaaccaggaaacagaatatctccaaatccaatcatgtcataacctccccagggatcaaaaagacgaggaaatctcaaaagcatatgaattgcttctccaccagccttgtcacctcgagcaacctaaaaagaaagcccatgtaagagtatgaanaaactataaaaaccagaattctctct

SEQ ID NO: 152311 - DNA, 460 bp, Glycine max
  unsure (1)..(460): unsure at all n locations
gcttaacacataatgccttctcatgttaagctatagatatgatctctcttattgatatggnngctctctggtaacaaataacacatcaattcacatagaaactctcacaaatatacctaaatcactttcagctaaaacctaatctacgataaagagcacaatgcatcaagagtattaccaacaaacaaaaagctaaaaccaaatgtaaatacacacaatggggacctggaaaaagacaaagaatgagagagagagagagaattacttggaattggtgttactgtcaatgataattgtggcaacaaatagaagaaggggagagaaagtgagaaatgcgacgagtgaaattttttaagcacatatgactcatacttagtgacggtttgacaaaccttataaggtgacacaaaattaattggtattaatcatatagttggagtagacgagaaaaaaaaatatt

SEQ ID NO: 152312 - DNA, 429 bp, Glycine max
  unsure (1)..(429): unsure at all n locations
agcttgagctagacctttatagtaaacatgtcatgtttagtcgagccttaaataggccgagccataggccctagacaagcggctgagctcatttccatccctagttacttcacctgtattaaagttaattgtgattntataaagatattacaataacgtaattattgtttacactttacatgtatttatatntatnttacatttgtttttgtgggtttgataaactagaattgacgtttgttaanaactaaataatttagaatttatcccacttttaatttgatacatttatcctaaatttttaaaaactacgaatttatccaatcattatcattaacaacacaaaatttgtgataattacaaaaaataaaacttagataaaaatgtgattgtacaataaggatgagataaactctaatttttaaaatg

SEQ ID NO: 152313 - DNA, 465 bp, Glycine max
  unsure (1)..(465): unsure at all n locations
tctccccntatttgctataaataggggaagaagtgtttaattttttggttagccccttaagcacttctctctctttcgatattgcttaggaaaattgtttccgtgaataaaatccaagccgaggcgcttccgtaacgtttccgtaacgtttccgtgagtaattacgcgaagattcatcgttcgttcttcattttcttcagtcttcaacgggtaagtacctcaaaccaagcttttcaattcattatatgtacccgtggtggtccacattttgtttcatgtattttcattctcattttcatttactttttataccccttttgacgtgcttaagccatttatttaagtcatttctcgcttaatctaaaaataaaataaatttccaccggatcgttgaattgtatcatccgtcattgtcgtttgaaatgaattccgaccattcgatcgtgccgtaaccacgttggaaat

SEQ ID NO: 152314 - DNA, 461 bp, Glycine max
  unsure (1)..(461): unsure at all n locations
agcttccatgtaagaatgcatgtttacatttaattgaatcatctcccaaccaaagtgtgctgctaaagaaatgatgatcttgactgtattcatttttgccactggagcgaatgtctactcataatcaatcccataggtttgggtgtattcctttgcaatgaaccttgccttataccggtccaatgtgccataagcctgatatttaactgtatatatccacctataacccacttcctttttgtctttcggtctctctacaatctcctaagtctcgttcctttccaatgcacccatttcttcattcatggctcgaacccaattatcatcttttaaggcttcttgtactgatgtanggattttgatagaatcaatagttgaaataaaactcaagtgttgtagaaaaagatttttagtagacacaaattgngatataagatatctggcataagatctctttcttt

SEQ ID NO: 152315 - DNA, 285 bp, Glycine max
ttcacattacccagtgtatatccgatctcccatttatgcgttgcacgccacccatttttagaacttgacctccacctcgttgcacccccatatccatgtcattaaaatgacgggactacacgtatcttatacaatcaaagttgattcacacatgattatctctactaactataacccttttggctgaactgaaacttttatatcacactatcgccttaacgtacacaccattggcaaccagaataatataatctgctaccaaaactatggttgcggaaaatgcta

SEQ ID NO: 152316 - DNA, 470 bp, Glycine max
  unsure (1)..(470): unsure at all n locations
agcttagcctctcattaatgcagagtatctagcacttactcacaccataggaatgtactaaaattatttaattttagtgctagtagaactaacacgtgacttattcttacccatatgaaccttcttcatgggatctccaatcacaaaggttgggttaccatgccaccctataataggctaatatgccatttccagattgacaggagtagattaaccttttcgcgaggagatataaggcctaaattgagacttagacatcgaattttgatgagatttnttgcagacacccttataaaaatgatatcttggagttcccgaagcctcattaattatttccaagggaatantttttcttttatttttaaagtggagaaatgcataaaatcccaaaaaaaatattaaaagggcacttanaaaatgaatgttgatgtgaattttggcagacaatccacttataatatatccaatgt

SEQ ID NO: 152317 - DNA, 402 bp, Glycine max
aaatattggggcaccacccttacatgaacctaatgttcacattctcttctttgtgatgttattttttattcttacttaaactttcatattcttacattttaagtttgtctatttgtatctcaaacctatttgtatgtaaaatcttgaagatgcttaaagacaaagaatacttgggtattgtaatctttgggtataagattgcaattgtaacacctaataaggcttagagaataattgtttatagctagaattggttagtggatctctttcatgttgaagggattaaatgtaactcaagttgagcgaacaagtataacagtttgtgtgtattttgtaacaccctatttttcgaaaataaataaaagtgttttatgaaaaattaatagagtgttagaaataaag

SEQ ID NO: 152318 - DNA, 463 bp, Glycine max
  unsure (1)..(463): unsure at all n locations
agctngaagacaagactatacgagggatcttccttgtttatagcaatatctctaagggctaccgtgtctacaacttgcaaactaaaaaactcgtcatcagtcgagatgttgtagttgatgagtgcgcttcttggaattgggatgaagaaaaagtggagaagaacgttcttatacccgctcaactacctcaagaagaagctgaggaagaagacccaggtgaaccaccttcacctccaccacaagaacaagatcaagaactatcatcactagagtctactccaagacgagtaagatctttggtggacatatatgaaacttgtaacttggccatacttgaacctggaagctttgaagaagcatcaaagcaggaagtatgggtctaggcaatggaagaagagatacagatgatcgagaaaaataacacatgggagttagtanattgtccccatggaaaagatatcac

SEQ ID NO: 152319 - DNA, 455 bp, Glycine max
  unsure (1)..(455): unsure at all n locations
tactaagcctgaagctaaggaaaagtttgaagaagtgttgaagtttgttgttttttacatgcctaactcccttgagtggcattagtattggttgttgcattttaacacattcgatatctattttgcattatgcatcatcatggtttgtgtgaacaaaagtttatgagttagaaaattttcttcagatgaaaaaactctttgttttaatcgattacaacctcattataatcgattacaacaagttgtctaaagtttgtagagttgagtctcgtatcagtttaatcaaatagcgatatctcgtattcaattacactgttgtttgagagagtgactggtttattcatgagtctctgctttaatcgattactatgtggattaatcgattacttctctctcatgtaagtgttcagaggtgaacaagaacactntaatcgattacatacgacatctaatca

SEQ ID NO: 152320 - DNA, 466 bp, Glycine max
  unsure (1)..(466): unsure at all n locations
agctntattcacatttataattatgcatttactggatgtccatagcttcattgaaatatgtttaagatataggtatacagaattttcatggaaatcaatatacgtatgtaaattttttatttgttatatatgtatactatatatttatccaatgatatgtttgatattattgttattattattttatatatatatatatatatatatatatatatatatatatatatatattattaagtttatgttaatgtttttagtacattaattatatatatatatacatgtgattacttccagatatatttcatgtgtttaattatntctgtgcacctatgtatataatatctatctaatgataggggtattattatcggtattattaaatatatatgtaatatggcggtatatatatatatatatatatatatatatatatatatatatatatctgatacatcgtaatata

SEQ ID NO: 152321 - DNA, 424 bp, Glycine max
  unsure (1)..(424): unsure at all n locations
tcagctgttactgtagatattgtcaattgaactcngttgtgtgtacttattttgcacattcccacagttgggatttgtgaaataatattttctgtaagagaaatgtccctcacacgtaactttcttttctcgcatatattcaaatttgtcccattagaactatgatcgcagactctttaactgttcaatcatcgtgaaatttgaacaccaggtttggaacttatttcctcatattctcatcgttggaatttgtgaaataatatctaggagagataaatgtccctagcacaaagacattgaaatagaggcttcaatcccttctccttctctctaacgcttggaaaccttagctgagcaaccagagaaaaagcatgaggaatcttaggaattgctagagactctccatattgtgagaaatcatttt

SEQ ID NO: 152322 - DNA, 348 bp, Glycine max
  unsure (1)..(348): unsure at all n locations
tggatcttcttcatttattatatccttngcctcctgaagatcaatggcaatggaatggagaaaggggaaaggtgattggagatgccacttcaatgagaagatgagtcaagaacaagctcaccactataggaaaccatggataagagcttgaaggtagtanaagatgaatatattgagagggagagaggggggcattaaatttatgcctcaaatgaagtctgaactttgaagtctaatttctcaaatgattcaaattgaaaaaatgcacacaccaggcccttatttattgcctaagtgtcacacaaattggaggaaaatttgaatttctattccaattcactttgaatt

SEQ ID NO: 152323 - DNA, 448 bp, Glycine max
  unsure (1)..(448): unsure at all n locations
agcttggaacgagaagaagccatcagcttatcacctaagggtctntggatctatatgatgtattcatattccagacatgaagaggcacaagcttgaagacaagactatacgaggtatcttccttgggtataacaatatctctaagggctaccgtgtctacaacttgcaaactaagaaactcgtcatcagtcgagatgttgaagttgatgaatatgcttcttggaattgggatgaagaaaaagtagagaagaacgttcttatacccgctcaactacctcaagaagaagctgaggaagaagacccaggtgaaccaccttcacctccaccacaacaacaagatcaagaactatcatcaccagagtctactccaagacgagtaagatctttggtggacatatatgatacctgtaacttggccatacttgaacctggaagctttgaagaagca

SEQ ID NO: 152324 - DNA, 461 bp, Glycine max
  unsure (1)..(461): unsure at all n locations
tattatatttgtgcacgccatggtgcattgtatttgttgttacgtacganagctatctagacatcgccgttttctaaaagctcatcacccttacggaagattgaaaaaagattttaatggaagtcaagagcacgaaactgcgcggataccgttaactggtgagcaggtcttccagcggattgaacaccttaatactatatttggaaagacccaaaagaaggataaaagtaagagttgcatatggaagaagatgtccattttctttgatcttccgtactggtctgaactagatgttagacattgtattgatgttatgcatgtagagaaaaatgtatgtgacagtgtcattgggacactccttaacattcatggcaagacgaataatggtctaaatacctgtcaagatctatctgacatatgcatacgatcgcagttgcatccaatgtctgatggtaaaaaat

SEQ ID NO: 152325 - DNA, 294 bp, Glycine max
  unsure (1)..(294): unsure at all n locations
acaccancactttgaattcttctataattgaatccagataccattactccatccctgcttgcctccattctagacatattaatcatgtatttagatcgcaggaaaaagcactattgcatgcgctctgagtcaaaccttgctactcctaagaaaactgacttacatccttgatggagacaatattccggctgggctaaaccaggatcttagtcttatagcacaagaccgctctgaaaacattataaaggatggagagactatctatattctccatatcttgctttattaaatatt

SEQ ID NO: 152326 - DNA, 441 bp, Glycine max
agcttggccaccaatcaggtcttatgatgatcaacttcaccattagggccaactttaatggcatatacccatctaaaaccaaccaccttctttttaggacgaagagaaaccaactcccaagcaacactatgttaaagagcctgcatttcaacaatcatggcttgtcaccatccatgatgaccaagtgcttcatggacatctttgggaatagtacgagaagataaaggggaaacaaaagagaaatgtgaagaagataaacgatgataactcagataaataggatgaggattttgagtagaccgaatacatttcctaagagcaatgggcacttgagtcatcatcatgaggaggcgatgatgagaaagaaggatctgtcatatgggaagccaatggagaaagacatgaaccagaagaactttcatgtaatattgggactagtcc

SEQ ID NO: 152327 - DNA, 437 bp, Glycine max
  unsure (1)..(437): unsure at all n locations
atggacttaccttgaattaatttctgcttgttctcctttngagcccngattccctttccttgttttgaatctcactacaagccttatgtgaaaaaccatgatattaccatatccttaaagaattttggagctttggaattgttttgggaataagtgtggggggtttttgtttcattggacaacttgttttgttgactatgcttcatgatgtattttgggccatacttgatgtacattgtatattggttaaatgttggacatgctgaatgaaatgttgtttctcaaaggcaaaaaataaaaaaataaaaaagcaataaagttgagtgaataagatctttaatggcacaagaatgatgaaactctgggttctactcttcatgtgtaattnttatctttacttcttttgtgtttttcttaatatgcacttattccccttt

SEQ ID NO: 152328 - DNA, 171 bp, Glycine max
ttaattatttgtaacgtcaatcttggattacttaacacttacatatgaaacaatatcttggcccctttctttattcatcgaacaccattcttgccatgaatatgaaaaatgatttccacagttcttctaagcaattctttgcaattaaggtacatgattttatcaagtatt

SEQ ID NO: 152329 - DNA, 415 bp, Glycine max
  unsure (1)..(415): unsure at all n locations
tttcttttaatatacttatcttgctcattatcctttcacttgacttgttctaacaacacacacttatttgaactcttttcttcttctttctttctttttttttgctgagtgtgttgctgtttcttacctttaaacattaaccatctaacagactccccaaaatttggggcgaaattgtcctaaaccaatgtgccctcttaaaaattaagcaaggtaaataggaattacaactcaaggctgacggttcaatacaattacagtttatctcaaagatggatgcaaatgatataatcatcgataacaagtaagcttttggtcaagtggcttgtatatacaacaatggccttcatcatttacaatttatgcatctgattctaaaatnttagagattgatgaataaattattactctatgc

SEQ ID NO: 152330 - DNA, 368 bp, Glycine max
  unsure (1)..(368): unsure at all n locations
agctnngagaatatttcttntcctncatttgtttgctcccaaaacaagttctagcaatnatgtcagctgacaaacttcgcacatcatcgtcaatattaatctctgaaactgctccctcacttacaagcctagcctcccaagaccttagtgttacatttgttgagtccactatcagattaaccattgccttcaacataatttacagcaaaagataatcatgagattctgattgtaatacaggataactgacattttttagctatcttgtaaatcagttctaggttagttctcaaagtcaaaatacttcaacatacgtaaatcggataacatacaatttggtccctagattgacaatttgtgttgctttg

SEQ ID NO: 152331 - DNA, 457 bp, Glycine max
  unsure (1)..(457): unsure at all n locations
tgcttgagaattgggcagcaagaggtagagagatcactcgtgtttatgngaaancangggaaaaccatagtccttgatcgttggaaaagtccttattccccattcttaacaacttttaaattgttacatgcaaattattccttttattttcttattggcttggtatgaggtgatatgccttttgcggtgcacttgtataaagaccgcactttagtgctaatgattatacaagaagtaatgcaagtgtatattatctttcattcttggggaatttcacatttttgttttcatgtttcgcctctatagtcaagcattgaccatctccttgaggtgaatgatactaaaaatgttaggcacgaatatctaccactagttcatgttgcacattaatgttatggtgagatcaatcacccaaacgcaatggtgatggcaaccatatctaatcaccctattttct

SEQ ID NO: 152332 - DNA, 293 bp, Glycine max
  unsure (1)..(293): unsure at all n locations
ttcaccttctctctaatccaatatgttggcttancgagcatccgctaagcacaacactcatgggctaagagcgaggaagaatcccaaagaagatgggctgtacagattcgctaaacacactgctccagttcatccgctaagcgagaaaggcgtgctaagccaaaaatcactaacgtgcgctaagtggtccatacgtgcgctaagcacacgagcacgaacaagcccacctatttaagcttgaaatcaaattttgtgaagagagtctggacaaggattcacacctttgcatgtct

SEQ ID NO: 152333 - DNA, 459 bp, Glycine max
tgagatgaggaagtgttgaagggtgaaacttcctgcttttattgtttaccacagagtggtacctggagatatgtcgcgggggtcatgagaccttggggacgtcaggtggggtgctattgcccaaaaccaatcttgaccaatcccgacccaacccgggcatagtctgtcagtgagaacctgtgatgtacctaaacaggcgagctcctggcagtcaacatataaaagaaacaaagaccacaaagcaaggaggcttgtggtggctggccagctgagaattttgtgtgatatgtggattatggcctctggttatcgattaccaacggtgggttatcgattacaaggcttaataatgaagacaggacgctaagatggtctttggtaatcgattaccaacgggtgtaatcgattaccatgctcgataaacgaattcaggaaactataggagaccctgggtatcga

SEQ ID NO: 152334 - DNA, 385 bp, Glycine max
  unsure (1)..(385): unsure at all n locations
agcttgatgtgaacaaagacaagtaagtttttctttttntacctaaaaatatgtttttccaaataattcaatattaatggttaagtgtttaagaattgttgcttttgcttatttactattactatatattttgcagatttttgtcaccagaagaattgataccgatactttcttatctgtatccgggagaggaagcttatgctaaatatttcacatgttacttaatgaatgaggttagttaactacctatgaattgacatggtgttgttaattgtattaatacatattgaagtgaaatacgaatcactagatatatggatggaacactttacatgcttacctattaccaattatttgctgagaatgtatgtatacatgtatttga

SEQ ID NO: 152335 - DNA, 463 bp, Glycine max
tccttgagaagattcctaaagaagctagagctgagctactctctcctttctaatagctaagctcacctgcttaagatgagaagctagagcttagctacacacccccaataatagctaagctcacccccatgacaaaatacatgaaaaaacaaaaaaagtccctactacaaagactactcaaaatgcctcgaaatacaaggctaaaaccctatactactagaatggccaaaatacaaggcccaaacgaagggaaaacctattctaatatttacaaagataagtgggctcatacttagcccatgggctcgaaatctaccctaaggctcatgagaaccatatggccttcccttggatctctggcccaacctacttggagtcttttatccaatgcccttgcagggtaggattgcatcacatggactataaaattacaatattaaatagtctatgtatttccaattat

SEQ ID NO: 152336 - DNA, 277 bp, Glycine max
catgcaagcttggacttggctagaggcacttactgttcattattgtctaagacccacaaatgaggctctacttaccctcctctgtgaaagagaaaatcagacgggacgaactagtgacaaaactacccccagaaaacgcaaccgtaggaggtataatgaatgaatgaggaatgtcctccccatcagttagctagacagagaacgttctaaataaagacagagtaaagaaaattggctatacaaacaccacatatcctagtttgtaaaaaacaattcg

SEQ ID NO: 152337 - DNA, 374 bp, Glycine max
  unsure (1)..(374): unsure at all n locations
ctgcaagcttgaatgctctattcaatggagttgtcaagaatatctncagactgatcaacacttgcacagtggccaaggatgcgtgggagatcctgaaaaccactcatgaaggaaccttccaggtaaagatgtccagactgcaactattggctacaaaattcgaaaatctgaagatgaaggaggaagaatgcattcatgacttccacatgaacattcttgaaattgccaatgcttgcactgccttgggagagaagatgacacatgaaaagctggtgagaaagatcctcagatccttgcctaagagatttgacatgaaagtcactgcaatagaggaggcccaagacatttgcaacatgagagtggatgaactcatt

SEQ ID NO: 152338 - DNA, 446 bp, Glycine max
cgggtacctatcctagttcgtgacgaattctttttataaccgaattggaggcatgtccaatgggcactatgacgaccattgttgaatcatggatgtcgataggaggagaaagagaatggaaataatatagaggccttatccccaaatgcgcaagcatcaacctcatcaagatcatgatggccaacccgctcggtagattagaggtgtaatcaacaccattgcgagcttctgatagagaattgtctagttagtcttgaaagcttcatctccacgccatcacaactggaaaatcagcttttaacataggttattaaggactttcaacatcgattattaatcaatgtgaaaactaccgatgttaaaagtattaacgttaacattgatgttagaaaactaatgttaaaccaaacaacacaacatctgttttctaaataaccgatgtcaca

SEQ ID NO: 152339 - DNA, 194 bp, Glycine max
ctttttttctttaaaaggtgcaggtcttgattcactaagactatagattcagtcgctccgagtcatactactaatcccaacaatatttgtaacattggtagcttctgagttggcattcttagattgttttttatcaaaaccatcaattcacactgtgacttcatatctccaaggcaccactttattattcttat

SEQ ID NO: 152340 - DNA, 154 bp, Glycine max
tttgtgaggaacttggtgacgattagagtgagcaaaggtatgatcactggagaacaccgttattgtctcccatcataccgtcctccctgggtcgcgtctagtgggacacatcttgacacatttgtcctacactctgctatctcatcacttgaag

SEQ ID NO: 152341 - DNA, 161 bp, Glycine max
  unsure (1)..(161): unsure at all n locations
gaaatttcttttaaaagagaccctgttacgtaaaatgttttaaaagaagcccccttgtgtaaatntgctgatacttgatttgtcgtggaagttttagttgtgccgtataagtgaaaggaaaatggagggtcttgagtgtgtaaccaatgaagaccatgatg

SEQ ID NO: 152342 - DNA, 439 bp, Glycine max
tcatggatttccttcacaatatatcggatttgttgtctttttctcagcagtttttggagggagatgtttaaattggctagaactagtcctaagcatagcacttcttatcatccccaaacggatggtcaaaccgaagttgctaatcggtgcttagagacctatcttatgtgctttgctggccctaagcccaagacttggttgaattggttgcattgggctgagttctggtttaacagtaactacaatatctttgctggaatgacaccttttaaacctttatatggacgagatcctccattgttgattaagagctgcaccattccatcaaagttggatgatgtaaatcagttggcccaacaacgagatgatttgcttgcggaattgcgacatatattgttgatatctcatgaccagatgagaacacaagcaaattatcacc

SEQ ID NO: 152343 - DNA, 456 bp, Glycine max
  unsure (1)..(456): unsure at all n locations
ggttgcattntacctatgacgatccttcatacgtcttttctattgtgtaccaaatatgttttgcacttctctagctaaggaccttcgtatattctttctcagagaggatgcacaacagagtgtttcgagctttaaagtttagcataaacctttgtctttgagcatatgtcctaaaggttttgggaacttgacttagttgattgtccaatggaatatagtttccatgttctatgacatcctagaggtctatataaatggactcaaaatgagctatcatacgttccttctagtagtcgtattngacgcctttgaatagtggtgacttgtttgtggagtatcattcttccatatctatttgactgtatgatctntcctctatatttgtaagaatactcaacccgagaggtcgagctgtgatgccaacaaatatacaatataccacactttaatggggag

SEQ ID NO: 152344 - DNA, 182 bp, Glycine max
agctttatctgggcgggtgtcagatgcttgggtcaagtcatcgcgatgagcgacgaggactgccctatgtgatggtatgcctgttgggcttgtacacaccgttactgtctatgcgctcggctactggatgaacacctctactgtttaaccacattcttgatgttaccgattctttctttgga

SEQ ID NO: 152345 - DNA, 277 bp, Glycine max
ctgctgccgaacatgtatgatcttgcaaattaaatgaccactaatcttcaaattgaggcccctatcgtcagatccatattgttctattcgcattataataccatatctctcatgttcattcatacttataaagaaattgctttgtgcccgaatttacgttttaccctgtggcgggactaattgatgggacgatatgaaattatcgttcgctcataatgaccgttatgttgccgattgactaataagattttacaccgactaatcgtgctggtgaact

SEQ ID NO: 152346 - DNA, 296 bp, Glycine max
cagcttatactcattgagaagtacataatatctattataatatggcgaagagcataataaaatttatacatcaataaagtcatcaccttcaattctatactcagtctaactttatgaacataatataatttatgaattggtgaacacatcaaattgcaagttcacatgattgagatattataattcaagtttaagaaataaagagtatcatttaacatattattaaattaaaaaaggctaatcggttgaaaaacataaaaaattaattgttattcatgtcaccatgtttaacaata

SEQ ID NO: 152347 - DNA, 433 bp, Glycine max
  unsure (1)..(433): unsure at all n locations
tatgtatgatgctttgttttcntttnggccncatttggtaatccatgaaatatgttcccctgtatcagatgaatcaaagaatgagggtagtttatattatatgcttggacttctggcctcacaatacttgtaaagaattgcggtactgaactactagaataatcctcaagggtaatcctgtgttgatgttctttagccatgacaaaagcttccggtagatctgtagcggattcccttaatgacggtgaatcagatgatgtatagtcagaagaatgagcttcttcttctataatggaagctactatcctatcttgcaacaatttccttatcctttatgcactgttccttcttaaagtagcttcaatgtccaagtccagatgaactaaattacctgtatgagatctatgcatacataatactgatagaaacaaca

SEQ ID NO: 152348 - DNA, 382 bp, Glycine max
agcttctcaaggaagctacctagtctattattagtttcttgtgtaacacttgttctaactttgatgaatgagagtcttgcgagacacaactcaaagttcaacttctctccctttttcctccttcaatttcatgctcccccctctctctttctctccctctttattttcctccattgaagcatcctctccaagcttcttatccaaggctcatcttggtggtgaagctccttctttcatggcttattccttaatggatggtgcctcctctcacctcttttccttggtctttcaatgcatctccatggtggaaaatcaccattaaaggaccccattgaagctcaaagatccaacctccatacaagccccacaagcaagtatccat

SEQ ID NO: 152349 - DNA, 461 bp, Glycine max
  unsure (1)..(461): unsure at all n locations
agctgccctctggttccattgccctctgacacactctattttcatctggtggnggcgaaccgagagttctaattcttgctatatggtctgttactctgtttatgcgtacagttattacttgcattctttgtctagaagattagttgacagataaatttctgcagatatctttatcaactgcctccattgcagccaaatcatacctgtggaggagcaaatatttgggctgatgttagtagcagtagagagatgttttgttcagcaagatcgtattgctccacaattaccaagagaattccttgcagtagtgggtattattttattccaaccattggttactccaaatagactgcgataagttggaccctggatgaagtaatccaaagtatgtaagatattggatgacatgacctttcatagttgcactcgtacacatcatacttgtaaagtattcagtaaaa

SEQ ID NO: 152350 - DNA, 317 bp, Glycine max
attcttctcaccccgcgttatgttacaaaattagatgttcatctaaggcaatcatattttagagggcttattgatgcgtggatcttcctcataatatggtgtatttgccaaacctattgaacctctctcagagggagggaggaatctatggcatcttatgtgttcctatggaattcgcgatatgcatattattcggctttatcccctttattatttaaatatgccattctttctaatcacacattacgcgggaatagcttcgatatatatattattcctttctcttttcaaaaataagtaataccaaagactttggt

SEQ ID NO: 152351 - DNA, 427 bp, Glycine max
tcgctgggaccctaatcctttactgctcaatttgtctcttccgctcctccaagggtcaccttgccacctcagtactcagcactcagcactcagcactccgcaccttccctgtgtgcttccacgtcaatgcttacatttttgtctatcgaacttgcataaaatctgtgcaatacactattttttttagtaaaaaaaaattgaataaataatttcttaaaaaacaaaaataaatgcatttaaaaaataaaaaagtacaatctgtcctgcattgacacgtaatactagccaaacaattaattaattaattaattatatatatacataacaaatgtggaatcctgacaacatttataatgagatatgtataaaaaaatattattttgatacattatattggattataaggtagttaaatgttgagaaatta

SEQ ID NO: 152352 - DNA, 420 bp, Glycine max
agcttatatgtgagttttcactcataccttatcaagaagttattcaaacatactaataactagagcttaacagcattcatatattaatcacaattacatccatgcaggcttggaacatatggtggcttatttgcatactttctatccgaaaaacaaatactaaatatgaagttagccattacctgtggtagaaaaaggagtaacggaaaaatcatagcagcaacattcttcaagtaatcagtatgatcacctgaagtaagagatggcattctttagacaagtcgacacatttatataatgacactgaattgaaagtcatgatcttaattatccatgacacatatacaatgaatatgttttgtctaaagaacaatgtcctatgtcatataaatagtctaattacatccagctttaaacttg

SEQ ID NO: 152353 - DNA, 454 bp, Glycine max
  unsure (1)..(454): unsure at all n locations
ttctgccgctggagccgacccatcaactgccgtatctcttttatactagngatccctaagctcttgaccttgacttgatagaacctctttttaagcgaaggagtttgacttgatcccatgttttactaaagtgaaacaaaatctaacgcgaatcaaaactccgacatctatcatgggtggaatggatgaatgcatgaagaaatgcgtatgatatagatgcaatttatgaacacaggagcctgggaaattgtctccttcttagatacaacgtcttggggtagcatagtgcccaacgtatgtatttaatattgtgacacggaccctccattggtttgccaaatagaggggatcaagacagaacccgtgcgtgatgcatatgcgaaaggcgcaacacgggaatgtacatattatgacaatattcacaaaatataagcccattggtacatgacactta

SEQ ID NO: 152354 - DNA, 466 bp, Glycine max
  unsure (1)..(466): unsure at all n locations
agcttatgtatataaatatatgtttctaatcaatcatgctcttgtgttctacgttgtagtctaaattactaaacctcgctgtaagagaaaaaaaaacacaaatgagtgacaatgcattaaccaataccttatgaagtaactcatacgaatcaaaattgaattggataaaaactaaaaggattttctttattattatttaaatctaactttcttgtcatactcgtaaacaattgtccacctacaataatgttgtccgtcacaaaagtacttcatcgatttcagtaaagaaaaaaaaaaaaggagaaacaaaatactaattacgcaaaaaatgtattgcacattactagctaagatctntgaataatgccaagactacagcttcctcggacccagaatggtatcgtcttgttgatatattaaaaaaaaaaaatctggtcaatacgtactcaaaaaagattgatagtat

SEQ ID NO: 152355 - DNA, 461 bp, Glycine max
tccgttcccgagagcatttcttatttaagcactgcattctttgctttcgtgtagcttaggaaaaacgtcatttcttcttctttctttctttcttccaaagccatttctaaagtcccaatcactttctccatcacccatagccaccattagccaccacaaaccatcgttgttctccattgaaaccccacaccgagaggaacccttcaaccaaagcggaatcttccaacttggcttgcggtttcgatagagaatgaaaccctaatctgacctttcattttctttcgacgtaaccatgattctacgcttgtttcttgtctttgcatcttttctgactttggaaccgccattgcatgtcttatgcttcctttgaaatgcatgttattttcgtaacctacattgaactccggtcacattggcgtggtcggaaattcctaatgatgttcctttgtaaaacccgaaat

SEQ ID NO: 152356 - DNA, 441 bp, Glycine max
  unsure (1)..(441): unsure at all n locations
agcttatccttatggctggcctccggacttcaccctccgtgccaccccggaagatttaagccaagcccctactttcgaggggcaactcccaccttatgacgactatcccgggcaagacgatgaggaaggagatacccatcttggccccctgctccacctcaaagatccgtccccccatgaactaccccaactgaacataatccgccatatcccggcctcacccacacccgtaaaagaatctgttcccttcgcggaagataagggaaagattgaggcgcttgaagagaggttacgagcagtcgagggccttggcaattacccattctcggatntagcggatntatgtctcgtgcccaacatcgtcatccctcccaagttcaaagtaccagactttgacaaatacaaagggacaacatgtcccaaagggcatctccggatgta

SEQ ID NO: 152357 - DNA, 464 bp, Glycine max
  unsure (1)..(464): unsure at all n locations
tgtatagttccacaatttatggttatttgggactatttttttatataatctngnnttatggttaaagttgtctctagaacatttccattggatttaatgatgaaatctgtgcattttcaggtaaaaaaaaggctaagttttgaaatgcaaaaagtagcaattgggctaagcgcatatccaccgctaagcgtatcttcagtgtgctaagcacaaaggagaatctggtagagcatcatcatcaaagtcgcgtgctaagcgcgagatcagtgcactaagcgcattttgtgccttcagccatgctcattgaaagacttgcgctaagcccgattccacttactcacgctaattgcgatggtggcgcaaagcgtaaggttgcgaattctaagcctatttaaagcctgttgtgtgcataattatggtacacacctttctaacatacaagctgatgcacaaagttcaacaat

SEQ ID NO: 152358 - DNA, 473 bp, Glycine max
  unsure (1)..(473): unsure at all n locations
agctngaatggaggatggatctttgagcttcaatgttgtccttcaagggtgatgttccaccatagagatgctgcggaagatagaggagaataggtgagaagtggcaccatccactagggaataagccatggaagaaagagcttcaccaccaagagagtgccttgtataagaagcttagagaggaagcttcaatggagaaaaagaaagagagagagaaagagagaggggggagcatgaaattgaaggtgtaaaagagggagagaagttgaactttgaagtgtgtctcacaagactctcattcatcaaagttgcaacaagtgttacacatgcttttatttatagcctaggtagcatccttgagaaaatttcttgagaaacttccatgagaaacttccttgagaagcttccttaagaaacttccttgagaagcttctttgagaagcttccttgagaagctagacttagctacacac

SEQ ID NO: 152359 - DNA, 472 bp, Glycine max
  unsure (1)..(472): unsure at all n locations
tactaagcttatgttgctcattgactccagattgctgcagaagaatgtactgtgatctatatggngatctgcagaagaacataaaccacagactcttgcaacatgtgcagatntctgattcatggcaagctgggttactatgttgaccaatgcatcaagttttccttcatactttttatttttagtagataaggatgaatccgtggtcacctcatggactcctctaaggacaatagcatcatttcttgcactgaattgttgggagttggaagccatcttctcaatcaaattcctagcctcaacaggggtcatatcaccaagatctccaccactggtagcatcaatcatacttctctccatgttgctaagtccctcatagaaatattgaagaaggagttgctcagatatattgaagaaggagttgaccttgaagcccttatctgtggattcacatttgatctcaactatacca

SEQ ID NO: 152360 - DNA, 464 bp, Glycine max
agcttcaagaaaaggccgaactccctgtctaaattttatttcaggcttaaataggtggctttgttcatgctcgtgcgcttagcgcaactatgacccgctcagtgcacataagtgaatatcagcttagcgtatgtttttctcgctcatcggatggactgaagtggtgcgcttatcgggatgacccttcgctcagcgaacatgcatagctcatccttcttccagattcttcctcgcgctcagcggatgtcttgctaagccagcagattggctcagcgagagggtgaaaatcagcacttcacaaactcgcctaattaacctgaaattgagagagaatgattattaaacacacaaaatagaattactaagtatttatcacctatctttaactaagaggatttacaacactacaaaataactataaagtggatgaagttgatacaatttacacaagtctttgtagatgc

SEQ ID NO: 152361 - DNA, 460 bp, Glycine max
  unsure (1)..(460): unsure at all n locations
gttgagtaatatataatgtttaatgaatggaagtctgttttatattgctactntacatttaatttcaacttagattgatattggctaaaggttaaagtggtcataagcaattaatatttccgtttttggattggtgtattacaatactctttcgttgtatttgtcaaccctgaaaagctgtaatattaataaatatttttagttttagttttttaaaacatagttttattttaatatttacaattgtaattatgagaatacaacatattaaaaattaaaataaataaaagagggacaactcagtgattctcttcaaaactactaactctgcaccaaaatttgcctttttgtattaaagtgtttttaattcacaagcgtgcacagttaggaagagacaaagcacccctaactaattggtttgcgaacacttgatttgaccacttgttatgacaacaacact

SEQ ID NO: 152362 - DNA, 446 bp, Glycine max
agcttgaccaatcccgacccaacccgggcatagtctgtcaaggagaacctgtgatgtacctaagcaggcgagctcctggcagtcaacagataaaaggaacaaagaccacaaagcaaggaggcttgtggtagctggccagctgtgaaacttgactgatatgtgagatatggtctctggtaatcgattaccaagggtgggtaatcgattacaaggcttaaaaatgaagacaggaggctaagatggtctctggtaatcgattaccaaggggtgtaatcgattaccaggcttgaaaacgaagtcaggaagctaagggagcctctggtaatcgattaccagcctgtgtaatcgattacacagagggatgggtcactggtaatcgattaccaggcatgtgtaatcaattacacagtgctttatggcatatttcatgttctgaagctgtgtaa

SEQ ID NO: 152363 - DNA, 457 bp, Glycine max
  unsure (1)..(457): unsure at all n locations
cagcttcgctgtctagtgattcaagagagagaaaggtccttttctcttttttnttagagattatgatgtgtgaagatctgcagagaccagagcttgaagaagaagctgttctaagagcttgagatgagtttgtgagtggttatgatatcctagaggtgaaggagacatcctcaccacttatatttttgcaatctttcatcttgttcttctctttgatgtaaaggaggtttcttggttatggaaagctaaaatcctctgttggatcttccctgttggtacttgatgtaaatatccttttatctatttaatgatggtgtgtgtcttctctgtgctatcagctcttcattctagtattgccttaccttgatcacgtatatgcatgctttgtttggtatgcaacattggatactagtntgattctgataccttgatacgtattgactaatttttgtacttc

SEQ ID NO: 152364 - DNA, 429 bp, Glycine max
  unsure (1)..(429): unsure at all n locations
anngctgcattggacttgcgaaagccctactccatcattaggattattacctgccatctcaaacaaacaaatcaaacgtaacaagacaattatagtcgttgtttgaatacctcacccactcaagtgtagcacacaattatggattttctctaatgacaacactcttgccttttaccactctaattccccttgagttcttaggaaattcaagagattatggccacaacaaagaacaattcaccaatatgtgtaaggtaaggctatagagacaaggaaaaggttaaccaagaaaaaggctaacaatgtttttaggcacaatntaaggaaataaaattcagaatntaggaattcaagtaacaatccttcatacaaccaatatatttccttaaagatatatnnttttttatgttcttcaagcatgaaccattc

SEQ ID NO: 152365 - DNA, 432 bp, Glycine max
  unsure (1)..(432): unsure at all n locations
tgtgcgaatcaaatcactcctgcattatatgtctatcttgcattctttctttctttacccactcctcacgtttggttttttatggaaaaacaccataactaaacgcgccacatggcatccctatcgcaccagatccaaatctagaacgatgggtgatcaagaggagacacatgaacagatgaaagccgacatgtcggctctgaaagaacagatggcttccatgatggatgccatgttaggaatgaggcagctcatggagaaaaacgtggccaccgctgccgctgccgaatcatacccaactctcttgtgaaccgcgcgccatcctccctcaaacatattatgacggggaatgaacacgctggggcacgacggcaaccctcatctgggatacaancgagcggcttacccttatggattgacgcccaactactc

SEQ ID NO: 152366 - DNA, 381 bp, Glycine max
gaataatagaagttgtcactgcaaaaggctaaagatcttgatgcattagatcaacaaaatcatggtgctgtaccacaatacagcgacataaattattgtcgtgataataatggttaccatggggctaacagtgtgaaggtcacttcctatgatgaggaagcccttccgacaataaggcattttggatgccttctgctacaccataagcttctattaaagtatatgcaccttctaacagtctatatgtcctgaaggcatatgaaaactgaagttaagacacttttcctgttcacttactgaggatctattggcagaaaaattcaagcttttgaaatacctacattaccctacttcaaagtactccacctaacattgttctta

SEQ ID NO: 152367 - DNA, 446 bp, Glycine max
tgtccactgcgaattcgatgaccactcaagcttcttttttttccaatctgagaagtgtgattctgtggcatgtcccgctcatgaatgaaaggcttcagactttgatagtccgatgtatgatgcttcagacaattgatttgcttcactgcgctgaactttcccgtgtggagatctatgcggccgatcatagatatttcaagatgttgagaatagctgggtgtaataatttgtcaatggttgaggttgtttccccaactcttctgtgtgtgcactattgtgggcacgtaccaagcacattatcattccaagcacctcaattgagtgaggccttgttcaattttgtgcctgctgggaacagaaggtacttgcgggcttctgtgctggaaaagctggtctgtgatatctctaatgtcactgctctctcatcttcagtccttattcctgat

SEQ ID NO: 152368 - DNA, 455 bp, Glycine max
agctaggaaacataaaataactgaagtataattaagaaagctcattgtattctttgtaatgggagtacaccttaggcgcatagcaaaataatgaaaaataaagatttattctcttttcgattggaatgaagattccattttaagactaaggccaccaatataaacaaccatccaattgcaacaatgttgaggttagggttaagatttagttgccaagctgattgagaaatgctgtttgtacgataattcatacaataacattttgtgtctatttttttccatcaaattatttattacatgtcataataatggaaacaaagacaaataaatgctatataaattattatacatatatcacatatttttttagttttttctttctaaaaagtattgtctcaaattttaaatcacagatagatagaagatatatatattttatcatgtttcaattattg

SEQ ID NO: 152369 - DNA, 442 bp, Glycine max
gatgtgggactgcaggttcttttcattgtcttaagagtgacgtgggtggagactatcatgcacttcatagtatggcctgttcagtcacgactactatactttttattatctgcacttgatgttattcggagagggcattggaatttctacaggtatattttatcatattttgaagagatgactgagtttttttatcctttagaatttccttcttggattaatcaggacttcaaaatgcctatctcatccaatgtaacaaactatttcactatttgtgtgtaccaataagcaagtcctattaaaaccacatacttttatgtactggcctgttaaaacacaatgtttctaatatactcctcacatgataatcatgagtttaaagcatgggcacagcacatgcctacgtattacttgggtcaatacaataatgtcactacactac

SEQ ID NO: 152370 - DNA, 462 bp, Glycine max
  unsure (1)..(462): unsure at all n locations
agctngagctatcaaaagacttacttattcatttagtgctgatttctctaccttcatagtttagtcagtttaagatctcttataactgtcagaaggagaaatggtctcttaatgagctcatttcatactgtgtgcaagaagaggaaaggctgaagcaagaaaggactgaaagtgctcatgttgtgagtacctctaaagacaagggcaaaagaaaaaggactgaggagctcaagaatgaagctgctaagggtccaggacaaaagaaacaaaaccagggtgacaactgtttcttttgcagtaagcctggacatgtaaagaagaaatgtaccaaatatcatgcttggcatgcaaagaaggggttgcctaatctaccaaaagtcaattgattcttaaagatggatctatgttggagatgagtaatcagtgacagtggaatctatacgacactctatattatcatta

SEQ ID NO: 152371 - DNA, 457 bp, Glycine max
tcacagcaatgtactcaattatgtcttagtaattattttttttttataaactaaaaagttaccggggggtcaagatatgtaataataatagttttttgttatacatgcctatgcttctagatgttgaatatttaatggctaatcacttgagtgttgagtgtgttcacttggaggcatgtggtggataccgtgatgtgtcatctgtcattacttgatcccacatgtactgatattaataggagggatttcatggaatcttgaaaaaaataattcctcattttttaatatgtgcgtactaattaaattctgactcaaaaaacaagtatcttaaattcaactcttttttatgataactatcttgtacagtgaaaaatatgataacctataccgtttgtatgcatgtctcaattatagaaagatgatattgattatatgtatattctagttttcacgtttc

SEQ ID NO: 152372 - DNA, 450 bp, Glycine max
agctaggacttcctgtgtgttgggaacctctccttcctcaggtgtacccaaacccaatcacctggttcaagcacgactttctttctgcttttgttggcttgccttgcatagctcgcatttttcttttcaatttgagccttcacttgctcatgcaacttcttcacatactcagctttagcctgtgcatccttatgcttaaacatagcaatgttaggcataggcaacaaatcaagaggagtcaaaggattatatccatacactatctcaaatggtgaacaattagttgtgctatggacagcccgattataagcaaactcaacatgaggcaaacaggcttcccaagatttaagatttttctttaaacagtcctaagcagtgtgcctaaagtcctattgactacctcagtttgaccatcagtttgtgggtgacaagtagtagaaaacaacaatt

SEQ ID NO: 152373 - DNA, 393 bp, Glycine max
tcctctaccgtaaaaaatatattatcggccagtgtttttataaagaattgcgcaatgtcggcagaaaaatatcagtcgtggctatataacgaccgatgtcaggtatttttgtttcaattcaatccctgaataacttttggatattgtccaataggaaatgttcgatcggcgtcatcaagtgatgcttgctttttattttatacctgctggaccggtcatctttcctggccgacatcgactatcattttttttatcagtgtcggtgaataatgttttttggccgaagtgggctgatgtttttctagccgagtatatgataacacgccagtgtctgccgaaacacatattcggttgagctcgcacgataaaacaaatccgacctacattgtatgt

SEQ ID NO: 152374 - DNA, 460 bp, Glycine max
  unsure (1)..(460): unsure at all n locations
agctnttgtagtgttcttctatcaaaggttcaaagataataattctcaggtcatagtagggatgatagaaataaatctaaatcaaatagtctccctgatgtacattgctcctaattatacaatgaatcttagtgatttcatacaaaacataaacctataagtccagacaataggttttggaagaaactttgtagggcacaacttacatttagacatcaccttcataggcagaataagtgataaaaaatcccctagatacaggacaaacaccaatccattagtgacaacattgtcatatgatggaattcaatttttgccacctaaaatctttgattcctccaggaatcagaataaccaatggcaaacacatattgatgttggatcctctaggagtgtataaccacccatggatcagctataataacaaatagaagaatagtctctcaataaagtttactga

SEQ ID NO: 152375 - DNA, 445 bp, Glycine max
  unsure (1)..(445): unsure at all n locations
agcttgaatctgaagctgaacacangcttctgacttgccaagataatatgaaaaggaagaagctgcagcaagatctttggtcagcagcccaagctcacgagtctttattgaggcagaaggcgagatcgcgttggattaatgagggggttagatatctcgatattttcacctggtgattaactcccatcgaagtttatagctttttccaacagagatttcaagaaactatgagcagcagaccagttttgaatgacacctcttttcaagaaacatgttctttggggaggctactatgaaaaatgtcaagactatcaaatngattntgagagctttngaattgtcatcaggacttaaaataaattatgggaagagcggctttggggtgttgggccaatctgaacaatggatattgcaggctgccagttatctgaattgcagaatcatg

SEQ ID NO: 152376 - DNA, 447 bp, Glycine max
tgacacttataatactaagcttcatggtaaaaccttagatgcgatggacactcttgagaagaagaaagcgcgagcaaaatatgtgccgtctaatataatttaaattgtaagttcaacattggttttcaataaaaagctgatgttaacaaattcatgttaacgctaacatcggttttattcaataaaccgatgttaactgatcatacgttaacatctgttttcaaaaaaccgatgttaacaaactaaggttaccatcggttttcttaaaacccgatgttaactaattaatgttaacatcggtttttccaaaactgatgttaaagtcacttcgttaacatcagttttcttcaaacccgatgttaacatatatacaatattcacaattatgtcacgacatttatcttaacatcggttttttaaaaaattgatgtcaataaagtctcgtta

SEQ ID NO: 152377 - DNA, 436 bp, Glycine max
  unsure (1)..(436): unsure at all n locations
agcttcgagtnagaatggaagaaaagaatctttatttctgtagcaacaacataaaaaagcatttagaacaatcattcagagtaaagggaataaaataattttatgcatgaaattgcagacaatcaacaataagaacaaaagaaaaggggacccccaaaaggagagagatcttacttaagagcggcttcacgaccgtgctcagcaacatcatcaaatatacaaatggcaattctcctttcctctgaggttntgtctttaccctgattattgaatatcaataagggagaaggggaattagatcagaaaacagaatggcaaatatgtctaagcaaatggccacctgtacaaaacttaaaaagtgtgtgtagtcaacatacatattagcaagcagattggtaataaattagcaactgtcaacaatccaaattattttact

SEQ ID NO: 152378 - DNA, 453 bp, Glycine max
  unsure (1)..(453): unsure at all n locations
ntcttgctcgggtatctnntttgacctcacctcggatttcttcatattaggtcgccaggttggaaggctcgcggttgaacctttctattgaatcttctggctgctcgaagtttggaagttttttctctaatcttcgccatttctcggatttcttcggtggtttcaagttccacccttatattctcttcattttgctattgctggaatagtagtctccttgtcgatggttcccctacttctacggggattatagcgtctgtgccatatgtaagtcggtaaggagtttcgttggtgactgtctgaggtgtgcagtggtacatccagagtatgttgtacaattcttctttccatatgcctttagacttgtcgagtctaattcgtatggccctgacgatgactactgtagctgtctctgtgtgttcgttagtctgaggaatgtcgacagatgtgact

SEQ ID NO: 152379 - DNA, 436 bp, Glycine max
  unsure (1)..(436): unsure at all n locations
agcttaggcaggcctaatcagaggacatttcctattactattatggncaattcacagaataaaattgtggatcttgtatcatgcatgtgctacagagcacaagtaggttcatttattcattcattaatttataattattatatgcaaatccttgtcaattttgcttggttggatacatatatatattgacaatgacttttcagatcgatatttaatatctgattagtttgtgtttaaatgtgtaagctttactgaagttaataaattgatgaattaatagggggcaatgtactctgaacgattgattatatgtccggataaagccgngcataattcgttaattgctcgaatggacaagaagacatgtagtttcttaattatcatataaaagaaagaaagataagtggagaactcgcatgtggaaaaactgtaaaaa

SEQ ID NO: 152380 - DNA, 435 bp, Glycine max
  unsure (1)..(435): unsure at all n locations
taagctgtaccatacttttaatttagagaccccaaagattgtttctttttaagatgngcnctntctcttcagaacagtcctcaccatatgatgatcttcctcttgttcaccctccatggccatccatgagacagccccagcaccttcggttcagcctccataaaaggtatacttgttttgtaaatcgatcgcatcttttctgttttttctttcttgtctcttccagatttgtgtgtgcatgttttcttttgggggaatgaccctctctcactttaatatttcacatggcagttttgtgttaactctttctttataaatattcacaatttttaataagatctcacctatatatttatatctatgaaaaagagaaaaaaaaatacaatattgacatatcattttagaggattacacattcttctaagtattgtgata

SEQ ID NO: 152381 - DNA, 470 bp, Glycine max
  unsure (1)..(470): unsure at all n locations
agctntgcacgtatcagtcaagtgtatgtgtccatatcgtagccaaggtgttcatcgataatggttccagtttaaacgtgatgcctaagagcactttggagaaattaccattcaatgcttcccacctaaagccgagttcaatggtggttcgtgccttcgagggcacccgccgagaggttaggggagagattgacctcccagtacagataggtcctcacacctgtcaagttaccttccaaataatggatattaacccccctacaactgtctgttggggcgtccgtggatccactcggtgggagttgttccctctacactccaccaaaagttgaaattcgtagtggaagggcatctggtcatcgtatcaggcgaggaagacatctnggtgagctgcccatcctctatgccttatgtggaggccgtagaggagtcattagaaactgctttccagtctttcgaggtggtaagca

SEQ ID NO: 152382 - DNA, 439 bp, Glycine max
ggcgcagaagacgactgttgtctcttcgtgctatatggcttttcgtcttacagacaacaaatagtttatacggataaccactctggtatttccggccgtcagcgtgactcaaaagtcagtatgacatatcttgtgagcgcgggagataacctaaatctccacgtgtcaacgggcttgtcggccgcgattgacgaatggcgcagaatacgacgttagtctctgcgtgctatatggcttttcgtcttacaggcaacaaaaactgtatacggataaccactctggtatttccggccgtcagcgtgactcaaaagtcagtatgatagatcttgtgagcgcggaagatgacgtatatctccacgtgtcaacgggcttgtcggccgcgattgatgaatgtcgaagaagacgatgctagtctctgcgtgctatcatgctcttcgtc

SEQ ID NO: 152383 - DNA, 470 bp, Glycine max
agcttcaagaaaaagatggcctcagcaaattccttatttccagaagggaattctatcaatagacctccaatctttaatggagagggttaccactactggaaaacccgaatgcaaatttttatcgaggcaatagatctaaatatctgggaagccattgaaatagggccttatatacccaccacagtagaaagagtttcaatagatggtagttcatcaagtgaaagcataaccatagaaaaacctagagatagatggtctgaagaggatagaaaacgagtacaatacaacctaaaagccaaaaacataataacatctgccctaggaatggatgaatatttcagagtttcaaattgcaagagtgctagggaaatgtgggacactcttcgattaacacatgaaggaactacagatgttaaaagatctaggataaatgcactaactcatgagtatgaattatttagaatgaatac

SEQ ID NO: 152384 - DNA, 447 bp, Glycine max
  unsure (1)..(447): unsure at all n locations
taagctttatcttaatgcaaggaaacatacttatggctatttgtctcttatatttggttntagcaagagaaaagcatgaaaattatgacttgcttataagagtttttactcgaatttgggctgccccgtgattgatactttgcgcctatgtagcatggaaaaagcttttcaatagaatgtagatatatgtgtgaatataggtaccatggaaaacaccttgcaacggtgtgtatatatgtgaacatatggcatgaaattctttgcaaggggtgaatgaatattgaggtcgcttcctaaatgaatgtatgatagcatggaattcccttttgaatgcaagtgtgtgcataatgtaaatagcttgccaatatgcataagtgtgagtgaaacaataaaagttggatgatatatattcaaatatgtgtaggtagttggtgatagcaaatgttt

SEQ ID NO: 152385 - DNA, 395 bp, Glycine max
  unsure (1)..(395): unsure at all n locations
gagtcacctgccgcactgcagcttgcngcccagaagaggcagtgcagtctgtcctttcacgactccngcgactagccacgcatgaatcagtattaacaggagaaatgctacgactactctgtgtatcggacattagatctgctggactatccataactctgccggctcgagctacatcgcaacaagagggactaccctccccattacatgttgcaaccggagaaatcttacgatgggatgcatatgaacattgggtaacaatacatccttgagtctgtgatctctgggggcaaaattccctatgatgattgaattggaaccgcggccganacatacttgattttgatggcanactcgatggcaacaatggtttcacctggagaataagatagagt

SEQ ID NO: 152386 - DNA, 242 bp, Glycine max
  unsure (1)..(242): unsure at all n locations
ttaaagctctacctatactatgcgaacgcttcactcactatacatacttagacttgtaacgcgaacagaagtactaacgtgcttgattatagctcctagcatgtgctatttccagggaagtcaattcccgatcgctaatcctctcacctctgaggtgggggctaacacatgatcatgcaaggtgcgctctggacatcggtatcctcatcatatgttggtactagccgaagntcccaacacct

SEQ ID NO: 152387 - DNA, 468 bp, Glycine max
  unsure (1)..(468): unsure at all n locations
agccttgtacgttgatgtgggtgtaagttattcaaatataacacatctaanaacatgaggtagtaaataaaccatgggaggaaggatacaataatcagacaacacatctagaggccttctaaagttgagcacactaaaaggggttcgattaatcaaataaactatagagcttacagcctcaccccataaatgagatgggacattaccatctataaaagtgatcttgtcacctctactatatgtctattatttatctcagccactccattatgttgtggtgaataacgacatgtggtttgatgcaagattccactatacttcatgaactctattaattcagtcttaaaatattaccctccattgtctgatctaatgaccttaatatatgtgttaaattgtgtagctatcatctgatgaaaagaacaaaacacatatcacacatcacttttatgttctagcaaatacacc

SEQ ID NO: 152388 - DNA, 436 bp, Glycine max
  unsure (1)..(436): unsure at all n locations
actaagctaacaagattcggctgaagttagcaatcttngtttcttattcttgaactctgacattccttgtcccgagcctcttgagagcctcttcacagcaatttcttgtccacttactaatcttccctacaaaataaataaataaattggaataatcttaatcacattgacactttttgaggtctttttcctaaaacgacaaagaagattgaatcaccttgtatactggtccaaaaccaccttctccaatcttgttgtttattgagaagttatcagtggcaatgactattgttgaaaggtcaagtaaggggagatcgatattttcttcacttcctcccctattttgatcacgtacaatatctgaatactctgataaaatggaacaatggcttcaatttagttaaaggcacaatgtatatgatatgttagtcaagtc

SEQ ID NO: 152389 - DNA, 240 bp, Glycine max
agcttatactcatgtggcatttcgaactttctctagcacaagacattcaacgcaatattagaccagcgctcttactcactcaaaggctcttctttacgtacatcataacgcgtatatacccaagaccattcttcctaccatctcacacggcatttatgatgcttgtactaccatccatgctctaagcttaacgcggtaccgattaatgaccatgcgcacacattgctatggctatcacca

SEQ ID NO: 152390 - DNA, 455 bp, Glycine max
  unsure (1)..(455): unsure at all n locations
ccggatccttaagcacctgcggctgcagcttattaagacaaaaaatcatgtattcattatggatgatcaagacagtttctagagtcttaggaagagtatattaaataggaagggtattccaattgaagtagcaaaaggtttggccaagaaatttaagttaaaaagtctttttcaaagagatttactctctagtaatcgattaccagaggatctaatcgattaccagtggccaaaactgatttacaacagctattaaaatttgaattcaaaatttgcactgtgtaatcgattacacatatatggtaatcgattacacatatatggtaatcgattaccagcagttattgaacgttttaattcaaattntaaagcttgtaatcgattacacatatactgtaatcgattaccagagaagaatttcagaagatattctcaacagtcacatgtttttactt

SEQ ID NO: 152391 - DNA, 459 bp, Glycine max
  unsure (1)..(459): unsure at all n locations
ttgttgcatatcaaattgctataaccagatgtgttgtttcttataataatggatgagaaagnaataccttaaaaagttccaacactagtagtccaaatacttgattccaacacttgtagtcttaatattagcaatttctaaagtcaaaccaaacaactctaaacattttgatcggtttggttcagtttaatcggatctatatatttaaactcgtgatccaactcatacatgaacgattttgatcggtttgattcgattgtgacccaaatacataaatgactcaactcaaactattcgggatcaattngagtcaatttggattcgcagaacattatcgagtgaaaagttatagaatgatataataattatcaaagttacaccgatctatttgattcgtatttattatataatctcatatattcttgtgggtcatttccttaagaaatattattcatatat

SEQ ID NO: 152392 - DNA, 421 bp, Glycine max
agcttggcagctgacattgtttttttgttttcatccgcagacatgtcttctgaacctgaaaccagcatctcaggcttgatggtggttgagccgtccatggattgactatgctggtgtctaactctgggcctttcattagtcccaataacaacattctctgtagaagaggtgggtgcccctgacgccggtgttgaagccgatgctcccacagcattagacggctcaaccatttgaaacgtggacgttgccgacgatgaattgaacttatccatatcaaggtacatggacagcaagtcctcctcggcatcatcggagaaggaaggaccatcaccaccttcaacaacaccaatgtcactgtcgaaactaatatcatccgggtaagtgagaaatctcgaatgagcacgcctatgacctctatttt

SEQ ID NO: 152393 - DNA, 456 bp, Glycine max
tctggagcttgtcataccactgatgaaaacatttgttgttattttagaatattcaccctagggggaaatataagcattgacaaagtggtgcataagtgtgtactggcaaataatttgcttaccataattaccattatctactgaaatgtaccatatgggggaatactgaatacaatcacttgccgatggaccatctaatactacatatctgtatattatctacaggatgaaatctgattcatataacttatattggtgaaaagaccatagtaagctggctcaccgctttaataatactggtccatatatacacaacgaaatctggttaggcatcttcttcatctagatatgtgtcccaaagacgtgtgacaagatggatgggtgtctgattacatatagcagaaatcagacgtaacaaatacataaaattggccaaatttgttgtactcataatta

SEQ ID NO: 152394 - DNA, 454 bp, Glycine max
  unsure (1)..(454): unsure at all n locations
agcttcttgcgtatccgctcttggtgctcaaaaaatcccaaaaacaaatccctcttattactagctantttgaattctttagttcctaaatgtacaaccttcaaattgttgctcgttcccctctttgttttctgcaaaaaataaaaaaaaaaaaaagtaccttaggtacttcatcactatttacataatgaaatatttatatatttttgccgatgaaaaaaaaaaccatgcagatcatagcaacacactaacaacagtaccagatatcacacatataacaacatcagacaataattccaaccaagaggaaatcatgactacaaatagcagaggcaataatagaccataatgcaacacacacaggcccaagcacctcagtgacttcgtataaggaccaggggagctgcaagcccgataacagattctagaattccttctacttcgcgcttaaagc

SEQ ID NO: 152395 - DNA, 453 bp, Glycine max
  unsure (1)..(453): unsure at all n locations
tctatccaaatggacttaccttgaattaatctctcttttttcccttttgagccttgattccctttccttgttttgaagctcactacaagcctttaatgaaaaaccatgatatcaccatatccttaaggaattttggagctttggaattgttttgggaataagtgtggggttttttttttgtttcattggataacttgttttgttggctatgcttcatgatgtattttgggccatacttgatgtacattgtatattggttaaatgttggacatgctgaatgaaatgttgtttctcaaaggctatagagtaaaaaaaaatcgaaaaaaaaaaagataagcgataaagttgaataagatcttaaatggcacaagaatgatgaaactctcggttctactatttatgtggaaattntatctttactgtctgttattntcttattttttttcttaatat

SEQ ID NO: 152396 - DNA, 456 bp, Glycine max
  unsure (1)..(456): unsure at all n locations
agcttgcacattactgctntattaagattatcaagatggtnagccgnggtaccatgacatcaagcggtacatagagtgtaaggagtatccacaaggggcttctggcaacgacaagaggatgttgcagaggttggaaactagtttctttctaagtgggggtatcatgatgtagctccattggagcttgttggccttggatcttcttcatcaatggagtcctttgcttcttgaattttaatggcagcaaaatggagaagaagaagagttgagaggagacaccacttcaaggagaagatgagtctagaagaagctcaccaccatatgaaggcatggataagagcttcaaggtaggagaagatgaatggaggaagagggagagaatgagcacgatattttgtgcctcaaaagaggtctgaatattgaagtttaatcctcaaatgatcaaagttcataaaa

SEQ ID NO: 152397 - DNA, 397 bp, Glycine max
aacggcgaagaacggtctataaaccttcgcataattcctcacggtaacgttatggtaacaatgtttcaaagcaaattctaaagatatagaatagcctaatgggctgaaccctgtttcacttcacttctccccctatttattgaaaattgggggagaagcttgccacccatctcgcccaagctagctgggttgcttcctccacaatcaacagccttctggaggaatcttctgtagggcccaagttttgccggatgctattatgcacccccattttacttattacacacccatgcacttttcttggtatattttatttcgataagttctgatatctacgaattgcgcaatatacgtgtatttttccgtaatgattagttccttgtggatactttttatc

SEQ ID NO: 152398 - DNA, 484 bp, Glycine max
  unsure (1)..(484): unsure at all n locations
tgcaagcttgagccaaaatcctgactcaccattatccttaccctcggaagcaaaaaataatagaagggaaatttccaatcaaagaaaaagagaaggaaaatttccaatgaaagcaaaaaaagaaaagaaggaaaattccccaatcaaagagtgggagaaagcaaaaagaaaagaaaggaaattcccaatcaaagaatgggagaaagtaaaaaaggaagaagaagaaggaaagaaagctcctgatcagggatcgaaggaaaaacagaagaaatgtgcagaaaggtctttggaccggacaatatctgaacaatacagaattgtcaccaaatgaacaaaaaagaaggaaaggaaaccacgacctaaaatggtcttctccctttgattaccaaccaaaatcccgtgcgctagccactttttcgccccgcactaaacaaaanaaacagaataagaaaaagcctacataaatcataagccataaacacac

SEQ ID NO: 152399 - DNA, 407 bp, Glycine max
  unsure (1)..(407): unsure at all n locations
tcagaagaaagtgatgaggtacaagctctaaaggcatatcttgntttatcccgagtagtcgaagagaagttcaagtccatagccatcaaagtctgaaaagagtatgatgaactaagggacgtcaatatggccaccgctgaatccttggaacgagataccaataatgcccgaatggaagaacacgtgcaagcaaagttttgaggggctntatatggcagcaatagtaagctcaagctccgaagaggtgaaaggaatcatcacgggtcaaaggcatgatcttgaaggatgagctaaaggcttaccttatgtcgaaaagaaatttgtcccaacagttaagcgagactgaagggaatatgtgggccgtcatcgatgagtgcaaagagaagctaaatctagcggcgactcac

SEQ ID NO: 152400 - DNA, 471 bp, Glycine max
  unsure (1)..(471): unsure at all n locations
agcttcagaccatagcaactcanaatctatgtatcctaaacccttcaatttaatggattttcaaggtttgagaagtgaaaatgagaatggggtaaatttagagcaaactctcacctcacacaagtctataccatcaataaacttgctcaaactggttttacgcctaaaattctgccgaatcaaaatttgactcttcaacacccaattttaccctagaaatggctcttgccttcactttggtcatttgtttttctctcttacacagcccaaactttctcataagtcctaaatgacatttcaagctaggattaactccctttaacctccaaataccactaaattcagaattggcctttcaactctcaaagcctcactctntttccactcataacaccatattctcactttctaaccctaggttaaccctacccttcatctctaacagntttccataagcaatatcagtacata

SEQ ID NO: 152401 - DNA, 416 bp, Glycine max
tactaagcttggaagatagtgtgaggtcaagccctaagctttcttttttatcccgagtagtcgaagagaagttcaagtccatatccatcaaagtctgaaaagagtatgatgaactaagggacgtctatatggccaccgctaaagccttggaacgagaaaccattaatgcccgattggaagaacacgtgccatcaaagttttgaggggctttatatggcagcaatagtaagctcaagctccgaagaggtgaaaggaatcatcacgggtcaaaggcatgatcttgaatgacgagctaaaggcttaccttatgtcgaaaagaaatgtgtcccaacagttaagcgagactgaagggaatatgtgggccgtcatcgatgagtgcaaagagaagctaaatctagtggcgactcacgagcaaa

SEQ ID NO: 152402 - DNA, 479 bp, Glycine max
  unsure (1)..(479): unsure at all n locations
taagtcacctgcggcatgcaagctngcnagcagaacatataggactgctgtctccctttatgaaatnaagantcaaccntctgtgcatgattataatggcacgtcacttagagtcacggatagtgctattttttttataagcgagaacaatattaatgcatttactgactactctcatctcaacaattacaaataagtaaattaagtaacaagaagcatgtatatataaagttacacgagtcatcttacaagaagaatgtttatagcactttcattaaagaataagctgtgtgtttggatattgctaaaatcatgatggctcccatgaaatcatgtacaataaaattgtggtgttcttaaagcaactataaacagctacaacttcatgacatgccaacacgagtgagaatgggacatggacaacatgtgctatgacacatggctatgcctgataacacgggtgtctctgttgtttctac

SEQ ID NO: 152403 - DNA, 398 bp, Glycine max
  unsure (1)..(398): unsure at all n locations
cgcataanataccatcacagaccgtattcaatctcaatactatggcattcttgggagaaacaaacactcagaccatttttaaactcagattatcattcatattcctaagtagatcaatcattcatgaccaaattggtgtttattttcaatttcctacaccattaccgatgcgagttcttgaaaattgttcctttgagacactgaacagtagaattcacaacacccttcagcaaaccaatgaccaatttgtggatgaaatctactaccgaaaaccatccacagatgcagtcaacaatttgtttttcattttctgcaatcgaaaatgatgatgatgtttgccaatgtaatgtgcaatgagcaaactcgtgtgtggccgatagaatattatgtccatcatc

SEQ ID NO: 152404 - DNA, 410 bp, Glycine max
  unsure (1)..(410): unsure at all n locations
agcttgatgtgagaaagcgtggaagagtttgtctttctacttttgtnngntgaccacagagtggtacttggagatatgtcgcgggggtcacgagaccttgggaacatcaggtggggtgatatttcccaaaaccaagcttgacccatcccgacccaacccgggcatagtcagtcagtgagaacctgtgatgtacctaaacaggcgagctcctggcaatcaactaataaaagaacaaagaccacaaagcaaggaggcttgtgtggtggctggccaactatgaatcttgagtggtatctggaaaatggcctctggtaatcgattaccaaaggtgtgtgatcgattacagggcttagaaatggagacaggaagttaaaatgacctcttgtaatcgattaccaagggtgtgtaat

SEQ ID NO: 152405 - DNA, 458 bp, Glycine max
aacttgcacaatgcactctgcctaaatatgaattttttgtatcaggaagcataaatatattcatcatgaaaacatcatagtggaaggaaactgcagtgctgtgatccatattatccttccacccaagcataatgatcctatgagtgtaactattccttgttcaattggagaagtcaatgtgggaaaagctcttattgacctaagagctagtatcaatgtgatgccactctccatgtgcagaagattgggagagttggaaataatgtccactcaaatgactttacaattagctgaccgctccattaccaggacatatggagtaattgaagatgtgttggtcagagtaaaacattttatcttcccggcaaactgtgtggtaatggatatctctaaagatactggcatccctgtaatatttggaatgccattcatgttgaccgcatgctgcatatttgata

SEQ ID NO: 152406 - DNA, 417 bp, Glycine max
  unsure (1)..(417): unsure at all n locations
agcttcanacctctcacaaatgttattacttagtanagaaggtgcatctccaaactctaagaggtgagttcgaatccttacatatgaaagagtcagcgtccatttccgattatttttcaggaattctcgctgtttcaaataaactaaaaataaatggtgagaagttagaagatgtaagaattatggagaagacactacactcgctagatcccaaattcaagcacatggttgtgacaatcgaggaaaccaaagacttagaaaccatgatgataaaacaacttcaaggatcactacaagcttatgaggagaagcataagaagaagcaatagatcactgagtaattcttcaagatgcaactgaaggtctagggtgcactcgaggacaagttggacgtggcaacaatggacgatgttcata

SEQ ID NO: 152407 - DNA, 452 bp, Glycine max
  unsure (1)..(452): unsure at all n locations
tggatatggagctgatggaagaaaatgtggctatggtgngntattagtccaatgtggttaatgtggctcatattaacgtctggaaagaggagaggataaaggagagtatgctgatgcaaaagtcaaggattagatgggcaagagaagggggacatcaacaccaagtattttcatgcctgtgtaagacacatgatcaaaatcaatcaacttattgctataaagccacaccagggatagaaagaggatgttaaaggagttaatgaaggggttatcaaacatttcaaaaaactttgtcaagaggatcccataataagaacaaatttcgatcatgtgagcttcatacaacttttagaggatgagagattattgttttaatgccccattctcgaatgaagaagtaaaagatgtcatgtcacaacccatcctaagatcgtgtctgacacacaaactat

SEQ ID NO: 152408 - DNA, 408 bp, Glycine max
  unsure (1)..(408): unsure at all n locations
agcttataaggcttgttaatattcctatttctggtctanttaatttaataggcttttaaaaaatcctgagcctaaccttntaattaaataggccagttcaggccagactttatgtaggccaggtcgtaggcccctgtagatcggcctggcctattcccacccctaggcaacaccaacccaaaaatccactaacgcttatatttacagaaataaattttcaattgttttacagttggagccggagtattgggataaaaatcccttcaaggctacagccaaggcgtttccttcagggttccatttcaaaccaactgcaatcaacaaaactagaactttctatgagttcattntgataaactcaaacttggtttccaccaaacacttcaaagactcaaatgattcgtcatt

SEQ ID NO: 152409 - DNA, 453 bp, Glycine max
  unsure (1)..(453): unsure at all n locations
tgaactctcatgaaggatggtggccagattcgtcanttgnntcttagttttacatcgactacaaaactcgcagcctcataaagacataattcatgactgactttctaacagaattcactggaaacgacacaaccatcccagactagtggaacctttacattgatggtgtgtccaacgtaaaaggaaacggggcaggaatcatcctcgaacgccctaacaatgtcactctatatcaagccctcaagctcaatttcaaagcctcaaacaactaggtagagtatgaggtgctcattgcaagtttgaagccatcaagagaagtctgagccaagatgttacgatgctacacaaacttgcatcttgtccaatgacaagttgctaatagataccaaactaaggaaacaatgttgctcaagtactatcacatcatgaagaacttgcattgaaaatttgaat

SEQ ID NO: 152410 - DNA, 393 bp, Glycine max
  unsure (1)..(393): unsure at all n locations
agctagtcagagccctgaatgtatctgttataatacttgaggaagctatgactgcacttgcagtggggatcttttgtatataagggaccacgatacttgcataagtgagttaaatacacttgatatccttttactcgcatggcatttgaattgcttggtttcatttatttccaactgggtatcctgcacgtaaaactgccagtcaggagggaagatcagcctgngctgctttctgggttattttagttggcttagtagtggctgctgcaggggcataccttgtgtacaaatacagaataaaggtatgctttgtcacatcttcagtttggagatgctattagatatttagatgccttgttctattcaatactgtactttatataacattgtggc

SEQ ID NO: 152411 - DNA, 308 bp, Glycine max
  unsure (1)..(308): unsure at all n locations
gctttggtgatgcctcctctaacatacgctttgttgtctatataatcgggaagcnaggatgactaatatggggattattgcagtacgttgtggtacaaaaataatgtctcataacacctaacgtttccgctgttcaatagcctcatgaccttagatgagtatttataacaataataatctagtactgccagtatggaaaggatccaatggagaataagttctattgcacgtgtgatgcacgaaacaagacctttagatgtgaaaggctatagctttggtgggtaactgtgcgatggatatgaatccgc

SEQ ID NO: 152412 - DNA, 444 bp, Glycine max
  unsure (1)..(444): unsure at all n locations
agcttctgttgtcaatgacgagcgtctctattatttctggactcaancggacatctgagtaaaaagttattgtcgtttgattattctcagagcttcagttttcaatttcgatcatctcgatatactacgggacacaatcggacatccgagtcaaaagttattgtcgtttgatttttcgcagagcttcccgtttcaattacgagcgtctcgatatacaacgagacacaatcggacacccgagttaaaatttattgccgtttgatttttctcagagcttctagtttcaattacgagcgtctcgatataatacgggacacaatcggacatccgagtcaaatgttattgccgcttgaatatgctcagagcttctgttatcattatgagcgtcttgaatattacgggactcaatcggacatccgagtaaaaattattgccgctgatttt

SEQ ID NO: 152413 - DNA, 375 bp, Glycine max
atatacagacgcctcggatgtgagacagaatccctgatcatattcaaacgacagtaactgtttactcagacgctcgactgattcccgcgacatttactgacgactcggatgtgcaattgaatctctgatatatcgagacgaccgtaactgataactgaggcgctcgactgagtcccacgacatttactgacgctcggatgtgcgacagagtctctgatcatattgagacgacgtaactgttactgagacgtcgactggtccaggacatatcatacactcggatgtcgacagatctctgacatattagacgacagtactgttactaaacgtgagtagatccacgacattcttacgctcgatgtgaactgatgccta

SEQ ID NO: 152414 - DNA, 466 bp, Glycine max
  unsure (1)..(466): unsure at all n locations
agcttataaacaaatgctcatttgacaatatcttattgaatccattgcttaattaaggtgtttactcaaaaacacaccctctatggacttgagttcacctaacaagaagacatgagcagagcaaacaaacacaagcaggctctcccacctcaaaggaatatctcaagtcaaccacaagctaatacttcatgcaacttgcaataatatatgcaaataatagattatcaatccacagaataagacatctgaataaataaataaataagaaagactcaagggcacagctggatagcaagagtatcttgaaacaaactatgaattgacgttttagccagaacagttcccggcccacacctcagatctgaatntatgattattctgagcaagttattcaaccaaaatgctacatttaacagacattgcaatattctactccctgcatatgggaaacaatgtgatgatcacc

SEQ ID NO: 152415 - DNA, 448 bp, Glycine max
tggctctatgccgacttagctaatataatgcatctttttttcatgggggcaggcgcttatcaaatgatataccgcttaacgctgctatggccacaatgaattgggctttgctggcatgagtagcgcttatctcaatgaaccccaatttatgccgcatcgaaatgggcttagtggcgacgtctcgtgcttatccagtgaatacgatgcgcttatcgagcaggccatcgtttatgtgaattcagatcaaattgaatttggcttagctcagccttggccagcttatcggaccaaatcagcttgagatgcaagggttgagcgctaagtgctatatactctccgcttatcgcatgacataagatgcgcttatcacgatgcttgtgcttattaaaaagactggatttcagaaaaaaatttctgtgttctatttcagtccttttctcaagaattt

SEQ ID NO: 152416 - DNA, 429 bp, Glycine max
  unsure (1)..(429): unsure at all n locations
agcttgtccgaccatccgctctatcattttatccataaaaggaaggggaaagtgatctttccttgttaccttgttaagttttctatagtctatgcatattcttcatccaatcattattcttgtgggaattgatttttcttattttggacaactatcatgccacctttcttaagaaccacttgcactggactaatatgtgcactatcaaaaatttggtagatcattctagcttccagaagcttcaacacctccttccttcatcacaggattcaatcttctttgcggttcagccactagtttgaagtcttcctccataaaaaatttatgcatgcactaagaaggacttatccctttaacattagagatagaccatctaattgcttctcagttagctcttagcacttcanacaatntcttctcttcggaaat

SEQ ID NO: 152417 - DNA, 426 bp, Glycine max
ggttgtgccccattttcttttttcttttcttcacactcttaatactctctcacttgttaacaagtattcaaggttttgggtattgtttatttggaggaaaaaggaaatttgtttagacatcaatcaattgtttttaaatctaacactagtatatgtgtatataaatactgaggcaaaagtcaaaagagtagtctgtgataatatatatacatacttgtccgtacatatatacctggagtttctataatcaaagagcttccacaacaacgccaattagcagtagtaaatgataaccttaaaaaaaaagcatagtgtagaagcatagcttccaagagtatttttatgatgccaaagattattaaagattcattcaaacgagattaaagaatcaagaagattcaagtgaagattcaagagaagactcaa

SEQ ID NO: 152418 - DNA, 461 bp, Glycine max
  unsure (1)..(461): unsure at all n locations
ttaagcaccgcggctgcagcttnttttactctaacttatnatattcataaaaataagataaaaataaataaaattaatgtgaactacagagagggatgcgtacattggatggtggaatatgcggcatgaaatataatgagaagcccgaggaatccgacaacaaaacctaaacccattgttttttgtgtgcaatctacgttggtgacggttgacgtatacgagacaactacagaaagatcggaaaattcgaggagtacgagtgacaccacaatgttccaattgtaattgcaaaattattagctttaactntttactcctaaaaatcctctggtttcacttttccggttaattggactactctatctttcatcatatgctaattnntttttctctctaaatatcacctctcatccgtgatgttttagttgttttttttttttcaattatctataaatctttat

SEQ ID NO: 152419 - DNA, 444 bp, Glycine max
  unsure (1)..(444): unsure at all n locations
tgctattcatcatatgtgacccccaatttggatgtctttgttctttncaaanagtctatgtttcttaatttgttcttcaattttgtgaaaatgcagtctagttcaagtcaggttgcaatgaagtgttttccattctactttggagagaagaaggatggtcctaagagcttgcagtctatatctggccagtctaacagttctacttatgttgaggctgagatgagaagatctggttctgaattgaactctatggatgcctcatataacagcacagactcactcatgagaagtgcatttcccagtttgtctcatagacccagcaacctcagagaatntactgtatctgaactgaaaacagccacaaagatgtttattcgctcagtcatgcttggagaaagtgggtttgggtgtgtctacaatgggttgatcaagaatgtagatgat

SEQ ID NO: 152420 - DNA, 451 bp, Glycine max
  unsure (1)..(451): unsure at all n locations
tactaagctttgatactattgatcatgataaaaatgtaagaatttttattcttctcttcattnatactacttttttattctcattacttatggtctatccagggaaagatatctgcatcatacaacaaccgcattgcaaaagagctaggtcaaaatntcactgacagagattcacgagatgattgatgaagcagaccaagatagtaagttattccaatcatatccttgtcaagtttctaattttacatgaaaactgatcatattgctgatttttatgctatgattaactgggtgtggatgcatgaactttagattatgctgacataatgttgtgtgtataagataaaatatgatcatttctttgaaattctaactggcatctttctgcatcgaaaagaataatacgacaatatggatgtaaaaatgattaataagatagtattcttgatga

SEQ ID NO: 152421 - DNA, 239 bp, Glycine max
actctctattgagaaaattgtttttctttgtagatctctcacacagagaacttggcttgagtttctcttactaggaaggcctcaacttgacttaatgcctcttaatgacctcgtaaatatccaaagaagaccttttaagtggagtccactcatccactgatcttctagcggaagcactcttctatgacaactatcatgtcatgatacctatcatggccactttgatgttaccattttga

SEQ ID NO: 152422 - DNA, 325 bp, Glycine max
  unsure (1)..(325): unsure at all n locations
agctcgncattggtctcaaaatatggactaatcttatttntttttgtttcaactattcggagtgtagcatgatgtcccacaattacataacgtgaaagggaatcaagcatgattatggcttttttggtttaacctacaagttatggaactattgtatctgattcttccaatcaatcagacaataactatggttctaattaaaaggacgaccatgattgataatgatacaggccaactggtacatgaccactaagaaagtatgtaagtgccttaattttccatttgagtgtggacggcacggtgacatatatctatagacaggctc

SEQ ID NO: 152423 - DNA, 431 bp, Glycine max
  unsure (1)..(431): unsure at all n locations
taagcttggtctaaatagttaaaataaaatgcagggttctttgcttataannngnncagaccaacgcngncagaatctagatctcacacgagatccggagggggatgaaatatcataaatcgaaagatcctaccaaaagaggcaaaattatatatgaagatatacatgtgatgaaaatgatgtataaggaaaatatcttgtatatgataactttgaactaaactttaactgaaaataaatattcatagatttatatgggtaactttccttatgttcataagggtgatctataaataccctgttattatgagttaaaataaatactgcacagtgactacaattgtacggattgttgtaactatattaatggtatgagtatactgagaatgagagacgcagaaccgctgaagatatgcttgttatcaacacat

SEQ ID NO: 152424 - DNA, 434 bp, Glycine max
  unsure (1)..(434): unsure at all n locations
agctntaaagngaatggtggtcatatcattacaatctcttcttaacattaatcattagaagaccggttgatgttttttttaataggtttaattgatataatgctcctaattaattatgcattgcgatgtttggttacttttttttcttattgtacttggtagtcaatctcaattttctctctttcttggtaatgcatcactgttctattgcttacagaatctctaattttttggcagcaaaatagaaacatcatctctcgctcctaagttgtacatttttttttgctacataattagtacgatacaattcaataaaaaatttaaattgatttcttacatgattcaatgattaattcgtaattatcaataatgcatgtntgataacttactgtttaccgtgcgtcacctttggccaaattgcaaaaattgtggat

SEQ ID NO: 152425 - DNA, 426 bp, Glycine max
gagtagaaacatgggaccaactcattgtatttcatttatgaagtcgtatctagtcaaggtctgagagaccatacaagtttcctaacgatttctaattatgtgggccattaagtctatcatatgctgacaatagccgagaagcccatgaatctcttcggggcggagtatgtgtctgccatcgccttggccttggctaacaatcggggaagttcttgactcccgttcaaggtaagagcaaaccgatccatccacatggttgcctcttggtgtaaagagtcaatcacccttcctctatcctctttttccgcgtatacttgggcatattcgtccgcgattctatgctcgtgggccgtggctagacctaactcttcttggtacttggcgatgatagctaacatgttggtctctgtctcgcataaacgctga

SEQ ID NO: 152426 - DNA, 299 bp, Glycine max
  unsure (1)..(299): unsure at all n locations
agctngcttgtggttcttctattgaagctggatctttgagcttcaatgaggtccttcaatggtgatttttcaccatggagatgcagcggaagacaaaggagaagaggtgagaggaggcgccatccattaatgaataagccatggaaaaaagagcttcaccaccaagatgagccttggataagaaagctggaaggatgcttcaatggaggaaaagaaagagggagagaaagagagaggggggagcaccaaattgaaggaagaaaaagggagagaagttgaactcttagttgtgtctcaca

SEQ ID NO: 152427 - DNA, 441 bp, Glycine max
tttttctgtgtcttctcaatcattatcttctgttctaaatattcataacccccacgagacaacacgtggggtgtagtgttttgcttttggatgacctatgcctttttccacacatcctgcaaaaattgaacattaatgaaactgatgattacaatgaattataacaagtgaattttaacttgaaaacaatgaaaatgacaaattacatacctcccacgaggggtctctacgactctaacaaaactgggcccatttctccttgctaatgctatattttatcaaacagtgtcatctacactgtccttatctgcttcaagtgcccattttgatgtcaaatcagactaaattgtctccaccattcccctatagtctgaagtattttcttctttgtcctaacatcagatgcttcaagatatcaaattcagcctggacaacaacaaa

SEQ ID NO: 152428 - DNA, 430 bp, Glycine max
agcttgagtgaaacattgactatgaggttttggttgatgatccttccttgatatatgccatccttactagcttatttcagttgtgactctaatgtgtatgttcttatctttgaaaagctgcatgtttgtgaaaatcaattgattgatgcagtccatgatattcagttcatatggttgaatttctctgtgaagcaaacaccatttttgagtgaccactttagcttgtcacttgtgtagaagaaaacttcattgcttcatgatgatgaatcaagattgattcaaggtgttttgatgataacaaagatgatgacaaaaagcccatgagaatgatttcaagattgagtcaagaacaattcaagaatcaagagaaagattcaagagaagtttcaagtttcaagtttcaagttttcaagaatcaagaatcaagaat

SEQ ID NO: 152429 - DNA, 401 bp, Glycine max
taaaggatacaaccaagaggaaggttttagtatcatatttaattgattacttatatcagtttttggttttagtagttgttatgtttttttttaagttgtttctttttgttgtactagttaatgacttgaatgaaatgctatgatcttttcctagttcacatcttatgtttgtctgtttttactctatgagtgtatgtcactttttggccttgttatgccaaaagggggagaagcattgcattagggagaagtagtgcattgcatacatacattcttattcagtcatgtgacaactctactttgtgatgatgatgatgatgatatgatttgacacatctcttggcaatagtgtttagataatctcaagtttatctcaagaaaagtctctactcttatgactc

SEQ ID NO: 152430 - DNA, 465 bp, Glycine max
  unsure (1)..(465): unsure at all n locations
agcttaactaaacatgtgcagtgttgctattgttgctcctgctccacctccatctgtctagcctttaccaccaccactagtaggtgttccacctactcttccacccaccgttcaagctgaaactcttagccttgaccctccaccacaaacatccaacccttaaacacttcccacatccactaccaactccaatataccaccaccaccatcccaaccaccatttcctcctactcaaggttaacaatgatatccttcatcacttctttcacctttaaacccactatctttttgctaatgacaaaaaagggagaagtgttatgaaagaattatntatgtaaacaccagtgctacttaataaaataagggtgttaaaattccaatatacatgtgttcatatntatatactatcatgcataatactattagagttaaaagtagttgagagcttccatacctagaactctg

SEQ ID NO: 152431 - DNA, 422 bp, Glycine max
  unsure (1)..(422): unsure at all n locations
agctntcataggtgaaatcatgtgcagtcatttcccttatagtcctctcacgaggtggaggttgtgccatgttctcagaatgtgcaaaatcagaatgctcagaatcagaatgctcaaaattataatgctcaagatcaggatgttcaaaatcaccaataacagaatgcacagattcaccagttatggaatgctcagaatgatcaaaaggtataaaatgatgcctaactaatctatgaaatgtcctatctatctcaggatcaaagggttgtaagtcagatggattgcttctagtcatacactacattcagcatgcacacaactagttgccttgtcatgtaaataaaggtgtaggtttgaactacagctaccctcanatgatatccaaatgacttgaaattttgtgaccacccttataaatgatg

SEQ ID NO: 152432 - DNA, 431 bp, Glycine max
  unsure (1)..(431): unsure at all n locations
tgtgaaatcaatagaatccaagatgctatgggacacttgtctttctattctattcntagaaatgtgacctaagcgnttgtgccataatgctcctgagtttgtattatcaattctatgcttagtaccatgcaattctgcattaaatgcttcaccattagaagctacaatatcaagtaaatatagattatcattaaccaagagtgaaccagttccaaccatatctaaattaaaagacaacctgaacaaattgtttccaaatgaacacaaataacccaatttgtctaaataagaaactgaaaccaaattccgtctaaatgacggtacaacaaaagtgtctgtcaaatccaaataaaaatcaatacataataataatctaaaatgccctatagcttccacttctacctatgtaccatctgcaacatagatccatc

SEQ ID NO: 152433 - DNA, 465 bp, Glycine max
  unsure (1)..(465): unsure at all n locations
agctntgcaactcatcacacttctactttctcggacatggcattgttgctactgcagaataatagtagggaaaatgaaaggaattacaagttcaacccgtttttgaatacaagctcaacatcagactgtgacattgggatatgcgtatttgaaaaatgaagggtgtaggattaattaatttatttgttgcaatggtagtattgtagtaactatataaatggttttatggatgttgagacatgtgatcatatgtaataattntaatttgtaaaaatgtgtggaggagtgagaatttataatctctcgctctctctgctccaccagcgtgagacacgagtgcggtgtgtcagtgtaaattgagattcatgcacctaatatgactccagcacctaagtagtttaacatttaaattatcacacaaacataatattgtgctatatatggcttaattaaataagtcctcta

SEQ ID NO: 152434 - DNA, 349 bp, Glycine max
  unsure (1)..(349): unsure at all n locations
gggcctcatgaactcactcgcaaagattcacttcgctccatcngtggccacggttgggtgggacatactctcccgccaccggttaaccccctttgatttcattccggaagccggtgggcggatccccacaatttttttcatcatcgtgcaccaatccattccgcgatgatggcccaattaccaagctgtcttatgtctgtgcttctccctgccaatggcgatggcgaatgacactgttaaccggaatctgacttggcgcggcggcgaagaaaccctttaccggataaagtgggggggaatgtggaaaaagtgctgggacattttattggttgatacctcctggtgggtg

SEQ ID NO: 152435 - DNA, 459 bp, Glycine max
  unsure (1)..(459): unsure at all n locations
agcttagaaatccaaaantttttaagcttttatgcaaggaaacatgcttatggctaggaatcaaaaatttggtttttaggaaagcatgaaaatagggacttgtttgtaagaatttgggctgccccatgattggcactttgcacctaagtaacgtgggagatgcttttcaatggtgtgtagatatatgtgtaaatatatatggcatagaaatgtgttgcaaagtgtgtgaatatatggcataaaaataccttgcaaggtgaatgaatagtaaataatgcatttcaaaatatgtatatttgtggataggtagcataagaagcctttcaaaaaaaatatacccatgccaaaatggcacaaaaatgcttcccaaatgaatatatgatgtggaattgcccctcaagtgtagatagatggcatgaaagttccttttcaaatgcaagtgtgtgcgtgacgtgagat

SEQ ID NO: 152436 - DNA, 450 bp, Glycine max
tgcatgatttacattattcccctttctctagcttattcttcttgatatcatcaaaatcttcatgatttacattctccccctttctcaagcaaattcttgttgacatcatcaagatcttcatgatttacacactttaatcgattacttagataacctaatcgattacttcattgaaataatcgataatcttatagatgtaattgattataggcagttataactattttctctataaataattagttggtgttcacatctaaacaatctagaaatcaagagagcattagagaatactcattacatctcgaaaattacttcttagcctcagaatgagcaagattttgtgctttcattagtgaacaagagaatagaagaaaatagctgtatagtaactcacaatgtcttaatcttttgatttggaagatcttttcttgaaagtgagttgtgtct

SEQ ID NO: 152437 - DNA, 321 bp, Glycine max
  unsure (1)..(321): unsure at all n locations
caagcttaatggatggttgccttctgttntacggttctttgaagggatttcttattatcctagagaaatattggtaggtcaatcccgtccttgatgatttgcggctgttttattcctctcgtttcaggaaaaactaaactatntatatgggtctttttcttttccctcttttattgcatggtttgttaatggatgtacaccaaagatagggaaacaagtctaaagagagtcattgaaaagaaatccctacttccacggatgatctatctttcgattaaaagcgcttcagcatccatcaaggagcatgttgaggtcaatggt

SEQ ID NO: 152438 - DNA, 213 bp, Glycine max
  unsure (1)..(213): unsure at all n locations
attcattatgcgatataatgtgctgtaacccattactaaccaattcacattattaagtactcgtctggtaatcatgacacttgttggtccaacaaaaatcatttactggtgcaacatacatgattgtcataattgacaacacataatgacatgcatgcgtattanagtttgagcgcgacacacattgactgacttgactacacattctgagtg

SEQ ID NO: 152439 - DNA, 394 bp, Glycine max
  unsure (1)..(394): unsure at all n locations
caagctttgagccanaatcctgactcaccatanaccttgacccagggtgagaatgccaatccctaccctcggaagcaaaaaaagaatagaggggaaatttccaatcaaagaaaaagagaatgaaaatttccaatgaaagcaaaaaagaaatgaaggaaaattcctcaatcaaagagtgggagaaagcaaaaaaaaggaaaagaaggaaaattccccaatcaaagagtgggagaaagcaaaaagaacagaaaggaatattcccaatcaaagaatgggagacagtataaaaaggaagaagaagaaggaaagaatgctcctgatcaaggatcgaaagaaaccagaagaaatgtgcagagaggtctttggaccatacaatatctgaacagtacagaat

SEQ ID NO: 152440 - DNA, 500 bp, Glycine max
  unsure (1)..(500): unsure at all n locations
agcttcttgaaccgagtagtaccgtgctatgctactgtgcgcaacatcggaccacttgcttgtgcttgancgactacacattgtcaagatgttgcctgagcaagatgaaagccttggaagaacgaagtgtgcctctgtcgttgtggatgatatcttcagagatacctgagtgaactgtgtctgaggatatcagacacctttggactttcaaggagttgagtcttatactatgnatatgcatatacgtgagaatgaagacaagcatgagtgaccatggctgagagtgtgagaacagaccggttactgcattgtgatcatgtgaaagcatgactcatgagtgttatgcatacaatacaccacatcatagaggcatatctgatatgaaacacatgactatgcatgatgctgctacggtgatgcttcatgccaaacacattcgtatatctctcggtgaagcatgacacagcgtggtcatcgacacagagctcactgtgagaggg

SEQ ID NO: 152441 - DNA, 375 bp, Glycine max
  unsure (1)..(375): unsure at all n locations
atgaagtaaccagctcgcctgagcgagcaagttactttcggatgaagcaagcagctcgcctgggcgagctactgtgcaacctctacccctcatttcctataaataggcatgaggggggctgaaggaacggtccaacatttgaaatcaagaggattagagagaaatttgcgagaagatggagaaaaaaagaagaaagataaaggttgagacgctttcgtaacgtttctgtgatcgattccgagatcatttttcatcgttcttcgacgggatagtttctattattgaagctatgaattcattctatgcacccttaggggaccatacttgctttacatatcttcatcttcattcttctaccattagngatctttcttt

SEQ ID NO: 152442 - DNA, 276 bp, Glycine max
  unsure (1)..(276): unsure at all n locations
acaacatcctanatagattatattatattgtagcananattaanaatanntttaaatttaagagagctngataatataaaaataaataagaaaaagaaaaaatagaaatcttactaatactaacagtctctcaataaatattctacaaaaattcttgaagatcttcctaaacatttggaaagtcttgcaaaaacacaattttntntaaaaataaagtacannatttggaanacaagatcactaagaatttggaacttcttaagtccaaagatcgac

SEQ ID NO: 152443 - DNA, 428 bp, Glycine max
  unsure (1)..(428): unsure at all n locations
atgcaagcttgtatattagacaagtcataagtcatcatgttcatanaacaaatcatttgtctaagtcactggcatctagaagtcctaattctctcgtaatggtgtagaacgaatctttgtgtagtggttctgtgaagatatttgcgagttganttttggtatctacaaattctagaacacagtcaccttttaggacatgatctctaagaagatgatgcctaatttctatgtgctcggttctagagtggaaaactaggttcttagatatatttatggcgcttgtgttgtcacattntatggngatgtggtctaatacaatcctataatcagatagttgttatttcatccacagaatctgtgcacaacaactaccagcagagatgtattctgcttcggttgtggataatgctacaataattttgcttctt

SEQ ID NO: 152444 - DNA, 298 bp, Glycine max
  unsure (1)..(298): unsure at all n locations
acccagtcaccctcattcagaagtagctctnttcttcctctattgcctntagttgaatacacctttgtttggttctcttattggttcttaaccctctcatgcaacttctttacaaactctgacctagattccccttctttatgtataaaagaagtgactagtgtgaggtgaatgaggtctaacggtgttaggggatngaacccatagacaacctcaaaaggggactgcttggtggttctatgaaccaccctgttgtaggcaaattctacatgaggaagatactcatcccaagacttat

SEQ ID NO: 152445 - DNA, 376 bp, Glycine max
  unsure (1)..(376): unsure at all n locations
ttcaacaagtgtatgaaatgcatgtacttctttatgatgagaaaccactcttcgtcgctgacatgttgaacactntagctggaaaacacttctttgtgagacagagcaagtctatgcaacaaagttcttcttttgatggtgattgaggaatattagagcttggcttcatttattcttcataagacttggcagatcctactcgaatgtctctacaaaatagatgttagacacaggattaaatgaagtcttaaatgtcaactttaatatcgaatcagatcatgattccatcttgcaatcgtgcgaaatatcagacgtagactctgcgaaacatgatntgataacgcatatgatgcaatcctcctaaagatggacccat

SEQ ID NO: 152446 - DNA, 273 bp, Glycine max
  unsure (1)..(273): unsure at all n locations
ctgatcaacacatgcacagtggccaaggatgcatgggagaatcctgaaaccactcatgaaggaacctccaaagtgaagatgtccagaatgcaactattggctacaaaattcgaanatctgaagatgaaggaggaagagtgtattcatgacttccacatgaacattcttgaaattgccaatgcttgcactgccttgtgagaaaggatgacagactgaaagctggtgagaaagatcctcagatctttgcctaagagaattgacatganagtcact

SEQ ID NO: 152447 - DNA, 83 bp, Glycine max
caagcttagaggcagaatgctgactgaccataattctttagccagggtgagaatgtccattcctaccctcggaagcaaaaaaa

SEQ ID NO: 152448 - DNA, 339 bp, Glycine max
  unsure (1)..(339): unsure at all n locations
gactaccaagggacatcggaagaagatcgctgatgtgccattattttcttcctatttcttaaccctctttgcaccatttaagtattgattaatcttaattgtcaaattaattaagcaattntattatttgggcccattcagctcaatttgatgttttaatctaatttcacgaattaatgaagcattgcgcttgaatccagaaatgggcttggacttgaagagggcagactattntattctacaaaattntatcttatctagactntatcttatctagatatttattagaattgatctcatctagatactatttcatctagatcttatcttatcttatct

SEQ ID NO: 152449 - DNA, 322 bp, Glycine max
agtgcacatgggcctgtgtactcgcactaagcctacgatgctcgcttagcacaagtgcctgtattcgcgctgaacgcggcttgagatgtgccttcctcgcgcttagcgtgtgcttctcgatgagcgggctgcgcactgagcagacagttctcactaatcctgatgtaaaaccttaccttttatattggtctatatctacgtctttttatttgtatccctcttttatatctgcgatcatagaaagagaactgtattttaaaataacataataatgctaaaaatactttaaggtagtttatataagaaaactatattacattat

SEQ ID NO: 152450 - DNA, 286 bp, Glycine max
  unsure (1)..(286): unsure at all n locations
ggagatgaagatgattganaagtactgtatggattgtgtttntcatggcgaatatgtgaatgtatgtatacatgattntgatgatgtcaaaagaagaatcaaacaaggctcatttgattcaagattaatacaagattgtttcaacaaataaagccttgattcaagatttcttcaagatcaagccttgcctcanaatgaaaggtttcaagtcatccaaggcacatgtaatcgattaccattacatgtaattgattaccaaggcacatgtaatcattaccaatacatg

SEQ ID NO: 152451 - DNA, 369 bp, Glycine max
  unsure (1)..(369): unsure at all n locations
agcttgttcggntgatttctttgataatgttttgctcttttgcttagaaggatttcttattntcctttgactttataatggttctcttgtaccgactaaatttcctcatttatgagggaagaatgcgtctgttttatgtactggttagatgagttcgtgccaagcttgaatgaattcttaagagggtgtgttttcaaagnttatactttactctgtatcctcttggtaatttcagggttcaagtgccatcttcagcgctgatctttttggtgactcaagagancacaacatcgatcttactgctggngaccttatcaatcgattatctttccaggtattctttaccttttactcgaattgggaaattca

SEQ ID NO: 152452 - DNA, 526 bp, Glycine max
  unsure (1)..(526): unsure at all n locations
aggggnnnnnnnannnccgctgtcatgtnttccatttatttttcanctcggnancanccaagacnnaagcnanatcctcagatggctcntgtaggactagacttataccaacctacaccatgggcacaacatgttgcaatcgaaaactgagtccgcacacccctaacttaagactaagtggcagtgatgcttcatgcaagtgctggggcaacagtacatttaccaatgctaaagtgacgtaactaggcacacaaatggatgatcataccgagagcatacaaacattaagaactgaattaagcattgaacacaggaaacacagtcaactagatgtacaagtaatgacattagactatctacagaaatccccagcaagggtgttcagccagccattacagaaaagctctaacagtgatgagattacaaaacctaggcctntttgcgaaagatgctccacttgctgcctctagagcggtatttcgagataagagtagggcgcgctcttgaatcattgcaaagcatctcn

SEQ ID NO: 152453 - DNA, 320 bp, Glycine max
agcttttactcactgttttcatcagatatcatttcccttcacgagataatcgccccttttcagatttcttataatgtcgcaagaatcagcagctccgaattctgtatttcgattctactcttgaagtagtattgacacatgccctttcgtgacaattttactgctatcgccattcttatgctcccataatatgaggctatactatgcttatcttaactccgaacagtgttgcgttatatttatacaaatatataccatttatactcacagtacgtatgtgaggggttaattcctctaactcataagcaccattcgaatag

SEQ ID NO: 152454 - DNA, 330 bp, Glycine max
  unsure (1)..(330): unsure at all n locations
gctctagccctcgaattgtcaacataacttcgctagagaaactctagcgagtacatcgtgcatatggagaacatctngtanagcccctgcacatagaccaaataaccatcaccaaactatataattatggtggaagtgtggaacaacataaagatggcaagttattaaaatccataaagccttatatcttagcagaaaaactcagaaattagttaagcaaacatgttccacatatattttgattctatggtttattaaataacagaagtggagttnctcttcatgcacagtacacacttcaattatgagacagatgttaagtaatttaag

SEQ ID NO: 152455 - DNA, 303 bp, Glycine max
  unsure (1)..(303): unsure at all n locations
agctntgttccctttgcttggatgtttgaaattctccaaattagtgacttaaaaaatgttcatacggcgggttttggaggttcacgtgatataccctcttcttattcccaaatgagaggaggccttacttaaaaccttcccagcttcccttccattgctatctcatccatccaaacatatctagctcaatgagaagggatccaggctttcattaactatctagctgttatacaattgttatatgtttcaatgttttttgtgtatttctttccattntcttgcccncaactccacatgtttctc

SEQ ID NO: 152456 - DNA, 213 bp, Glycine max
  unsure (1)..(213): unsure at all n locations
gcttattattattccaataactntgtgtgcggaacaataaaaataacactcataaacatattaaaaagcatttaacaatgaggaanaaaatgtcatataccaaacaagaagaatagccacaagagaataacaataaaatagtatttattttctaaatctacctncttattacctaattagctcaatctcgcaaaattgaaaatgcacaattga

SEQ ID NO: 152457 - DNA, 311 bp, Glycine max
  unsure (1)..(311): unsure at all n locations
tgcgctaagccactgctgtcttgcttagtgggatggtctcactaatcgcatggttcaggcttagcgagacaacactntntgaaccttcataattntctcctttttacttgaanatgaagtgaaatttacattaaattgaataggaaggcttctagtgagcacaaatgataactaaactagaaatatttacaatcctaccaaaaaataaccataaattgggagaattatntacattntggacactnttctatacaaaaattagtcgtaaaagacgactaacacatagtcatatatgttggtatgtaagtagt

SEQ ID NO: 152458 - DNA, 375 bp, Glycine max
  unsure (1)..(375): unsure at all n locations
ttcttaataaactnttaattgggtgcaatatttatgatgataaattatttcttttgaatgatatattatttgtataacttaatanaaaatttatataatttaagaaataaattgtataattaacataaacatatttgataaataaatatatcataataactctcaatatttgtcttacgagaaatataaacatacattcactttctctttcatctcattgtgcaaacatctctctatttatttttcattagactacttatactctattacttatttaatattgagaattaatgtgcgaataactcatgagaattctatataaatatactttatactatgaaaatatatttcaaatacttaccggcttggaaatga

SEQ ID NO: 152459 - DNA, 335 bp, Glycine max
  unsure (1)..(335): unsure at all n locations
tgtatggagatctgagcacttcttctctctatgtcttcacaatcatctcttaggcggaagttgcagaatcatcatgatgaagatactatattcngcacgttatcgttgatattttggacccttaccttgattgcattgcttaaatatgtattcatactattgtgtgctgatgacaacggtgaacgtatgctgctgataactttattctcttagataattgttcttatacataggttacgatctgtgtgagtgtgagctgagtatgatacttgtgtcatcaggtggaacatttgcctttattcgctgctgtggatgcatgccacgcttaaattact

SEQ ID NO: 152460 - DNA, 298 bp, Glycine max
gatctaagaataggaaaacttaattatcctacttggatgaatatgaagcttgaggaacatggatagaataagaatgaaggaagaacccgtgctattgactgtttgtcctacatggacaaatttatcgcctacttaactatgtcaacactcaaccaatattgattcttctcattgcccaccaccctaccagtcaagaacacccaatcatccacaagggccacccctaaatcagccgcacagccctgctgtcggacatacgatatcaaacaccactcttaacacataccattacactaac

SEQ ID NO: 152461 - DNA, 270 bp, Glycine max
  unsure (1)..(270): unsure at all n locations
cttcattcaacatgtcatatgaacagganagantatacaaattcattaacaatcaagtcacactaaacattacaggacaacataagccaacctaaaatcctagaatgcaaacctaaaaaccagtctctgaattgagcagacctaaaccctaaacatctaacttccaactctggaagcccaagaacaaacttcccaaagatcaaatcccaaacccaacctcagaacccagaaacgtatatctagctacatcatagacaaacagatgacagc

SEQ ID NO: 152462 - DNA, 339 bp, Glycine max
  unsure (1)..(339): unsure at all n locations
tcaagcttcagactttcgattcggagtaagttcctattcttgagattgattttattatacganagtaaaggtgagggtcaccaccgatatttatgtttgaattggataaagtcattaactggtgtattggactaaaatactattaatatattttgacataacaagttgtacacatgctacaagattatggcagaaattatcctgatagattttttaaagatttatgatagatttatagttcattatatttaatggattatatgtgagaatcaaaacattcgaagtattcctatgaatctgcacgatctgaaagagttttattaattctcttttaacaaa

SEQ ID NO: 152463 - DNA, 515 bp, Glycine max
  unsure (1)..(515): unsure at all n locations
aggggnccatgacccatatgatangcttagnattnttcaaancattttgcaagaaantctgctangactatatatatgcatttttgtgtatgaaaacaagttatcagatgaagctaggagtaggtggaggggggtttaactagtaattaccgctcttattcacaattaattagccttatatattttttcgggggacggttggtgctggttcgaatcgaatgaaatctctcttctgtagtttgccaaaaatagtttcttgagatcacttttatattttttatttgtaatttcattcttggtgaaccgtgaactacatcaccatcttctatgaataaattacctctaatttatgggcttattttctctctgtctataaaagattaattatgattcttaataaaataaatatttttcttaaagaaataaccactataacattattagatcctttaagaatgtgaagagactttataacttaggcgtatcttagagtgcattatggaatttatccaaag

SEQ ID NO: 152464 - DNA, 206 bp, Glycine max
gctagacatgaggaagcgttcaagggtgaaacttcctgcttttattgttgaccacagagtggtacctggagatatgtcgcggaggtcacgagaccttgtcgacgtcaggtggtgtgctattgcccaaaaccaagcttgaccacatcccgacccaacccgggcatagtgggacagtgagaacctgtgatgtacctaagcaggcgagc

SEQ ID NO: 152465 - DNA, 314 bp, Glycine max
  unsure (1)..(314): unsure at all n locations
ggttgaattaagatatcacatactntntcttnaataanaaatctattttgattntaacccanatcccaagaattctttcanaatgaactcctaaataattatgcannataaacttactgaatagaagcaataagcaataaccaataaaagagtttaagggaataaagaatgcanactcagaattatactggttcgcccacatccttgtgcctaagtccagtccccaagcaacccgcttgagagtncactatcttgcnaaagcccttacagtctgaacacacaggacacccttctttggtcagattgttacacaa

SEQ ID NO: 152466 - DNA, 340 bp, Glycine max
  unsure (1)..(340): unsure at all n locations
tgtgtcgtctgcatactgcaatatgctgactntgacttcatttctgcccacattgaaaccttgaaacaggttnttatccattgcttctttcnaccagcgcgttggtccttccacaagaatgttaaacaggaacggngatagagggtctccttgtcttaagcctctntggngaataaactcaggtgtaggacttccgttaaccaatatggatatggaagcagactttatgcagccttcaatccaagttacccacctgtcacanaaacccatcctcttcaacaaatatagtacaaactcccaagatactgaatcatangccattntataatctactttgata

SEQ ID NO: 152467 - DNA, 240 bp, Glycine max
  unsure (1)..(240): unsure at all n locations
caattggaagtgatcatggaggtgaatntcataatgagtcttttgaacacttttgtgaagaacatggaattcaccacaattcttattccccaagaacacctcaacagaatggtgttgtggaaaggaaaaatatatccctataagaaggtgcaagaacccttctaaatgaaacaaggttaccgaagtacttttgggcagatgttgtacatactatntattacaccttgaacagagtactta

SEQ ID NO: 152468 - DNA, 351 bp, Glycine max
  unsure (1)..(351): unsure at all n locations
tgcacaagactctttaatattgaagagtatccttgtggaaccttcttccgacgaagacactgacaaaaacttatcttctccttcttggacaaggtatgtgcaggctggggcaagtaaattttcttcccatcagaccttggatgcaattgtgatcgtatacccatatcagctagatcttgatgggtattcaagccatccttcgtcttgccttgaatgttaaggagcgtnccaatcacattgtcacaaacatntttcttcacatgcataacatcaatacaatgtctaacgtcaagatcacaccagtacagaagatcaaagaanatagacctcttcttcatatgcaactctgac

SEQ ID NO: 152469 - DNA, 421 bp, Glycine max
  unsure (1)..(421): unsure at all n locations
agctntgaattctagtaaaaaaaaactcctcatacatattctaatactcatgcatcttttacattcaaaactggaaacttagattcctagccatgagtcatccttttggcactgtagtttagcttctacaaactacccacacactcacaatgtgcacaatttgtttcgcaagctaaattccacaaaatcatccgcaaatgccattgaggcatttcaccgaacacttggtgggcatatgtttaagcatgaaaatcaagggaatgagggcaatgtggcttgccccattatctcagaatgcaccctatgcctaaggccatacnctacaaccccacaattcaacaaaaacaagcaaattcaaggatacatcccttcacgtttgagcaaatatatgcaacttagagcaccaaaatatatcaatgga

SEQ ID NO: 152470 - DNA, 232 bp, Glycine max
  unsure (1)..(232): unsure at all n locations
atatcagtataactctgatatggcttacgaccggactcagctgcagaacatggttaaaaaggatagcgagtcctttaaagagtacgctcagctgtggagggacctggcagcgcacgtagcccctcccatggtcgaaagggaaatgattaccatgatggtagacaccttgccagtggtttactatgagaaattagtangctacatgcccttcagcttcgcagacttggtattc

SEQ ID NO: 152471 - DNA, 317 bp, Glycine max
  unsure (1)..(317): unsure at all n locations
atctagaggtatacctaggatctctatcagacactatgctagatggcacaccatgtaatatgacaatctcactaatatacagacaggtcaactnttccaaggaagatatgatattaatgggaataaagtgagcagacttggtcagcctgtcaacaataacccacatagaatcaaaacctcttggggttctaggtagtcctacgacaaaatccatagaaatatatgtccattgtcactgggtatcttcaaggggtgtaactatcctgaagggctctgatatcttatacttatgacagactaaacatgcatacacaaac

SEQ ID NO: 152472 - DNA, 52 bp, Glycine max
tcccccttcacaccccttagccttgaacctaaactataccccccccaaaacc

SEQ ID NO: 152473 - DNA, 180 bp, Glycine max
  unsure (1)..(180): unsure at all n locations
agcttgaaaaataaatatttaataaaaatatatttatttaataaaaatattaatttttgtccaaaaaaattattaaactaaaataggtgttaatttaaaantgggctttctgccttaaataagctggaccggccctggaatgaaataatgggaaataaagaaatttggtgaaaagtattc

SEQ ID NO: 152474 - DNA, 252 bp, Glycine max
gagctagaaacccagtttttttttttttaagccccctacaccaagactttcataccacaaccaccatagcacaaacatcgtgtctcatgaaaccacaccgaaggacctcaacgacggaacttactggctgcgatcgagaacaacccaattgaccttcgtttttcgaggaaaaagtcatgctgtcttgtagtcatctgcttgatctctgattggacgcatgatgctatgttcttgaaacctaagaagagattg

SEQ ID NO: 152475 - DNA, 158 bp, Glycine max
ggctcaatactagtatcctatgcttcttctcttatgtgtaatctcttctttcggtgtctctctgtacctttaccaacgccatctccttacctttgaaagacttcattcctctgataaagatcttcagacgttgtactttttgtgtgacgaaatccttc

SEQ ID NO: 152476 - DNA, 380 bp, Glycine max
  unsure (1)..(380): unsure at all n locations
gctgccactcaagagacatctcacctatatctnntattaaaactatcatgtacatctgtccattattcanaaataacaccatctaagcaaacttaactgagtagagactagtactctccttcttccataccaatatgtcctcctcaatcagaatcaaattaatacttctaaagtcatgaccttntatctaagtaaattattatatntatttctcctaatgatatagagatttctncattcccatcaccacaatcaatntccctccctccggtcacctaaactttgacaccctggctttatggctactacaanggtgtataatctagtatacttcctatatgtgaaaataaaaccacttcacccgaacgtcttgagaaaat

SEQ ID NO: 152477 - DNA, 147 bp, Glycine max
  unsure (1)..(147): unsure at all n locations
tcaagcttcttctggaccttgaacaagcaatcaactttctctgtcacaaccatgctatgtgctcgcgactggtccctttcttcccttcgcaacttgagctcactattgctaccccatagagctncgagaaatttgttccggccatac

SEQ ID NO: 152478 - DNA, 324 bp, Glycine max
  unsure (1)..(324): unsure at all n locations
caccggtcacgtgtctactatcattgttataatctctntctctggtttgggggtgctacttgagttgccaagcctctccatctttgngcgtgttctttgaaagatccgtccnccctattgcacacgttctgtagttgcatcctatccgaagacattatactgacactgcctaacgaaggccaccactaggtccttccaagaatggactcgggaaggttccaagttagtgtaccaggtaacagctacccagtaagactttctcaggagaaatgtatcagcagtttctcatcttttgcgtatgcacgcatcttccgacagtacatc

SEQ ID NO: 152479 - DNA, 215 bp, Glycine max
  unsure (1)..(215): unsure at all n locations
gatccanaatcctgactcaccatanactcttgacccagggtgagaatgtcaatccttatcctcggaagcaaaaaagaaaagaaggaaatttccaatcaaagagaaagcagagaaaaaaaaaaaagagaagataggatattcccaatcaaagagtgggagaaagaaaataaaaggagacgaaagaattttcccaatcaaagaatgcgagaaagtat

SEQ ID NO: 152480 - DNA, 270 bp, Glycine max
  unsure (1)..(270): unsure at all n locations
ccaaaactcattccgtagatccctcttgtaagactaagtttcaatcttgcttcaatcaagttctaaggcaacagtacatttcccaatgctaaagtcacctaactatgcacacaaatggatgattagaccaaaagcatacaaacattaagcattgaacacaaaaaacataatgaattagatattaagtatttacatcagttgctcattagaaatccncaactagggtgtntagccagccattacagaagagaccctaacaataataagctt

SEQ ID NO: 152481 - DNA, 440 bp, Glycine max
  unsure (1)..(440): unsure at all n locations
gatgcaagcttgcctctacagaggcatatatacgaanaataatccacacacacttgtacaaataaaaagaataataaatccacagcaacaaccttatctctgtagccgtcaacaccaatgggcgaggtctgtataaccattctctnttccttttcttttcttcaattaccatcaatgtatcattccgggttctgatttttttttgtgttataaatacgaagagaaaaaactagaggaaaacaaagtggaagagaaaaaagcacaggaagaagaaaagaaagaagaagagacaaaacagaggaatcaaaagatggcaagaaatccaacgaggaatctgcgccaccagaaatcgtgcaaggcacaaccttcacaatgcatgaacactttaagcacgatttctgacatcttttttaagntaaggactaaatttgcacacttat

SEQ ID NO: 152482 - DNA, 368 bp, Glycine max
  unsure (1)..(368): unsure at all n locations
gagggagagacagagagaggttgtagcacgatatttaatgaagannaagggagagaagttgaactttgagttgtgtctcacaagactctcattcatcagagttacaacaagtgttacatatgcttctatatatagactatgtagcttccttgagaagctctcttgagaaaacttccttgagaagcttccttgagaaaacttccttgagaagctagagcttagctacacacacccctctcataactaagctcacctccttgagaagcttccttaagaagattcctagagaagctagagcttaactacacatacctttctaatagctaagctcaccttcttgagatgagacgctagaacttagctacaca

SEQ ID NO: 152483 - DNA, 307 bp, Glycine max
  unsure (1)..(307): unsure at all n locations
gtcgcaacgtgcccttcgcgggcgagcgatggcgaggctcacgggtgcgctttccaaaggaggaaagatgcgcggagtcgccaccaacgtttatttgtggaaaacgtctgataaaaccgaaggaaactggtcaaaaggaaaattctaagttcgggagttgtatttacgcttgaggaaggtattagcacctcacacgtttgtcccataggacaacagtctattttttagaattgcggaattgtgttatcttaacctttagttctttttatcttttgaggtcaacanaagcggggcttttgctcctaca

SEQ ID NO: 152484 - DNA, 361 bp, Glycine max
  unsure (1)..(361): unsure at all n locations
tgccggtaaatgtcgccaaggtagatataattagaagccctcgctggtgaattagtgaacccagaatcataagagaatatgaagatggaggaagccgcaggcagtggcaacagtgacggtggcaacaaatggtggtggngagtggccagcgctgctcanatgggaatgngaattcgtaccttcgccaaagggcacggaggcgattcgcgcctcatgcctttcanagccttcgttgtagcttccctcttcgtcagcagcgccgccttcgccttcgttctactcctccaagctaacggcatccacagggtactactgctctcatcttcattcccatttctggtttctaactctctntatgtct

SEQ ID NO: 152485 - DNA, 201 bp, Glycine max
  unsure (1)..(201): unsure at all n locations
catcatcattgtaactatagctatccattataaaatagcttagacaatctaggtctgctgcttctaaaccttntatttatccttgaagcagctcaatgttttttatttcgcgtcaactagtgaagagtgaacactgaagctgttctgcagactcattgattttccttcattgcgacagaacctaaccataccctgccctga

SEQ ID NO: 152486 - DNA, 198 bp, Glycine max
  unsure (1)..(198): unsure at all n locations
acacacccctttatactaaatgcancccccttttctattttgtttgaaattctttntccgtaacgttacgaaactttacgaatctcgtaacgatacttattntccttccgcacggttacgaatccttacggattatgtatttactctnntttggctttcaaagaagttacggacactcacggattgcgcaaaaacacc

SEQ ID NO: 152487 - DNA, 399 bp, Glycine max
  unsure (1)..(399): unsure at all n locations
agcttggttntggtcaatagcaccccacctgacttccncaaggtctactgatcctcgcaacatatctccaggtaccactctgtggtcaacaaataatagtaggaagattgactcttccatgctttctcacatcaagcttattggattatggcgcacccgtcatatgtggtactaggtggcaatcgggcgatggcacaaatcaactatcacatttccacaagccaggcataagcacaccatccncagctgcccacctttaaatttagctcacgtgcatgtacgtagccttctcctcgttcctctcagcaccgggtccccatcaaccccctcaagctntcacaatatccaatcaattcaatcccatttgtcatgaaactaccttaaacaaagaanaacaga

SEQ ID NO: 152488 - DNA, 314 bp, Glycine max
  unsure (1)..(314): unsure at all n locations
gcttgaatcgatacacacatactgtaatcgattaccagagcagtatttcagattatattctcatcagtcacanntcttttattggttcttgaatggccatcanaggcttatatatatgtgacttgagacancgaattgctaagagattntcagaacannaaggtcttatcctcttanaaagcanaatcgtttcatcctcttaanaattccttggccaaaacacttgtgattcaataaggaattagttgagtgctcaaattgttcaatctatctctttcaagagagaatacttcttctcttcttctntattctga

SEQ ID NO: 152489 - DNA, 383 bp, Glycine max
tgagagcgcgatcttatactgtgagagaacgactagctgcgagtaataatctttgcatcaatctctgaattctagaatgaaatgtataaatgaggacatgatgaatgctatgattgcacatacacaaggcttttgaccaaaaagcttaccttgaatgataattatatccttcgcaccctttatgagctgaatgatattgtcaaagatttgaaccctgaacttaaataataacctccagataccttgttagattctaggagagcatatggctcaaggcaaattaccgcaaatttgcggagtggaactaatgggatgcaagaaagaaataaacatcggcacaacaacacatatgttgtgtataacaataaaggagaatgaaaagt

SEQ ID NO: 152490 - DNA, 425 bp, Glycine max
  unsure (1)..(425): unsure at all n locations
gctctcttagtggtgcttcttgcaagcnnccttgttacttgtattgattgttattntcctgtgttgtcaaagccattcaatttaacatatagttgagaaattgatcatcaaatgtatgtgcatganaaatatatatgttgagagatattggccttttcatgattagttntttaatccctcccagaagctaccatggccacccataatanatgccattctaaatttttgagtttcttacaaattaagtatggacaatggacctaagtgaatggatttgacctacgatagttgatatattcttgatagttaatatctgaacactcacttattntatacactncatcaataatcattttttctctttctatcatatcatctatcttatanntttttttctttttgggtcattctctctggctctatct

SEQ ID NO: 152491 - DNA, 318 bp, Glycine max
  unsure (1)..(318): unsure at all n locations
agcttgtaggattatggtgtacccatcacatgttgtactaggtggtggtcgggcgatggagcacaaaacattttccacatccacaatgcgcgcataaacccaccatccnctgttgcccacctccaactgagctcacgtactcccacgtagcccatatcctcgtttctctcaacaccgggtccccatcaatcctcccaagcttccacaacatccaagcaaaacaacattccaacagcacaagctatcacagccaagcataacagagcagaggcagaaaactctgctcaacacatcaaccaaaattacagcttttctcac

SEQ ID NO: 152492 - DNA, 357 bp, Glycine max
catgcatgcttacattccctttagcattcattattgaatcatttcagcctttgctttcgtgtagcttaggaaaaacgccatgtattctcctttctttcttccaaagccatttctaacatgccaagcactttctccatcacccacatccaccattagccaccacaaaccatcgttgctctccggtgaaaccccacaccgataggaacccttcaaccaaagtggaatcttacaacttggcttgcgggtttggtagagaacgaaaccctaatctgaccttttgtttttatcgagaggattgcgttgaattgatgagcaacgacgaataagaatcttcaagtgacgcgacgaggaacccgc

SEQ ID NO: 152493 - DNA, 172 bp, Glycine max
acttctgctttagttagaccacatatgtacctgagaatgtcgcggggtcaggagacttgggacgcaggcgggtgctattgccaaaccaagcttgaccaatcccgcccaacccgggcatagcggcagtgagaaccttgatgtcctaaacggcgactcctggcagcaacagaaa

SEQ ID NO: 152494 - DNA, 285 bp, Glycine max
tcttcttgcttatggcgcttctatggaggctggatctttgagcttcaatggagtcctttaatggtgatttttcaccatggagatgcagcggaagacataggataagaggtgataggacgcaccatctattaaggaataagccatggaagaaggagcttcaccaccaagatgatccttggattacaagcttggagattgatgcttactggaggaaaagatagagagaacgagggagcacgacatttgttgaatataagagggagagatgtgcaactttgaagtctg

SEQ ID NO: 152495 - DNA, 495 bp, Glycine max
  unsure (1)..(495): unsure at all n locations
tgcangtgaacccctttaaaaccgtggtaantnccntttggantcacgcgacactatctagtactcaagcttaatccacanagtccacgattttatctgcatctcctttaaatgaatgcgaagagaatgaagttgtgcattttgctttgccaacaggcaacccaagcccatgagaccattcctatcaaacaatcactcattcactcacatacaccacaaacctaatttggagtctcgaatgcttatcctttgagcactcacagtacgatgcccctcctcctactcccgcgagagtaacgagagcatgtttggtgaccctgtccaagaacttacttcttcttagagacacacagtcgtcgcctcccttcctgcaccgagagtacaaatgcagggtggtgagcttaccaaaaactactctcccggggccggcctggttggtcgacctgtactcggagtatgcatccgtgcctcctctgccgagggatggacctgccg

SEQ ID NO: 152496 - DNA, 390 bp, Glycine max
  unsure (1)..(390): unsure at all n locations
agcttaaccaagaaaaaggctaacaatgttnttatgcacaattgaaggaaataaaattcagaatttaggaattcaagtaacaatccttcatacaaccaatatattaccttaaagagatttttttttanagttcttcaagcatcaaccattcaacccaaatttgtctctctttntttttttttttaattntgcttatacgaatttctgttttttttttataacaaagagatcaaaaggcttaacttttgcaatggttcagcctaaaaaaaaaacatgaacaagaaggtaatataaatggcaaagaaaataaagaaggatgttacccaatatttccagcaaaggaagtgttgatcctagaatcggaactctgataaccaaatgatatgaacc

SEQ ID NO: 152497 - DNA, 318 bp, Glycine max
  unsure (1)..(318): unsure at all n locations
cacaagtgagtttattcgattattagagttatctctttatcttaggagagtgattctctnattcttggtgatcaagacactctgctgatcnaggacttcacaccttgtgtgtgccctcctggnagagtgttctttcttctatcatctcaccttgtcttttaccacaattcagaaatcaccttgccaaatatctgtgacatactccattacacactcaataagtattttgacctaatgaattcaaacagactttactcgttgaatacctcatggacctgacttcgtatgcatttatatttgtcgcacactaccacgtta

SEQ ID NO: 152498 - DNA, 396 bp, Glycine max
  unsure (1)..(396): unsure at all n locations
aagctctactaaataagcctagacattaaaattttgataganaaagtcacatgcatgttccctgtatatagacaagatttgagttgagatgaactgaagaaagagagggcatatttagtactctagctagtcaaagtggtatatatatgtctaataacgaacctggtgctccataatttttgcatcccgtgtcctgttttgttgaatctctccctccaacctaaagttatatagtcagtcacaaaaagagtagtaacagggttaagcatatatatgtgtgttatgtcagttatctttcacaaagcagtatatgctatatatatcgctcacagatcaaagctgacgatagctaaacttactccaataggtctgatgcaagaacatactcattcatgc

SEQ ID NO: 152499 - DNA, 511 bp, Glycine max
  unsure (1)..(511): unsure at all n locations
cggaatgaaccatgtagnacccatcactattacgtaataagtctacagaaataccagtcatgcatatctccaatcaatccacgggcttatataacatgcaaggtgtttgggccactaacatgaaccacattcataacccacctgtcaagattctgattaatcaatgctgctgcaaatctgcaaaactcaatatattgaagattgaagattctcataggaaaattcctaaatgcatatctataacaagaaagtaaataagacaaaaacaataccctccaaaacctgctcgcatgtccataacatttcttaatctgatttctttccagtgtaaaacacgaacatagcttgctattatttcattccagtatttcgaatctgccctaaaaagctctgatctggatgtgaaagcatcaagctntatgctttgaagcctatcatgtggggtttgcaaacgtgcatgccattagtaacatttgctcatatccgttcttatgcattcagagatgcatgt

SEQ ID NO: 152500 - DNA, 415 bp, Glycine max
  unsure (1)..(415): unsure at all n locations
gagggactcatggtcactatgaatgacaaattccgtgggataaaggtagtggtgccatgttcccacagcccgtactaaggcatacaactccttatnataagttgaatagttaagggtacgaccacttaacttttcactaaaataagcaattggatggccttcttgcatcaacacagccccaatcccaacatttgaagcatcacactcaatttcaaaagatttttgaaagtttggcaacgcaagtatggnggcattacgtagcttttgcttaagaacattgaaagcttcttcttgtttctctccccatttgaaaccaacattcttcttgagcacttcattgagaggtgctgccaatgtgctaaaatccttcacaaatcgtctatanaaacttgctaagccatgaaaactcctcacc

SEQ ID NO: 152501 - DNA, 451 bp, Glycine max
  unsure (1)..(451): unsure at all n locations
tattgtagccgatgctctgtctcggcgtcatgcattactttctatgcttgaaacannaatgattggtcttgaatgtttgaaaagcatgtatgataatgatgaaacttttggagaaattcttaaaaattgtgaagaattttcagacaatggtttctttagacatgaacgctttcttttcacagaaaacaaattgtgtgtgcctaaatgttctactagaaatttgcttgatcgtgaagcacatgangaggtttaatggtgcattntgtggtccaaaagactctatagacattacangaacatttnntattgcctcatatgaaaaaggatgtgcagacactctgtgaacatcgcattgtattgtaaaatgcaagtctaatggtaagcctcatggattgatactccattgcaataccgagtatcttgattgttatcatggatttgtttgggctgc

SEQ ID NO: 152502 - DNA, 322 bp, Glycine max
  unsure (1)..(322): unsure at all n locations
tgcgcatacttcttcacgaacgttcacttgcacaagacattcttataactatgtaaaatgaacccatatactattaatgcaccttcgttacctagattatttacatgtactatcaacgtgtatgtgttacctacatcacacacattttctttgctagactcacatacatgcatactctaagcactgtggctatcanaaattgcatacgtgcacatcnttggatctctaatacctatacatacacaaacttcataatgaatcttgactatctacacaataaggcgctacatttcatgctgtctttcaagtgttgtgactacct

SEQ ID NO: 152503 - DNA, 279 bp, Glycine max
  unsure (1)..(279): unsure at all n locations
gatgatgaccgataacccaaagaatgattcgaagaatgagtcaacaagttcaagtttcatgagaaganatcaagaagattcaagaatcaagagaagtttgatttcaagattcatgagaagatgaattcaagtttcaagagaagaaatcaagaagacttcacaagggaagtattgaaaagattttcancaaacaaacatagcacagttctgttttcanaagagttttcttcacaatttctagtaccagagttttactctctggaatcgataccagttcct

SEQ ID NO: 152504 - DNA, 272 bp, Glycine max
  unsure (1)..(272): unsure at all n locations
gtctcaagactggactaatacatntgctgtccaagttttatggtcttgcaggtgaagatcctcataagcatcttatgaagttccatattgtctgttccaccatgaagcctcctgatgtccacgaagatcatatctttctaaaggctcttcctcattctctggagggagtggcanaagaatggctgtactaccttgcttccaggttcattaccagctgngatgaccttaagagggtgttcttggggaaattcttccctacatctatgaccact

SEQ ID NO: 152505 - DNA, 512 bp, Glycine max
  unsure (1)..(512): unsure at all n locations
tggggnatgagactcctgatnacgtcttggantttacggacnctattcaatactcaagcttgtgaagtatgtatgttaatgaggaggagtttaatgtggcattattggacggatanacggggtgtcttagtaggatggttgtgcccgcctacacactcattaatattttataaagtgtaaaaatgtatgcttcaacattgaattctgagatagagcacgaagataatatctaactgatggcttaaatttattgataagagggagtagtctatagaaaaggtgtactttatacgatgaagtgatttttataaatgagataatggcttagtgcggctaattgtgataataaagaatttgttgtttgtgaacactattgttaggacattggggatatttttggttctaatactgtaaacgattacatgtaaattttctattgcttatatgataaggctgaatgaataggtgtaaattaatattaattataatcggagttttatgtctgtatctag

SEQ ID NO: 152506 - DNA, 394 bp, Glycine max
  unsure (1)..(394): unsure at all n locations
ataatgatggtccgagntatgttgtggagcggntacgaacccggaatgggtttaggcaaagacaacggcggcataactagcctgataaatgccaaaggaaaccgtgggaagtatgggttatgctataagcccactcaggcaaatataaagaggagcgttgccggaaggaagagcggaagtcaaggctcgcggatgagacaagaaggtgaaggaaacccaccctgccaaataagtaagagctttataagcgcgggtctggaggacgaaggtcaagtcgtcactatatatgaagatgatgctccgagtacgctgtatttggtacgaccatgcccttctgatttacaactgggaaatcggcgagaggaggaacgccccgacttttacgcgaagagca

SEQ ID NO: 152507 - DNA, 369 bp, Glycine max
  unsure (1)..(369): unsure at all n locations
tttctctacaatngcatcacctctcaatgagctggtgaagaagaaatgtggcattacctgnggtgaagaacaagagcaagcctttgctttgctcatagaaaagcttactaaggcacctgttctagctcttcctgactgttctaanacttttgagctagaatgtgatgcctctggagtgggagttggagctgtattgttacaaggtgggcaccctattgtcttatttagtgaanaacttcatagtgccaccctcaactaccccacctatgataaagagctttatgccttaataagagccctccaaactcgtgaacattaccgttgttcaaggaatatgcattcatagtgatcatcaatcacttaagtaca

SEQ ID NO: 152508 - DNA, 367 bp, Glycine max
  unsure (1)..(367): unsure at all n locations
agcttgcctcanagatgtccaggaaggacaatgtctcagaaggaactagttccgctccggagtatgatagtcaccgctttaggagcgcggtacaccagcagcgcttcgaagccatcaaggggtggtcgtttctccgggagcgacgcgtccagctcagggacgacgagtatactgatttccaggaggaaatagggcgccggcggtgggcaccactggttactcccatggccaagtttgatccagaaatagtccttgagttntatgccaatgcttggccaacagaggagggcgtgcgtgacatgagatcctgggttaggggtcagtggatcccgttcgatgccgacgctatcggccagctcctgggata

SEQ ID NO: 152509 - DNA, 280 bp, Glycine max
  unsure (1)..(280): unsure at all n locations
cttatcaagtaaatggatcattcttaacgtccaacgccttataatgatcacctttcangtaaaaagaatcgcttgattcacgcttaagaaagaactacataggttcgatttcctcatcgatggagggtacgtatgagcaaaagccccgctattgtcgacctcataatataaaaagacataatagttaaggtaatacatattccacaattctaaaaaatatgttgttgtcctttgagacaaacgtgagaggtgctaataccattctcaaacgtatatacaa

SEQ ID NO: 152510 - DNA, 394 bp, Glycine max
  unsure (1)..(394): unsure at all n locations
agcttgtatttcaaatattatggtgtgcgcttgttgtaacatgttatgtttgctactgatttttaattctttgaccctttgaatgaccaaattggctttcgatgtcttcatgagacttgtagagaattttatcctttacattcaagcactggtatcatgttatttggaccattacaacataatcaatccttanagcattgcagttntgttatattgtgaggacaaactgacatctctatcttcatggtcagtttcttccaagatccaagccttatttgcccatgacttctccataaaagatatatatatctttctcttagctntctacaaccactgagatcatcccaaattcacttttgtagctcaagtagttntcaaattattgcacacatat

SEQ ID NO: 152511 - DNA, 525 bp, Glycine max
  unsure (1)..(525): unsure at all n locations
agtgatgnnntttgaaaccccagtaagtanccnttgcttgtacgcgatactatacactactcaagtgcgccatgccncttgatatacttgtgggactcatggtcactatgaatgacaaattccttgggataaaggtagtgttgtcatgttttcaaagcccgtactaaggcatacaaatccttatcataagttgaatagttaagggtaggaccacttaacttttcactaaaataagcaattggatggccttcttgcaacaacacaaccccaatcccaacatttgaagcatcacactcaatttcaaaagatttttgaaagtttggcaacgcaagtatgggggcattagttagcttttgcttaagaacattgaaagcttcttcttgtttctctccccatttgaaaccaacatttttcttgagcacttcattgagaggtgctgccaatgtgctaaaatccttcacaaattgtccataanaatttactaagccatgaacacttctcacctttgtcacggacttangtgag

SEQ ID NO: 152512 - DNA, 386 bp, Glycine max
atgcaagcttgcagatagatcaatgtgagtcaacttttatctttgatcaaattataaatgtttgaattgttcttaaaattataataaaatcaaatatgataaaataaaaataaattctatttctgaaaaaaaaagtcaattctactttaacctattgaataaaattattttaattcagaattaattttttcactactgctaattcaaacacacacttaccataaacacgcgcgttgcactcgaaaatcaattgtctcccgctccagcaaaatcaaattagtaaagcgattgccacataaatttatagtaacaaataacaatcatcaatgcctcaaagctaaaccccaaaccatcttcttcaccttttctctctgcacacgaatatg

SEQ ID NO: 152513 - DNA, 273 bp, Glycine max
  unsure (1)..(273): unsure at all n locations
ctatatgatatagtgtattctctatattatgttcgtatgtggaggaggctaaattatcattctaattctcttatagttntaattgtgtaatcttgattgtataaattattaaatatataaacatttgttcttattttattatactatatagattgtctttacattattgtatatcatttaaatattatgaggatatgaaattataatttaacctttataaaaatagatgtaacgcaacatagagactgatgctactttgatattccaattgat

SEQ ID NO: 152514 - DNA, 273 bp, Glycine max
tatcttgtgcattcaatatcctgatgagggtgtttcatatgttctcaagactggacaaatacattggctgccccagtttcatggacttgcaagcgaagatcctcatacacatcttagcgaggttaatagtgattgatccaccatgaagccccctaatgttcaggaagatcatatcttactaaagtatttactcattctctggaaggagagagaaaagaatgcgtgttctacattgctgatagatccatctccaactgggatgaccataagaga

SEQ ID NO: 152515 - DNA, 353 bp, Glycine max
  unsure (1)..(353): unsure at all n locations
gagatcatccnctcaacaacattatgggtgatatctcanatggggtaacatctagacactctcttaaagatntatgcaataatatggcttttgtatccatgattgaacactaaaatataaaagaagccataatagatgataattggatcattgccatgcaagaagaattaaaccaatttgaaagaaataatgtgtggaaattagtagaacaacctggaaattatcctatcatatgaacaaaatgtgtttttagaaataaattatatgaacatggtataattattagaaataaagccaggttagtagcacaaggggataatcaagaagaacgaatagactatgaagaaacatat

SEQ ID NO: 152516 - DNA, 122 bp, Glycine max
tgctattgtaacatccactttattagcaattgtggaatagattagaaggccattgatggtgacgctaatattgaagaaggaacaattctattatagaaacacaaggggaaccatttttacac

SEQ ID NO: 152517 - DNA, 202 bp, Glycine max
  unsure (1)..(202): unsure at all n locations
gtatatagcttatattctggtgcttctgcgctgntaaaaacaagtaacttagcatgattcctcggaagccaaagttgcctttaaaatttcttttctggtaaggaatttccgttccggaaggaaattacagtttacctctataaacaaaaaaagctattccaaaagaagaaaatggtaaaacattgccttttaaaacagcaac

SEQ ID NO: 152518 - DNA, 345 bp, Glycine max
  unsure (1)..(345): unsure at all n locations
cagtgtttatattgcggttccaatgtggccagagggttacccagaacatggaacggttcaagcaatgatggattggcagaggagaacaatggatatgatgtacaaggatgatgctggagcactaaaaggcaagggtaatgaggaagatcctctcaactattcgacattcttctgcctagntaatagggagctgaacaaagaatgagagtatgtgcccccagaaagaccagatcctcatacagattatatgagagcacaagtgtcccgacgctttatgatttatgttcatgccaagatgatgatacgcatgtctgttaattaagtttaccacatcttccaagatac

SEQ ID NO: 152519 - DNA, 288 bp, Glycine max
  unsure (1)..(288): unsure at all n locations
ttctaacacaggtattttcacggattgtgactgggatgctcttatactangaagtctctgcttatatantttactttagattaaggaggacagatactaatgctccttttaacttgaaatatccttccttccttcatcagagagcaagaaaaacttactaatggatggaagcatctataccatgttgcatntacaatanaagcaaaacacacaatctcaatataacttctattcaatagttggccaaagactttcacaatgagaagagattagatattaatataaaga

SEQ ID NO: 152520 - DNA, 459 bp, Glycine max
  unsure (1)..(459): unsure at all n locations
ngcaagctntctaaatgtttctttgcccagtctcaggtagagtacttaggacatttggtttcgcatcggngagtggagcccttagcatcaaaggtcactgcaattcagcaatggccaattcctcgtacaacgaaggccgtaaggagcttcctgggccttgctggcttttatcgcaggttcattcagaattatgccattggtgtggccccattagtcaaagccacgaccaaagaacccctgcattggacatctgagacacatgaagcctttgacactttgaaacatgccttgtcaatagctccggtgttagctttaccagacttcaaccttcccttcacagtcgagacagatgcgtcaggagttggtatgggtgccattctttcacagcgaggccaccccatagcatttttcagcaaaccttttagtgccaagtactctgatcataacatacatgcgaga

SEQ ID NO: 152521 - DNA, 492 bp, Glycine max
cggaatgatacactttactatctataatctcagctctcaggagctgagctagttattaaaggggtgtgtgtagcttatctctagattctcaagaaagttctctcacatattgttctcaatataacttctcaatgaacctacctagtctatgaatagaagcatgtgtcacacttgttgttgctatgatgaatgatacttttatgagacacactacacagttccacttgtcttcctctactataacttaaactgaatctacccctgctctttttcttttcctacatttaagcatactctatatgcttcttatccaagacatcactcttgcgtgtattcctcttctttcatgagctacatacctatcggtctgtccaggccatatctatttttcttaacactttgtgcttctatagttccaacatttcccttctggctgctcttactctcttcatactgtctgctgtggcctttaatgttcctttctccttaccg

SEQ ID NO: 152522 - DNA, 416 bp, Glycine max
  unsure (1)..(416): unsure at all n locations
ctaagaagaaagtagaaaacatatcacctttctatttaactatcttttgtattgtatgcttggcaaatctgaatggtactttcctctgtttggggtggaacttatggatttccatttcccaaaagggtgactcttctgtcacttccatcttcatatgattttggtatgtggcttcagttttagccattatgtggntgctgtggcgcgccaattgtttgacttcaatgataaattgtgtttcttactcaacatcaattcattggaaattaatgctttccttaactcagttctatttgcaagaactagagaatactatacacgtgtttctgcatgaacaccagctcatgcagctacttcattaacgcatatataattaaagttggctctcagaatntctccatatcaccaactatgat

SEQ ID NO: 152523 - DNA, 328 bp, Glycine max
  unsure (1)..(328): unsure at all n locations
atagcccgaggactagagtacttgcataagggatgcaacactcgaantttacattntgacatanagccacaacattctttnggatgagaagttctgcctcaagatatctgattntgggctagcaaagccttgtcctagaaatgaaagtattatttccaggtctgatgccagaggaacattatggtatgtagctccagaaaatttggcagaatttcacacanatctgatgtaatcttccactttanatttaaaccacctaaaccttaatgggtaaaattaattctattatgcattanatgcatcttatctttgacttgaactctacaat

SEQ ID NO: 152524 - DNA, 439 bp, Glycine max
  unsure (1)..(439): unsure at all n locations
ttatagacgaatgtttcacttttcttccacttctaccgagagacataaaattttcaacgtctttcatagcatcaaactgaaaatctctaactgcccttccaatactaatcgctgcctcaacaattcctttttctcccattagcttgctcctgtttagtgacacaatgcgaatgacaatgcagtttccaaagtacgttgaaggaatcgaaaattcgggacggttacggcaatctcccagaaacttcaagctgtaaatttcatcattattattattatttgcaatagtgatagcattgacctcttcttctgattgaaccttgcaaacccacatcanagcacttgtcataacaaaggttgatatgtgcaatgactctaattctaacccataagtacttctacattcaatcgacacccatttctttagcttcgcaacatggcc

SEQ ID NO: 152525 - DNA, 385 bp, Glycine max
  unsure (1)..(385): unsure at all n locations
taaacctcttaatttagtcaatgcaatttcttttttatcccttgttctaattacatgcataatgcatctggttntcctagtttttcaattgttaaaattaggtccatgatctaatgtattttttgacatgatagtggcttgtctgacttgccacatgatacanagcaatggcatgagttcactggttatagccactgttttgtctgtcattgtaagaatgnngaaattgtgaatatgaataggatttgaacaagaatctgttcttgtactannaaatattatttttatgacacattntanaacggtctaatcgcttanaatgtcagcttgtcaatttataataatanaagtatataatgacaatttctaaatgtcttacatggta

SEQ ID NO: 152526 - DNA, 178 bp, Glycine max
  unsure (1)..(178): unsure at all n locations
tgcttaagacattatgaattcaacttggacagtgcaaacctgagattcaacggtacatgatattcatcactgggcaaatccatgaacaactaacgccacctagactttggtgggacggcgagnnntntatcgcaggatgcttcatacacatgccgtagacgcgcgcacattacaccaa

SEQ ID NO: 152527 - DNA, 335 bp, Glycine max
  unsure (1)..(335): unsure at all n locations
gtgtgcgttgagttggttaagggtggttcacgttgtgattggcggaagtggttggttcaactccttctaccattggtgagggaagttgaatattacattgtaaaaaaatcttacatagtgtcgcctttccctgtgaaatattnttcgcaatagaaactaatcttctgctagaattatgagtgaaaactaaccaattaaatatttatacaattaatacttacagtatttctcataattaaataaatcatgatgatcaaatatatattctcttctaaaagagaatcaattcaacatacacaagtctacaggaaaactatattatgagtaaactatca

SEQ ID NO: 152528 - DNA, 514 bp, Glycine max
  unsure (1)..(514): unsure at all n locations
ntganncccctgttgaaccctatagtatntaccngtcactatttcgtactcaagcttatgcttctaccggttntggactaccaaattgtcaagttgtttttgcatgaacaaaacaatcatattcatctcacaaaaaaaaatcgattccaaatcgatgttgttggctaaagataatgacatctcttaactccttggcaattgtatcaattcgttcaagtaatagtttaaacgataaaatcgagtgtgagtccacaagaactttgactgtactcagagtttatatatatccaattttaagtaataaattaattgaattgaatatttgttgagtgatgacgcataaatataattttgatctaaattaaactacaaaacanagcatgtgcaagggtgagaaaacaaacactcaaaacagtgaagtaacgattgatgcagaattatgaacatgttggggctcagtcagcctaccagaactactctngatgcaacattaaggatntntctctatttaacg

SEQ ID NO: 152529 - DNA, 314 bp, Glycine max
gacgaagcgtgttgtgaatggcgtctcgcgtggctagcatggtatcgacagcatcattgcgtgatgaccacttgatgtaattggagatggccggaggaggcttaccatatgtgacctcgtatggagtgaagtcggtgccggagtgctgagacgtgttgtaagaccattcagctagggctaagaattaaaccagtatgccgggttgtggtgaacgaaggaacgaagatattgctcaatcgtaccgctcatcacttcggtttgcccatcggactggtgatgatacgccgtactcatgcgtatcgtcgtcccactga

SEQ ID NO: 152530 - DNA, 264 bp, Glycine max
agctgtaggacgtgaaatcatgtgcagtcatgtatcttatagtcctctcacgggggggaggttgtgccatgctctcagaatgtgcaaaatcagaatgctcagaatcagaatcctcagaatcagaacgcttaagattattacgcttccaatcgagatggtcatgagcaccaataacatactgcacagattcatcatgagcggcctgctccggatgaccaaaaggaataacatgatgcctaactcatctatgaaatgtcctatcta

SEQ ID NO: 152531 - DNA, 522 bp, Glycine max
  unsure (1)..(522): unsure at all n locations
tggggaatgatacctnagtgagtangcgtgctattacctgtcactatcgaatactcaagctgggagaggatgcttcaatggaggaagagatttatggacagatttatagagggggtagcacgaaattgaaggaataatatacggagagaagtggaaccttgaagtatgtcttacatgactctcattcatcaaagttacaacatgtgttgcacatgcttctctttatagactaggtagctggcttgagaagccttgttgtgaaaactgtcttgataagctcatttgtgaagcattacgtgcgatgctagagcttagctccacacacccgggtgataactaaactcacctcctggagaagctcccttaacatgactcctaacgaagctatagcttaactacacatacctccctaatacttaagctcaccttcttgtaatgagaagactttaactgagctacntggcccctgttgtagctatactcacacctgtgacaaataagcaatggtatgcaatacactcg

SEQ ID NO: 152532 - DNA, 396 bp, Glycine max
  unsure (1)..(396): unsure at all n locations
gactcattatccntnacagntattttaacagaatgtcttcctggcttactctgatttcttgaaggagaatcccccaataaatcactcaccttttcttctacgcagagagaacttctcggtggagcaatcttctttgatgcttcaggtttagaatcctttttcctccatccaccaaaccatcctttcttttcttgcttattttctccacttttgttacaatttccatcttcaataggaatttctctttcttcataacagctgtgacgatgcccaatgatcacctcatcactctcattgttcaagtctggcgactccaaccttagtgcatcttccaattgccttctttcatcctcggncaaaatatcattgagctcttcactctcttgttcattttca

SEQ ID NO: 152533 - DNA, 294 bp, Glycine max
  unsure (1)..(294): unsure at all n locations
tcttacacgtgtaacacacaacttcagcttagtggtttaagactctaagtgtagcgtccatggaaggcgaagcatccataanagttactatccatagtgctctatggccttcaataccatcaccatcaagcaagggagatgcttcaacctccaacccagctgctgcanaatggccactcaatatacaagaatgtattcctcatacaatagcaccaccacattagaatgctcgagttgatccaaaaatgcacaacatataanaatgctaacaataaaagtcctaacccttatcat

SEQ ID NO: 152534 - DNA, 365 bp, Glycine max
  unsure (1)..(365): unsure at all n locations
tctcttatgttgcagagtctatgaattctagaataatataacttcaaccactanaaatgacttcaaattgtatttaacatctaagccttgtcagctcanatgatcaaattcctcaatgtgaaaggnggaacagactcttctatttataagagtcttanaggtaattagtgatttacaaatatcatagcanataattaaccttctaagagctntccgccttttagcanaggctgctttagacctgatcgatgaggtacaactcccttaacaaggttccgtcaatgtggtcgattgattatggagttaattttcaacaactttgtagggatatgcatcatacatggatgatcatcatacacatacta

SEQ ID NO: 152535 - DNA, 396 bp, Glycine max
tagcttttggttttggtgaacacaattaatctattaccatgtaactgtaatcgattacttgggtgtttgtgcgtgatgtaatatgttacatctctatgtcttcacctcgtcaaccactattattactacatttacttccgccacccacctcagccaactaaaatgcctcagcctctctttataagccaaccttaccctatgcacaaatcacaccaacacctgttctaaacctcctgttaccacccttctctgaatacaaatatcttatgctctcaaaccctctatctcctcttcaagatgacaaacaatcctttaagagcaaataatatggaaaaatattccaagaagaagcaaggagaatgttcataggatgttatcaacccgttggacttggaa

SEQ ID NO: 152536 - DNA, 517 bp, Glycine max
  unsure (1)..(517): unsure at all n locations
gcgggaatgaacccatgtganaccntgttgatacgatggcatctacgtgacactgtgtagtgctccagcccgtgcgattatgaggtacccgtctcctgtggtactaggtggtattcgggcgagggtgcataacatttctgacgatccacggatgacctataagcaccccatacgctagtggcgccctatggcagagctcactatctcacacatgacacacatacgtggtggtgtaagcaccgggtacacctcaagccttctgagctttcacatcatacaagtaattcaacaattattgatccgaactcacacatgatgagctgaaggcgtaggcgcagaactctgctggaacacataccagtctcccgacttttcacatgcaaatatcccatatgcattggctatggtctacgacgttgaccgtgtggatcgactagcatagactactgtgcgtatctagtacatattctacatcttgaccgatgtgatatgctatagaatggctagactcacgtag

SEQ ID NO: 152537 - DNA, 390 bp, Glycine max
  unsure (1)..(390): unsure at all n locations
cttgagctataattcattgtttgtgttatgagtctacatcaaacaattgtattattgatgtttctgtcacaatcaagtgatagttgatgtctccatatgtgcgtacactgtgattatgttttcgtttctaaaattcattnggagtatctactgttgattctagatgagtgatccttcttgatttacaattattgtctcctaatcaatcgagtgttcatcttattattggctgctcatattccaatcatgtctagttaaaatgcttgataatctttcttggtgttacttctaatacgaataaagagagacttcgcctttgacaatcacgttaagatgtttngagaggaaatacttgagtagacatgatcattgtacctatagacgaaagtc

SEQ ID NO: 152538 - DNA, 252 bp, Glycine max
  unsure (1)..(252): unsure at all n locations
gattgatagttcactaagaataatcttataaagaatacctttcctcttagcaatgaaaaagtgagtccccattttgttntggacaacacacccttctttgttaaaggaaacatcaagtccattgtcacataattgacttatgctaagcannnatatgttaagctctttaacaaaaagtacattatcaatgggaggatagggatcaatacttantctttcatactccaactatttcctcttctatttccttcg

SEQ ID NO: 152539 - DNA, 393 bp, Glycine max
  unsure (1)..(393): unsure at all n locations
cagctccattgatatcatttatttaatgcaatgcacatgtttcgaataagatttcttgtatcacaggaaaagatctaatccaagttgaattacggatcatactgattgtggtgcgaaaactggcttgaagtagccatctgggtaatatccaaaccacgaagtttcctctggtattaaaacagtgtcgcgctcacactgttaatgtataaaataagactacaaatatataagctttcctcatgaaatcaattagcaatattctattcataatatcacaataatacatttagaggacttaccatgataagtaccanattctgcaagctactcaatcttttcttgtaagaagcatttctcttatctggtatttcattgccatgcactggaagaaat

SEQ ID NO: 152540 - DNA, 391 bp, Glycine max
  unsure (1)..(391): unsure at all n locations
gctgtctctagatagacaatcttgccctcctgaccttacggtgacttaccactttgatntctttttttgttggtgagtaactgtaccattaaatataagcatcatataagaaactagctcacaagaaaaatctggtaaagactacatatgannaaatagcgtggtcttaaacaacaattgtaacgtaatanactgaaccgctgggtaatttcttgaataaataaattcagatcttcacaatgataatttcataaactcttactgtacaacacattgactgaagacaaacattatgcataaaactatagaagcatggcatatgttcatctgcaaccaacaggaatgtatgtcacacattgaaacagatatgtnntatctcatactcattctt

SEQ ID NO: 152541 - DNA, 416 bp, Glycine max
  unsure (1)..(416): unsure at all n locations
ctgcacaaggctcttaatatttgaagagtatccttgaggaaccttcacccgacgaagacactaacaaaaacttatcttctccttcttggacaaagtatggcaggctgggggcaagtaaattttcttcccatcagaccttgtatgcaactgtgatcgtatacccatatcagctagatcttgacgggtattcaagccatccttcgtcttgccttgaatgttaaggagcgtcccaatgactctatcacagacatttttctccacatgcataacatcaatacaatgtctaacgtcaagatcacaccaatacggaagatcaaagaatatggacctcttcttccatatgcaactntgactattatccttcttttgagtcttcccagatacagtattcacgtgttcaacccgataatatacct

SEQ ID NO: 152542 - DNA, 298 bp, Glycine max
  unsure (1)..(298): unsure at all n locations
gttcttgaccatattgaaccccggtgacaacaattgcttcaaggacagagacaatgaagaggtcgctggacaacaggatcaacaaatgacctatagtatggttcttgacttagatcgaacctgaggacaacgatattaaccaacagaccacacaacaaatgaataacaggacaagagacaatggagctgcacaacatagggttaagagagacaaatgatgagggaataatctcanataccttgcaagcatggtagaaactccaaacccaaactgagcatactcaaattatccaatctt

SEQ ID NO: 152543 - DNA, 405 bp, Glycine max
atcactatacacattagatctgagtaagatctactattgaagtactaaaatgtacacacacatacctcgccacaaagagcaatatacttggaaagcagcttgttgattctatcctgctcatctttcctgagaattcgtagtttctcctcactcacagatcgtgcaagaagattcccaactgcaacaaaatcacaaaactaagctaaaaccaataaaatttcaatgcacacacacaatcgaaattagagctgaaacataactccaacttacatggtgtatagacataatccttggtactattgtgtgtgacatggagaacagcaatggaaattggatgagactccacttcttgagagcccaattcatagtcttaagtccatcttgcacatcattaccaacagcaac

SEQ ID NO: 152544 - DNA, 312 bp, Glycine max
  unsure (1)..(312): unsure at all n locations
taattaagcaatatggatgagatatctctctaattcaggatctaattataacatgatatgatcaaatgtaagaactaacatcactcaattaagatatgggaattaaaattacacagtatgtgaatataaagaaactcanattgtatctaaactttctcttctactaatattactattaaataatatgttttaactatgcctttaatgaaagtgtgttttaactatatattaccaaagaaacatagtgcaacctatataaaacgtgtatncgaacaaacctactatcagtaagtatactttatacgttaatct

SEQ ID NO: 152545 - DNA, 482 bp, Glycine max
  unsure (1)..(482): unsure at all n locations
tatgacccctgannccttgatccctgattactgcggnttaagataaccgcangccgaagctgtatatgatttatgaactggccatcattgtccttatgcaagtctngcaccttatgttgctggtcgacacaaccatcatattccgactgagagtgtgtgcttaaagaacatcacgtcgaatcggccgtatcgctgtcaccgctcatatagagtaacattatgtggactacttatagcggcgattacaggtgggtggtcttttcatatatcacatgctacatccctttctcctaaatgcaaaagacttcgctcgcttcatagcttatacttactctcctttgaangacagacacatcacattgaacatcaccaaaaatatcttttggcaggctgccaagacaaagacttatgctgtatttgatgaccataacttaataggtcacttccccgagacctagagaaaccgatcttcgacttaaacc

SEQ ID NO: 152546 - DNA, 514 bp, Glycine max
  unsure (1)..(514): unsure at all n locations
tggggatgacnccattaganancnctgtatttgcngacactatacagtactcaagctntgagaaattatggctgaggctaagacatgttgtgggcccattgttcaaatggaggcatttatttatttatttttaatttatcatttgggtaaatgtcaaattaatatgggataagtcattatagatgttgtaacttttgaatcgaaagtattttttttttaatttatgactttaagatcgtaggagtttttttttagtactctaaagtcgtaaagtctattcgttaaattttttattaaattcataaatgaatgtacaacttcaatttttttattccttttcataaaattgtaaatcattttttaattcaattatttaataaataaatgtatttttacttttcttagttttatataatattttctacatattttttatatagacttatctaatatatttcctatactagtttattcaatattgtcttaatcgctggtatattatcttattttatat

SEQ ID NO: 152547 - DNA, 309 bp, Glycine max
agcttgataacaatgtctcttctgtttagcattattaacggcatgctcctcttccattttgcatcctgctacaggaaggtgccattcggtagagctaagaattctttacagggctgatggggtttatcaacaaggtagtcccaactaggatcggacacttccaccgttggatgataggcatcttctacaatatcctttatttccatgggatcttcattctccttatattgcgcatcctctttggcgctctgcttaaagagccagaaccattacccattgtctcttaaaatgcgtgaatctggggcattt

SEQ ID NO: 152548 - DNA, 310 bp, Glycine max
  unsure (1)..(310): unsure at all n locations
agagcactcgatctatataaagaactttttcttcaacaacaacaccttaccanaactcatgagaaataataatgcanaactaacactaataagatgttgcacaaatacccattatgggtaaactcaaagaaagaagaanaaggcttaccatccaatagtggggtcacaagctcaaggaaatagatgagtgcaaattgtcctaaagggaaataagccctattcttgagagtgaatgaaaaaccttcttatggttggaggagaaaatgggaaagctctgagaaatgagtaaaggtgcatagttncaaagtat

SEQ ID NO: 152549 - DNA, 297 bp, Glycine max
agcttatcgagatccgtgatggataggcaatgtttcggcataatgtggaacctgacgttgttgatgtacacatgcaaatcggagaagatggagagttatttgatggcaaacacaatcatgttgttcagcttcacgacttccgcgtgcatcaccactaaggtgaggatgttgaagccattgttgcggataagaagcatcacgtcaatcaacatcaagaataccttcgcgaaggtgttgttcttgttccaatgaagcgtatcagaggttaaagtgatgcaatggcgaagtgggttcgag

SEQ ID NO: 152550 - DNA, 372 bp, Glycine max
  unsure (1)..(372): unsure at all n locations
ctaactgngcagtantccaaaaatgtgagtgacatcaccttgaggtgggcaacaaattaagtgccttcaccataatagcacctgcacctgaacctatgaagcttcattctacacctgagaaagatgatgagatatttcctcataagagaaagcttccaacgcacatattacgcaactgacccttttttcctctcatgacttaaccacccctcctacctctattattcccaataccatatctcactcacccgtacatcaccattctgcacctaccttacctctccttgcagacaaactctttatcgccttcacatgtaaccccgtaaacactacaatctctaatatatgattgctcaactctcttcaacctct

SEQ ID NO: 152551 - DNA, 375 bp, Glycine max
  unsure (1)..(375): unsure at all n locations
tttgagccgtcgacgaccngngatccttagagtcacctgaggctgctgcttacatcaacacttcaggggctgtactacttacatggattgatgggcctatgcagttgaaagcctggagaaagaggatgcctatngttgttgggatgaattctccagatttacctgggtaaactctatcagagagaatcaaaaccttgagtattcaagagctgagtctaagacttcaaagagagaaagactgtgtcatcaagagaatcaggagtgaccatggcagagaatttgaaacagcaggttcactgaatttgcacatctgaggcatactcatgagtttttgcagcattacacaaacagaatgggatagtgagaggaaaacag

SEQ ID NO: 152552 - DNA, 234 bp, Glycine max
  unsure (1)..(234): unsure at all n locations
tttgagcgtctcgatatatgacgagactacatcatacatcttagtaanaagttatagtcgtttgaatatgctcagagcttcaacattcaattacgagcatctcgctatattacgggactcaatcagacatccgagtaaacagtttgttgtttgaattgtctgagagcactcacattcacattctagcgcctcgatatatatatggactctatcacacatccgagtataaagtta

SEQ ID NO: 152553 - DNA, 407 bp, Glycine max
  unsure (1)..(407): unsure at all n locations
tgcaagcttctttgagaaaacttccttgagaagctagtgcttagctacacacacccctctcataactaagctcacctccttgagaagcttctctaagaagattcctaaagaagctagagcttagctacacatacctctctaatagctaagctcacctccttgagatgagaagctagagcttagctacacacccnctataatagctaagctcacccccatgacaaaaaaaacatgacaatacaaaaaaaaaagtccttactacaaagactactcaaaatgccccgaaatacaaggctaaaaccctatactattagaatggccaaaatacaaggcccaaacgaagaaaaaacctattctaatatttacaaagataagcgggtcatgcttagcccatgggctcgaaatct

SEQ ID NO: 152554 - DNA, 337 bp, Glycine max
  unsure (1)..(337): unsure at all n locations
cgcctaactaaatatgatattgagtgttttttacatgcatntacttaacaagaaacttanacattagntaagtttaaactatatggttggaaaaagaacaagtggaagagtgaaggtttccaaacaacaatccttgacaaaaaataaaaaaaagctggttctagcaaataaatcatatcacactaagaatgagaaataataccagcatccctatccaaaaaatattcaaggatgagacgtgtaaaaggtcacgaatttcatgctgctaatgatatatctaacantaataatctngtccttttataccttttanggtattatggagatggacgggagt

SEQ ID NO: 152555 - DNA, 178 bp, Glycine max
cccatcatgatgctctttctgaacagaaagtacctgtgaacgtgcactaaattgcctatcaactcactacgagagaaattgaacttatcttaaactctgtgatatgagtatcattacaattatgaggcatctcagtgcataaaatggatcaggttggtccttatgaccttgctgccta

SEQ ID NO: 152556 - DNA, 354 bp, Glycine max
  unsure (1)..(354): unsure at all n locations
tagctacacacacccatctaanaactaagctcacctccttgagaaacttccttgagaagctagaagctagctacacanccctataatagctaagctcacccncatgacaaanaaacatganaatacanaaaanatcctactacaaagactactcanaatgccctgaaatacaaggctaanaccctatactactagaatggccaaaatacaaggcccagacgaagganatacctattctaatatntacaaagataagcgggctcatacttagcccatgggctcgaaatctaccctaaggctcatgagaacnctanggtcttcctttggatctctagcccaatctacttggagtct

SEQ ID NO: 152557 - DNA, 445 bp, Glycine max
  unsure (1)..(445): unsure at all n locations
taatagggtaagcactacaacatttataatttcaaagcaaagcacataataatagctattgtacataggtttgatcacacataacacactatagaatattattcgtcataattaacaaacaattctaaaagctatagcgtcatggtactttaagatgacatatagagttttaggtttatcaaagaatttcccataacaaatccaggactatatcccaacattgcaaatagtacaagagcaagcaatcaatatactttagaatctcacacccatattccatttcaagcattatattttttcatatttagacataacttggcttatgttctaggccaatattggactttattttacaccagcttattggactntaagaatacatcccgcaacatcaaatgactcaaatccattactgcaaaatacaaatacccagaggaactacaac

SEQ ID NO: 152558 - DNA, 520 bp, Glycine max
  unsure (1)..(520): unsure at all n locations
atgtaattgaaacctttgtaagncccgtcactatagaacactcaagcttctaagattattaataatatatccattattcaatattttcaattaattataaaaacaaaattatttatctaaaaaagaanaattaaaaaaatattttgaaaacaaaataatttaaaattactaagagaaagagcaactaagattttgacagaaaaaatgaatgcaaaaataacacaattaaaattaaaaaataataaccattaatgtcttacatttttatgcataaacatatatattacttttaatttaaaaataaaaatattttagtcatttgtgtgaaattaaattacttacaacaaataaatttaattcaattctttaatagtaaaactctttatatatatatatatatatatatatatatatatatatatatatatatatatatatatatatatatatatatatacacacgtatcagggacatatgtgggataatatgactacgttatatatgcgagtggagatgctg

SEQ ID NO: 152559 - DNA, 420 bp, Glycine max
  unsure (1)..(420): unsure at all n locations
agtacaataagctntatgttctaaatctactggaagatgacatcccttgccatgcaccatctagaatggggaaagactggtaggggtcttataggctattctatacacccacaaagcatcatccaatttagcaaaccaatctttactagaattctctttatctttgtaaatgagacttcaacttgaccatttttttgagggtggtaaggcgatgcaaccttctgtctgacattatagtgctccaatgccttctgtagttgcacattgcaaaaatgggaacccccattactgatgagaactctaggagtttccaacccacgaaaaatattcctcttcacaaaccgaatgactatttttgcatcacctttctgtgtggcaatggcttacacccattttgatagaaactctttaaatgacaca

SEQ ID NO: 152560 - DNA, 265 bp, Glycine max
  unsure (1)..(265): unsure at all n locations
gtatccattcagagaaatntccttttgggaggtcatcatgaggccaacaagattccttgtgtgaagtgngacacagtttgcctttctaanaataaagggggccttgngattaaagatttgtctaaatttaatgaggctntacttgacanaatggggtgggagctggctaataattagaaccaactntgggcaagaatcttaatctccaaatatggtggctggaaggagttgatctctggtggaaagagcanattntcctctcata

SEQ ID NO: 152561 - DNA, 360 bp, Glycine max
  unsure (1)..(360): unsure at all n locations
tgaccttgtttacagcgacgggcactctttagaactgacagaggcccataatcagagctggaaacgccaggaccctattggacttcttcgagtccactgggtgtcttatgggtgcgatccctacaaacaatagatgacatcaganatcagttgagcgatgtgcatacttacctatgtcacgatggcatgaccttgctgggggcacgggcaccctgtaagactgacagaggcccgtaacctgagctggaaaccctagggccttgttgggtttctctgagaccacggcgtgtcttgtgggcgcgatccctagcaatagtggatggcatcacaaatcaactgaaccatatgcatacttaccta

SEQ ID NO: 152562 - DNA, 360 bp, Glycine max
  unsure (1)..(360): unsure at all n locations
ttatctagtacattgtntttgaaacaagcaccctacagtagaattgccaacaatagacattgtttcagttagggttttcaattatcattattgacgacttttagtgagcctcctaaagaatgtaaacgcgtggcttatgccaccctcttgataaactaagaagaagaaggtgaataataaataatcttttctattaaaataatacggtagttggtagaaggtatttataacattaaatagtactctcttcatttgtaaacgatatttatntatatacacatattaagaacgtcaaaggatatatattacataataagggttcattgagtgctatagattttaatattactttagttttat

SEQ ID NO: 152563 - DNA, 390 bp, Glycine max
  unsure (1)..(390): unsure at all n locations
agcttgtagggttatagtctcacgattgtcacgtgctcatgcaacaattgttagccgtggctatacgagacatcttgccaaacaaagtcaggttcacgataacttgcctgtgctttttcttacatgctatgtgtagcaaagtgattgatccagtaatgtttgatgagttggaaaacgagaccgcaattatactatgccagttggagatgtattttccccctgctttctttgacatcatgattcacttgattgtgcatctggtcagagaaatcaaatgtcgcggtcctgtttatctacggcggatgtacccggctgagcgatacatgaacatcttatnagagtatacaaagaatctatatcatccgaaagcatctattgttgagaggtaca

SEQ ID NO: 152564 - DNA, 111 bp, Glycine max
agaatgaagtccactcaaacctgaaatctccaacttccactcgtagacacgcacttcacgactaccgaaatgccctccttttgcgatctggagcggaaatgatggccaaag

SEQ ID NO: 152565 - DNA, 404 bp, Glycine max
  unsure (1)..(404): unsure at all n locations
agcttgtaccagccactanaccttcaatttcaattgtangctntcctaatttcttgaccttcctcctacgagagaccaacttcaactcagtatgttcctgtanataattataattaattagaataaataaaattgtatataaaatntaaatatgttataattaaagaaataactacctctcttgcccacactttggctaccacatgattaacatatgatgtcaacactaatgtatcttgnggcccacctggaaaaccctatgaatcaacacctacatcctttgtaattggatcatgaggttcctcatgagtctcatcagcagcatcatcgatatgcccattatcctcgacaatagttgcaagtgttcattatctacgtgtcgacactttcaatcttcgacgctg

SEQ ID NO: 152566 - DNA, 319 bp, Glycine max
  unsure (1)..(319): unsure at all n locations
gcacgagacatcagggtttagtattccaagatacaacatatatcgcatgaacattgttagatagagaacatccttaataacatcagtcatccagtaggaagaccaacacgttctttatctgtcttcatacaccactactcacgtgatttaattttggatagtttagttgcatacttgtccataccacgcaccanactntcatccaaaggcacttatttactgaaccacagctntaccaagtacaacagaatgctcgggagttggatactcagtattcacttaccggtttatactactttcgtgatccagtgcacttgtc

SEQ ID NO: 152567 - DNA, 349 bp, Glycine max
aagcttctatagaatgttcgttcctaatttctctacaattgcatcacctctcaatgagctggtgaagaacgatgtggcatttacctgaggtgaaaaacaagagctagcctttggtttgatcaaagaaaagcttactaaggcacatgttctaactcttcttgacttttctaaaacttttgagctacaatgagatgcctttggagcgggagttggagctgtattgatacaaggcgggcaccttatttcttatattagtgaaagacttcatagtgccaccctcaactaccccacctatgataaagagctatatgccttaataagagccctccaaacttgggaacattacctt

SEQ ID NO: 152568 - DNA, 295 bp, Glycine max
  unsure (1)..(295): unsure at all n locations
gtcacattgtcaaagctccaatcttgtnnttgaaatagagagagcaacaacagcaaanactacaatcgaagaaaataaatcataatcgaagagcanaaaaaatatcagaaacaaggttctaacgtttctctcacacaangccttttatttcctctnctaatccatttttcttttcttttggtattccaccanagacaatttttttctaatggaaaaaacactcgactggcagagaaatagtgaagtgaaaagagagactgagagaanagatattattctggtgacgctgatgtgt

SEQ ID NO: 152569 - DNA, 429 bp, Glycine max
  unsure (1)..(429): unsure at all n locations
agcttggcagtgtgacattntcttctgagtatttaatgcagcagattaatgagttttcattcttatcactgaatttcccatcgaagcacaaacacaatcaggagcactaggtttaatataatccttagcttgagatgccaatttcctctgctccctgcgtagttatatgtcaaaagtggtaaagactctgcatcatcataacaatcaaaccaaataatgtgcataaggatttagctcttctagagtgagcaagtgtgtaaagtaagaaagtaaaagtgaatgtactgttgatttgaattgatgtacctggtggccctaactaactttaaaacaatggggaaacacccttagtttctcactttatacatttactaactttagaggagtcaaatccctgcatcagaatatgaacaagaaaacatcacctta

SEQ ID NO: 152570 - DNA, 459 bp, Glycine max
  unsure (1)..(459): unsure at all n locations
ntatcaccaggatgatcaaaatgtttttcatcattgcttgagttggaaggttgggaatggggataaagtcagcttttggaaagataagtggttaggggaaggtcctactctacaacagaaatacaatcagctgtttctaattaatagacagcaatctgaccttatttcaatgatgggctatttctctcatgatacatggagatgggacttgaaatggagaaggaacctgtttgaccatgaaagtgatctagctgtcgattttatggaagaaataagctcttttcattttcagagaaatgttaaagacatcatgacctggaaagctgatcctagtggtgtctattccacgaggtcagcatacaaattcatgataaccccctctttcccagcctttgatctgagatcctcaactntattatggaaattgaagattccccagaagctgcagttttcacttgg

SEQ ID NO: 152571 - DNA, 306 bp, Glycine max
ttgctgtgatgaacaaaatttagccaatattatcagataaatcaaatacttaccgtagaattactgaaaatagaatctacatcatcaagactaatattagcctgttcaaatacaggaggcttatatcccttcttgaaccagtcattctcaatgacctcagtaaatgtaatccgctgtgtcatattattaaaagaaaaacagatgccggttgttaataataatatatttggtgaaatggagggaaaagtaaaatattctgtatacactagattagactagagtactatataattaaacaaagaaaac

SEQ ID NO: 152572 - DNA, 363 bp, Glycine max
  unsure (1)..(363): unsure at all n locations
gagagtcatcttgatatgacagctntggaagtcctcttacgagactatgctctagcatgaccaagcttcttatgccatacccagtgatgctctntgatttanagtaagcatgagaacctttgactggacagatcaccaagtttaatattataaagaattccttgtctcttagcaaagaagagtgaagagttgtccttgntctgaacaatacacatccttgttaaaggtgacattgtatccactatcacataatcgacttattctcaacagaatatgcttcaatcctttaacangtaanacattatctatataagggtagggaggaacacatactttacctacacanngtatcatacctttctg

SEQ ID NO: 152573 - DNA, 505 bp, Glycine max
  unsure (1)..(505): unsure at all n locations
atatgaatcctgcangcagtnatcccttagaatgcngccggtcgnancctnggaccgattcatgcagacaagggacncctgtanagcatacataggtttttgtcagctgaactaatgaggcgaacatgctcatcatgctgacgcaactcaactcatggggctcctcgagataatgataattaagcagaaacctaagatggcctgtcaatcctatacagcaataattacagaacccctccttgccttgcccaccctttggctaaccatgagtaacacacgacgtcaacactaacgtatgctgtgcccacacctgaacaactctactaatcaccacactacctcctttggaattcgatcatgaggcttctcatgagcctcatcaggggaatgattgatatcgcccattattcttgacaataggtgccagtgngcattatctacgtgtccccactctcaatcattcnacgctgagggcgttctgctcgacccactaacctntctaccn

SEQ ID NO: 152574 - DNA, 228 bp, Glycine max
  unsure (1)..(228): unsure at all n locations
cttattattattccaataactntgtgtgcggaacaataaaaataatactcataaacatattananagcatttaacaatgaggaanaaaatgtcatataccatanaagaaaaaaagccacaagaaaataaaaataaaatagtatntattntctanatctacctncttattacctaattagctcaatcttgcaaatttaaaatgcacaattgaccaaaaaataacttgat

SEQ ID NO: 152575 - DNA, 226 bp, Glycine max
  unsure (1)..(226): unsure at all n locations
agcttgagatgaggaagtgttgaagggtgaattttcctgcttttattgttgaccacagagtggtacctgnagatatgtcgcggnggtcaggagaccttggggacgtcaggtggggtgctattgcccaaaaccaagcttgaccaatcccgacccaaccccggcatagtcggtcagtgagaacatgtgacgtacctaagcaggcgagcttcttgcagtcacagataaa

SEQ ID NO: 152576 - DNA, 296 bp, Glycine max
  unsure (1)..(296): unsure at all n locations
caggcaactaactcctctttcanaaccatgctatgtgctcgcgactggtccctttcttcctttcgcaacttgagttcactattgctaccncatagagctccgcgaaatttgttccggccatactcttccttgcgagccctcttggtctcttgttcaagggctcttgcggtaattgcattctcttcccgtaacccggcacactccttccgaacgtgtgtagcggccaacttgaacttcttcttggcaagttttgcctttcctaactcgctattgagagcttggacttcttcgtgctc

SEQ ID NO: 152577 - DNA, 113 bp, Glycine max
  unsure (1)..(113): unsure at all n locations
gctgcaagcttggattgattcggtctgacaagggattaatgnttagtaatttaggctacaacattgaacaaaagaggcaaatatgatcatcatgctttgataaaaaaaaaatg

SEQ ID NO: 152578 - DNA, 320 bp, Glycine max
  unsure (1)..(320): unsure at all n locations
atgagaatggggtagatttggagcatactctcatctcaaacaagtctataacattaatctaaactcgctcaaactggttttacaacgaanaatctaccgaatcaataattgactcctcaacacccaatttaccctagaaatggctcttgccttcactttggtcactcatnttcctcatttgctcagcccaagctgtcccataagtcctaaatgacgattcanactaggattaactcactgtaatattcaattaccactaaatccagaattagctnttcagacccctcaagcattacactgtgtcactcatatcactacat

SEQ ID NO: 152579 - DNA, 348 bp, Glycine max
  unsure (1)..(348): unsure at all n locations
aaaaaaataatttaatcgaactgatcgaaattcggaacatcactctaatctgtgtcaaatacaanaaataaaaaaagaacaccatatatttaaaaaaaaaaaaaaatttctccacgggacctatgcaacaggatagcaaaaaattcagtgcgctgagtgaataaatgcttccaaaagggcgtaaatcgaggggaacgaaacaaaaatgattcatatctgaaaaaaaaacagacaccaaataccaatgaaagctttgcaaaaaaagcatagatcagcgcatatcaaacatagagcatgattacataatcagatgaaaacgcggattatatatacaatagtaatatgagt

SEQ ID NO: 152580 - DNA, 312 bp, Glycine max
ctcctcatacagtgaaactggcacaagtgaccagacatctgatacggtagagggtgatttattattcatgtttcatagttgtatattataatcgcacgtatatctataagaatgatgatgggtagcacttcatcaagtgaaacctctattcttaacacatgaggaagttcacagtacaagtgaaccatttggtattctcaatgacaataagttaaaaatatcagcattcaatgtagagagctcatccgaagaagtccgggagatcttcatgggtgcatgagctacagattctgcaagagttattgaagtcac

SEQ ID NO: 152581 - DNA, 381 bp, Glycine max
  unsure (1)..(381): unsure at all n locations
cgctctgncattcagnanagaaggagggttgagtcccggtttatggtttgatcccacatcaggaacgttagcaatatcagtacttggtcttccgtatgagtttgaggagtcaactgagggtatagtctcaatggccagcttggttatagtatcttcttgcgtacctgattctggagagccctgcttctgcataaaattgtcgacagtattatttctaagttctggtggcatggattcacgctcaccagatacagggatttggttgatttcaataactgagtgctttgtgtcatcagcactcaacttattcagctgatagacagaaggcatagactgctgtccagatgggagcctcttctcagtgtttcaactgatggactg

SEQ ID NO: 152582 - DNA, 381 bp, Glycine max
  unsure (1)..(381): unsure at all n locations
ctaaacttaaatctcgcgatactaataaatggttaatactgtattattctggttttacatttntgttctatgtggctttccagattatctcttcacctagtaaataagagactaatctaccaagcatgatctggtggtganaaagatcaaccctctctagtctcaatggtacctttctcacaaacaaagttcagaggattgaatcanaaatcacattcacatgctcaagggatgtgagccgctgtcactcacatcaatgtatggtatgtctgtaatacgttgttggagttatgttattggcaaaatggattgttcacaacataaccactatcatatggcacataactcacctattgagagcatgatcaacaccttcagtat

SEQ ID NO: 152583 - DNA, 317 bp, Glycine max
  unsure (1)..(317): unsure at all n locations
agctngaccgatcccgacccaacccgcgaanagtttcatcgtgagtatgaaaagaggcacatgtaatcatcctgctcgaacaaatgacaacactggggcaaataaagagggtgagaatgtagaacaaacccatgctgcgactgccattactatacggacaaggttcccaccaacccaacaatgtcattgctcaaccaataacaacccttctccctacctaccacccaggtaatcacaaaggccatccctaaatcaaccacaaaacccatcttccacacaaccaatgctaagcaccacctttagcacaaaccaaaaca

SEQ ID NO: 152584 - DNA, 151 bp, Glycine max
  unsure (1)..(151): unsure at all n locations
cttgcacttgaacgccaattgttatcatcatatactaatggatcacatccagacagcttatccgaaggtgttctaattgtgtcggaaatnttcgacagactacaaaactctggcgattaatatttctgacgaccattattctaacggattt

SEQ ID NO: 152585 - DNA, 334 bp, Glycine max
  unsure (1)..(334): unsure at all n locations
acatgatacatgtcttggtttggctgggctcaaagataaaggagatgccccacattatttccatgacacanatgcanagatgatgatttggaaacttcatgcaaaactggtcatgcatgcacctatgtggacactcaagtgtcaaacttttatggtcatgtgatgctagggctcangatttagatcaacccaatgttgccaaaatatgttcttttatccatttgtgcattcatccgagtccatttcgggcgttcggtgaaatttcacagtgttcacccttcaggtgtagacacattntttttcaaaaactagttatgatcaatgaatttttttc

SEQ ID NO: 152586 - DNA, 407 bp, Glycine max
  unsure (1)..(407): unsure at all n locations
gacaactctgatatcaagagacttacacacacacactntntcctagtcgatcactcacatanatntccattctcnccccttggttttgagtttatgcnttcatttgaaattagttaattacttatgtgagttcttgatttattccctatatctctccccctttggcatcaacaaaaagccaaagtgtgtaacaagtataagacacacatatactattaatcattcacaaggcatacattgaagaatataaaccaatcatgaagcacgaaacatgaatagatcanatatataataaccacatagtcatataatataattcataattgttcattcacaccatgccaatatagaaaatactaaatatccaaatgtcataataatatatggtatttggataagtcactaca

SEQ ID NO: 152587 - DNA, 278 bp, Glycine max
  unsure (1)..(278): unsure at all n locations
agcttccttcanaaattaccatatttgcgtggtgactactaagagataggctaccaacaagatcaaatttgaggagaaagcaaattgaggtcgaagatccactgtgtccattctgcattcagctgaggagagcgcttgccaactattctttcagttggagaaggatactccgctatggtgggaatcattatcatgggtgaangtagtgggggcttgtccaaatcatacaaggcaacacttncttcaacacatatatggagcgacagatggaatgagag

SEQ ID NO: 152588 - DNA, 454 bp, Glycine max
cagaggtggtggttgtgttatgttatcgattttcactctctattcatatgtttccgtatgtaattatgaaaacttcacttaatttatgcttagttttgattcttatttttggctgtgttgtttatttggggactggtgtccattaatatgcttttggcagtgctttttcatttctaacacgttcttgtgttctgcaatctttttgcatgtaatttcttatatacttagtagttggaatgggcactgtgttatcttttcaggtctaacacgttcttttgttctgcaatattattgcacatgatttcttaaataccgagtagttggtagatattgtttcttttaacagcatacatactgccatgtgccatagagatatagaactgcttgactcctggtgtgcacaatgcgattataactcaactcactgtgcttgaatctgcggacttctgaaacg

SEQ ID NO: 152589 - DNA, 304 bp, Glycine max
  unsure (1)..(304): unsure at all n locations
agctntgctgatttagttntcacttacgaaaggttcaaagtgagtctgaaaagaggcaaatttaatcatcctgcttgaacaaatgagaaaactggggcaaataaagagggtgagaatgtagaagaaacccatgctgcgactgccattcctatacggncaagtttcccaccaacccaacaatgtcattgctcaaccaataacaacccttcttcttacctaccacccagttatccacanagggccatcctaaatcaaccacaaaacccatcttccacacaacccatgctaagcaccacctttagca

SEQ ID NO: 152590 - DNA, 314 bp, Glycine max
  unsure (1)..(314): unsure at all n locations
gcttctctgggacctangcanaccttcaactcatccttcacgatcaaagtgtctactcgtcattggtcgctntcctccctccggagcttaagctcgctatctcagttcggcattntccttttggatcttaagagttgctgattngaacctttattttgaccgttgggcttgctcgagtcctgccctaagggactacacctcttcatcttcctccggtgcctcaacttcctccccttttgcgtgtgggatttcagccacttacggtagcctccaatgggcccgttgtctntgtctttctttgcattatttcccat

SEQ ID NO: 152591 - DNA, 120 bp, Glycine max
agcttgaccaatcccgacccaacccgggcatattcggtcagtgagaacatgtgacgtacctaagcaggcgagctcctggcagtcaacagataaaaggaaaacacgaccacagagcaggga

SEQ ID NO: 152592 - DNA, 224 bp, Glycine max
cttcaccttcttgtcttcaacgtgaactatgaccattgttctatcttcccgcgatgcttcttttcatgtccgcctgagtgggcttatagcctaaaccatactctccacgatttgcttgtgtatttatcaggctagttatgccgacgttgtatttgctatacccatcctgggttcataaccgttccccaacataactcgggccatcattaccgctgcatcggaca

SEQ ID NO: 152593 - DNA, 209 bp, Glycine max
tctgtgtggtggtcggcagaggagcataaaccacacagtctggcgacaggtgcagatatttgagtcatggccagttgggttaccaggttaaccaaggcatctagtttaccttcaagcttcttagtctcacctgatgaagatgaattcatggctacttcaagcactcctctaatgacaataacatcatttctggcactgaattgctggga

SEQ ID NO: 152594 - DNA, 386 bp, Glycine max
  unsure (1)..(386): unsure at all n locations
accaagtggcctagaatttgatcctggctgtcgacactctttaagtgaagagccgcacggttggggagcctatcctgtgccagcatgcaagcttaaagggctgttatgtaagggagcgggttacgcatgtaatataaaaccattggtgtgggattagcctacaactaatgctattctagttctctagataggtgggtgacaggcattggagacggcgaaaaagttaactataataccgcatcatactaatgaaaacttcgcatgctcaatgaatgcttaataagatatgtggctgcacaagaaaagtgacacttacgangaccgcgtctatagatcgactcttgccggatccttgcattgcgtctttataacgcatacattctgac

SEQ ID NO: 152595 - DNA, 187 bp, Glycine max
  unsure (1)..(187): unsure at all n locations
gcttatattgtaattgtttaagttgtaagactctcgaaacaccttgtanatcctgagnaaaaaaagattangtgcttaatttgtatatctgtctataagacattaaggctagtttatgtgcatacaaacatcaacaactctacntaattgttagagccagaaatggcttaatagtcaaagaatactt

SEQ ID NO: 152596 - DNA, 614 bp, Glycine max
  unsure (1)..(614): unsure at all n locations
tcgacacttcanttctccattgtatactcncganatcataattcntntactggctactgacacncaaacnannacccgaagaganaattgatgcgtctcgtacncgagatcctctaagtctacctgccgcatgccagcttgtggaagaggcaaataacatattatgcgtgttgctatataactatctcccatctctcaatcaatcctttgtatagtgtaggcttgtacaccacaaacttgcatatggggagtttgaggaggtgtacaactctatctttacgctgtgagaattgttcatattggctgtggctatcctttgtgaacatgacggtttacgtgttgggcgatggtgtgcgtgactcaccacatttgctaaacttgtgaatgttctctgatgtgacgatcaagattacgattgttgctgcataacgggttctgaaggatgtatactgtacgggtgntgactcttatctactctattccacagcacgcagcacccaagctacttgtcctccggaaccataaatcgtacgacgtatcatacgttccgattgatcaatcgaatgtaactatccacatctcggttcgatcatacctatcaccctaactatacg

SEQ ID NO: 152597 - DNA, 173 bp, Glycine max
gtacttgacagtcatatcttaacacgctccaacactagtcgtcccaactataacaccccatttttttgtaaaatagattataaagggttatattgtcaaataaatatagttttagaaaaataatgacggttctgtaattaaatccctatggagaaatagttttatcaactaaa

SEQ ID NO: 152598 - DNA, 436 bp, Glycine max
  unsure (1)..(436): unsure at all n locations
caagatgatgggctcaacatatnaacaaacccgctggccaatcatggaggngggcggataatgccatagatgtgagtaggncgcaccggcccatacttttgaaggatggaacgacctccagaaggtttatctacgaagccctgtcaaagacggtatgatttcccgtgccagagaacatctttgctaatgcattccgttgtactgcatgacatggaaacatgctcggcggatagagatctattgcacaaaatgatacaacacggctagctagatgtcgtctatgatggggaggaagaatcacatgttacatcgccgctaccaatgatcaagtgctcataatcctaatccttggtaatcattacctagacactattccaatgacccaacacctttgcatgatggcagcaacattctattcttacttatcgcacaactc

SEQ ID NO: 152599 - DNA, 425 bp, Glycine max
  unsure (1)..(425): unsure at all n locations
agatgcatgcccatctattaaatgttgcgagtataatctgctctattattttacaacacccttgtttaaagtgtttcggtaattatatataatgaaatggaaactttatgcttctatatttatgattctatcgagttcaactgactatataccaatatttttgtggtataaatgcactctaaccatcttaattattactaaaaaaatgacatctaagacagattgattagaatatgtttcatcaaattatttgtaaaaaaatatatagtttaaaacgattcttagaaaaattatttcaaaaaaattatttttgtaaaatggtttttaagaaaatcgtattagaatctttaaatctgttaactttttttggtttaaaaaagacattataaaacnggttctctaaaaatcgtcttagaaaatctatt

SEQ ID NO: 152600 - DNA, 194 bp, Glycine max
  unsure (1)..(194): unsure at all n locations
ggccgcaactcattctatgactgagatctatcatcgattctgcctctcttcgtgtataacactgattcaggtgatacaccaccttgtaacggcacgacaccgtttaattattacccccgcctgccacatacaaactgtgaattataacatctgatactgtacgcagcacacgctgacgacttattccaccgacn

SEQ ID NO: 152601 - DNA, 532 bp, Glycine max
aacattcatctccatgtactattagtgtagcaacatgataataatccacccagcacgtacatgatgcttcgtctcggatcttatatcacctgacgcatcaagcttgagcgaaaagtgtgaagatcacacttcctacttttattcgcgaccacgagtggacctggagatatgtcgccggggtcaagagatcttggggaccgcaggtggggtgctatcttccaaaccaagcttgaccagtcccgacccaacccgggcatagtctgtcagtgagaacctgtgacgtacctaaacaggcgagctcctgcactcaaccaataaagaataatgacccaatgcaggacgctgcgtggtgctggctactatggtcttggtgatactggatatggcttagctaagatacctcggatgtaatcgatacaagctaaaatgaaaccgcagctatattccttggtatccaaccacggtggtatgttcaccctctataatggatccgagttgcatctcttgtcctcttctactggacggcgttatc

SEQ ID NO: 152602 - DNA, 455 bp, Glycine max
ttataccatggatgaataacagcggctcagctacatcaaaaactaccaaaagaaacttagagttgacaagtattgcagcttacaaagttcattggatactggaacaaacaaaggctcgactaaaggaaaaagagtcattttaccttcaacctttgttgggagcccatgttacatggatcaactttattttgatggtatggcaatatgtggtcatgttggtttcctaaatctttttataactctaacatgttatccaaattgtcctaaaattcgtagattactttcacctttgaatcttaaaccaacagacaggccagacattgtctcatgaattttcagattgaaatatgaacaaatgctttctgacttaccaaagcatcagctgctcagaaaagttgttgttgcgcgtaagtttagaatgatctttgctgttgaacgtagaaatcaattgatca

SEQ ID NO: 152603 - DNA, 431 bp, Glycine max
  unsure (1)..(431): unsure at all n locations
gcttgtaagaattgcaagatcatcttccttgactacagttngaaaaagatcgccaccaatataaagagatgacaatttagagagtgatccaagactttcaaatggatctccactgaatttattagtagacagatcaagatatcttaatgatgaatgctttccacacgatctaagaagagcaccaccttttgtgttgttggaagaatctatccgctcaatatttttaaatgcacctatataatctgtcagatggcctgaaagtcgtcaactctgaacttgaagtcttgtgagtccatgggaaatacattgagcaagaatctctaacagttcattaacctgctcggttgagtttgagattcgagatatcaatgtcccttaagtcgcagagattacccaaagaagttggaatgttttcttcatgtcgatacctg

SEQ ID NO: 152604 - DNA, 381 bp, Glycine max
  unsure (1)..(381): unsure at all n locations
catcangaaacaatntcactttaaaagtgggtcccaattggattcctaagtttcaacttacctttttggaagtgacatcatggcagttaggtcccagctttccatcgtggattcagtcacaaaacaaacttcaatatgttggactgtctaacacggngattttagattctattcccacttggttctgggaaccacactctcaggttttgtatttaaacctctctcataatcatatccatggtgagcttgtgactacaataaaaaatccaatatctatccaaactgttgatctaagcacacatcacttatgtggtaaataccctatctatcanatgatgtgtatgggttaaacctttcgaccaattcattctctgaatccat

SEQ ID NO: 152605 - DNA, 389 bp, Glycine max
  unsure (1)..(389): unsure at all n locations
agctntgagccanaatcatgactcaccatataccttgacccagggtgagaatgccaatccttaccctcggaagcaaaaaaaagaagagaacgaaaatttccaatcaaaggaaaaaggagaaggaaaatttccaatcaaagaggaagcaaaaaaggagagaaggaacatttccaatcaaaggaaaaagagaggaaaggaaattctcaatcaaagagtgcgagacagcaaaaagaaaagaaagataattcccaatcaaagaatgggagatagaataaaagagagaagtataaaagaagactgctcctggtcaaagaanacagaagaaatgtgccgagaggtccttggaccagacgatatctgaacaatacagaattgtcaccaaatgaaca

SEQ ID NO: 152606 - DNA, 346 bp, Glycine max
  unsure (1)..(346): unsure at all n locations
aacacaccaaaagattatgatgatgcatggctcaaattctcaccactttcaaattgagctttcaaaactatcatgacatgtagaagaaaaataaggatttcaaatcagaaaatgtcaagagacttttattttcagaacaattacccatttcttgaacatatcctataattcaaagaanaatatgcaaagttgtacatgcaaacagaatttgacctaaatattaaactagaaacccaacatacttaaaaacaaaactaacaaaactaacaaaactaggaataccaaactaacttaaaaaattactaaaccaaaaccaaagaacaagtcccccatacttaaacaacac

SEQ ID NO: 152607 - DNA, 416 bp, Glycine max
agcttggcatcaaagcgctctattcagcatttgcactccacccttctcggggatcttagcagggtttttttaccaataccttctctctccaatatttgcttgaaatacattactttaagaattaatttctaaattacaccattttctatagcaaagtcgggttctgacatcccaacttgatatttttttatcattctacacattctctctccattgttttcttacaatacactactttatatattaattctcacactagatcactttcaacaaattcacgaagatcggggtcggacttcccttttttatttataaaacactctatatattattaaaattaaatattatattatataaaattatttctaattaatatagaatttagctatctattaaattaatttatggaatattat

SEQ ID NO: 152608 - DNA, 434 bp, Glycine max
  unsure (1)..(434): unsure at all n locations
tgataagtntatgggctaaacttggtttgattaggggtgattcataattagtcatcaaacaattaacttgaanagttaaatgacttataagagtaatttgatgaaaatactttttttgagccacaagattatacgaaagatttgataatattaaattcgagcagaatatgcttcctcgagataaaaataaagaagcaaatgacttgagacaaattgcttttggttataaaatgaatgagcagaattttgaatctcttatagcggtaaaaaaatttagcagatgagttcanaatttttaatacaaatactttaacacctcttgattgggaaaaaaaaatctttggttgattatctctaanatccaagctcgtaagtttataaaaaaagataaatatagagcattgaactatgctgatttaggagatgacgtatat

SEQ ID NO: 152609 - DNA, 420 bp, Glycine max
  unsure (1)..(420): unsure at all n locations
gcttcttcttggttctctccccattngaaaccatcatttttcttgagcacttcattgagaggtgctgccaatgtgctaaaatccttcacaaatcgtctataaaaacttgctaagccatgaaaactcctcacctcggacacagacttaggtgtaggccattcttgaatagccctaaccttctgctgatcaacttgcactccttttgaactcacaacaaaaccaagaaacacaacatggttagtacaaaagatgcatttttcaagattggcatacaattgttcttttctaagcacagtcaagacagattttaaatgatcaatatgcaaatcaagtgaagtgctatagataagaatatcatcaaagtacaccacaactacactttctatgaactctctcaagatatggttcattaatctcatg

SEQ ID NO: 152610 - DNA, 401 bp, Glycine max
  unsure (1)..(401): unsure at all n locations
ntataagtgcgggtctgggagactaatgtcaagtgttcgcgatatgtgaagatgatgttccaagtacttcggatttggtccgaccatgccctcctgatttccagctgggaaattggcgagtggaggaacgccccggcatttacgcaacaagcataatgtaaacctttacggttttaaaagctctatagttgggcctaggcttcagagttttcattttgttaaggctttgtgtcttttgttttttaatttataatacaaggatctntcttcatctgttcctggtctctacccattctcattcatttgcatgtttacttctttntctaaaacggcagattcgatgacgagttccccgaagtactaatacctgggacccgtctatcaacttcgagcaagaaatg

SEQ ID NO: 152611 - DNA, 421 bp, Glycine max
  unsure (1)..(421): unsure at all n locations
ctcctacanttcatctctagcatgcattnttctttctttctttacccactcctcacgtttggttttttagggaaaaacatcataactaaacgcgccacaaggcatccctatcgcaccagatccaaatctataacgatgggtgatcaagaggagacacaggaacagatgacagccgacatgtcggctctgaaagaacaaatggcctacatgatggaggccatgttaggtatgaggcagctcatggagaagaacgccgccaccgctgccgctgtcagttcggctgccaaagcagacccaactctcttggaactgtgcccatcctccctaagcgtgtaggacgggaagggaccactgggcacgatggcacccttaccttgatacaaccgagcggctacccttaggatngccgccaactactcac

SEQ ID NO: 152612 - DNA, 450 bp, Glycine max
  unsure (1)..(450): unsure at all n locations
tcgtgattttctggcagcattgtgataaaagtccttttagacaaagctctcataacaatttcaggtgccagtaagttagaaatgcatgacttgatacaggaaatggattgngaaattgttcatcaagaatctatcatagaccttggacgacaaagtcaatattggaaattcgagtaagtgcaagatgtattgaaatataacatggtaaaatggatattcaactgcttttattngataatacctgtgcttcttagaatgtatctagtatgatagacctgatcattattattntaatttttggttgtcatggaactgatattcgtgaaggcataactctagatttgagtaaattaaccagggatctatatttgagctccaattccttggcaaaattgtctaacatgagatttctanaatccatgatttgtgctacatgacttactgatttac

SEQ ID NO: 152613 - DNA, 330 bp, Glycine max
  unsure (1)..(330): unsure at all n locations
agcttnncccagtccatgagccgctgaagttactcttctatcgnggngcaggtttccatgtcgtgtgattccccgagatgaaacaaacattcctcacttgtgccttcgccacgagagaccatgcatgttgcctgcagcgactggtagatgaaccgtctagacatagccacatcttctaatctctctgactctgacgacctattctttgtgatggcatttatgctaactcccccatgactggctagtggattggtttaacgttggggccctcttcttgaaaggatagtctctccacacttattatgtgtagcaccttatacttgaatggcc

SEQ ID NO: 152614 - DNA, 381 bp, Glycine max
  unsure (1)..(381): unsure at all n locations
ttataagtgcgggtctgggagacgaangtcaagtggtcgcgatatgtgaagatgatacgtgctcatgcaacaattgttagccatggctatacgagacatcttgccaaacaaagttaggttagcgataactcgcatgtgctntttcttccatgctatatgtagcaaagtcattgatcctatcaagtttgatgagttggaaaatgacgccgcaattatactgtgccagttggagatgtattttccccctgctntatttgacatcatgattcacttgattgtgatctggacagagaaatcaaatgttgtggtcctatttatctaccgaggatgtacccggttgagcgatacatgaagatcgtaaaagggtatacgaagaatcta

SEQ ID NO: 152615 - DNA, 464 bp, Glycine max
  unsure (1)..(464): unsure at all n locations
agcttgagaaggtggcaaaaagcttatagaaactttaacatgtatttactatggagtatgaaaagagaggacttgaacagaggtaaggtataaaacaccagttctgtggtgaaagtaaaaacgaaatatctggctcacacttgattcaatgaattgaatagctcaaggaaatataagcacccatgatggttgtggcatgtacttcaacaattaattcaatatagaaactataataattgatacgaaataaaatgtgtggaaatattgagaccatacttcanatgagtaagtaatatgcatcttgaggttccaagtatatattgatggcttcacagattcatcccttgaagttaaaatactaacaagcaatttgaagatcaactttccaggtatgtaaaacacagaattaggatcatctacagtcttatatagaactgcatcaacctagtccattgatttaatta

SEQ ID NO: 152616 - DNA, 502 bp, Glycine max
  unsure (1)..(502): unsure at all n locations
gcaccctttgaacccctgannnccctgancccctgttgacaccttgctattcgtgacctctggatactcagccttgtgatcactgtatcaccagcatatctttcagctctattgaaagcctatctgcttcaaagaaaaatcgactcatagtcagggcgtttaacaaaaatcttctggaaaggactcatttttgaattcatctttaaggtgttcagtacatgtatggngtgagacaggtttggaaaatacaattgttccagaccccaagcgagttaattactgctcacaggggggtagagttatgctaaatgtgtcagcagatggtaccccacgcaatgcanatataatgtccactatttccgatgaataccagaagctgaagtactctgtctctcttgaaatatttcaatttactttgtgtgtgaacaaagagaaacagtccacacagatggaacttgaaagaccagatctgtctatacgaatatatgaggagaaangcccg

SEQ ID NO: 152617 - DNA, 474 bp, Glycine max
  unsure (1)..(474): unsure at all n locations
gctttttggagtagaaacatgggaccaactcattttatttcaaaaatgttgtatctagtcaaggtctaagattccatacaagtttcctagcgatttctaattatgtgggccattaagtctatcatatgctgacaatagccgagaaacccatgaatttcttcgggggcggagtaagtgtctgccatcgccttggccttggctaacaatcggggaagttcctgactcccgttcaaggtaagagcaaaccgatccatccacatggttgcctcttggtgaaagagtcgatcacccttcctctagcctctttntccgcgtatacttgggcatactcgtccgcgatcctatgctcgtgggccgtggctagacctaactcttcttggtacttggcgatgatagctagcatgttggtctccgtctcgcatagacgctgagacaagcttcttttggaccttgaacaggcaactaactcctctt

SEQ ID NO: 152618 - DNA, 427 bp, Glycine max
  unsure (1)..(427): unsure at all n locations
gtgcgggtctgggagacgaaggtcaagtggtcgcgatatgtgaagatgatgttccaagaactctggatttggtccgaccatgccctcctgatttccagctgggaaattggcgagtggaggaacgccccggcatttacgcaacgagcataatgtaaacctttacggttttaaaagctctatagttgggcctaggctttagagttttcattntgttaaggctttgtgtcttttgaatttataatacaaggatctttcttcatctgttcctagtctctacccattctcattcatttgcatgtttacttcttttttctaaaacggcagattcgatgacgagtcccccgaaggtactaatacctgngacccgtctatcaacttcgagcaagaaatgaaccanacggaagatgaaggagatgaggatgtggga

SEQ ID NO: 152619 - DNA, 289 bp, Glycine max
atttcccccttcttctttttaaatataccatttataaaaagggaaaaacttacgtagagttattaacctatttgtggagatttaaaacatctgggttaagagatccatctaagagcctaaataaaatctggaagacagaacaagggaaatgttaaaagaagaagaagtgaatttgcatgaatagaacgcgtgagagaagaaaaagaagggacctcaatttgcccattggctgcagcaatatgaagaggagagtgacaatcatagagaagggtcagagttcaagagagct

SEQ ID NO: 152620 - DNA, 383 bp, Glycine max
  unsure (1)..(383): unsure at all n locations
tcttctgacccccgcgacatattctcaagtaccactcagtggtcaactaataaaacgtggaggactgactctttcacactttctcacaccgagcttattgggttatggggcacccgtcatatgtggtactaggtggcgatcgggcgatggcgcanaacaaatatcccatttccacaagcccaggcataagcccaccatccccangtgcccacctttaaaattagttcatcaccgggtccccatcaacctctccaagctttcacaatatctaaacaattcaattccatttgtcatgaaactaccttaaaaacagagtgaaggtagaaatctttacacaagattcattcanactccacatagtttttccaacccacatacctcag

SEQ ID NO: 152621 - DNA, 69 bp, Glycine max
  unsure (1)..(69): unsure at all n locations
agcttgaaggtgtgtaacccaccattttccatattatatatactggnaacgtgtctactatcatggaca

SEQ ID NO: 152622 - DNA, 240 bp, Glycine max
  unsure (1)..(240): unsure at all n locations
agctntgtataatgagaattgtccttcaacaagctttgaaanttggcatctgaagtctgaaagctctangcagataagtctgcaaaagctggaagtggtgctgaagtaaaagatgcaaggatgccagctattggtgcanaggaagagggagcatcagctgctctgatcttggtcttccttgcctctagaaaattaactggttggtcattcgcattccaacangttcttatgatataagct

SEQ ID NO: 152623 - DNA, 461 bp, Glycine max
  unsure (1)..(461): unsure at all n locations
agcttggttcaaccncgtaatccaaggaatggaaattctgattgccaatacttcaacaacatctcatagggatgaatgactcgggcatactttaagcttatgcacggaaaatgtaattatgaaattgagatgcccgaagaaacaccatttcctagttaaccatgcattaggtaccatgttcaattattttgttttgttgttgtgtgttttttttttagaaatgggtttatgatcccaacatggttggctcatggtgcctaacacatgcaactaagaatgtagtgtgaagtttcacgcttccccttttttgtttttgttttgtagaggaaaacgcaaggatgagcaaacatgaaaacaaatggtatgcaattntgcagatcaaaaagtttgttgaacgcatatgcatgatgatgccatgactcatgcanaatgtgaggctggaatatgataacggacaaatg

SEQ ID NO: 152624 - DNA, 398 bp, Glycine max
  unsure (1)..(398): unsure at all n locations
ttgagggagaatgttagataatatgttttttctttaataactttcttaatatacatcgtagactatattaacacattctaagtaatcgattacgatttttttttattttttattttatgatgaatttcatgctgatcacacacactttttcactcatataatgagactaaaagaataaaatatacgtatacacgcaatataaataatggaaaggaatataaatttactgtgagtcgacactttcaattatttttatgaaatatatcaataaatattcattatcctcaatcaattatgaagtttttagacgaattttctccttttctttgcgagacttctttcatgtcgggcgatggctctcctttcaagatgattattcttatttcanaaacttttat

SEQ ID NO: 152625 - DNA, 516 bp, Glycine max
  unsure (1)..(516): unsure at all n locations
ccggtnatatntttgaaaccctggagtttggctttaccatcgatnacccacannanaaanaanaacacatntttgatgaaacacgatgacacaatcacaacgacttgtgtcatgtattgtactacggagatccttaacgagtgaatctctctctaggagacacgtatggaactgtatgaatattacgcatacctactttagagcgaagctctactgcttgagaagacaaactagatattcacacaaccccatcttgatatgtttagctcacccgatgacatattacatgttaagtgtgctgaacttctgttgtgctgagacacatttattgactctctatgataccgtcctgcgctatgcacaggttatagagacttatcggtgacctgtctaacgaaatgccagttgatatcgtgtcatctataatcgggcttatgattggacacgggctcgaaactaacgtatggcgaagacaacatgtggactatcttggtgttatctcactgatctgggaan

SEQ ID NO: 152626 - DNA, 391 bp, Glycine max
  unsure (1)..(391): unsure at all n locations
atcttaagtcacctgccgcatgcaagcttgcctcanagaggtccaggaaggacatggcatccgaaggaactagttccgctccggagtatgacagtcaccgctttaggagcgctgtacaccagcagcgcttcgaggccatcaagggatggtcgtttctccaggagcgacgcgtccagctcagggacgacgagtatactgatttgcacgaggaaatagggcgccagcggtgggcatcactgtgtactcccatggccaagtttgatccagaaatagtccttgagttttatgccaatgcttggccaacagaggagggcgtgcgtgacatgagatcctgngtaaggggtcagtggatcccgtttgatgccgacgctatcggccaactcctaagata

SEQ ID NO: 152627 - DNA, 289 bp, Glycine max
  unsure (1)..(289): unsure at all n locations
tgctatgtgctcgcgagtggcacctctcttcccttcgcagcttgagttcactattgctaccccatagagctccgcgaagattattccggccatactcttccttgcgagccctcttggactcttggtcaagggctcttgcggtaattgcattctcttcccgtaacccggcacactccttccgaatgtgtgtagcggccaacttgaacttctccttggcaagnttcgcctttcctaactcgcttttgagagctcggacttcttcgacctcttccgaggcttcaaactctct

SEQ ID NO: 152628 - DNA, 296 bp, Glycine max
  unsure (1)..(296): unsure at all n locations
atgcaaaaggtacgtatagcaacgtgccttctattcggtcaagcagacttgcacttcaacttatcatatttttttcttcttaaacaacatttttatcctaaaataaaataaggactctgtaattntattttattttaaaaaaatatttttaaatctcatatatttaaaagagatgatgaagtcagagtaattgattatggaatttaaaaatccagtttataaaaaaaatgtgattatcccatcgaatttctaaaaaaaaacatgacacatcagtgggttattaatattattgggat

SEQ ID NO: 152629 - DNA, 125 bp, Glycine max
  unsure (1)..(125): unsure at all n locations
gtatgtgnttggtatttatgttaaatataaagnttaannataanaatgagagtttgtattaatatttaatagtatgtaaggngatgaaaaaaataaatatataaataaaatgaattnattattag

SEQ ID NO: 152630 - DNA, 392 bp, Glycine max
  unsure (1)..(392): unsure at all n locations
agcttcttgaggaagcctcttaatgaagcttcttgaggaagctacatgagctgccttggtaaaaacgttgcccagccttcgataaccgttggatcttcgtgtaatttggtttgcagcttcacaagacaattgtacacgatctgcctgttgggatctttgagaagatgtctggagtgtgtgtgaagcttccgttcccgagagaatttctcatttaagcatttcagcctttgctttcgtgtagcttaagaattccttctcctttctttcttccanagtcatttctaacgccccaagcattttctccatcacccacaaccaccattagccatcacanaccgccattgttctccattgagacccacattgaaaggaacccttcaaccgaagcggaa

SEQ ID NO: 152631 - DNA, 447 bp, Glycine max
  unsure (1)..(447): unsure at all n locations
ggaaggtttgtacatgaccaaatctttagttaatcgtctttacctanaacagtctttgtatttgtttaagatgcatgaagatagatcactaggagaacaattggatttgtttaataaactgattctagatcttgaaaatatcgatgtcactatatgatgatgaggatcaagctttgttattgttgtgctctttgcctaagggttactctaatttcaaagagactntattgtttggaagagactttgtttctcttgatgaagtgcaggctgctctgaattcaaaggaattgaatgaaagaaaggaaaataagtcctttacaagtggtgaagggctgacagcaagaggcaagaccttcatgacaaatagtaaatctgataagaagaagcanaagccagaaaaccagaagaatggtgaaggaaatgtcttcanaatcagaggtcatcact

SEQ ID NO: 152632 - DNA, 200 bp, Glycine max
accggatcttaagtcacctgccgcatgcaagctttcttaagaagattcctatagaagctagagcttaactacacacacctttctaatagctaagctcaccttcttgagatgagaaggtagagcttatctacacactccctataataggtaagctcacccccatgacaaaatacatgaaaatacaaaaaatctctactaca

SEQ ID NO: 152633 - DNA, 329 bp, Glycine max
  unsure (1)..(329): unsure at all n locations
gatggtgagactgactctaaatttgatttctgtggaccagtcttagtgcttttgaaattntatcaaaatatacccattggttttttattaaattgcgcttgaattaaactagataaattttgcaatgaattctctattagagccccttgtgagatgaggtcaaattaaggtccatttgtgacatacaaggtggctgccctattgtgcaaattgggtttggcagtgtgtgggtctctttgattttgagtctttataagggtcgaaatgttgtttatagcttcttaaattagctcataaattctttctaaccatgtctattagaaaaatta

SEQ ID NO: 152634 - DNA, 429 bp, Glycine max
agcttggtggagttcaaagagaatcgtagaaggttcgggctaagatataagcctacacgcaccgacatgaagagaaacaccctataaaggagaggcagaagtgtgggccaccagcaaggattgcaagtaaaaggaactcccttatgtcacatcaacaagagttttgtcagcgcacgctggatgtgtgaggggtgggttgccatgatccatgatgaagtccctcaagagcaatcaaactgggtgcggccatgccctcctatgttcgagttgggaaattggcaaattatcaaacaacccacaatttttgtggcaaacataatgtaatttggtaatccaaaccctatagctgagcctcggcttgtcttttgctattagatatatataaaatataatctggcttcattttttcttgcactttcatccctattt

SEQ ID NO: 152635 - DNA, 265 bp, Glycine max
tctttgagaaaacttccttgagaagctagagcttagctacacttacccctctcataactaagctcacctccttgagaagcttccttaagaagattcgtaaagaagctagagcttagctacacatacctctctaatagctaagctcacctccttgagatgagaagctagagcttagctacacaccccctataatagctaagctcacccccatgacaaaaaacatgaaaataaaaaaaaagtccttattacaaagacaactcaaaat

SEQ ID NO: 152636 - DNA, 254 bp, Glycine max
  unsure (1)..(254): unsure at all n locations
ggcacctcacataacctgttattctctngnccaagggaaagatttggagtaaaactttggaggtccacgaaacagacgacaaattatttctaatgtataataaatacttttagtttgatatatttttttaaatgaacgagaaaaaaatgatagattaacataaatggaatgttctaacaccccagtgcccggaggcttcccgctatacgaaggtatgtgggaggggtattngacacagacttacccttgcctat

SEQ ID NO: 152637 - DNA, 559 bp, Glycine max
  unsure (1)..(559): unsure at all n locations
ctcgtaacttaactcggcttcgtactcgcaactgngctcgtatttctatcctatatgttatcncacacgctgtgtattttgttgattctgttcgaacccgngatcctatanatagacctcacgcatgccagcttaaataccaccagcatcaaagatctatggtctgttgacggaacctctccaaatgcgatctttccgcaagaattacggaaagatcttataattgaccttagccgacgtatccatgaagccattgcgacactcaacctattatacgaccagcctttgaaatgttttcattcggagactctcatctaccccacccatggaaatttgagaaactttaggtgcctctccggggaaaaaacatattttctttccggggctccctctttgaccaattgccctgtggcaaggtttagaaaaggttgaagattaaaacactcgggacggctggtgcccccccggggactctaaaactggaagggttggcaccaaggatgggcccccttttgggggaccctctatttttggggggccccttcacccccagcggtgc

SEQ ID NO: 152638 - DNA, 329 bp, Glycine max
  unsure (1)..(329): unsure at all n locations
gagaaaacttncttgagaagcttctttgagaaaactttcttgagaagctagagtttagctacacacacccctctaataactaagctcacctccttgagaagcttccttgagaagattcctaaagaagctagagcttagctacacacaccccctataatagctaagctcacccccatgcaaaaatacatgaaaatataaaaaaaaagtccctattacaaagactactcaaaatgcccttgaatacaaggcttaaaccctatactactagaatgggccacatacaaggcccaaaagaaggaaaaccaattcctacatttaccaagaagaat

SEQ ID NO: 152639 - DNA, 470 bp, Glycine max
  unsure (1)..(470): unsure at all n locations
acactcttaggatttgcctagtttacatttcttgcttacattcataatagcttatttcctttaccttccattgtcaaaccgcctagatagctttccttttaccaattagttntttaccttatctttcacacctcttttagtgtttatttggctagnttcaaccatagtttcttttaccttttgttntcaaacctccaacaagaaagaaccacaacttaggaaccaatatgagtcatcattcatctagtggtaatggcaagggtactagtcataaagaccctttatctagaatcttagatgagttgagttccctcacgttatggaaagaanaacaagagagaaaagaanaaggaagaataagagtggaagaaataaatcatgatgaaagaaagacaatatgagaggaagaaagaagaacaataatgaaagaaatgaanagagaaaaacatgcctnctatagtagtcataac

SEQ ID NO: 152640 - DNA, 429 bp, Glycine max
  unsure (1)..(429): unsure at all n locations
atgatttggattatcctctanggcaatcagtattcagtattttaaattccctctcaaaaaattgcaggcttggtggcggtgccacaaagctgccatatattataagaggcttagtagaggtgcaatagttacacaatgcagatggagggggcgcatagccaggaaagaacttatgaaactgaaaatggtatgttttaccatgattcttatacattaagtagatccttcagaaatagatgacaaaagatgtaacacgtccatcctacaaaacttatggcacaaaaagcaaaagatactatttgatcaatttttaattgtaaaattgagtttcaaattatagatatatacaaacaatattcatattttttgtttcattattatcttcatgaagggaaaaacaatagaagaacttanaattctcttctgatc

SEQ ID NO: 152641 - DNA, 371 bp, Glycine max
  unsure (1)..(371): unsure at all n locations
gcttattcttncatggcttatttcctagaggatggtgcctactctcacctctcctcctttatctttcgttgtaactccatggctgaanatcaccattgaaggacctcattaaagctcaaagatccaacctttataaaagcttctcaagaaagcttccatcaggacttttggacatcatagtgcctacagctgaggcatcaaggatcatcttggttngaggtttcataccactatggaagatatgcatatgtgcactgtcatcanagttatggtttatgcacctctgcaacaaagctttaaatctctcccatgtctcacagagaggtttgtgagatccttgggataaagtcatgatgaaggggtttacactg

SEQ ID NO: 152642 - DNA, 335 bp, Glycine max
  unsure (1)..(335): unsure at all n locations
gagaaagtgtggaagagtcagtcttcctacttttattcgttgaccacagagtggtacctggagatatgtcgcggnggtcaagagaccttgtggacgtcaagtggggtgttattgcccaaaaccaagcttgaccaatcccgacccaacccaggcatagtcagtcagtgagaacctgtgacgtacctaaacaggcgagctcctggcagtcaaccgataaaagaacaaagaccacaaagcaaggaggcttgtgtggtggctggccagctatggatcttgagtgatatatgggttatggcctctggtaatcgattacaaagggtgtgtaatcgattaca

SEQ ID NO: 152643 - DNA, 504 bp, Glycine max
  unsure (1)..(504): unsure at all n locations
atccttaagtcacctgcggcatgcaagctngttcgcacatcgntcgcgtgtatgacatccactccacaaggtttgaagtagaggagaccttcaatcctattacgcaacgtggcggacaaaaatgggcagttaacttgaatggtcattattgtcaatgcggaaggtattctgcgcttcactatccatgttcacatattattgcagcttgtggttacgtgagcctgaactactaccaatatatagatgttgtttatacaaatgagcacatcttanaagcttactccccacaatggtggcctcttgggaatgaagcggctattcctccttctaatgacgcatggacacttatccatgacccaactacaattcgtgcgataggtccggcaaaatcaacaaggataatgaatgagatggattggatcgaaccatctgaccaccgactaaaatgcagtagatgtggagccgaagggcataacangcgtcgctgcccatgcaatctgagcg

SEQ ID NO: 152644 - DNA, 411 bp, Glycine max
  unsure (1)..(411): unsure at all n locations
ttcaccgacgaaaggaccacagtaggtctaataagagacaaatctgatcatcatgctttgatacatgccaaaaaaaactacggcaaatgaagagggtgagaatgaggaagaagcccatgctgtgactgtcattcctatacagccaagtttcccaccaacccaacaatgtcattacttagccaataacaaaccttttccttacccaccgccagttatccacaaaggccatccttaaatcaaccataaagtctgtctaccgcacttcanatgacgaacaccacctttagcacataccataaacaccaaacaagaaatggaatttgcagcgagaaagcctatagaattcaccccaattccagtgtcctatgctgactngctcccatatctacttgataattcaatggtagccat

SEQ ID NO: 152645 - DNA, 420 bp, Glycine max
  unsure (1)..(420): unsure at all n locations
agctctcatctagccaagaatttacaaaagtgttacaacataacctaacgatttctaattatatgggccattaaatttatcatgtgttgacagtaattgattagcccgtgaatttcctctggggctgaacacacttcggccatgggccttgctttggctagtagtcgcgggaggtcttgacttccatttaaggtcaaggcgaacctatccatccacatggtcgcttcttgatgcaatgcatcaatcaccctccctcttgcttccttctcggcgtatgcttgtgcgaagtcctcttctatcttttgctcatgggtcanagactgggttaactcttctttgtactgtcctattatanctagcatgctctgctccgtggcttctaagtgttgggccaaacttttcttggatcttgagcaagct

SEQ ID NO: 152646 - DNA, 427 bp, Glycine max
  unsure (1)..(427): unsure at all n locations
tgtatcgattcgctcctagtcaggatcacatcatcttgctcctttctttntcatttaacttttggtctttgtttccttctctctttatatatgttttggggtataataattcatatatgtatgtatgtgtcggaacctacccttcggtaagagggcgaggcgaaaagccaaaggagcatcttccaaaaaggaaaacccgcgggagtcgccaccaacgtttactctaggaaaacattagaaaaaccaaaaaaaaaaggtcgaaggtctgcaaattttgaaaatgagggtttgggagttgtttacacacgaggaaggtatttgcaccccacgcactcgtcacaagggatggcaacctttaatcgagtgtgcanaacatgaacttcaaaatgtgtattttccctttcatatnngtttttttatttctttg

SEQ ID NO: 152647 - DNA, 500 bp, Glycine max
  unsure (1)..(500): unsure at all n locations
ttaagtcacctgccgctgcaagcttatgattttttanaaaataattacttctctgtgagtctccatgaacctaataaatatgaggagaatgaagatttgtgagtctccatgaacctaaaaaatctgaggagaatgaagattggggaatgaattataaaattgtgatcctgtcttttataaacctaaactgacccgctnttttcaggaaaaaagataagaatagttaaactttgcccgtatcatacatatcactctaatanaaaataaagcattggagagaccagaacatatgagatatgaatcgaattcttatgcgtttatactttaccataaaagtcatattcaatattatgtgaaccattgatntagatggctttnttcttaataactcatcatttaacagagttcagaataatataaattgatgaataaatcacattcgcgcttcttatatactgaacctattaattcaagccttaagctaatataagcaacatttc

SEQ ID NO: 152648 - DNA, 412 bp, Glycine max
aatgtaataagttaaacataaagctattgattgccgtaatcaattggcctaaaggccaagtagagtatattaaatttcaggcaaacccttatttcgaatcaactggaagtcgatcagcaaatcttttaaattaacgaatttgcctactttcaggaaggaaaaaaaaaaaaagcagtgtaatacctaatatatatctgaatttatcatacgtatttgctacaattagattttgtaaactgtaaatctctctaatataattcctttatgaaagatgattgtaacattaaaaaatatattttgggtcagcagcttggatctttatagggggtggtgccaacctagttgggactactccctcgattgtatcagctgtctcaccattcatttaataaataaataaccaggatcaatt

SEQ ID NO: 152649 - DNA, 276 bp, Glycine max
tagacactcagcttcctcctcttccttccaagggtggagacaccctgagaggtctcccgaccattgttgagctgaacatacaaccatattcgatctgtttatgatgacctctcggactaaataatactagacgatgcactatcgatggtgagcaagagccgccggcatacattagccggcaaataccccgcacttgcctcgcgaactatacgtcattcttctcatctacgaacgatgcgcggacccaggctgtgtcctgctcaactagagcgttga

SEQ ID NO: 152650 - DNA, 361 bp, Glycine max
gagactatgtttggcaaagaaaaactatgaagaatgcgttgccatggaaaaactacaacgcctactctcttcaaaagaaataaagaaatttcaaaaattgaaaaaagatatgctgaagaggtgaatgaattaaatgataaaatccaagagatagaagataaatattatgcaacagagaaatggtagcagcagaggaaaaacactattaagaaattattggagtacaagtgtgaggtgaagtcccacattaaatagaagtggaaaagttgagcaccatataagtgaggagaagacctataaatctaagtcttaaggttttgagttaaagtgtgggtattaaatcccttatcttgttactcat

SEQ ID NO: 152651 - DNA, 386 bp, Glycine max
  unsure (1)..(386): unsure at all n locations
tggtcaccattntcaaggatagaattcataagactaaggaaaaggattaaaaggaggtcaatgatgatgatgatgatgatgatgaagactatgtacctaaatatgaagagagacttggatcaaattctataagtgaaaattaccagcacgacaaatatgatgaattttctactacaaatgatcttgagtcacgggaaagaaagataactcttgaaaattttcaatataatgctaatatacattattgtgttaataaatgagtggggtggttttgtggttattgtgaaaattntcaatataataccataggaaattgacttcattntcttgatctatctacatctttcttaanaaaaattcaaattcactcttttgtaanaaaatag

SEQ ID NO: 152652 - DNA, 244 bp, Glycine max
  unsure (1)..(244): unsure at all n locations
cataaaaagtcttgtggaattgattacaaggattnggtaatcgactaccaatgacaagttttgaataaaaatcacaagatgtaactcttcaaatggttttcaggctattctanagggtataactcttccaatggtttccattgaccacacataaagagtctataaaagcgcgaccttgagtngcatattgagatctgagtacaaacttttacatcttttacacacaacctttgaacatcttctt

SEQ ID NO: 152653 - DNA, 451 bp, Glycine max
  unsure (1)..(451): unsure at all n locations
ggcttctacaatctcccnctntttgatgatgacaaccctgatatcaagaaacacatgcacatactttttcctagtcgattactcacttaattctccatattctacccctttggttttgagtttaagcttcacttgaaattaagttaattacttatgtgagttcttgatttaatccctatttctctccccctttggcatcaacaaaaaaccaaagtgcgtaacaaatataaaacatacacaaataactaatcatacacaagacattcattgaaaaatctaaaccaatcatgaagcaagaaacatgaatagatcaaatatataaaaaccacatagtcatataacataattcatatttgttcagtcatactatgcaaataaaagaaatactaaatgttcaaatgtcataataatatagccaaatacacggctagaaatcaaagtactaataata

SEQ ID NO: 152654 - DNA, 476 bp, Glycine max
cgcgcgcgcgctcttattagagaacggtaacgtcttgtactattatacacacgaaactatatctacaggatgccacgtatgagtgattacctcaataatcaggcgcttagactcgatctgagagaggagagacgtataaactcatcaacttctctaggattgaagttctgatctatatcggaacattatcttctgacgcgatacctgcatacactacgctcagcataccagacctctctgcattgtatacgacggaggtcctccgagtacagttatcaaacataacctatccaattgaagcacatggacttttcaataaaaagcacgacaattccattattacacgtctgctcattgagaaagagatctctaggccgtagatatatactctcatattcaacttagatgaatgtagaaaaaatgtacttatagctgcataatgatcatgtgccggatctaacaatacacgagatgcc

SEQ ID NO: 152655 - DNA, 337 bp, Glycine max
  unsure (1)..(337): unsure at all n locations
tctccaccattntcttataaatagggggagaagtgaagaggaatttcgttcagccctcctggtaattcagaatcacttaaaattagtgaanaaaattggttccgtgaagaanatccaagccgaggcgcttccgtaacgtttccgtgggtgatttcgcgaaggttttcggccgttcttcgacgctcttcattcgttcttcgtcgntcttcggtcttcaaccggtaagttccctaaatcgaacttttcaattcattctatgtacccttagtggtcctcatttgcttttacgtgctttcatttacatttcctttacttttcgtacccccgtttgacgtgc

SEQ ID NO: 152656 - DNA, 489 bp, Glycine max
  unsure (1)..(489): unsure at all n locations
agcttgtctcagcgtttaggcgagacagagaccatcatgttagctatcatcgccaagtacgaagaagagttaggtctagccacggcccacgagcatagaatcgcggatgagtatgctcaagtatatgcggaaaaagaggctagaggaagggtgatcgactctttacaccaagaggcaaccatgtggatggatcggtttgctcttaccttgaacgggagtcaagaacttccccgattgttagccaaggccaaggcgatggcagacacctactccgcccncgaagagattcatgggcttctcagctattgtcagcatatgatagacttaatggcccacataattagaaatcgttaggaaacttgtatggtctcttataccttgactagatatgaattccttcttgaaatanaatgagttggtcccatgtttctactccacanagcttgtgcaaatcanatcactcctacatctcatctctagcatgcattt

SEQ ID NO: 152657 - DNA, 451 bp, Glycine max
  unsure (1)..(451): unsure at all n locations
ggcgaccagctcgcccaggcgagtaagggtgcttcctccagaagcaacaaccttctggaggaatcttctagagggcccaagtgggcctgattgctatttgtacctccctttttactaaatccatccccttctatttttttggtaattctttttccgtaacgttacgaaactttacgaatttcgtaacgatacttattttccttccgcaaggttacgaatccttacggattatgtatttactctnttttagctntcgaagaagttacggaaacttacggattgcgcanaaacacctcttttcgatttccgccacattacggaatttcacggattgcgcaagcctgcttccttttgattnttgacaggcctcgggacttcattcattgtgcaaccaaggacgccaagtatctcgaagcggccaatcaaaggttgtatatcatcaaataataat

SEQ ID NO: 152658 - DNA, 141 bp, Glycine max
  unsure (1)..(141): unsure at all n locations
tactgaccattgataatatcacaagtgagtttattcagaaattagagtttatgtctttatcttgtgagagtgattctcctaaattcttgagtgattanagaacaccctgcctgtatcaaaggactttaacaacctttgaga

SEQ ID NO: 152659 - DNA, 131 bp, Glycine max
  unsure (1)..(131): unsure at all n locations
gattacctctataatcaggctcttagactcgatctgagagacgagagacgnataaactcattatcttctcaaggatagagtgtctgatatatatcccaacaatatcatctgaggtcatccctgcatatact

SEQ ID NO: 152660 - DNA, 427 bp, Glycine max
taggggcaggtacgaacaggttctatgcccatgatcaatcgatcaccacccccgcgttcggctaaagatattaaagaagctctcctaggaggcagcctagtatctctaactttgctctttaatttcctgtttcatacttgttctttttcttgaactatatcctgaattcgcctaagtttatatgcaattataggattttaagagaaaaaatataacaatgaataacacaattttgtaaaggattttcttcaccaaaaaaataataattacctcgcttgggcgagtggccagctcgcctaggcgagcatggctatggtgaaaaacataaaaaggggaggggtgaagccattttcaccctattcttgcccaaaatcaaaaccttccccaagagcttacgggagccaccattggcagcagcccccaagct

SEQ ID NO: 152661 - DNA, 411 bp, Glycine max
  unsure (1)..(411): unsure at all n locations
catcacatgtggcactatgtggcggtcgggcgatggtgcacaacaagttttccacatccacaaatcgcgcataaacccaccatcccctggtgcccacctccaactgagctcacgtactcccacgtagcccatattctcgtttctctcaacaccgggtccccatcaatcctcccaagcttccccaacattcaggtaattcaacatccaaatcatcacaaactaacaaaccaagcaaaacagggcaaaggcagaatactctgcccaaaactcaaaccanaatcacagctttttctcacttaaagaccccagtaacatttccttcattccaattcgttaaccggtggatcgactcgaaaaatttactggaagtctctagtacataagcctacattntgaccggtgggatctact

SEQ ID NO: 152662 - DNA, 268 bp, Glycine max
catgcctttgacggcaaccgcccacacgcgacgtgagagatcgacctccctgtacagataagcccccatacctgtcatgatatccttcaagatatggatattaacctggcttacagctgtcttttgggacgcccgtggatgcactcagtgggagatgatccctctacactgcaccacaaattgatagtcgtagtacacgtgcactggggcattgtgtctgtggacgaagaaatcttggtaagatgcccattctctatgccatatgtgg

SEQ ID NO: 152663 - DNA, 448 bp, Glycine max
  unsure (1)..(448): unsure at all n locations
gcttgcatataataatcacagtatctgcatatttcaattcagtatatggacatgtgttcttccttaagagagggtgttatccctgttgaagatcctgcatactacctgcaccaaaaggaacataacacagtcattaagaatcagtgttctgagtatatcaatgaattntgtgtccacaagcctgtggcagaaccagtggcttgtgtcaagggaccaagggattataattcttcacgtatccagtcgtgcttaaaagttgtctcaaatgtagatgaagaggctgatgttgaacctacatctcctgaanaggaagggatagaatgtgataatccagaatctgaaagtaggtgagaatctgacatcaagtgctgttatggttgtgaaactgatatataattgcatgacgtcttatagcagcagaatctgaagtgaaacttaatagcctaat

SEQ ID NO: 152664 - DNA, 454 bp, Glycine max
  unsure (1)..(454): unsure at all n locations
agttagggtagtgaatgatattctgaaggcgtgttattgtgtaacccattaataaagtgtctcgattntgcttataaactctgaaatgtgctttgctcttttgctttaagattntattttattttggtacagaagattttatttttttgaaacaacaagtattgacaactttctggctgtagtaaatagaagaaggaaagtggaagaaataggaaaatgataaactgcacctccttttacttaatcttaatgattctcagttgttttgcttttcctcttgcaattgtctgaaaccaaggtggaggtagaagtttaaattccataaagcacttaaagaaactatttaatatcctttgcgtcatttcatttggatgggaaagctatatacatttagctagagcatgccattactgcataaagaataccctaattaaggatagattatgagacacac

SEQ ID NO: 152665 - DNA, 88 bp, Glycine max
tgtattgagcattccttttctgtatcttccgttttgcttagtttagccctgtaattctaatatagattaagagagcattcagcttgac

SEQ ID NO: 152666 - DNA, 172 bp, Glycine max
tcttacatattaccccatttatgtctcaagatttagtgattcaagcttggcctcttggttgagctcttaacatagtagaggaaagaaaactcccgaaatgatggaagaaggatatgctgtgaacaaaacccatatgttcaagggagccacctataactatgggaaggaaaaa

SEQ ID NO: 152667 - DNA, 315 bp, Glycine max
  unsure (1)..(315): unsure at all n locations
gcttcttatccaggcaattcttgggggngaagctccttcttccttggcttattccctagnggatggtgcctcccctatcctcttctcctttgccttccgctgcatctccatgatgaaaaatcaccattgaaggacctcattgaagatcaaagatccagcctccatagaagctccacaagcaagcttccatcaagttatgaccatttgaatttctcgagatcttccgtggntcaatttcgggcgtctccatatgtcatgtgcctgaatcggacctccgtaatataatttatgaccattcgaacttctctagagctt

SEQ ID NO: 152668 - DNA, 410 bp, Glycine max
gcagatctggtcttcgccagtgaaaggatcaatgtgggtccgaaaagaggcaaatttgatcatcctactatgacgactgagaaaactggggcaaataaagagggtgaggatgagggagaaacccatgctgtgactgccattcctgtacggccaaatttcccaccaacccaacaatatctttactcagccaataacaaactttctccttacccaccacccagttatccacaaaggccatccctaaatctaccacaaagtctgtctaccgcacttccaatgacgaacaccacctttagcacaaaccaaaaacaccaaccaagaagtgaattttgcagcgagaaagcctgtagaattcaccccaattccagtgtcctatgctgacttgtcccatatctacttgataattcaat

SEQ ID NO: 152669 - DNA, 449 bp, Glycine max
  unsure (1)..(449): unsure at all n locations
gcttaataacaatgcctaaggaggagcattacatagcacccatcttggtcctgttagggataaacatgtcgttgaagtacattcaacatctggttataaaggacttttaccatggcatactacagtgactaacactgtattcagaatcattntcatcccttttatgaacttccctcttttttatgaactgccctcttttttagtctttgtttcccacctcttaaacatctgcattntcccatttaggtttcttgtttttgtgaggaatggcggaaattatgttttatatggacaagactgttggttggaattggaatgagaatcaacatggtgctcatacttttgttttcaaataaataaaagtgggcatgctactaatatttaatntattatggtgcttctattaataaagtacaccttgttaggaaaccaaaatatagaacagaaat

SEQ ID NO: 152670 - DNA, 287 bp, Glycine max
  unsure (1)..(287): unsure at all n locations
tcttatccaacgctcatcttggtggtgaagctccttcttccatggcttattccttaatggatggcgcctcctttcacctcttttcctttgtcttccgctacatctccatggtggaaaatcaccattaaaggaccccattgaagctcanagatccagcctccatagaagccccacaagcaagtttccatcagaatgtccacgtctttagagggctacacgcccatgccttcagaggactacacgccctcgccttatgaggactacacatcctcacctttagaggacta

SEQ ID NO: 152671 - DNA, 435 bp, Glycine max
  unsure (1)..(435): unsure at all n locations
ctgtgagaacctgtgacgtacctaaacaggcgagctcctggcagtcaaccaataaaagaacaaagtccacgaagcaaggaggcttgtgtggcggctggccagctatgtatcttgggtggtatctggaaattagcctctggtaatcgattaccattcatggataatcgattacaggggttaaaaatggagacaggatggtaaatggcctctggtaatcgattaccaagggagtgtaatcgattacacagggtgatagggcactggtaatcgattaccagctgggtgtaatccattacacagggtgatagggcactagtaatcgattaccacttatgtgtaatcgattacacagtgtattttttaattttcaatgtgcanaggctgtgtaattcgtttttggcaccggtaatcattacatactttggtatcgatacc

SEQ ID NO: 152672 - DNA, 318 bp, Glycine max
  unsure (1)..(318): unsure at all n locations
tcatgatgatgaatgaagttgattcaagtagttntgatgatatctaagatgatgacaaanagcccaagagaatgatttcaagattgagttaacaagatttatgaatcaagagaagtttgatttcaagattcaagagaagatgaattcaagattcaagacaagaaatcaagaagacttcataagggaagtattgaaaagatttttcaaaaaacaaacatagcacaattttgtttttcaaaagagctcttctcagaattgtctaagttaccagagtttttactctctggtgatcgattaccaattaactggtatcgatta

SEQ ID NO: 152673 - DNA, 395 bp, Glycine max
  unsure (1)..(395): unsure at all n locations
agcttctaaccttttccttcctttctaccacatatgtggagttattccacatacataaaaggccaccagcagcttccacagatggaacaaaatcccaatgaccagtggagtctcccgaaatggcctggcaaatacttttattaaagntctccctcttggtttcttggaggcagacaagatgcactttgtgcttacaatgagccttctaacagcagcccacttgactcccctcccctaacctctagaattataggagagaattatcataattgctgagatttaattcccttttctgttgccatcaaatcatctttattctccatatgcagcagtagccccttaaccttgctatcttcttncttataagacaagcccatttccttcaagatgtcaca

SEQ ID NO: 152674 - DNA, 432 bp, Glycine max
  unsure (1)..(432): unsure at all n locations
agctntggagtttccaagtgccaattcgtcttcttctttagtccagtcttcttctggcttcaatccatcagtgggctttccttctgtgtccagcatcttgggatgttcccagcctttgatgacagctttccaggttctgctatccagtgatttgaggaaggccaccatccttgctttccagtattcatagntggttccatccagaattggtggtctgttcactggtcctccttctttctccatgttcatcagaatttatctccctaggtctcactcagtgatttcgagtgcctgctctgataccaattgaaattctgataccaatgccagatgtcgtacaggatgtcacgacatcacgcttcagaacatgcagattatctctgagtggatgaacacgataaacaagtatataacacaagagaattgtttacc

SEQ ID NO: 152675 - DNA, 429 bp, Glycine max
tgtctcagcgtctatgcgagacagagaccaacatgttagctatcatcgccaagtaccaagaagagttgggtctagccacggcccacgagcatagaatcgcggatgagtatgcccaagtatatgcggaaaaagaggctagaggaagggtgatcgactctttacaccaagaggcaaccatgtggatggatcggtttgctcttaccttgaacgggagtcaagaacttccccgattgttggccaaggccaaggcgatggcagacacctactccgcccccgaagagattcatgggcttctcggctattgtcagcatatgatagacttaatggcccacataattagaaatcgttaggaaacttgtatggtctctcagaccttgactagatatgatttctttttttgaaatgaaatgagttggtcccaggtttcta

SEQ ID NO: 152676 - DNA, 466 bp, Glycine max
  unsure (1)..(466): unsure at all n locations
gtcacctgcggcatgcaagctngagaatatcaatgcgtcanagtcgctatctcaatcacctttgtttgaagatggagttgtatcaactcacaatggagatgggaggagatctccatgaccacatcaacaagttcaatcggctagtaagttaactgttgaatgtggatgataaattctctaatgaggagcaagcgctcttgttgttggtctcactaccaaagtcttccatagctttggttcaaacgttgcttgtgggaagatcaactttgaatttggatgaggtgactgtcgctcttagagaanatgatgagaattgaaaatgctgatgatgaacacaatgcaatagctgtgatggaatctgagcgagggaggaatcattcaaggagacatgatggtctaagaggaagatcacaatcgcaatcgcatccacaacgagatatgagtaacattcactgcttctattgtg

SEQ ID NO: 152677 - DNA, 345 bp, Glycine max
  unsure (1)..(345): unsure at all n locations
ctgaggatagagacttcctaagctatatatcttctctctcanataagttctctaactttctagctatctcactctaagaagtggattcactcttgtcttggatggttaggaatgaaggctcctacccttatttatactactccacctccacaatgaatggtggagattacttgtatcctagggtggagattaattctctagaattctccacacattctaggagtctctacacttttctactctctttcatatcattccataaggtttcagaaggttccacacatctccaaaatatttcagagggttccacattcttccacaagcttctagagagttctacactac

SEQ ID NO: 152678 - DNA, 465 bp, Glycine max
  unsure (1)..(465): unsure at all n locations
agctntgcaactcagacacctcaacaggagagatccgacgaggctgttgctcctcttgagcctacacctgcacaggttgaaccagtgccagctgatccacattctccagtggcagatccatcttctcccgaacttgaagcagctcccccatcttcacctattattatcatctctgaagaccctacagagtcaacatttggagaagctgttgctctctctgattcccctgttnttcatctgatgaatgaggaggagacacaggatcagtcacaggattcttanattcctgtccttctgtttatgttgacaattatcataactattatattntagtacattgttttagtgaattttggtgatggttatatatacttgtgttttttggggaaagtacgatgcatggtttgaagcatacaggaatagttaacttgatcttgatgaatatgtagtgaaacacttttatca

SEQ ID NO: 152679 - DNA, 397 bp, Glycine max
  unsure (1)..(397): unsure at all n locations
tcattgcagtcttggaagccagattagttcatggatgagatccccacttttgttgctcaacctttgcctgttggaatggatctggtttggttttggtttggggttctcaattgaatttgaattcctcttaattggttcctgcaaaattgtgtttttttgggttcggttgtgtgttgtgataatgcaaaaggttgttaaaaatgatttttatttcatttttttatgtggggggttgagtttctaggtgatttgtatgaatgcacttggtcttggagaaaaaaaattgtgtgaattttagttggaatggtcgaacagtgtgaaaaagttttaggttgcanatacacaactgtgggtgtgattatgccaaaaggtatattaaacaaattgaattttatgt

SEQ ID NO: 152680 - DNA, 468 bp, Glycine max
  unsure (1)..(468): unsure at all n locations
ttgtcgtgagaaaaagaatacactccaattcatcacatggtaaatgaataacaatggaggacaaanagtatatagcaatattaataaataaataaaaagtatatagccattgaacgttagtgacaaattcaatccatgtcagtagtcgcatgacattcctttttcttctagaactgaaccaacatcaccgaaaatcaaagccattagccgaaagcantttaacatagaaacctataaaattgtgagttagggtttagtgataggtcatggtgagttggggtcttggatccggttcaagtatggacctttctttccattttttttatcttgactctcatgaattaatgggccagcaacacttgatttgtgcttgatacattatactaanaattagaaacctataaaaccttctcttttctttctctttttcttttattatctcttctaaatttttctttctcctctctc

SEQ ID NO: 152681 - DNA, 444 bp, Glycine max
aaagatctcagttttctattatataatgatataaattagtttaaaagtgcatcagatatcagttttctattttataatgatataaactaaaatacctgtttttaacactgtcttcatggtgtaaaggcacagctccatcatcaggttcttcgtcatcttgtaccattaccgcttgatctactattcctaagttgtgaagccattcttttaacttcacaagacagcggtattacattagcaattaggctgaatcagctatatcaaatgtaatgaaggaaactaaactaatggagatatgtatcttcacttaataacaacggagtaacatgataaagaatcagggtttggaacctaagttgaagtgtgaggttggggaggccaaaaagattaaatgatagacacaatactgcaaaattaatgtgcaaacctgctcttgcttgtcat

SEQ ID NO: 152682 - DNA, 456 bp, Glycine max
  unsure (1)..(456): unsure at all n locations
aacccatggaagctcctaatatctcccacactttgntgggtgggccattcttggatggccttgattttctcaaggtccacttggaccccatttctaccaactacaaaacctaagaagactatattatctacacaaaaggtacacttctctatatttgcatagagggtgtttttcctaaggactgaaagaacttgcctgagatgttctaagtgatcatctaggctcctactgtacactaaaatatcatcaaaataaacaactacaaatctacctatgaaatccattaagacatgatgcataagcctcataaaggtgcttggtgtgttagtgaagcccaaaagcatcactatccattcatacacaccatacttggtcttgaaagcgcgttccactcatcactctttttcatcctggattcgtgataaccacttttaagatcatattttgaagagatat

SEQ ID NO: 152683 - DNA, 442 bp, Glycine max
gagctgaacacacatacctctataatagctaagcacacctccttgagaagagaagctagagcttatctacacaccccctataatagctaagctcacccccatgacaaaaaacatgaaaataacagagaaaagtccttattacaaagacaactcaacatgccccgaagtacaaggctaaaaccctatactactagaatggccaaaatacaaggcctagacgaaggaataacctattctaatatttacaaagataagcgggctcatacttagcccatgggctcgaaatctaccctaaggctcatgagaaccctaaggcctttccttggatctctagcccaatctacttggagtcttctagccaatgcccttgcggggtaagagtgcatcattacttttcactcagatgtgcgattcaggcacatcagatatcgagacgctcgaa

SEQ ID NO: 152684 - DNA, 286 bp, Glycine max
  unsure (1)..(286): unsure at all n locations
gagcccgagtagtcaaagagaagttcaagtctatagccatcanagtctgaagagagtatgatgaactaagggacgtcaatatggccaccgatgaagccttggaatgagaaaccaagaatgccctgaaggaagaacacgaccaatacaagttttgaggggctttatagggcaataatagtgagctcatactccgaagaggtgaaaggagtcatcacgggtcacaggtatgatctgtaaggacgagctataggcttgccttatgacgagaagaaatttgtcccgaccg

SEQ ID NO: 152685 - DNA, 193 bp, Glycine max
  unsure (1)..(193): unsure at all n locations
atcagaccacttccagngtgctggaactacttcacactgatttgatggngcctattctagttgaaagccttggaggaaagaggtatgcctatgtcgatgaggatgatatcttcagaattacctgagtcaactttatcagagaaaaatcagacacctttgaagctttaattgagttgattcttatactttaaag

SEQ ID NO: 152686 - DNA, 281 bp, Glycine max
tcacacttacaaaggatatatgggtccatgagggacctcgggctttctacagagggcttgttccatctcttcttggtatgattccttatgcagggattgatctcactgcatatgacaccttgaaagatctatccaagagatatattctttatgacagtggtatggtattactgcaaccacattatctcttgaacttaatggatttattttaccactctgaaatttttagtgacacataacacatgtaaactcaacctttgaacttaaatatgtaatttttt

SEQ ID NO: 152687 - DNA, 247 bp, Glycine max
  unsure (1)..(247): unsure at all n locations
ttcgctactaaagttggcgactntgaaaatatttggagtagtttttaacagattttatatggatatgtttgaattagtgtactatattcattctatatatatgggcgtgtctcaaatgaagtgcatcaataagtgttccagaaggtttacgagtaaagaaaagcccacgtgattcccctaactatttcgcgttcatctccacgtgactcccccaaggctgcaactctactactaccatgtgctagaa

SEQ ID NO: 152688 - DNA, 118 bp, Glycine max
agcttgttggattatggcgcacccgtcatatgtggtactaggtggcgatcgggtgatggtgcatatcaattctttcacatccacaaataagacatgaacccaccatccccagttgtcc

SEQ ID NO: 152689 - DNA, 260 bp, Glycine max
  unsure (1)..(260): unsure at all n locations
tcagaccaaagcaacatanaatctatgtatccgaaacccctcaatctaatggattgtcaagggttgagaagtgaatatgacaatgagcgttatttggagcaaactctcacctcacacaagtctataacatcaatctaaacttgctcaaactggatttacacctaaaactccacccgaataaaatttgattcctcatcaccaattttaccctagaaatgactcttcgttcactacgtacatccttttcttttattgcaaag

SEQ ID NO: 152690 - DNA, 449 bp, Glycine max
  unsure (1)..(449): unsure at all n locations
agctntgcggaattggccttcgctggcgaaatgatcgaagtgggtctaaaaagaggaaaatctgatcatcatgctttgataaatgcaaaaaaactggtgcaaatgaagagggtgagaatgagggagaaacccatgctgtgactgccattcctatacagtcatgtttcccaccaacccaacaatgtcattactcagccaataacaaaccttctccttacccaccacccagttatccacaaaggccatccctaaatcaaccacaaagcctggttaccgcacttccaatgacaaacaccacctttagcacaaaccaaaacaccaaccaagagatgaattttgcagcanaaaagcatgtataattcaccccaattccggtgtcctatgctgacttgctcccatatctacttaataagtcaatggtagccataacctcaaccaaggttcatcaa

SEQ ID NO: 152691 - DNA, 399 bp, Glycine max
  unsure (1)..(399): unsure at all n locations
tattatgattacgagctataaaaccaaactcatatctaatgagtttagagttaagttaattattttatattttctcttttttctgctcanagtaagatataactttcaattcatcttatcttggctagcaaaggaagaaatcaattcttgcacagtcgattttgttttatagatttacctacatggagaaacaaaagtcaatttgaaatttcattggtacaaatatttgataattggatgcttaaatatttctagcattaaatattcataaattgcatatggcttcttttgactcctcaaaaacataggtaacaaaatacattgcanatccaatgtagattactggctcattattatactaatattgttattccaacgtagattgctanatatagtagt

SEQ ID NO: 152692 - DNA, 333 bp, Glycine max
  unsure (1)..(333): unsure at all n locations
agctnggaaggatgcttcgatggaggataagaaatagggagagggagagagaggggggagcacgaaattgaatgaataaaagagggagagaagtggaactttgaagtatgtatcacaagactctcattcatcagagttacaacaagtgttacacatgcttctatgtatagacttggtagcttccttgagaagctttcttgagaaaactttcttgagaagcttgtttgataagacttccttgagaagctagagcttagctgcacacactcctctaataagaaagctcacctctttgagaagcttccttgagatgatcgtacataagctagagct

SEQ ID NO: 152693 - DNA, 200 bp, Glycine max
gcttcacaatgacacaagggagtgagactgtgactgaggagaggaggggtcaggtctatagggtgcgagactgaggagagggaatgaaaatctgtatgacgtgagagtgataacaacacatgatggccctttacatgatggttttaataaaaccgatgttgagtatctcattgtcacaatggttatgacaaaaaacatct

SEQ ID NO: 152694 - DNA, 365 bp, Glycine max
tagtgacacgagtagccatcccatcctagcgagtgtccatcttatcaagatgctcacccacaaatgctcgaagatcgctgagctttgtgaggactctattccacagagaacaacaagcatgccttcgtggtggaggagatggggtacgtacatcaagaacaggtggtggcaagtcttgttagcgaactcactgaccattaacatcctttcgataaccaaaggaggtaacaacaccggcaccaatggagaaagaccttttaaccttgacatatggttcatcctccaaaggaacattggattgatgacgacatagagtatcaaggcggcgatacatgagaggtgcattgacccgttatgccctatgc

SEQ ID NO: 152695 - DNA, 117 bp, Glycine max
agcttgtcggccacgattgacgaagggcacatgatgacgacgttagtctctgcgtgttatcaagcttttcgtcttacagatagcctatagtttatacggactaccactcgggtattt

SEQ ID NO: 152696 - DNA, 115 bp, Glycine max
ctataaatctaagcttaacatcagacccctccaggtgtctgaactacttcacatttatttgatggtgcctatgcaggttgaaagccttggatgatagaggtatgcctatgttgtt

SEQ ID NO: 152697 - DNA, 61 bp, Glycine max
  unsure (1)..(61): unsure at all n locations
agctntggtacctattgatggatacctaatttgttgatctaattnttagcattaacaaact

SEQ ID NO: 152698 - DNA, 405 bp, Glycine max
  unsure (1)..(405): unsure at all n locations
agctncacggcacgactgttaggattaatgcaatgattgctgaactacaagctctacagtcgaatgagacctggaggctcactcttcttcctccacagaaaaccgccattggctgcaggtggatttacaagatcaagtatcgcgctgatggctcgattgaaagatataaagcacgtntagtggcatagggctacacgcagatggagggtcttgattatcttgatacgttctctcctgtagcatagttgactaccggtcgtcttcttcttgcccttgctgccgtgaatcaatggcatctgcggcaactggacgttaataatgctttcctccacagacaacttgatgaagaagtttatatgcaggttccaccgggattgaccgtttcacatcctcaactggtatgtc

SEQ ID NO: 152699 - DNA, 411 bp, Glycine max
tcaagaaattgtgaaaagaataaggtaatatacatatacatttagtacaaatagatatagctttacacactactgtatgattgtgataattaaaaaagaaaaagaaaaacagttttcttctagtaggaaactaaattcatacctaggtaaagttttaagaatatctaattacccatgcaaaatttcagcaaccgaggcaagatataaacattgtattttaaggataattagccactgaatgtgtccttattcttcgcacagcaatgaggaactaatccaaatgatatcagaaaatgggataacaccagtgacaaatagacaatagtactaacagcaatcaactacggaaagttaaggaatattgtattttaaggataattagacacatgtgtccttattcttcacagaaca

SEQ ID NO: 152700 - DNA, 502 bp, Glycine max
  unsure (1)..(502): unsure at all n locations
tgatctccgccggactaagcacgcgctgcacttagaaattaaccgacggctatattaccttaactattgaaataaaaataagtgctatattaatgacctttggggtaaatacaaaataacattactcacacattttaatattttgtggtggagaataaaggtggtcgcgactatagcaacttctagggccggcgctactactggtatagtataaaacttccgaccccattggccaaaggctcttcgctatgcgaaggtatgggggagggatgttatacgcacccttaccccttgcatatgcaaagaggctggtttcggattccaacccatgaccaacaagtcaccaaggcacaactttacgggtgcaccagggctcgccctcctactacttgcatatgatacttaacagaaattgcgccatcagctgccagcagaattcacatagagaagtattattaaattagatggcatcaatatacacagtctgatgagtcagcttggn

SEQ ID NO: 152701 - DNA, 454 bp, Glycine max
  unsure (1)..(454): unsure at all n locations
ttaaatcttcaaaggtagtccgtctgaattcaattcaaatcccttgcctaggattcacaagcaggctgctaactcttgctgatttggccttagcaaagcaaatcttgcatatgccgaaagactntatccttcctctataaccactggtgattccaaacgagagttgagggcagctgagtcaaatggaatccattgccccctaactttgacctcttttggtgacttgtcttcatgatcataaacatttgcataaaactcctttacaagtgccacatctattcttccctcttccaaattcgcgattntcttatgctagttcctcctgtttaactccctttgaaattcctcanagtcattgaacgacaattgcacattcctttcaggaatgatctttctgccgaagatattgtttgtgtaatgatcccatgcttcangggaagaaaatttgtgtcta

SEQ ID NO: 152702 - DNA, 306 bp, Glycine max
agcttgtcgctagagctgacccatcaactgccctaactcttttagactggtgatccctaggctcttgaccttgacttgatagaacctctttctaagcgaaggcatttgacttgatcccatgttttactaaagtgaacaaaaatcggtgcgaatcaaaactccaacatctatcatgggtggaatggatgaatgcatgaagaaatgcatatgacacatatgcaatttatgaatacgggagcccgggaaatggtctccttcttagatacaacgtcttggggtaacaaagcgcccaacgtatgtatttaa

SEQ ID NO: 152703 - DNA, 399 bp, Glycine max
tacccatcacatgtggtactaggtggcggtcgggcgatggtgcacaacaagtttttccacatccacaatgcgcgcataaacccaccatcccctgttgcccacctccaactgagctcacgtactcccacgtagcccatatcctcgtttctctcaacaccgggtccccatcaatcctcccaagcttccacaatatccaagcaaaacaacattcacacagcacaagctatcacagccaagcaaaacagagcaaaggcagaaaactctgccaaaacaccaaccaaaaatcacagcttttcccactcaaagaccccagtaacaattccttcgattcaattcgtaaaccgttggatcgactccaaaatattactggaagtctatagtgcataagcctacattctg

SEQ ID NO: 152704 - DNA, 417 bp, Glycine max
  unsure (1)..(417): unsure at all n locations
gcttctgagcatcatcaaaataggcatacttattgtgctcaggtaataattntagttccaaggaaggtggctgaacagtggaaggcaagggaaggttgacagttggtggaagagaaatagaaggatctgaacctgcacctgcatcacaatcagaattgcagaagaaatctctacacatatattacatacagtagtagactcataagaatcatcacaagtacgatcaanagaactaagatcaaagtcataaaaatcagaaagtaaatctgtacaaatatccacactatctattgcatcatcaatgatatctataaggaaaacataatgctcatgtgtaggatgtctcatgtgcctaaaaatgttgaaatgcacaacatcatcaccaaactccatggaaagagttcctacatgcacatc

SEQ ID NO: 152705 - DNA, 66 bp, Glycine max
gaaaagaccgagggagagaaatagatatatgtggaggattttattgagggaggaaaagggagagaa

SEQ ID NO: 152706 - DNA, 172 bp, Glycine max
  unsure (1)..(172): unsure at all n locations
gcagcttgctacgattattgtcagacnataattatttatttaaaataaatgttgttaaccgattgtcatagagtatgctaattagttatagtattatatagtcagggatgcacaaatctctccccaagcaatttttcatttgtatctgctctcacagcaccagtagtgttgc

SEQ ID NO: 152707 - DNA, 106 bp, Glycine max
ttggcagagagccagaaacaataaatgatgacgtttaagctaatattagaaagaaaaattgcaggaagcgaagtgatcctttttatggctacataccaaaaacccc

SEQ ID NO: 152708 - DNA, 372 bp, Glycine max
  unsure (1)..(372): unsure at all n locations
gcacctgccgctgcagcttggacagtaaatggaatggtagccctccatacatggtaatattattcaacggacccatactatgattaaaagacactgaaactggntctcgaaatgtgatcccatttgatcgttgcatcgagattctgaatgttctttccaattctatttcttttctcacttcatcttccaggtctcgttgttgtgcaaatgtcatctcgcgagcaatgatttctctcctgattccttccttctctagctctcgccatattttctctttctccaactctcgttggaacacttcattgacattgatcggcatggccattagaaaaactctaggcactgaaacatttctgggaaagccacctgata

SEQ ID NO: 152709 - DNA, 438 bp, Glycine max
  unsure (1)..(438): unsure at all n locations
nngggaataatatntaacaactgtagtattgaacttaacccacaacaagtttctagttatatgaactaatatatgtgtcacttctaatgtttctatggctgttacttttaggtaaagactgggaagaccagcttggagcaaatatcaagagtttattggaatcaggtaagctaaaagctaatagtcttgtccattcttttttcttatccatgcacctttatgtacttgagaatccctaaacatacatgtaacaataatttttccccatatgtaaaataacttgacaccctcgaacttctcaaagtcattccaatttctattcgattcgccattggtactggtattttctacagattatgctcctgtcagtgttttgtacaatcaattgtctggagttcctctattattcatattcccaatatgaatatttaaaatgaa

SEQ ID NO: 152710 - DNA, 451 bp, Glycine max
atcctcttagtcacctgccgcatgcaagcttgaaattgacaacggaagctctccagaatctcatatggtgataacttatcacacgaaagtctgattcaggcgcatagtatatctagaccctcgaaattaaacaacgaaagctatcgagaaactcatatggtcataaattgtcacacggaagtccgattcatgcgcataatatatcgagaaggttggatttgaaccaccaatgctctcgagaaattcagatggtcataacttttcaaacagaagtccgatatatgcgcataatatatcgagaacgttgaaattgaaccacgaatgctctcgagaaattcaaattgtcataactcgtcacacgaaagtccgattcaagcgcatactatatctacacgctctgaacttgacaacgaaagctctccagaaattcatatggccataacttgtcaca

SEQ ID NO: 152711 - DNA, 377 bp, Glycine max
  unsure (1)..(377): unsure at all n locations
ggccgccacggagttntccgactatgctcttgtgtggtggaacaagctacaaaaggagagagcaagaaatgaagagccaatggttgatacatggacagagatgaaaaagatcatgaggaagcggtatgtgccggctagttactcaagggacttgaaattcaagctccaaaaactaacccaaggcaacaagggggttgaggagtatttcaaggaaatggatgtgctcatgattcaagcaaatattgaagaagatgaggaggtaactatggctcgatttcttaatggtttgactaatgatatccgtgatattgttgagctgcaggagtttgttgaaatggatgatttgcttcccaaagcaatccaagtggagcaacaat

SEQ ID NO: 152712 - DNA, 153 bp, Glycine max
agcttgttcttgattattcctgagttctgtaacttgcttagaacaataaacttggccttctcttatttgtctttgggcttggcgaccacgatcaacaaagtactttcggcacctactatatgttgactcgaccaacggcgttattggaaagtt

SEQ ID NO: 152713 - DNA, 246 bp, Glycine max
  unsure (1)..(246): unsure at all n locations
gcttccttttaagtgcgtcancgtttaanaaccgagtctctgatggtggtggcgaagcctttgatggtaccctcggcgggaagtgaatggnggaacatcgacacttcctcattcagaatacnggcccccacactttgcaatggtgtgtatttcaaggtaatgggatataatatccctgcctatatgcttgcctcttgggaagaaccttggattcatgcccctgggagtggtcccttcaacgattca

SEQ ID NO: 152714 - DNA, 368 bp, Glycine max
  unsure (1)..(368): unsure at all n locations
actaatgtagttnctaaacaaaaatcaattgaggaagcttcgccaagtatccccattgaaaaacctttattcaaacctttcaaagttagtgaaaaggctaaacgaaaaattagggaacttagaaaaactaaatccttaattgaaggcgtaggtgacaatcatagtgaattactaaacaagaatggtagtttacttaaggtcattccagatactccccaagcctcggaaaatacttccaaaatggtaacaagaagtacctccaaattaattaatattattaatgaagatagtgaccaaaactcagataacacaactgagataggatcagtgtcagaaaagaatataaatccaattaatttcaaacactg

SEQ ID NO: 152715 - DNA, 223 bp, Glycine max
agcttgagatgaggaagtgttgaagggtgaaactttctgcttttattggtgaccacagagtggtacctggagatatgtcgtgggggtcacgagaccttgcggacgtcaggtggtgtgctattgcccaaaaccaagcttgaccaatcccgacccaacccgggcatagtcggtaagtgagaacctgtgatgtacctaaacaggcgagctcctggcagtcaacaga

SEQ ID NO: 152716 - DNA, 427 bp, Glycine max
  unsure (1)..(427): unsure at all n locations
gaggtccaggaaggtttggcggccgaaggaactagttccgctccggagtacgacagtcaccgctttaggagcgctgtacaccatcagcgcttcgaggccatcaagggatggtcgtttctccgggagcgacgcgtccagctcagggacgacgagtatactgatttccaggaggaaatagggcgccgacggtgggcatcactggttactcccatggccaagtttgatccagaaatagtccttgagttttatgccaatgctcggccaacagaggagggcgtgcgtgacatgagatcctgngtaaggtgtcagtggatcccgtttgatgccgacgctatcggccaactcctaggatatccngtggtgttggaagagggccaggaatgtatggcgcctactangcaccctttggacccagataagtncaaca

SEQ ID NO: 152717 - DNA, 361 bp, Glycine max
  unsure (1)..(361): unsure at all n locations
agctttgatatggaaattaagttganagtaaatgatggtatgtataagacatcaatcagtgtaatgaatgcagaaagttgtactgcgcctgagtgggtagcatagacaagatggccatttggtaatctaaccgtgatgggattaatttgatgatatgagtgaaagtttgttaaggaggaggaaacgtgatcagtggctcctgaatctaatatccaggaggtagagtttgctttttcgtaagataggattatacctgttgcatcgttattggaacaagataaaatggaagcgacctgtggtttggtggatgctgagtttccagcagatggctgttgtattaatgctagccatgccttgtact

SEQ ID NO: 152718 - DNA, 360 bp, Glycine max
  unsure (1)..(360): unsure at all n locations
ntgcggatatggtcttttcaatgaaaggatcaaagtgggtctggaaaaaggcaaatatgatcatccttcttggatgaatgagaaaactggggcaaatgaagaggatgagaatgatgaaggaacccatgttgaggctggcattcctacaaggacaaactttccctccagttcaaaggccacctatttaagcctgaaatcagaaatagaagtggacgttgggcttttccttgagcttttgcatttttagatatttctatagagagaaaggtccaagttccaaagagttttgagagcttttgttgtgcgaagactgacagagaactgagagtgaataggaactcattctgagacatgagatga

SEQ ID NO: 152719 - DNA, 462 bp, Glycine max
  unsure (1)..(462): unsure at all n locations
tgatgatgacaacttctganatcaagaaacacacacacacacacacacacacacacacacacacacacacacacacactttttcctagtcgatcactcacataaanttccattctcccccttttgttttgaatttatgcttatcttanaattaagttaattactcatgtgagttcttgatttaatccctatttctctcaccctttggcatcaacaaaaagccaaagtgcatatcanatttgaagtattcaaatataactaaatatccatacaacattcatggaaaaaaaatatcaaccaaatcatgaagcaagaaccatgaagcaacaattatgaatagattataaaatccacatagtcaaacaacatacttaatattngttcanataccataataatatagccaaaatacaaggctgaagatcagagtactaataatattaanatagacatctaagatgag

SEQ ID NO: 152720 - DNA, 297 bp, Glycine max
tggcactgcagatctgatctgcgtgatcctcatccacgtacattgtgtatgctccggttgagtcggtgtaccccttcttcgtgtacacaacctcgttgctaaccctgctcttgcattgcaacataatctcagcacctgcaaacaatcattaatcaaacaatacgtgttacaaactagcaacaactactaaggtaatgtttccattcacattaaatcattcaaaattaccttctaatatgtaaatttaaatatatgttcacatgtttagtctcatgccaaaaaaatgatgttagatct

SEQ ID NO: 152721 - DNA, 420 bp, Glycine max
  unsure (1)..(420): unsure at all n locations
gcttcatatatatataacataacattatgtggtaagacctaacacgccaacaaattattctcaattagttgatgaacttccaagatcccatttcactaaatttccttagntattagatacctctaaatatatgacaaagcatggatttgaatatatagataagctcatccttatctttgggatccaccttagaatcaatagaatattcaaaatagtgttaaggagcaacgaaaagaaactaagaacaatattaaaaggaataaagtgctaaccatctcactcaatgaatgaatgctntgacaacctcaatggatgcagacaaaataatcagaaattctagtactaatgtatctttagcagcttatgggtacttgaatggagaataagtgtnttttctgagcttatggctcaacttgatat

SEQ ID NO: 152722 - DNA, 432 bp, Glycine max
  unsure (1)..(432): unsure at all n locations
tttcattntgctattntccttannattttaaattntcatgttgtaatattgtcacgaatggacagtttttagttacatttctttctttnttctgctttgtattattaaatagaatttattgttgagaggaagcagagaggggtgttatcgttgagaggatgcagagaggggtgtggcaaaatgacgtaagcgggttccttttacaatctatttatcccacagggtctatttttaaacaattgtcgaagagggtctgttttttaaaggtgttccaccacttggactggcggaacccttgcttgcataaattcccatgcatgcatggttctgccagtggtgttagcgtaaatcaacccaaagggtttcgccaatcccactagtgagataccccatgccattcatcccatcatccatcaacgccatccatccatg

SEQ ID NO: 152723 - DNA, 429 bp, Glycine max
  unsure (1)..(429): unsure at all n locations
ctaaaccttgaaaacttgtgctattcattcttttcatctcttctccctttgccaaanagaattcgccaaggacctaaccgcctgaattcttttgtgtctctcttctcccttttccaaaagaacaaaggactaaccgcctgaattctttagtgtctcccttctcccttgtcaaagaattcaaaacgacacagtctgaaaattcttttgattcttcccattccctaatacaaaagtgttcaaaggactaaccgcctgagaattcttttgtatccccattcacaatgtatcanaggtttaacagcctgagatctttgtctaaacacattggagggtacatcctttgtggtacaagtagatggtacatctacttgtgtttgactgagaacaagagaangtacatctcttgtggatctgttctagtggagggta

SEQ ID NO: 152724 - DNA, 529 bp, Glycine max
  unsure (1)..(529): unsure at all n locations
cgcccatcatgattgaaacgccatctatntangtgtgactacagataactcaagctgtacggtattgcgggcaagttatgtgctgaagatntattntataaaattaattaattaattgatgtgagttaaatttgaaataaaataaagaaacaggacatccatttaccagaacgtgtcccaattaatttttgttactatttttaattacataaatgatatatatatatatatatatatatatatatatatatatatatatatatatatatataattggcatgaatcgaaaatattctttttttcttttttatcgtaattttaaactgtaaaaaagtaggacatttttttcctatagcgtgatacatacaaagttaacagttaacaattgtgtntatataatatataaatatatattaattaataatatatattacttctagtaaaaataaaataatatactgcttaatagatntgatgattaattccatcgattatatactaatctntntaatataaaaaaataaaactn

SEQ ID NO: 152725 - DNA, 501 bp, Glycine max
  unsure (1)..(501): unsure at all n locations
agtcacctgcggcatgcaagcttctggttgctgcgatgatcgaccagaactgttccctgaactcatccaagtcctcaaaggcttgagactcacagcagttaaagctgacatagccagtgttggtggcagaatcaaaagcatattggtgctttgttctaaggatagagaagacagtgtttgccttgccactctcaaacagtccctcaaatctgctgtcaccaaaattgcttcatcatccatggcttctagntgtcccgctagaagtaagaggcagagattcttcttgccttctcactgcctacagttaattatttattgcaaanaatatttttttccccactattcattgcagtatggggcaattatttgctctattntcaatatatatatatatatatatagactccccattaggaagataaaatcatgaaatattagttctgtgcaaccaattaaggcatagttaaattganaggaaaggacgcacagcatagtatgagt

SEQ ID NO: 152726 - DNA, 447 bp, Glycine max
  unsure (1)..(447): unsure at all n locations
cgcttaattatctttagaggaggataccgtccaatggaggataaaaaaatgatgttgataatcttttccttttttacatttgaaggtattaaaaaaaagtgtcttcatgacattattaagaaattaaaaaaattattaaaaatcatataatgcatttaaaaatcattggagaagacatttttatgcatttcaatgaaaatatttttctttttattttttttaaccgctgttcttaaaacattagttaatatttaccttaaaaaatgctaacaaaagatattaatgccttgttaattagaagtattaaaataaaagattgattctttntaaaatgtatatattgtttataatattttattgataatacttgtaattagtgtcacaattaaaagtagctttttataaaaattgaaaatgaaaacttccatttgaagtcagcaatgttat

SEQ ID NO: 152727 - DNA, 429 bp, Glycine max
ttcgttggcgaaaggatctatgtgggtctgagaagaggcaaatttgattatcctgctttaatgaataggaagcctgcggcaaatggagagaatgagaaggagggaggaacccatgttgtgactgctgtcccaacacgaccaaatttcctactagctcaacaatatcaatacttatccaatatcagcccttctcattacccaccaccctatcaaccaagaacactcaatcattcacaaaggtcatacctaaatcagccacaaagcccgcctaccgcatatccaataccaaacaccacccttaacacaaaccacaataccaaccggtgaatggaatttctagaaaagaagcctgtagaattcaccccaattctggtgttgtatgctaacttaactccatatctactcaataatgcaatggtagctataatc

SEQ ID NO: 152728 - DNA, 466 bp, Glycine max
  unsure (1)..(466): unsure at all n locations
nttccctcattctcacgttgcttttcttctccccttctcatccaccattgttgcccattaaagctccaaactttgctcaccatttctactccaaatcacaaaaggaagccattttcggagtcgtgaagcgcacctctacgttgtgggacttcaaatttcaggtttgggtagacttcttctcacataaattttgtgggtattgggtctttgggagatatgatgggtagttctactaggtttatgccttatggtagttatttgtgaaggaatttgttgaaagcatgctaaactcgtcatgtttgatgtgagccaaatatacccattctgttttagggttttataatgatgctttgtgatgcttgtgtgctgaaatcattggtagaaaactggtagagatgatggggagagttaacctanggttaaaagtgagaatggtagtgatgtgagtggaaaagtgaggttttga

SEQ ID NO: 152729 - DNA, 483 bp, Glycine max
  unsure (1)..(483): unsure at all n locations
gcttcacacttgataatggagacacatgaacagtgctatgtaatgacattcatggtgctccaaacaaaggtggagtatggaggattgccttgagggtccgcacttaggcaatcatgaaactcaactccaaactcgaaagtggaggacacatgaacagccctaagcaataacattcatgtggctccggaataggatgagaatggaggattgccttgagggtcctctcttaagcaatcatggaacacaactccaaactcgaaagtggaggacacatgaacagccctaagcaataacattcatgtggctccgaagcangatgagaatggaggattgcctcgagggtcctctcttatgaaatcatgaaactcaactccacactcgaaagtggagaacacatgaacagccctaagcaataacattcatgtggctctggaacaggatgagaatggaggaatgcctngagggtccctcttaagctatcat

SEQ ID NO: 152730 - DNA, 412 bp, Glycine max
  unsure (1)..(412): unsure at all n locations
agtctcacgattgtcacgtgctcatgcaacatttgttagccgtggctatatgagacatcttgccaaacaaagtcaggttaacgataactcgcctgtgctttttcttccatgctatatgtagcaaagtcattgatccagtcatgtttgatgatttggaaaatgaggccgcaattatactgtgccagttggagatgtattttccccctgctttctttgacatcatgactcacttgattgtgcatctggtcagagaaatcaaatgttgtggtcctgtttatctacggtggatgtacccggttgagcgatacatgaagatcttaaaagggtatacaaagaatctatatcgttcagaaacatctanttgtgagaggtacattgcagaagaagccattgaattttgttcagaatactt

SEQ ID NO: 152731 - DNA, 453 bp, Glycine max
  unsure (1)..(453): unsure at all n locations
agctntaggagaaaccatataaactaaggtagttcctanacaaaaaacaattgaggaaacttcgccaagaatccccattgaaaaacctttattcaaacctttcaaagttagtgagaaggctaaaagaaaaattagggaacttagaaaaactaaatccttaattgaaggcgtaggtgacaaccatagtgaattactaaacaagattggtagtttacttaaagtcattccagataccccccaagcctcggaaaatacttccaaaatggtaacaagaagtacctccaaattaatcaatgttattaatgaagatagtggccaaaactcagataacacaactgagataggatcagtgtcagagaagaatataaatccaattaattccaaacactggagaacaacctccatattatattatcaacgtccaactggccctgaccttctattagaggaaag

SEQ ID NO: 152732 - DNA, 457 bp, Glycine max
  unsure (1)..(457): unsure at all n locations
ngaaacaactcgttacataatttgatatggcttgggcaacagatttcataagtatttcgttacccattctagaaagagattgctccatccacttgttcaatttttattacacactcttctaaatgctagagaaaatcatcttaaactttcccaataaagtggtagcccaagatatttgtcatgaaaattgtaacgacctgtcttgtcgttatgatatcaccactctaaagtacgtaaattntaatttttaaatgaaaatttcattaatttgcttatgaaaaatgagagtaaatttttcgcgatatagattcaccaaacaacgcacaattatttaaatgaaatatatatatatatatatatatatatatatatatatatatatatatatatatatatatatatatatnaacttagccacactcacataatagaaaagtaaattagttcatacatatag

SEQ ID NO: 152733 - DNA, 479 bp, Glycine max
  unsure (1)..(479): unsure at all n locations
agctngaacacctattagtatttatatttcttaaataataaatgtatgacatcaactcgtcattggctcccaggttagtggattaagcaaaatagaccaatacaaactcacgggttaagtcacctaacccattgatccaaagtttacattgtcacctctacattagtgactntttgttgcctttgtttcctttaagctttntgtgtataaaaatatattttttcttgtgtgaaatatttgtttggaattcagttttaactatataataaaattgatggttaagtttaatatatatttaaacagtcttgatcatttgattatgaggacttggataaaatatatattcttcaaagttttgttaatataacttggtaaatataattctaattttataaactatganaaaatacaaaagttagatgaattcaagctcaacacaatagaacaagtaccaacanatactatcatacatttgacat

SEQ ID NO: 152734 - DNA, 430 bp, Glycine max
  unsure (1)..(430): unsure at all n locations
tctgtctgcagtagcaccaccaccagccatgttaattaatttgctctcaaacaaccaattaattctctagcctcaacgtcggtacgagcttaattagtatattaagaatgctattattagtaatatatattcagttctatagagaatgatgttttgtcatatgcttacagaccgtaatggtattgctcttgcgggaaccacatacactctagctagaaaacaagacatacatagttaattaattaataatgttaaagccggcccttggaagacaatttacatgcttaagtttcacgggtttaggtctaaataatgccattaaattatttnttttgtttggaatataatttatttattatcatttaagttgcaacaagccttggtcgttacttgtttgttctattatgcgtggagtcttattcatcgaacg

SEQ ID NO: 152735 - DNA, 309 bp, Glycine max
  unsure (1)..(309): unsure at all n locations
agcttntgaccggctgacaagcaacaatctaagttataatatctacaccacaagctgtatcattgtaataacttactcatattcttcacatttggacagacgataatatctacaccaccagctgtcctcgaataacctgaattgaaacagaataaacagcagtaatggaataaaccccatcgaagcatctgcgtaagaaacccacttggaggtgtgatcaaatatcaaaaaggaggctgctgtaaaagccacaaccatatcatcaacatagataaaaagtaacacggtcccaaaagtcaagctcggatg

SEQ ID NO: 152736 - DNA, 222 bp, Glycine max
cttctgaaccttcctaaggaaatccttgataggattgagactcaggaagatatgaactatattgaaggttggtagcaaatctttacttctacattaacgcttctcattatgtataggatacgagtgaaaattcatatctgggatggggtatttcggatgaatctttcttgccggcgttcgtcattcgatgccccatatataccctcattaaagggccacaac

SEQ ID NO: 152737 - DNA, 406 bp, Glycine max
  unsure (1)..(406): unsure at all n locations
cccgctgagttctttgttatcaccganactctaggaggaggccaagaaactactgtgtaagattttctttatttccttgntagtgttcttgatttgtgaatctcacttaaattttgagcttaatatgtggcatgcattgtgaatcacatttttaatctttatcagctaagttgagttgtttatgtatgttgtagggcctttcaaggagaaacgaagcaatgagcttatattctaatagctcanaatcacatataattctcacatttgtcattgagtctttgtgtaagggactgtcaaattttgtaattctacctaacattaccagcagttgtgtatggaaattgtntgtttcctaagattcaagccaggtttatattttctctgttagttctattgctaaacatga

SEQ ID NO: 152738 - DNA, 399 bp, Glycine max
  unsure (1)..(399): unsure at all n locations
gggtgtacgtaaaataattagcactaaagcttatattattntatgtatttatcacaatgtgcaaatgagatgattgtgtctaactttttccataacatataggcctgatgttttattttagaagtttataatctgatcttcagaatttgaaattttttctttacattcttatcaaaggaacgtcgttttaatcaggtagagtacaattataaacatataaattacaaaaattaaatataacattntatggtttatgatgatgagtgagatgtggtaatgggagagcaataaggaaagcattntggatccacanaacaggacatgaagcttcttgcaagttttcaaataatcccttcacgaatcggtttgggatctttgcaaatttcttgtctcanatcc

SEQ ID NO: 152739 - DNA, 69 bp, Glycine max
  unsure (1)..(69): unsure at all n locations
agnttattgcttatgttaagttattacatcattcatcccanatttctacctttttttttggaggggggg

SEQ ID NO: 152740 - DNA, 440 bp, Glycine max
  unsure (1)..(440): unsure at all n locations
tgcccaagtcagcaacatacacactgtgtatattgtggattctacaataaaaggtaactttgaatacttcacagtcatgaagtgtctaccaatctctgttaagatagttgttacaactttatttaagcaaagaaatagctcctttccttaaacaccaaaacagaagcaacaaaagttagcaaagcaagaaatacaaccgcgaaccataaaatagtgctcttatagattcatgattcttaatattttcaggtgtgttaaaaacgatttttctgaaaaatttgtcacaaatcaagcttgaaccagagaatcaccacgcgcagataattaactgcacattaggtgccgtagctatcgagataaagaaaagtagaggctattgctcgagaagaanagaggaaaagcttatgaacaagaaagcanataaattgagcaaaatgatc

SEQ ID NO: 152741 - DNA, 313 bp, Glycine max
tctcctaccactgccttacaatagtcatcaagcaatatgttggcagccttcacatctctatggattatctttggatcacactgctcatgaacgtatattagctcccttgctgctcctaaggcaatttgctttcttgtgccccagtccaacactggcttacctgcaaatatccatcactggtatatggatcagccactcaacttacatagcacatgcatgttcattctagttctggttacataaacttctctatatgcacctttgagaagaacataagaagttagaatcaatttatgtaccttagttattggag

SEQ ID NO: 152742 - DNA, 336 bp, Glycine max
  unsure (1)..(336): unsure at all n locations
tgtacgcacatcgttcgcgtgtatgatattcactccacaatgttcgaagtagaggagagcttcaaccctataacgcaacgtggcagacaaaagtgggcagtaaacttgaatggtcgtcattgtcaatgcggaaggtattctgcgcttcactatccatgttcacacattattgcagcttgtggttacgtgagcatgaactactaccaatatatagatggtgtttatacaaacgagcacatcttaaaagcttactccgcacaatggtggnctcttacgaatgaagcggctattcctccttctgatgacgcatggacacttatccctaacccaactaca

SEQ ID NO: 152743 - DNA, 252 bp, Glycine max
agcttgtctcgctaagcgataatccacttttggctctaaacacgacttttcgcactaagcacaatttcctctcgggttgggatttgcgttgagtgtgacaattgatgttgagcacaattcattttgcgttgagtgcaataattcgcgttgagtgcaacctttcatcccgagagcaattccttcttgggttggaattgcgcttagcgtgcttctcgtgctaagagagatgtaaaaaattgttgttctaaatcc

SEQ ID NO: 152744 - DNA, 254 bp, Glycine max
  unsure (1)..(254): unsure at all n locations
tgagatgaggaagtgtagaagggtgaaacttcctgcttttattcgttgaccacagagtggtacctggagatatgtcgcggnggtcaggagaccttgnggacgtcaggtggggtgctattgcccaaaaccaagcttgaccaatcccgacccaacccgggcatagtcggtcagtgagaacctgtgatgtacctaaacaggcgagctcctggcagtcaacagataaaaggaacaaagaccacaaagcatggaggctt

SEQ ID NO: 152745 - DNA, 402 bp, Glycine max
tgcagcttggttaatattaggccttgataatcaataaagcctattggaaattaatatgtaaaaggtagtgactaaaaatgcaaaattacactttagtttttcataagcataacatccaatacaactcataagtttataattagtcacataagtttttcataacatatcacaagtcacaactaaaataaaagaaaacagtccaagtgtgcaattatagaatctagaattcttgatatttagactagcaccaaatcgctaattttttccaaataaaaacacaaaggtagtaatagagatggtgaggggcacttgatgtgagagaaaagcttatctctgctaagcctcaggccaaagtccaagggtgaatatggagagatcaaaagttacagagcaatgggtata

SEQ ID NO: 152746 - DNA, 433 bp, Glycine max
  unsure (1)..(433): unsure at all n locations
tgatttagttntcgctgacgaaaggatcgaagtgggtctgataagaggaaaatttaattatcctgcttgctgcttggacgaatgagaaaactggggcaaatgaagagggtgagaatgaggaaggaacccatgttgtggctgccattcctacatggacaaacttcccttcagcccaataatgtcatcgctcagccaatatcgacccttctcattacccaccacccagtcatccacaaaggtcatccctaaatcaaccacaaaacccacctaccacacaaccaatgctaaacaccacctttagcacaaaccaaaacaccaaccaaggaagggaatttgcagcaaaaagcctgtagaactcaccccaattctggtgtcctatgctaacttgctcctttatctacttgataatgcaatggtagcgatcacccctact

SEQ ID NO: 152747 - DNA, 111 bp, Glycine max
  unsure (1)..(111): unsure at all n locations
agaggtaaatgacatatgatcatttctcctacttgctgttgcacttttggctatttttgatacctaaagntttcattncgaatttaattacacgatgatgatgctggatga

SEQ ID NO: 152748 - DNA, 402 bp, Glycine max
  unsure (1)..(402): unsure at all n locations
agctngcgaataattaacacagaatngtacaaaattcttatgatacatgatcaaatttatcaaaaaanataataatgacccctgaagctatcttggtgacagtgacaataagttgagccttgtgcagcaaaacttagtgttgagtgaaggatgacttgttgcttgtgaattgacttaaccagtttttgacagctttacctttggcaatgaagcagccattgttcttcctatcaaccttcaacggactccccattttgaccatcatcttctgaaccaacactctcaccggcgactctcctctgacactgctatgctttcccaacccacanaccaccgtaaattccgcaggaactccataattggaatcattcaaccttcttccatctcctcaaccaaagcaca

SEQ ID NO: 152749 - DNA, 116 bp, Glycine max
  unsure (1)..(116): unsure at all n locations
taatacagtagtctttatttactttcaaattnttttactgttatggtgtctgtattgattntgttttggattgtattttcggagtttgctttgtctttaattattgattatttgat

SEQ ID NO: 152750 - DNA, 303 bp, Glycine max
ccaacgccagctctgaccactgttctttctttccgcgatgcttcttttcatgtccgccggagtgggcttatagcctacaccatacttgccacgattaccttgtgttttgatcagactagctatggcgccattgtctttgcctaaacccattcgcgggtcataacgggtgctcaacatcactcgggctctcattacctccaggtatgaccgacctgctgcagcgacacgtgcacctcaggaggaaatgctgaccacctcaaaagactggagagcgggttctaacgattcttctgcggttccaca

SEQ ID NO: 152751 - DNA, 180 bp, Glycine max
  unsure (1)..(180): unsure at all n locations
actaagctttgcgaattattgttcagcgctaagcctggcctgtcangctaagcgccacttttcttttctaagttntccttgaataaggctaagcgcatttgtgcgctaagccctttgttgtgtgtgagctatgcgtcttgctgcactaagctcaactccctcactggtctttaagttttt

SEQ ID NO: 152752 - DNA, 289 bp, Glycine max
  unsure (1)..(289): unsure at all n locations
agcttcaacanatgttcaccagaaatcctaagctatcaccatcaacctctaatgacattagtttctttttctttgttnttcttccataatcattttccttttcattctttcattgtgtggtgaactcctttccatggtgaagcatacactgcaacaatctttagcccaagatatggagtttgattctaaacgtaagttgacttttctttaggaaaatatgcttcattntttatacaacatcttgttctgttgcaacatacattacaacctnttatatatatatatatat

SEQ ID NO: 152753 - DNA, 436 bp, Glycine max
  unsure (1)..(436): unsure at all n locations
tcttagatagcaacttgttntgtgctagtaatgcatcttgagaggaaagctccaggaagcttctttttgtgggaatatgagtccgatcacacaagatggcatgatcacttgcagccatgttctcaataagctccatggcttcttctggggtcttcaatttaatttttcccccagcagaagcatcaaataactgcttggactgtggccttaacccatctataaaaatgttgaactgaattggttctgaaaatccgtgagtcagtgttttccgcagcaagctatggaatcgttcaagtgcttcgcttagagactcatccagaaactggtgaaatgaaaagatggntgcttttccttctactgtcttagactcggngaaatatttcttcaaacatttctccaccaattcatcccatgtcttgagactgtntcccttaaa

SEQ ID NO: 152754 - DNA, 434 bp, Glycine max
  unsure (1)..(434): unsure at all n locations
agcttcatgactagacatgacttctatgacaaaactacaataggtggacaagtcgctctagatttgtgaggttttcttctactttaatatttttgtaagaattttatgatttaggtttcagccacaaaaaataacaagacaaaactcanatcatttgttcatgagtgtatgaaattcttttagcctattatttgatttgagtcaaatctttcatgttaattagtccttaacatgttcatgcaaaatgcttagagagtctttgattgtgaacctttgcttgaacttttatgcttccttatgattgcgtctattgtgaatatgagtcttggtgattgaattgctggctgaaatgttgatcctaagtgaatattgaactcctataactgtcgtaaacagtcctagtgagttcaacatacatatgaagggtgaaagta

SEQ ID NO: 152755 - DNA, 376 bp, Glycine max
  unsure (1)..(376): unsure at all n locations
ngaagctcaaggaaaagcttgaagaagttntggctattacatgcccaactctcttaagtggcatttgtattggttgttatcttnggtgtttcttcttagtacatttgatatttgtattgcatcatgcatcatcatggtttgtgtgaagaaaagtttctaagttagaaaaatttcttcagaggcaaaaacactattttaatcgattacaaccttattgtaatcaattacgacaagctgtctgaagcttatagagttgagtctcgtatcaaattaatcgattacagctatctcacaattgattacattattgttcgagacaatgactgatttattcaagagtctctgctttaatcgattacttctttctcgtttaagt

SEQ ID NO: 152756 - DNA, 415 bp, Glycine max
  unsure (1)..(415): unsure at all n locations
agagatacaatctactcttggatttgcattaaaanaaaatctttgcatctatctttcttctgctccctgcctgaaaacatgcatgtatagcctggtaattggtcaatgtctttgctaaagattatctgggctgttgactcgaagcttttctaatttattcaataagatgcatgaataatttaatcataaatcataaattccatacatgatgtaattattcatgtatcttattgaatatatagatcttatggttatttcatataattagttaattaactggtgattattttctgaccaagcctggtgattatttcatacgcttacgtaattaactgattctgttttatattttatttattaattcttcataatggagatgaantctacacaattcatgtttgaacacaggatgcat

SEQ ID NO: 152757 - DNA, 455 bp, Glycine max
tctttgagaaaacttccttgagaagctagagcttagctacactcacccctctaataactaagctcacctccttgagaagccttcttgagaagattcctatagaagctagagcttaggtacacacacctctctaatagctaagctcacctccttgagatgaaaagctagagcttagctacacaacccctataatagctaagctcacccccatgacaaaatacatgaaaatacaaaaaattccctactacaaagactactcaaaatgtctcgaaatacaaggctaaaaccctatactactagaatggccaaaatacaaggcccaaacgaaggaaaaacctattctaatatttacaaagataagcgggctcatatttagcccatgggctcaaaatctaccctaaggctcatgagaaccctagggccttcccttggatctctggcccaatctacttgga

SEQ ID NO: 152758 - DNA, 349 bp, Glycine max
gcgagctctgaccactgttcttcctttccgcgatgcttcttttcatgtgcgccggagtgggcttatagcctaaaccatacttcccacgattcccttgggtttttatcagactagttatgccgccattgtctttgcctaaacccatcccgggttcataaccggtccccaacataactcgggccatcattaccgccgcatctgacagacaatgttgcccaaagagggaatccacggaggaaatgctgaccacctcaaaagactggaaagcggtttctaacgattcttctgcggcttccacataaggcatggaggatgggcagcttaccaagatatcttcctcgcctgacac

SEQ ID NO: 152759 - DNA, 106 bp, Glycine max
gctgatgagtactattgtggagatgattgaccattctcaaagccaaggaacatatggatgcgtattttgaaatgatgagatcattatccaacaacatgaatttatc

SEQ ID NO: 152760 - DNA, 358 bp, Glycine max
  unsure (1)..(358): unsure at all n locations
agctttgccaaataaacaagttctctattgttgatactcagatcattccattttaattntaaatacttggcgacccgatgcgcttgccggtatatcacttctgctttgatgtaagtctttgtaaatttaagaaaaaggaactgtgtggggagacgaacagtaccacattgcatttgagagttgaggtcaggtacatatatcatactaagcatgagtgattgaaactatggacgaatgatgactactctgtgagtgtatgttggactaatggatggttgcgtatgtttatgggatctgataatgttttcttactaattattcgagttttgtattaacttcttttataataaactcaccc

SEQ ID NO: 152761 - DNA, 435 bp, Glycine max
  unsure (1)..(435): unsure at all n locations
tatccttatggcttgccttcggacttcactccccgtaccaccccggaagatttaagccaagcccctactttcgaggggcagctcccaccttatgacgactatcccgggcaagacgatgaggaaggagatacccatctcggtcccctgctccacctcaaagatctgtccccccatgaactaccccaaccaaacatagtccgccatatcccgacttcacccacactcgtaaaagaatctgttcccttcgtggaacataagggaaagattgaggcgcttgaagagaggttgagagcagtcgagggcctcgaaaattacccattcttggatctagcggacttatgtctcgtacccaatatcgtcattcctcccaagttcaaagtaccggactttgataagtacaaagggatgacatgtccganagggcatcttcggatg

SEQ ID NO: 152762 - DNA, 187 bp, Glycine max
  unsure (1)..(187): unsure at all n locations
agcttgaataggtgtcgcgttctactgaactatatatattntggtggntttgcaatgttgctatcctagatttgntattttctctcttggatattttagcgtcgacatagtgtaatatacaggtatgagcttatcaagatgaatcattttaggggattatcacttggcattgttcagctattctcta

SEQ ID NO: 152763 - DNA, 333 bp, Glycine max
  unsure (1)..(333): unsure at all n locations
nttaggtggagcatattanaataaactaagttcatagaaaggtaataagacaccttcataagcccaaatgagatcttctaaacaccctctttatccatataactctcaaagtattacttaacaaaatttcaatgaatccttcaaatatgggaactgtcatttcaatcaaagaaaccaacaaagtccaccataaaaaagctgtcttcactctttagactgttttacaaattcactagaaaatattctacgaagaagatatcatcatatgatgtaaagcgtgctagttaactatgcaatgacacaagccgtccaaatgcacccattttaagatct

SEQ ID NO: 152764 - DNA, 315 bp, Glycine max
gatgatgcagatgggtttgtagctacctcatgcactcctctaatgactatggcatcatttctggcactaaactgctgggagttggaggccatcttctcaattaaatttctggcttcagcaggagtcatgtctccaagggctccaccactggcagcatctatcatacttctcttcatattactgagtccttcataaaagtattggagaagacgctgttctgaaatctgatggtgggggcaactggcacatagtttcttaaatctctcccagtactcatacaggctctctccactgagttgtctaatacctgagata

SEQ ID NO: 152765 - DNA, 303 bp, Glycine max
tcagaagaaagtgatgaggtacaagctctaaaggcagagcttgaaagagcccgagtagtcgaagagaagttcaagtccatagccatcaaagtctgaaaagagtatgatgaactaagggacgtcaatatggccaccgctgaagccttggaacgagaaaccaagaaggcccgaaaggaagaacacgtgcaagcaaagttttgaggggctttatatggcagcaatagttagctcaagctcctaagaggtgaaaggaatcatcactggttaaaggcatgatcttgaaagacgagctaaaggcttacc

SEQ ID NO: 152766 - DNA, 246 bp, Glycine max
  unsure (1)..(246): unsure at all n locations
gtttaaccatgtagggtaggaaatttttttctaatannccataaaaacgcgcattgtaatgtntttacacagcttgcaacaacataaggccaacaagcactgctgcaaactgttaaaaatacaaatagaacagtgttgcttcaaacgacagagggctaacagtgcaatgtaatcaaaacaacaaagctacgctgtcttacaaagaactaaaagctaactgacatatccctaccaanataaaaaagc

SEQ ID NO: 152767 - DNA, 413 bp, Glycine max
  unsure (1)..(413): unsure at all n locations
tacccatcacatgtggtactaggtggcggncgggcgatggtgcacaacaagttttccacatccacaaatcgcgcataaacccaccatcccctgttgcccacctccaactgagctcacgtactcccacgtagcccatatcctcgtttctctcaacaccgggtccccatcaatcctcccaagctgtcccaacatccaagtaatacaacattcaaacagcacaaactatcacagccaagaaaacagggcaaaggcagaaaactctgcccaaaacaccaaccaaaatcacagcttttctcacttatagaccccagtaacaattccttcgttccagttcgttaaccgttggatcgactcgacaatattactgcaagtctctagtacataaacctacatnttgaccgttgggatctact

SEQ ID NO: 152768 - DNA, 446 bp, Glycine max
  unsure (1)..(446): unsure at all n locations
cgcctatctgatgcaacagtaatgatggcccgagttatgttgtggaacggttacgaacccggaatgggtttgggcaaagacaatggcggcataactagcctgataaatgccaaaggaaatcgtgggaagtatggtttaggctataaacccactcaggcagatataaagagaagcatcgcgggaaggaagagcggtggtcaaagctcgcggttgagacaagatagtgaaggaagtccgccctgccacataagtagaagctntataagcgcgggtctgggagacgaaggtcaagtggtcgcaatatatgaagatgatgttccgagtacattggatttggtacgaccatgccctcctgatttccacctggggaattggcgagtggaggaacgccccggcatttacgcaacgagcataatgtaaacctttatnggtntaaaagctctata

SEQ ID NO: 152769 - DNA, 206 bp, Glycine max
  unsure (1)..(206): unsure at all n locations
aaatagaagtttttttcttccaaantncgcctttgcccattgactttcggggagacaggaaaaaccttacaacagatcctcaacagtgattggctgtaaattaacttgaagtatttttcatctattcaatagattgatatgatgagaaaataggatgacttctaattgaataaccatgtgaagatcactactgatcacattaaatg

SEQ ID NO: 152770 - DNA, 426 bp, Glycine max
  unsure (1)..(426): unsure at all n locations
cgttcgagcttggctgangctggtgtgtcaaagttaagttcctggcagacagcaaggggtggtgttggacagagccatagcagtggtcaagtggagcaatgccctcagtgtggtgctaagttttcctcagttactactttggttgaccatgtgcaaaaagttcatgaaaggagtcgcaaccgatctggagcaaaggttacaattgatgtttgtccaaagtgtagtagaggatttcgagatccggtggccctagtggaacatgttgagagggatcacggtggaagttctagatcataggtacgagttgctattggtattgaaatgaatttaacttgaagaaattgncatattttgctataaatagtctggaggaatatagtggttataaacatgaatttaattggaatacatcgagagtgaaacatt

SEQ ID NO: 152771 - DNA, 285 bp, Glycine max
gtataacccttcagtttcaatccagagtctccatatatgaggaatgggtctttagttcttcttaagtacttaagtatggtcttaactactttccaatgttcctcaccagggtttgcgtgatatcgactagttacacctagtgcataagcgacatcaggacgtgtacaagtcatggtgtacatgatagctcccactacactagcatatggtattctactcatgcgttctctttcttcaagagttgttggacaatgttccctactaagagttattgcaacgcctaca

SEQ ID NO: 152772 - DNA, 418 bp, Glycine max
agctttgtgccttgaaacacttcattggtgtgcccaagcctcgctgccctaatacttgtcagtgttgcaccgtcgtggcttgtcccttgtgtcatcgtgccgcaccaccactgtcatcatctagcttgggtcaccgtcaacgaacaagctgtgaaccctaactctcgcatttgcctttgccacgtcgcgacatcgaaggtaagaacccacaatagtatattgcataaactaggtaaaaggcttcaatgatatatgttccgtaattgtatgcttctgtgtgcagcatgtatattttgggaatacattctaagtggagagtacaaatcaaaggatcaaagttgataacaatgtagactcaccttatatattgagctaaatacatcatggctcaccttgaagtctatcataattacagaaa

SEQ ID NO: 152773 - DNA, 460 bp, Glycine max
  unsure (1)..(460): unsure at all n locations
tactaaaaaagcccattattgtcgtatcttgctttcattgacaacctagnttntgttggtgaagctacaatggatcaagtagaaatgatgtttgaattccttaattacttgtattagatctgggcaagtaaacaacaaggacaagacgaaggtgttcttttataaaaacataggcgatatcatgagaatttagattaatggcaagttgggttttggtaggaccaatgacatcaacaagtatttaggagtcaatatcaatcatgggagggtttccaaaaaatccttgcatgggatcattgacaaagtctagaagtggctcagtgtttggaaaaagaggtcattttcctttacgaggaggttgacattaactaaggcagctctcaatgttcttccatcctacaccataagccatcgcacatcctttattcagctngtgatgagttagacanaatatgtcatg

SEQ ID NO: 152774 - DNA, 279 bp, Glycine max
  unsure (1)..(279): unsure at all n locations
ggactaagcacgcgctgcagctcttgcgaaaaaatatggcttgttgaaaaaagcgcatgcggctgataatatccggcggggctatttaactaccgatgtcggctattggtttttctattccaccccttgattatatttggatgatgcctattangaaatgttcggtcggggtcatccggtcatgcttctttttgaggcctcaatctgtcggctttcctagcccgacgacgtcagctagcatttttttcgatccatatctgtgtgaatcatgtttttttt

SEQ ID NO: 152775 - DNA, 408 bp, Glycine max
  unsure (1)..(408): unsure at all n locations
tcaacattcaatttcgagcgtctcgatatattacgagcctcaatcagacatgcgagtaaaaagttatggccctttgtattggatcagagcttcaacattcaatttcgagcgtctcgatatgttacaggacttcatcagacatcagagaaaaaagttatcgtccgttgagttggctcagagattcaacattcaatttcgagcgtctcgatatgttacgggactcaatcagacatccgagaaaaaagttattgtcgattgaattggctcagagcttcaacattcaatttcgagcgtctcgatatgttacgggactcaatcatacatccgagtaaaaagttattgtcgtttgaataggctcagagcttcancgttcaatttcgagcgtctcgatatgtacgggactcaatc

SEQ ID NO: 152776 - DNA, 420 bp, Glycine max
  unsure (1)..(420): unsure at all n locations
agcttctccttccatggcttattctctagtggatgacacctcctctcacctcttctcctttatcttcagctgcacctccatggctgaaaatcataattgagggaccttattgaagctcaaagatccatcctctaaataagcttctcaagcaagcttccatcaagtggtaatcagagcacaagagcttcaagtaggtgcaccttaaacctccattaattnttagctttaccttctcctccattggtgtgtcttcatttgtctccatgtatctcgtcacatgacttgtgctgaatgttgttaacatgattttttagaatttccaccaattaaactctctatagaagctagaattgatgttctatggttcancattcatattaatgttcttgaccatgaatcgtgttgagttacgctccttcg

SEQ ID NO: 152777 - DNA, 411 bp, Glycine max
  unsure (1)..(411): unsure at all n locations
tctctgggaccttatgcaaaccttcaactcatccttcaagatctaactgtctactcgtgattggtccctttcctctatccgaagcttaagctcgttgttactgccccacagagcccctcgaaatttgttctggccatgttcttccctacgagcccttttggtctcttgttccatggacttggtggtagctatatttacatctctcagttcggcattctcctttcagatcttgagagctngtgatttgaacctttctttgactgttcgggcttgctcgagttctgccctaagggcctgcacctcttcgtcttcccctttagtggttctcaaactcaagagccaatccaaaccttgcatgtgggctttcaaccacttacgatagccaccgatgggcccgttgtactgcctttg

SEQ ID NO: 152778 - DNA, 388 bp, Glycine max
  unsure (1)..(388): unsure at all n locations
ttgagctggaacctgttacagctaatagcttcaggaggataagattatgggtggtttatatgatgcttcttctgaaggcccaaatactactaagttacaggttgttgaggggactattaacaaagaaggaaatcagtttgaagactgcgaagaggccaaccagcaatgggttcttgcgcagtccatgggcctgaaccatgtatcagattctgaaggtatacactctttctcagctatggagtctcgggacaggaaagaagcttaaagatgggaaacagatatattcagagatgaatatcttgtcctataacattagggggctgggtagaggccttaaatgggcttctatcanngaattggtgggtaaatataacatagatcttctgtg

SEQ ID NO: 152779 - DNA, 316 bp, Glycine max
  unsure (1)..(316): unsure at all n locations
gaaatataaatcatattattgctctccatgttcttaaaaaatgtagaccgataattaattngtaattactttctatatttttaaaacggtatgacttgtccgataatttatagctgtactttatggataacttatttgagcttgtggtctaaaattgattgttctatgtcgtaataattttaagaattagaattaagttgaatcaaataatttatttgactacatatgctgcagttatcatttttttatgtattatatggatatgaattgcaagtatacaaaagtgatgttatacgtttttaatatatacggctat

SEQ ID NO: 152780 - DNA, 452 bp, Glycine max
  unsure (1)..(452): unsure at all n locations
ntngatatatctatggaactatatactcttatctggagaaactgagtaactcaagtccatgcggagacaatgtcatttataaaanttgtaacttgtgacaacattagtatgcttgccaaaagtctaacaagtttatgacactgttgtcggngacttgagttgctcacttagttctttcatattttatttttcagctttatatgccattttccttacttttatggttttcttattttgattttgtatgaattctctctttttatatttaatttttgccaacctcagtgcttacgatttattgtagatttctctttttcctttatgcgaggtaaagttcctacagataaattgttatttgatctgaaaatttcctagactaaaaggaagaataggaagaaaaagaaacaagcaaccactaggccatcaggtgaatcttcttttattgattctcc

SEQ ID NO: 152781 - DNA, 149 bp, Glycine max
ctaactactaacagtcgtaaccaactatctactaccttctaaccatatttgactctataatgaatgagctctaatatgggtgatatctcccctctagctcgagaatgtatgtttgacattcctagcctgccgttgagaaattgggatac

SEQ ID NO: 152782 - DNA, 388 bp, Glycine max
aattctatcaatagaccttcaatctttaatggagagggttaccactactggaaaacccgaatgcaaattcttatcgaggcaattgatctaaatatctgggaagccattgaaatagggccttatatacccaccacagtagaaagagtttcaatagatggtagttcatcaagtgaaagcataaccatagaaaaacctagagatagatggtctgaagaggatagaaaacgagtacaatacaacctaaaagccaaaaacataataacatctgccctaggaatggatgaatatttcagagtttcaaattgcaagagtgctaaggaaatgtgggacactcttcgattaacacatgaaggaactacagatgttataagatctaggataaatgcac

SEQ ID NO: 152783 - DNA, 472 bp, Glycine max
  unsure (1)..(472): unsure at all n locations
gctcgtctacgatcggattgccctcttgcaacatgtgagaccaaacattaactcctcccttgtgctcaaactcattaatgttcttgatcaacatgaaacaaggatgagtatcacgacattccttaataagctcgatggtacttttggaatctgactcaactatgaactccttgaatacatgactcttatcaagctacaagccaagaaaaattgcccaaagtttaactgccaaaacagaacagtaaccaatatctacatcaaaggagaataaaactgatccaatgtgaccactaagggctcctccaactgctgcctttctcgaagctatatgaacaattgcatcatagttcaatttgaactggcttgttggaggagggaatcacttaatgctaaagctagtcacagattaacaatctgaggaaccaaactctnttggcacttcatactctctaagatagcatcaacctggagc

SEQ ID NO: 152784 - DNA, 407 bp, Glycine max
acaccactatataatgttccagcgctgccacacaagctgacacaaacttaacaagcatcaatttctgagcgcagagcataagctgcgctttgaggccatctagggatggtcattcctcaaagagaggcaggtccagctaaaggatgatgagctccctgactttcaagaggagatagcccacaggcactgggcatcacttgtgacacccatggctaaatttgacccggagatagtcatggagttttatgccaatgcccagcctaccaagaagggagtacgagatatcactcctgggtgaatggccagaggatcccttttgatgcagacgccctcaattagatattaagccacccactgatcttggccgagggccaggagtgtgagtacaattagaggaggagacatgt

SEQ ID NO: 152785 - DNA, 429 bp, Glycine max
  unsure (1)..(429): unsure at all n locations
gcttaccacctcgaatgactggataactgtttctaatgactcctctgcggcctgcacatacagcatagatgatgggcaactcaccaagatgacttcctcgcctgatacgatgaccagatgcccttccactacgaatgtcaactattggtggagtgtacagggaataactcccactgagtggatccacggacgccccaacagacagctgtaaggggggttaatgttcattatttggaaggtaacttggcatgtgtgagggcctatctgtactgtgagatcgatctctcccctaacctctcggcgggtgccgtcgaaggcacgaaacaccattgaactcggctgtaggtaggaggcattgaatggtaatttctccagagtgctcttangcatcacgtataaactggaaccattgtcgatgagcaccttggc

SEQ ID NO: 152786 - DNA, 628 bp, Glycine max
  unsure (1)..(628): unsure at all n locations
cccgcacctcactcactntcccacctaattatctatattcctctgctggactgtctacnnncttnnnnnncnncgaacgccggccnattgagaccatcgagtaccctgngtttgactcgagttcaccngcacgcgagcnnagctaganaagantatttaacatagtaaccattaacgatatgattgagcgactatacttcgcactattctcgcgactctggaacatagtgtcgcgcgtcagtctacatccgnctggaactcatgctctctgagcgtatatttaccgaatatcttataaacacgttaatgcgactgtcgatattctggcacacctatatcaccattgtaatagacactattctgtcattcattacacatttgttactaagtgaaatacatagtacacaaggacttctactatttataattgctatagaatcatagctcgatatacttccctcactcacaacagatcatttgtgctcttattatcaggacgatattaaggctgacttgtgacctgtatattaacatcataggaacactcctcgttcgaaacacatacatatatatctatacacaaatatcaacatgccgatgaaagagaataacagaccactctgctccg

SEQ ID NO: 152787 - DNA, 715 bp, Glycine max
  unsure (1)..(715): unsure at all n locations
cagtcaacttcgtctcacgctatagcctcantantctttgcgctgnntntgatataattgtangtgtnntctcntttcaaaacnnnncnnnnnacggcacgctggantttganncccctttgannttcgaattcgatagcacatacccgagctcgcaangagaattaccatcgtagaangacctctcggctggcatcttctgatatatcttgggtagatgcgtacctacttctgtctgaacgagacgcgatctatgacagagagaagaagtgaccgaacattntcgacgtctcgatatgcacaaacctagagatctgtatcgagacgcaacaacatgaccgacactaaanaggtacgaacgtaacacactaaactagacgcatgagactacctcatgctcatgcacgaatacgtgcgatcgcgtgcctaacgctcaataacgacagtacgacatcggataaccgagttatgtcaacaagacggcgacactttcgatgtattgtaaagataccataatgtgtcctaattactgaacatacagcgcgagaagcgagtcctccatttataacgcgcatttgcggatgagctcggagcctgatcagctgcactcggtgcttcatcttcatctggctgctactgatgattttgcttctctgcagcacccttggatgacacactcctatctcgacctttctaccttcacattaatcacccc

SEQ ID NO: 152788 - DNA, 358 bp, Glycine max
  unsure (1)..(358): unsure at all n locations
tacacaaaaagaaaaggctgaaacactcaagtgtttctgctcacgggaaaggaagcgttcctcacacgccaaatgttgtatggaagatctcaacggtcatatcatggacaaatgttctgtcatgcttcagaccaaatttagagaagatccaacggttaacanaggctggggtagcgttttacccatacatctccatgtagcttccttgagaagcttcattaagaggcttcctcgagaagcttcctcgtggcttctttgagaagctttctcgagagtcttctttgagaagctagatccttatctacctaagatgcaagggttgagcgctaagtgcttgatactcacagcttagcgtatg

SEQ ID NO: 152789 - DNA, 227 bp, Glycine max
ttttttcttactctctttgactccatttttggttttcacataaagcatccatggaagctgataaaaaaaacattgttttcgggtttatgatcccattaggggtaatttttatgtgatgttttgtgatgagattgctattggagtggaggaagctccttcttggacccaaagctcattcctttatccttctttctcacaaagctctctttttgatccaatagaagtaa

SEQ ID NO: 152790 - DNA, 438 bp, Glycine max
  unsure (1)..(438): unsure at all n locations
actcagcttcttcctctcaatccacatggnggagtcttctttagggtgtgtgtgtttctcccttgtcttatatagccccctcgcaccatatttttccttccatcactccatcttcttcctagcgggctttaatttatccatgtctgcaagtggtagttcttttgcattttctggtagaaccattcgccaatgccaccatggaagatgtgaaactattcgaactacaaaaacaacgaggaacccacgaaggttattatatacttgtgcattgcctcanacagacccagataattgacaattgtttcaatggagtgaagaagaaaaccaagtctctaatccttcttctgtcacaagagaatcaatgataatggctgatttgaacctaccaattgaagcactgcagaagagaatgagaaattaacaaacattgcgttgtag

SEQ ID NO: 152791 - DNA, 394 bp, Glycine max
tcatagttgtgtagtgagaacctgcgatgtacctcaagcagaaatggtaccggcagatccctagacatgagtaacccttaccgcactttaggtaagctgtgagcggctacccacacagaatctatggggacatatgggttcttgcgcttggttactcaataccatgcgtggatgatctattagcatgtctccgaacgattactggacgtatgtataggctctggaaaccgagtaacgaaggggtggtggctagtcccattacttgagaatgcagcctgaggctatggacgtttctggcaacccatattcagcggagcaatcgattccaggcttaaacctcacgttttgacaaatatatgcacttatagcccaaaatatataatggacacccacg

SEQ ID NO: 152792 - DNA, 461 bp, Glycine max
  unsure (1)..(461): unsure at all n locations
acgagctcagacctggnaccgctctgcttactgacttgcttatgtttaagaatccaaactctggtattacattcagacggactgatatgaggatctgcttaagagagatagtgattccattaaggatgacgcatgtctgatgcatgtacactagaagcagcaggggaacacacctagggacagagtgtatacgtatgccaagatggtgagcacgatgtccctagtttactgtgagtgattgncatgctaaatgaactgttgataccgagacatgccattctgaatgcaaatatgtgcaggatgttagtagagatgcaatatgcatatcaattactacgcatgaaccaacgctaagttgttggagtacctcaaatgtatgtgaggaattggagatccatatgttgacgatatcaaccaggtggatagtcgacggcacactgtgacagtgaagtgcagttccn

SEQ ID NO: 152793 - DNA, 355 bp, Glycine max
  unsure (1)..(355): unsure at all n locations
tgatcatcctactangacgactgagaanactggggcaaataaagagggtgaggataaaggaaaaacccatgctgtgactgccattcctgtacgaccaagtttcccaccaacccaacaatatctttactcagccaataacaaaccttctccttacccaccacccaggtatccacaaaggccatccctaaatctaccacaaagtctgtctaccgcactttcaatgacgaacaccacctttagcacaaaccaaaaacaccaaccaagaagtgaattttgcagcgagaaagcctgtagaattcaccccaattccagtgtcctatgctgactngctcccatatctacttgataattcaat

SEQ ID NO: 152794 - DNA, 463 bp, Glycine max
  unsure (1)..(463): unsure at all n locations
tcaagaaaagaccaaactcttctctccaataattgatttcaggcttaaataggtggctttgtttgtgcttgcatgcttagcgctactctgaaccgcttagcgcgcattagtgaatttcggcttagcgcgtgcttttctcgctcagcggatggattgaagcagtgcgcttagcgggatgacccttcgctcagtgcaaatgcacaactcatccttcttccagattcttcctcacgctcagccgaggagtgttgcgctcagcagatggctcgctaagccagcagattggcttagtgaaaggatgaaaatcagcacttcacaaacttgcctaattaacctaaaattgagaggaaatgattattaaacgcacaaaatggaaatactaagtatttattacctatctttaacaaanagtaattacaacactacaaaataaccataaattggaggagaattgatacaattt

SEQ ID NO: 152795 - DNA, 308 bp, Glycine max
  unsure (1)..(308): unsure at all n locations
agcttgaactatanagcatctcactatttggtttcaatttgtctggggctcattgtaatgttgcacgcttgcagttcttagagagtagctgcctactttaactatattttttaagatatagggatatttcagtactttgatgctaagattgttcagtcaaatatctattgtgtaaattggcatgatgggtttagggtgaacactcagcatgtgtttcactcttgttaggggttctgtcatgttagtggctgaatatcttgatttgtagcaattgtctaattgaatttgaaccgaagtttaaactacct

SEQ ID NO: 152796 - DNA, 284 bp, Glycine max
gagagggccttcattactcctattattgaagatagtactcaactgacggagcaatattcagtattactatctgcatatcacacatcactcctgttgtcttatatttacattttatgtcctcattgcttgcaataagttcgggctcattcattgtaatgtgctcataagtggttcacttcaatgataggtaaaaaatcaaatctcaagtaccttacatcaaaactttgggaggctggagttgccatagtgaagacaactgaatttgtccaaagcacgacatcccg

SEQ ID NO: 152797 - DNA, 392 bp, Glycine max
  unsure (1)..(392): unsure at all n locations
gtgttggatcgcatgcagaagagcctcgagcttgaggattggcacatggagccttctagaatgacactttacaggtttggcaacacgtcttctaactcggtctggtatgagttggcatattgtgaggccaacgggaggattaagaaaggtgatagggtttggcaaatggcgttcgggtccgggttcaagtgtaacactgctgtgtgggttgctttgaatacgatcgaaccagggtccatcaagagtccgtggagggatgagatacataattttcctgtcaaggctgatccacttccttgtgagagaacaaatgaatgaataatccaatcatgcacatttgggtttgggaatttctgangaaagtatgtggtctgaattgattattagtatta

SEQ ID NO: 152798 - DNA, 540 bp, Glycine max
  unsure (1)..(540): unsure at all n locations
ccgctcactctctctcattctattantacatgctttctttcgtactcatgcctactcntcccaacgcgcnatgaacctgagcctctttgaccgtcgaaanacccaccnncagctgcaccctagcgaattgtcttcctccgtcaatgttcgttgtgggtctaataagaggcatacgtgatcttcctactatgaccactggacaacactgcgtgcactaaattgaaggtgaggatcataggagaacctcattgctgtgactggcatttctgctacgaccaatgtgccaccacacccatcaatatttttatctgagtcaataacataaccttcttccttactcacccacccaagtattcacaaaggccatccctaaatctacccaaagtctgttaccgcactttctttgacgaacatcacctctatcacatatcaaaaacaccaaccaagatatgattctgcacgagaaagcctgtaaattcacccccatccacgggcaagctgcccgcgtcctatctattgacaactaatgggagcctaccg

SEQ ID NO: 152799 - DNA, 351 bp, Glycine max
agcttctgcttatgtggcagggcgggctacctttactttcttgtctcaactgcgagctttggccactgcttttccttcccgcggtgcttctcttcatatccgcctgagtgggcttatagcctaaaccatacttcccacgatttcctttggcatttatcaagctagttatgccgtcgttgtccttgcctaaacccattccgggttcgcaaccgctccccaacataactcgggccatcattactgctgcattggacaggcaaaggctgccagagaaggagtccacggatgaaatgctgaccacctcaaaagactggaaagcggtggctaaccattcttctgcggcttcgcaca

SEQ ID NO: 152800 - DNA, 324 bp, Glycine max
  unsure (1)..(324): unsure at all n locations
accacttccaggcgtgctggaactacttcacatggacttgatggngcctatgcaagttgaaagccttggaggaaagaggtatgcctatgttgttgtggatgatntctccagatttacctgtgtcaactttatcagagaaaaatcagacacctttgaagtattcaaggagttgagtctaacacttcanagagaaaaagactgtggcagagagtttgaaaacagcaggtttactgaattctgcacatctgaatgcatcactcatgagttttctgcagccattacaccacaacagaatggcctagttgagaggaaaaacaagacttt

SEQ ID NO: 152801 - DNA, 393 bp, Glycine max
  unsure (1)..(393): unsure at all n locations
cagcttgtgcctttcatgtctggaatatgaatgtttatatagattcaaagaaccttatgtgctttgctgatggcttattcccgttccaaggcttcaatggtgtcttgtcttttacagacttagttggacatctgttgagtatgtaaacagcagtgtagactgcttcagcccagaatgtgttaggtagtcccttctccttgagccatcgatctaagccattntccataaattgcgcaattctttctctctgacacttcattttgttgaggagaatatgtgactataagttgtcgctcaatgcctncatcctcacaaaatctttcaaactcgcgagaggtgtactctttgccgtgatcacttcttagtacttttatctcgtttccactttgattt

SEQ ID NO: 152802 - DNA, 436 bp, Glycine max
  unsure (1)..(436): unsure at all n locations
tgctcgtctgggcgagctaggtggcaagctcctncccctatttgccatanatagggggaggagtgaagaagataagggttcagcctttntggcacttctctctctctcgaaattgctgaggaaaattatttctgtgaagaaaatccaagccgaggcgcttccgtaacgtttccgtgagtaattacgtgaagattctcgaccgttcttcaacattcatcgttcgttcttcgttttcttcagtcttcaacgggtaagtacctcaaaccgagcctttcaattcattctatgtactcgtggtggtccacattttgtttcatgtattcttattctctttctcatttgctttttatacccccttttgacgtgcttaaaccatttatttaagtcatttctcgcttaatctagaaataaaataaatttccactgatcgtttgaa

SEQ ID NO: 152803 - DNA, 397 bp, Glycine max
  unsure (1)..(397): unsure at all n locations
atcctgactcaccataaaccttgacccatggtgagaatgtcaatccttaccctcggaagcaaaaaaggaagagaaggaaaatttccaatctaaggaaaaaagagaggaaaggaaattcccaatcaaagagtgggagaaagcaaaaagaaaagaaagaaaattcccaatcaaagaatgggagaaagaataaaaatagagaaggagaagaaggaaagaaagctcctggtcaaagatcgaaagaaaacagaagaaatatgcagagaggtctttggaccaaacaatatctgaacaatacggaattgtcaccaaatgaacaaaagaaagaaaaggaaaccataacctanaagtggtcttctccctttgattaccaaccaaaatcatgtgcatcggtgacttg

SEQ ID NO: 152804 - DNA, 466 bp, Glycine max
  unsure (1)..(466): unsure at all n locations
tacccatcacatgtggtactaggtggcggtcgggcgatggtgctcaacatgttttccacatccacaatgcgcgcataaacccaccatcccctgttgcccacctccaactgaactcacgtactcccacgtagcccatatcctcgtttctctccacccgggtccccatcaatcctcccaagcttccacaacatccaatcaaaacaacattcaaacagcacaagctatcacagccaagcaaaacagagcaaaggcagaaaactctgctcaacacatcaaccaaaatcacagcttttctctcttaaggaccacagtaacaattccttcgatccaattcgttaaccgctggatcgactccaagattntactggaagtctatagtgcataagcctacattgtgaccgttgggatcgactagcaaacatccagaactcattctgtactactctttccacagccaaccacacac

SEQ ID NO: 152805 - DNA, 516 bp, Glycine max
  unsure (1)..(516): unsure at all n locations
tggcatgagccatgaatttggaccatgcgactacggacactatngatactccagccttgcagatgttggcttcacacgacgatattctcacagtgngtctttgtagaggcgaaagctcatcatctagctatgatagactctataaataaactgagcacatgaagagggtgagggtgaacgatatacccgtgctagtactgccatttctatacaaccaagtttcccaccaacccaacactgtcattactcaaccgatgacaaaccttcgtcttacccaccgcccagttatccacgaaggccatccctatatcaaccacaaagtctgtctaccgcacttccaatgatgaacaccacctttagcacaaaccaagagcaccaaccaagaaatgaattttgcagcgagaaagcctatagaattcaccccaattccagtgtcccatgctgacttgctccatatctatttgaaattccatgggagccataaccccaaccagggtcattatcttccattttccg

SEQ ID NO: 152806 - DNA, 552 bp, Glycine max
  unsure (1)..(552): unsure at all n locations
ccactcaccccctactactctcctgttctngagagaaaagatatgtatgacacacgtacctttnnnagagagnccattgacccttgaaccctgtgtccgcgaccactaaacgaccgcagcatgcagcttaacattaatttcacgttcgaaattacggactcttcaacaacgagaaacagctattgtcgtttgaaatctgctcctgagctataacattcaatatcgagcgcgcccgtctatcacgggactcaagcagaacatcctgacttagaaagctattagtctcggtgaatgtgctcagaccataaactatcatatgcgaaaggctcaagtagaccggactcaatacaacatactacgacaacatgatactcgtcggatcgaattgtgcgcttgagctctcaacaaatgatttagagcgccctgatatatgatgggactccatcacacatgcgattaagaagctattagtacattgaaatcgcgcaatgcttaaatattctatttcgaatgactcgatatattacgggactcaatcaacgtacgagaacg

SEQ ID NO: 152807 - DNA, 461 bp, Glycine max
  unsure (1)..(461): unsure at all n locations
tataaggctntgagtgggaaatgatagtgagactcaacttgtataccaaccttgtgctacaacaattgtagcaagacctagtatccataatgagagaagaatttttgtttaaaaccttgcatcttgtatgaaagatgttctctctttaggtttgggttaggtcacaagattaacttgttggatcgagtggcctcagaacaattaagaagggggggttaaattaattattcttaaacctttactaattaaaaattactcttttaaggcttttactanattgttaagagaatgaggactagaagagaaacttaacagaaagtaaaagcagaaattaaatgcacaacggatagtaaaagagtagggaagaaggaaacaaacacacaagagttnttatactggttcggcaacaacccgtgcctacatccagtccccaagcgacctgcggtccttgagattctttc

SEQ ID NO: 152808 - DNA, 533 bp, Glycine max
  unsure (1)..(533): unsure at all n locations
ccacccccatnatctcttttcctctgggataagattctacttatcgcatcnnccgagcgcgattgaccttgaaacctctgtacgccatcntacagcgaccgcagctgcaacttcaacattcaattccaaagtctcgataattactggaccctatctacctaccagaaagatggtatcgacgcatgaatatgccctgagcttcaacattcaatttcgagcgcctccgtatatcacgggacttattccgacattcgagtgaaaagttatcgtcttttgaaaattgcctagagcttatacatctcaatgtcgaatggcccgatatattaccggactcattccaacataccataaaaatgttattgtggggtagaatttgcctctgagccttcaacactcaatttccagcggctcgaataatacgggactcaatccgacacccgaggaaaaaattattgtctgttgaattcgctcaagcaaaacaattcacttacgaaggctccatatattaccggaccaatcaacaaacgaaaact

SEQ ID NO: 152809 - DNA, 463 bp, Glycine max
  unsure (1)..(463): unsure at all n locations
ntgagccaanatcctgactcaccataaaccttgactccaggtgttaatgccaatccttaccctcggaagcaaaaaaaaagaagagaaggaaaatctccaatcaaaggacaaaggagaaggataatttccaatcaaaggaaaggaaattcccaatcaaagagtgggagaaagcataaagaaaagaaagaaaattcccaatcaaagaatgggagaaagaaaaaaagagaagtaaaaaagaagaaagctcctggtcaaagaaaccagaagatatgtgccgagaggtccttggactagacgatatctgaacaatacagaattgtcaccaaatgaacaaaagagagaaaaggagaccatgacctataagtggtcttctccctttgattaccaaccaaaatcctgtgcgctagcgactttttcgccccgcactaaacaaaaacagataaggaaaaagccaacaaaaaaa

SEQ ID NO: 152810 - DNA, 503 bp, Glycine max
  unsure (1)..(503): unsure at all n locations
tgtttgaagcctttgaattgaaccatgagaacnaacctngattatacccgccgatattggaaagggatgtcttttcaaggactgatgtctctatatctcaaggacactcacgatgagcgaattattctctcagtcaccgatgcacacgtaaaattgagtctttgtaaaaatgctcatactaggtactctatgcgtgtgcatatatcatacaaagaattctatcattctaataatanaatagtctacaaatctctacaaagctcaatccttctaattccttcgtagctcacttgctgaataaacattactatccatttctaactcaaacacatgatgtgattctacctgacgacctacaccattgcgatatatggggtccctatgcccacctacatcttaggagaatacaggaatccttacctgggtagacgaccgtgcgaattagttagctatactagcaaacaaacatctgtgcttaatttttccaacaaccctcaccagcg

SEQ ID NO: 152811 - DNA, 185 bp, Glycine max
tggggggatcttattcttcatggctatctcctagtggatggccctcctctcacctcttctcgtttgacttcgctgcatcttcatggtggaaaatcaccattataggacctcattgaagctcaaagatccagtctccttacaaggccccaagcaagcttccatcatattctaaccttttcttggaa

SEQ ID NO: 152812 - DNA, 392 bp, Glycine max
  unsure (1)..(392): unsure at all n locations
gcacagtaaaagaagtgatgtatgtgaagagccttgtttctatgatctacctcggctttaccttctctgcttacggtttactagtggccacagggaacgttttctttcttacacaagcaagcggcagcatggaatcaaatatcactaccaatggtaatgatatcggtattctttatttgatcaaggagggcgtgaaacttatctcaccattcatcttctttattatcagtntcccatttcgatgctttctgagaaatttcaaagctaacgatggtaggaagccaaaaggaaatgcagccacaattgtaagaattggttttggcatggttcgtgcggttaattgcagcctcgtagcatggcatatggaggctcctggcaagaacacgacagtg

SEQ ID NO: 152813 - DNA, 406 bp, Glycine max
  unsure (1)..(406): unsure at all n locations
actttatacaagaatgaagctctgttaccacttgttagacaagtggcctcagatatcttaagaagggggggttgaattaagatattccaaactacttccccaattaaaaatctatttcactttttattcaagttataaattcccttaataatgaacttcttaaatattgattcaaataaaacaatttgaatatgaatataaaacaataataaacaaaggagattaagggaagagaaagtgcaaactcagatttatactggttcggccacacccttgtgcctacgtccagtccccaagcaacccgcttgagagtntcactatcttgtaaattccttttacaagttctaaacacacaaggacaatccttcctttatgtttagaattcctttacaacaagagacccacg

SEQ ID NO: 152814 - DNA, 431 bp, Glycine max
  unsure (1)..(431): unsure at all n locations
gagtttggagtgcacatttgaattacaaagatgtggagagccatgaaagaagcaaagcaactagtggaagggaatgagagggaacaatatgccaaagtatttgattatgcacatgaattgttgaggagcaatcctggatcaacagttaagatcaacacagtgccaagtccagaaggtccaccataatttcagaggctatgtatttgtcttcctggctgtaagaagtggtttgttgctggatgtagaccattcataggtctagatggatgtttcctaaagagtgcatttggaggaaacttgctctctactgttgggcttgatggcaataaccacatctttgttattgcttatgctgtggtggacattgagaacaaagacaattggaaatggtttctaacttctgtacatgaagatncttgggattatataca

SEQ ID NO: 152815 - DNA, 193 bp, Glycine max
caaacatgcaagcaatctttcctttgaatcaaaaccaagaagcaacaaccacatccaagcaccaataactgttgaacatgaatattaatttgaaaatgcaaaaaaacaatattatgtcacataccatgcaacaaagcagagagactcctctgagtgtagtagtcatataccatgaatttattatctttttaat

SEQ ID NO: 152816 - DNA, 379 bp, Glycine max
  unsure (1)..(379): unsure at all n locations
ccctactatcattttgtatagtggaagaatcttcatatttgagaattataatcgtgtgatcccattactaactttaattactaagtgcctatcttaacttcacgaagcgagaaagtccgagttctccctacagctctttggaaaggggttattttatccatcatgggacgtgttcagcttgtcaactcatgtatacaagggatgttaatgtacaacttctttgtctacgcttggccagcttctatcttgaaacaattggattcttggattaaaaactttgttttggctagggacgcaatgcacagganaattataattgtagcttggcataaaatctggtggccaaaagcggacgggggccttggaatccgctctatgg

SEQ ID NO: 152817 - DNA, 444 bp, Glycine max
  unsure (1)..(444): unsure at all n locations
ttctaattagagaaatgagatcatcatgttctttaatgcattctntcaaacacatattttcctagtgattgaaatttattaggactcacttgtagaatattatgtgtgtcttacttccttttgaaatgaatatattaacgaataaacgtggactctccatgactagatgtgatagacaaaccacaggaggtacaagaatggttagcacaaaattattaagtgactacttcattttaacataagaattatgatttgagttaattgacttattgattgattcatattttctaaggctaattgagttaattaagtgaccacttccttttaagtgaccacttttgtcacaagtcagacaaaatttgtacgaggtgcacaatgataaagaaacaggagttcttcaactgaataagtttttctccctcatgtgaatgcaaaaatttcagc

SEQ ID NO: 152818 - DNA, 430 bp, Glycine max
tgcaagctttattcattcgcatacaatccgctaaaggataatgggtaaaagaactgctatgttttaccatttataggatgcagtttaattgatggcaattgctttctgtacttacgaaattgcttcaattacttccattccggaagcaatatgagaagtgcagaaaaaaacaccctggattgatttgtagttttgggtcatacacaaggaattattttactttcaggaaccagtgcattttagtaatcaagtaatctccagcacaaagcctttctgcaattactgatctattggatctgcaacaagttatcattattacactatcacattaacataactattatgtcaactacacgtcctaatcaactttgatgagcatttagcattgagcttctgaacagtatataacatgaagtttcctatctcaaca

SEQ ID NO: 152819 - DNA, 464 bp, Glycine max
  unsure (1)..(464): unsure at all n locations
cgtngctcgtgtgctgagtgtgtgatgagatcgtgtagaggggtttgatggaacttatatttatattagttgagtgtggctgctagtccttgtttgtaggggatattgtagtctttgcagataattctcggcttgtagatattaatcaatagcttacatataatgttagagataaacatttgcttatagataaaaaggtagaagataatcaaaccttgtagataatgtgtgggcttataaataattattctaactgccaatagataagatattcaaatacatttgaatattagtaggttagagataacctgtttgttgaggagtccggctgttaaggttcatgcatccgtgttcctgtagcanggctaaaatggagggtggacacgtatttatgagtgccatgtacgatgccatgtgtattctgcgggtcctggacaacatataagcccctgaagctctaagtc

SEQ ID NO: 152820 - DNA, 317 bp, Glycine max
aacaacaaatataagaaaatacatccaagtagggatggcgttagaacagtgggatttgccctttccacaattcacctccacaaacccacctgtgaatactgctttctttcctaacagagaagataaaattgatactcaaccatgtcccgttatgggtatcccatatctttttctttaaaaagccatatatcaagcacattttagattgaataatacataaaaatgaatgttaagaaccttacaagataataagaaatttaagaataaaatcatatcatagctactattaagatggaagctgaactctacaatttaac

SEQ ID NO: 152821 - DNA, 462 bp, Glycine max
  unsure (1)..(462): unsure at all n locations
ctcagcttgcagaatgtactctacttaattttgaagattgtttcaaggaagcatatatatattcatcaggaaaacatcatagtggaaggaaattgcagtgttgtgatccagaagatccttccacccaagcataaagatcctgggagtgtaacgattccttgttcaattggggaagtcaatgtgggaaaaactcttattgacctgngagccagtatcaatttgatgccactctccatgtgcaaaagattgggagagttggaaataatgcccactcgaatgactttacaattagctgaccgctccattaccaggccatatggagtaattgaagatgttttggttagagtaaaacattntatctttccggcatactttgtggtaatggatatctttgaagctactgacatccctgtaatattgggaaggccattcatgttgaccgcaagctgcatagttgatatg

SEQ ID NO: 152822 - DNA, 504 bp, Glycine max
  unsure (1)..(504): unsure at all n locations
cggcgtgttgaccatggaaagcgcttatgcgtctcagctcctgatgattgaacncgatagcttcaagttgtatcgatgatttctatgatgatgactctcagtcctcgagattgggtcagattgagtcttcacaattcagaatctgagaatgttgattccagattcacgagcacgtttcactgtgaggaatcaacattcaagaatattcatgatcaagattctcgaatcaacaacagactctttcttgatacgttctaccacagctttcanaacattgactagcacatgaattcctcacataatcttttaccacagagttgttactctctggtaagcgaaaaccagtatactgtgatcggttaccaggagcaaagtttgttctctaaatgctttcgactgaatntacaacggtctaattgatctctcatggtgaattgatacaatatattggcatcgaaaccagggtgttgaacgttgaaatcaaatcaagtgtgagagtcgcct

SEQ ID NO: 152823 - DNA, 189 bp, Glycine max
  unsure (1)..(189): unsure at all n locations
taaaaggaggtttaagatatangaatataattggtaaaagataatgtangtanatatggattatatatgttaagtgtgtggatgagagttanatttnttagaatagtagtagaaatgagtagaggacaaagaatgtgttatgacataaaattntttaagggatnatgttngatgtacaaatgtgtgtaa

SEQ ID NO: 152824 - DNA, 594 bp, Glycine max
  unsure (1)..(594): unsure at all n locations
ccttcactacactcccttgtncaccccctcataccacttacgtattgtgantctttataccannctccncttttnnaaaggccgcaganttttgaccccntgantttgataccgttggacatacgagacactatggaaaaaaaaaccctacgcgcaatatganttatctataagcttggttatgcggcattttgtatatatataaaaaggtacattgcgctcttggaggtggtcaacaacgacgggcacgaanataaaacataacacttccttgggagctcttattacatgtatcatccataaactttgggccatcctctatttattagcctctcatgacgatcagaaactaaattattcattggctgagcttggataccaaacgttctctgatgtaatgacctttactatccatgtaaggtgatttcaacattagtgattactttctaaggctattatcttgcgtatggcttgatcactcattcacatgtatggtataaaggtataaacatagaaaatgattgaccctaaaacatgaagaacttctaattatcatgatacatataaactgggaatgagccatattatgcacct

SEQ ID NO: 152825 - DNA, 423 bp, Glycine max
aagcttcatcatcactccctcgcctatataggactatacgtcctcccattcggaggactatatgtcctcaccttcaatgggctacacgccctcgcctttatagggatgcacgccctcgccttaaaagggagacacgacctcgacttcagagggctgcacgccttcgcctttagagggctacgcatcctcactttcagtgggctccacatccgcaccttaagaaaatttaaggtcctctgccattaatgcttaaccgagacttgctcttccaattaacggaccagtagttttcttttataagttcttgggccacccccagatattggagggtcaccaactatgcgagcacaaccagagaaagaggctatcacgcaactactatgcatatcagggcaagaattcattcgtgccactgcacagaga

SEQ ID NO: 152826 - DNA, 442 bp, Glycine max
tctcacagataggacatgcatgatgccttttcacactatatccacttaaatttccatatgctggaaaatcattaatagtacaaaacaccattgcgtgtaatgtgaatgtctgctgcacatttgcatcccacacatctactccttcttcccacaatattttcaagtcttcgattaatggtgtaagatacacatcaatatcattccctggctgccttggacccgtgatcatcatacacaggataatgtatttacacaaaatgcacaactaggggggaagcttgtaaatcatcagtaaaacaggccacgaactatggttgctgcttaagttaccataaggattcattccatcagaagcaagagcaacccttaggttccttggctcgtccctaaactctggatacaaacaatcaattgtcttccattatggagaatcggtaggatg

SEQ ID NO: 152827 - DNA, 320 bp, Glycine max
gacagcacatatctctgaaagattcaagttgtattgaggtctgagatttgatcaaccagtccaatacactgaatatctcatagaattgcaattatttgacaggaaaaaaaacagcctaacaagcatcttaaaaacatgattctttgagagcaatattacctaactcaaaaacttatattaataatatatattaggattctccctccacccacattcttaccttaatttccctacccaaactaccaaatcatactatatatatgtgtgtgtggtatcataaatatatatatatacatatatatatatacacatatatatat

SEQ ID NO: 152828 - DNA, 447 bp, Glycine max
  unsure (1)..(447): unsure at all n locations
tttcacacagattatgttcgtangactgctcgttatgactctactgtgcatcttaatgcagatatttcaatagtatcaaagaaacttgtgtaacactaccaatttgaatatcactaacgtgatgggaccaacatacgagattgtccctatagcaaagctataagtgacaaacttcacttgtctcctaacaaaacaaacgttatagtttgatcaatgtatcaacatattatatcatgactctacttaaccattgaaattaatatgagactataaataaaaccgaacaatttataatagattaaaaataataaaagaattcatgagatactaaatacatacatcaagatataataagtggttaaaaatatatttaaccaaacaatatatgtatgttttttaagttcgacagaccagaactatagcatcaatgtcatgatcatccctaat

SEQ ID NO: 152829 - DNA, 342 bp, Glycine max
attctttgcattgagggttattgtccttagcgtaactaaccattaagtgacactgactagttgttcatgttggtgaaaactgttgtgtctggcgagatgattatggacatattcataaactcttttgactgcatattcgtgttcccctttaaataaatgtatgtccatgtatgaatagcatgcatcgtctacaaacgtgatgaagtctactgtataatatatgtaacaccgacatctactgtgcttccattgtacagttgataaccacattgtctattttcgtcgcacgcccaatatttgccagttctccgtgaatgatatccatcacctatctaatactac

SEQ ID NO: 152830 - DNA, 262 bp, Glycine max
  unsure (1)..(262): unsure at all n locations
tactcagcttgctgattacatctncccctttctcaagcaaattcttcttgatatcatcaaaatcttcatgatcccgactcgttggtggaggatgcatgaatgacaatcaattcatggcgcttcgaataaaagtggagaatggaggatatgcgaatagcgctaggcaatcaatttgcggtctcccgactcgctggtggaggatgaatgaatgacaatctactcatggggctccgaataaaagttggaaatggaggatttgaga

SEQ ID NO: 152831 - DNA, 395 bp, Glycine max
cgagcgtctcgttatattataggactcagtcagacatccgagtaaaaagttattgacgtttgaatttgctcagagcttcaacattcaatttcgagcgtgttgctatattacggtactatatcagacatccgaataaaaagttattgtcgcttgaatttgctcagagcttcaacattcaatttcgagcgtctccatatattacgggactcaatcagacatccgagtaaaaagttattgtcgtttgaatttgctcaaagcttcaacattcaaattcgagcgtctcgctatattataggactcagtcagacatccgagaaaaaagttattgacgttggaatttgctcagagcttcaacattcaatttcgagcgtgtcgctatattacgggactatatc

SEQ ID NO: 152832 - DNA, 405 bp, Glycine max
  unsure (1)..(405): unsure at all n locations
actcggatgtctgattgagtcccgtaatatatcgagacgctcgaaattgaatgttgaacctctgagccaattcaaacgacaacaactttttactcggatgtctgattgagtcccgcaatatatcgagacgctcggaattgaatgttgaagctttgagcaaattcaaacgacaataactttttactcggatgtctgattgagtcccgtaatatatcgagacgctcanaattgaatgttgaagctctgatccaattcaaacgacaataactttttactcggataattgattgagtcccgtaatataactagacgctcgaaattgaatgttgaagctctaagccaattcaaacgacaataactttttactcggatgtctgattgagttccgtcatatatcgagacgct

SEQ ID NO: 152833 - DNA, 360 bp, Glycine max
aataacaccaacaattctcgaccataattgtacgttaattgactggaaaaaccgcaaagtccttaaagcaatgaattatacctactcaggaacaacctatggttgacatcctataattacttctaagtagaatgttttcaattgatcttcaagccaagtggaagaaatagtagctgacgtaacatacatttagcgatgtataaaaggaataaggaggtatgcaggataaaatgaatctatatatatattttttgtatcaaacgattacattctcttatactatttacatgacaaagaatgcctaacacttataaaggataagaaggaattcaatatcatacaaggcatattcctgcgcta

SEQ ID NO: 152834 - DNA, 435 bp, Glycine max
  unsure (1)..(435): unsure at all n locations
ataagattgcatatntgtctaattaataaccatatcttacagtgtacagttcttatgtgtgcaagcgataatttaacatgtacactgccatataatgagtctgagcattcatggctaacacatcacgattgaaaaataaatcgtgacatgaactttcactcaacatgacaattggtaagagtgagatatatctatttaaaggctactagtcttaacgtactaataatatagcttcctgaaaaatattaaaatgatctgctatctcaaagtttaagaattaatatattggctggagatgactcagttatatatatactgaggagaaaacctatgagaagtaacaatgggtaaattaaattatcctagcttaaantgttatttactgagttaactatatgcgtgtttcgaatgaatttgntaacgcggatcaagtac

SEQ ID NO: 152835 - DNA, 271 bp, Glycine max
acactctcaaagcacaaccggcaaagctcgatcccagagcgcatacatgcgtcttcattggttttacaacgcatactaagggatatttagtctaccattttcattcgcatagcatcaattgttcacgaaacatcgtattttatgagaatcatttcctacattttcctgaaacatcatctctgaaatctagctttactatctcaactccggagtcagtctccagcgaccaatatgaacctccagttgatactatcattaccggacccagaac

SEQ ID NO: 152836 - DNA, 397 bp, Glycine max
acaacatccaatcatcctgaactattctagccaagacatcatgacagaggcagaaaactctgcccaaaaacacacaccaatattgatgaggacatgaccaatagcaatggcaatgatccacttgaaggacttggatgacctatgatcagggctagagcttggaaagccaaggaagctcttcaacaagtgttgaccatactgcttgaatacaagcccaagtttcaaggagaacagtccaaggctgtgagttgtatcatgggccacatggaggaggactaaatgacaccactctgtcttaattttagagtgtctacgttgtctaaataatggcccaatccttgtatagttggctgaccaaacatatgttttgggttaatcaactaaaagggctttagtt

SEQ ID NO: 152837 - DNA, 414 bp, Glycine max
  unsure (1)..(414): unsure at all n locations
cttaatggaggaaagattatggagagaaagagagatgtggagcacgnattgaaggaataaaagaggttagaagtggaactntgaagtatgtctcacaagactctcattcatcaaagttaccacaagtgttacacatgcttctatttatagactacgtagcttccttgagaagctttcttgagaaaacttccttgagaagcttctttgacaaaacttccttgacaagctagagcttagctacacaaacccctctcataactaagctcacctccttgagaagcttctataagaagactcctaaagaagctagagcttagctacacatacctctctaatagctaatctcacctgcttgagatgagaagctagagcttaactacacaccctctataatagcttagctcaccctcatga

SEQ ID NO: 152838 - DNA, 179 bp, Glycine max
tgaacttttttttttctttgacaaagttttaaagattctggttttaaaccttgaaattggtattattttttcattctttcctttcaaaaagaatcccaggactaatgcccgaatccttcggctctctctcctttctaccaacaaagactaactgctgatattttggctcctctcctata

SEQ ID NO: 152839 - DNA, 385 bp, Glycine max
gcgccatttttatacttatatgaaacactgataactatattggaagcacctggcctgcatatcatgtttaatgtgttatgttgacctctccattaaattggaaccgtttcgtgttgtattctactcttctgatagttgatgtcatgattgggttacaatcttactttggcataacaaccttggacttgaatggaatatgatgattattaatcctgttttatgtcattgagaacaaatatagctagtataggacatactacccatattgttgtttttactgtaaacctcctggtaatatattggggatactctttcttgattataaagatttaatttcctttgatggaattcaaaatgcagttatttcgaagacgattcttggtaa

SEQ ID NO: 152840 - DNA, 316 bp, Glycine max
  unsure (1)..(316): unsure at all n locations
tgacatacttgctatatgaagagacatagtattttactgactgatacttcatacataatgggtaatactaatacattacatatattacagcatttcattgcagtgtgaagtgtataacacagtttagattggatagaacagaaaaggggataatgttcaattacgcatattcatgtcaatagctgaccccacatatgagttgctgaaataagactctagcctgaatcataacaacgggttacaaacttgcgtataataagtacgaacttatagcattcgggtagagaattacgtaacggatntactaagaacctct

SEQ ID NO: 152841 - DNA, 422 bp, Glycine max
  unsure (1)..(422): unsure at all n locations
agcttggctcgtggtgtcctgaataagacgaaatcttggctcgttgtgtcacggaggatcaacaggaatggaagaagaaaagaactaccagtggtcttccgagaagaggagcgcgtttttaaatttttaacttanagggtaaaatggccattcactaaaattgctgggtgcaccagcaatattgctgggtgcacctaacaactcccgaaaacgaaaagtgcangaagcatgtgatgaagtgcacaaagtaaatgcccataaaaaagcctttttgacctaacacacttatctgtttaaatntggtgtaatacattaatacattaacatagcatacttatctcgtcttattaaattttaatcatattgatttacataacaagtcaagctaaagcatatattaactttatctaaaataaattcat

SEQ ID NO: 152842 - DNA, 449 bp, Glycine max
  unsure (1)..(449): unsure at all n locations
acatttaatcaaggaacttatgtcttcacacctaatgaattaaagattataatattgttttccaacaatgatcgatattaacattgaatctcaagttgggtattatgctttaatgtacagaaagtatggtttgatgaaaatctaatcccgacaagctntgtcatttgtattttgtttgcttttaatgtgttcttatctaaaaatcccaaaaatagtttaaaattgtgttgttgtttaaagtattctttatatttgaatgtcaaattttgtgctttcattggtctgtttgttagtttagattgtaaaattttgtgtatttgccaaatactatgcaggtcctcgtggaaatgatatctcttacctatcanatactacttgacaacttggtacanttgccaatgaataaacaagtttatgtatttttataggctaattggatcattctatta

SEQ ID NO: 152843 - DNA, 333 bp, Glycine max
gaggcagcattatgcacaatttctaaaaactcttttattttttatctaaatggcaatcaaactgaagtgaacctttatgcctggacaccacctaaactgtttacatttgcttgatgttattatatggattgtttcactctccaggctgaggagaggcactgtgagaatctaggtcgacttttgtgcactgctaagctggttgcaaagcaagaaggtcctgatgatggcttcaggattgtaattaatgatggacgagacgggggtaagcattcttctccatgtcattgtagtaacattggccaatcagattttatttgattcataggttcttgc

SEQ ID NO: 152844 - DNA, 447 bp, Glycine max
agatttgtgttgattatatatcccttaatatgttggcggtgccagacaaattcccaattccagtgattgagttactgggtgagttagggaaggctgttgttttttctaaacttgatttgaaatctgggtacagattttaaagatgccctcatacagaggttccaaccagcatccatggtaaactcatttgaatccttgttaacactcaaacaagatcaagctgttcacgaattcatgacacagtttgagaaatatgcaaggtctgtgaaggggttagatgagcagtatttgatgggaattttcatcaatgggctaaaagaagagatttctgctgaattatggttgtatgagcccaagaccttgtcagaagcaatgaacaaggcaggaaattaagaagaaatagaataactgatttattattgattataaagaaataagacaaacaat

SEQ ID NO: 152845 - DNA, 433 bp, Glycine max
catgcaagcttaagctgttggatgaaggcttatgaatggttctactattctatctacgttgaattggacaaaaggaaaaagcattgtaagcatttcttggaaatattactaactcctgtgcttctctttctgcagtggttgttttattgcttccagtgcatacgaagatcggctggctttgttttctttgtcaatgtctagtggtgatatcattgatgaggttcaaaattactataccatcctgcattttgaaaaggctgcatgtgggtgtgtgtgtgtgctagcaaaatgcatacatgaatatgatagaggacttttttttctggtggtataggctacatatggctgccaactagacatacatatagggcaatattttctgtgaatctttaaagatattagaatctggaagaaccgaataatctaacgtatt

SEQ ID NO: 152846 - DNA, 447 bp, Glycine max
  unsure (1)..(447): unsure at all n locations
acttctaaactattatatgctacttaataaaaataatggaagaaataaatgtaaaaattatgtgattaaaaaaaatacattggaagtgtttgtttcatgtaatcttattaaattatcaggaatacaaagctagaaatatatattcttgtgttttgttagaaggtaattaaaaaatattgttagacataactcatttttaataatttagtttgtacatgtttctccgtctttttattttaggtaaagggatgagaatcttatattgaatgcttaaaaaataattcctcgtttttttcttattcaacctcgtttgtttatttatttaatatttttatttttaaattaaaataaatttaaaaacattcccataaattataaatatgtgccanatatctntgatgagaataagattcctaanaatagcattcccaaaaatattaatttctg

SEQ ID NO: 152847 - DNA, 305 bp, Glycine max
tgttgcacaatttaaattcatgaggcgcattcgagttggcaacaaacttatagctccggtcagataccagtatctactatcacagaccctttctctcttcgtacatgcacacagaaaaagtgtgccttctaaatttcatatctagcacgcatgagtcttcaaatgtgagccatctaaaattcttacaacgacattcatcccatattgtgtgtataacagaaatgttaatcttcaccaaatagaggactacgctctagctcgagatcaatatggatatgatccctcctctcgagtgtaaactcact

SEQ ID NO: 152848 - DNA, 342 bp, Glycine max
  unsure (1)..(342): unsure at all n locations
tttagttatattgaagaatcgttctctattacgtgatttttatgggtagccagagtaggagttgaagaaaggctcttatctggttctgggtttatgttgatagatgggctgtaacttctttatcttcttctgcttctctttgcagcgtgcagtacaatgttccgtacgtttatcatgcgatgcttgcctacttccatacggacaatgatgtgctcaagggtcttgccaagtaatgttttgattatttatatataggttctgttgtgtagggctttatgcttnttaccttgcgagtagtcaattaatgactgatgattacaggctttatatggagtcaagcga

SEQ ID NO: 152849 - DNA, 425 bp, Glycine max
  unsure (1)..(425): unsure at all n locations
agcttgtgtgaagagatagacaganaagactccagaaatttttttgcaattgtctatcaactaagcgctcagtcttcatgcgctaagccaagcttgctcgcgctaagcacaaagacccctgattggttggctgaatagttcagctaggcgcacatcactacgctaagtcccacatcttcatggtaattgaactttaaccagcgggcttagcatggatgatgcgctaagcaccacttcttctctggaaaatttttactgtagcagcgctaagtgcgctatcctgtgctaagccccagatcctttctataactttagtttttaagctgggcttagcggngcaggaagcgctaagcgccgatctcttacgggttttgaattcttggaagtgcgcttagcacgcctgttgcgctaagcctgaactactc

SEQ ID NO: 152850 - DNA, 443 bp, Glycine max
  unsure (1)..(443): unsure at all n locations
cttcagattgttgcatagaaaggcaaaggtctgtgtggtggtcggcagatgagcataaaccaccgagtctggcgacaggtgcagattttttattcatggccagttgggttaccaggttaaccaaggcatctagtttaccttcaagcttcttagtctcacctgatgaagatgaattcgtggctacttcatgcactcctctaatgacaatagcatcatttctagcactgaattgctgggagttggaagccatcttctcaattaaatttctggcttcaacaggggtcatgtctccaagggctccaccactggcagcatctatcatacttatctgcatgttgctgagtccttcataaanatattggagaagaagctgctctganatctggtggtgagggcaactggcacataatntttaaaatctcttccagtattcatataggctc

SEQ ID NO: 152851 - DNA, 344 bp, Glycine max
gaaatcattctataagcttgggagggtgatgcttcctactataggccatgtaggaagcttgttcactgtttcagaacttactacatgataaaaagccatgcacgaccccggtgaaggattataggaataatattctcattttgcatgtagaagcttcctctctccttcgttctctcggagaatacttcagcacgaggaaagctacctctaacagaaacattaattatccttatattgtactccctccatctgagaatatacacatttaatatttttgcacactattaagaaataaaattaatttattaaatcttaaagaaaatattaaataagttctttatata

SEQ ID NO: 152852 - DNA, 416 bp, Glycine max
  unsure (1)..(416): unsure at all n locations
tctcccctccccttcctatttccatctcgggctgatgcatgtgctggaattntactattagtggtatacatattatgtgaacaaaagactcatatgcttattaagaacaaattttatatcacaaaattgataaatttaaaatcaaatgtatatgaatatatgaggaggtagttaatgttgcttcaatccaagtttaatttcagtaaatttgttgtcacaattccatgcagatgaaaagaagtcagtctttaaggtggatgtcctcctcctcccattcaatttcttttctgatcaaaagctcccatgcatggtcataaaaccggaagtagaagacaacttcatctccggccatcaattnttttttatcaagatactggaaccatgggtcagcaattgatggcacaccattgtggatg

SEQ ID NO: 152853 - DNA, 417 bp, Glycine max
agcttcacaagctatcttccatcagaggagttcttaataaaggcagaaaaatacattaattatgaaaaaaatttaaaagttggaaaactaaaaatggtagaaaatgagagtatacaaaaaattaaagcataggtgaaaaatgacaaattgtctaaggtggatgacaaaccaactcacaaagctaggtcaatgtatgacaagtacactcccttgaatgcatctcgaggtagaatattgaatgaaattatgaatgtagaactgaaggatactagtcttgatgttaagaaccgaaaatggcaaaaaacaccagtaaaaatattttcactatcatcgagaaactagacaagataaacaattattttcaattgaaaaatgttattgaaagcctcattcatcgaggaaaactggatagatatg

SEQ ID NO: 152854 - DNA, 392 bp, Glycine max
aacagaacaattatgacctctctagcaacagataaaccctggatggaggaatcaccctaatctcagatggtctagccctcaacaacaacaacagcagcctgctccttccttccaaaatgctgctggcccaagtagaccatacattcctccaccaatccaacaacaacaatagccccagaaatagccaacagttgaggctcctctgcaaccttccctcgaagaacttgtgaggaaatgaccatgcagaacatgcagtttcaacaagagaccagagcctccattcagagcttaaccaatcagatgggacaattgacaacacaattaaatcaacaacagtcccagaattctgaaaagctgcgttctcaatctgtcccaaatcccaaaaatgtcag

SEQ ID NO: 152855 - DNA, 245 bp, Glycine max
agcttccatcaggtattaaggtaaattaaatatttatttattgtatagaaaataatagaaatacaataaagaaaagaaagaaaaggggaacaagttctttgtgaataaataaaatgtatgaatcatgtacattttataagttggtattttggaacagaaagtagtgataacttggttgaaaaaggaaaggatgggaaatgatgattcatctgaattgctagcttgtttttatgttgctattctat

SEQ ID NO: 152856 - DNA, 290 bp, Glycine max
gctctgacttgagtcatcaagagattataaatatgtgaccatggcatgagtttcagaaaatgatcaatcatcataatcatcaattaacaatcattcatcatcaatcatctttgaatcgtatatctttcaatatctttctacagaattttctgattcatttctcttcatctttctaaaaaattttggtctgcactttctcttccaagaaaagatctttgataaaaaacttatgctattcatctttttcattctcttctccctttcccgagagaacgaagttctaaccgcct

SEQ ID NO: 152857 - DNA, 413 bp, Glycine max
  unsure (1)..(413): unsure at all n locations
gctntagatcacgatgaatataaaannaattatattaatcttatttttttaagggttaataaatatttgatattggcaatgttcatatactttcagagttgaaagtattgagagaactgtggaatactatctagttttgatcatgcatttcaatttctttgaattgctaaaatgttccatccaaacagttaaagtttaaactcctgtagcaacaaacttaaatggaataaaaaaatgacgttgtttcacagaacaggaggaggtgctattatcaccactattttttaggttaaaatataatcttggttttcctatatttgtcaattcttaattctaattttttattttanaatagaaatatttaattcttttatttataaatcaataattctggtcccgtagtggctttcttc

SEQ ID NO: 152858 - DNA, 457 bp, Glycine max
  unsure (1)..(457): unsure at all n locations
gctcgaataaccttgggcaattaatgtacaggataggtgggttttttttttttttttgatttatttcaagaacaaattaatcaaacattgcattgaaagaggacttatcatggttttaaaatacagtctgcgatcataattatagttacaaattacaatatcaaagtttctagaccggccattgcacagtgcgataacaattgcactaaccttagtcgctcctcaatttctcataataccgaagtttttaaggtctcgaaacccacagtagcaactaattaaaaaccttcatcatgacccatatgcattagtaaaaattaatattagcttatgccaaaatatctgctgtgtgttcgaaacttagccaaaatgaaaaaccaaaaaatccttggatgtagaatagtagttgaacgcatacagcactatataagagggatnggctgggaggcaaatttat

SEQ ID NO: 152859 - DNA, 448 bp, Glycine max
cctgcacgcatgcaagctatacttcactgcttcaagtagcgcatgattgtcttccataggaaaaactttttctaaaggttactattacaccaagaagatactgtaccagatgggaatggagtatgaaaagattcatgctagcccaaatgattgtgtggaagaaatgtcttccaagattattttgatgatgccaaagaatcaagagtcaagcatgttccaaagaatcaagagtcaagccagtttcaagaatcatgatcaagatttatgattcgagaataatcatgatcaagattcaggtactgcatctagactcaagattcaagaatcaggagaagactcaatcaagataagtattacaagaattttttcacaacattgaatagtagaataatttttctaaaagaaaaatcttttaccaaagagttttactctcaggtaatcgattacc

SEQ ID NO: 152860 - DNA, 465 bp, Glycine max
  unsure (1)..(465): unsure at all n locations
acttgattagcttattgatgcacaagatgcattggtcacacgaaggtctgttactataagcctaaaagaagaatgaaatcagatctttgcttccatctttgctgtttgagttatatgctctatgctagtgcttccatatctgttgtttgagttttgtgctttgtgttgaaattagacctaagttattgctttcaattcataaatatttaactntgacttaacataaaaaggcatctgactgaaacaagtatgcgagcagggaattctgatctgtatggattcctcgagccacgttccattcagaggtctgggcaatcgcagtttgagactgaaagttacatatagagttggatgcagagttcagaatgcgatgtccaccttggagcctacctaaatgcgtaagtgacacaaaataactgaatttaattaatgtttactaatatactaacccatattcgtcttcac

SEQ ID NO: 152861 - DNA, 422 bp, Glycine max
  unsure (1)..(422): unsure at all n locations
agcttaacgaaaggcatgccaagtaggnggaattcctaaagctatttccttatgttatcaaacataaaaagggaaaaggtaatattgtagccgatactctttctcagcgtcatgcattactttctatgcttgaaacaaaattgattggtcttgaatgttcgaaaagcatgtatgatatggaagcaatgtcttccaaggttantttgatgatgccaaagaatcaagagttaagcaaagtttcaagcaaagattcaagattcaagaatcaagtttcaagtttcaagattcaagattcaagatttaagaatcaagattcaagaaaaatcaagatcaagattcaagaatcaagagaagactcaatcaagataagtactaaaaagtttttcacaacattgagtagcacatgaagttttctcataatc

SEQ ID NO: 152862 - DNA, 467 bp, Glycine max
  unsure (1)..(467): unsure at all n locations
tgtcagcgtgtccaagaccgccacctctgtcattgtccttgctgcatgtcgaatttggaaatgcactcgtgccttagatttgaaaatacacttcacgctttagatctaaaaatgcactacacctcagattcataatgcatggccttgcacacaacagatttgtcgcgacaatctcccagagaaagtcccaatcggccttcttgttgtgcatcttgtcgtgattgatggtaatgccaacgacattggcgcaagagtgggttgtgatggtgcacatgggcctaccgacaccgtaacccacgtcgaggattctgttgtcgggcttggcctcgacactgtcaaggaggagtgtggaagacgtcggtgatggagctgctagaggtataagtaaatcggttatttcatcactttcatgacccaacccacaaaaggaaccttattntatttatnttggctctcctaattaatca

SEQ ID NO: 152863 - DNA, 433 bp, Glycine max
  unsure (1)..(433): unsure at all n locations
agcttgaagaagttttgtctttttacatacctaactctntgagtgacatttgtattaatcggtgtattgggtgctgcatcttaatatatatactttcatatgtacatcatgcatcatcatgtagaagtaagaagattgtttctaaaagttagaaacttcttcaatgcataaaactcttcgttttaatcgattacacaagagtttatagcttgcagagagattctcattttggtttaatcgattacaagctaatcgattatcatgtaattgtaattgattatcatttaatcgattacacaagagccctgatttttaatgagtctctgctttaatcgattatcatgtaattataatcgattactttgctcttaaaaatgttctcagaagtgatcaagcactactaacaaaagtgctttctacatcgtgcaaaaag

SEQ ID NO: 152864 - DNA, 476 bp, Glycine max
  unsure (1)..(476): unsure at all n locations
actcctcttatgtggagtggtgatggttgtttattccttttcattgngatagttgtatggattctggaacacaggataaatgatgagttcaggggtccacctaggcagcaaattataaccatgttgtggtcaattatttatttcattatcttactattgtacctagcataatagttgcacaccttttgcatattcaagctataaacgaaaactacaactagaagtagctttgctgtgggccatggaaaacaacattggcagcacctgtttgtttgttagcatcatatatacacaaggaggttatcatttgtcagtcatggtattggaaagattccaggatcatcatccataaggcattntgtagtcaagatatttgtgatgatagcttctcggttctcacaacatgaatttgctatattcaggaattctgttctgaagtatttatggaatatttgtttcagaaatttctaagatta

SEQ ID NO: 152865 - DNA, 466 bp, Glycine max
  unsure (1)..(466): unsure at all n locations
atgaaccttgaaacctcatcncgcgatccttaancgactgaggctgcaacttgaagaaaggagattatcatcttctacttnattcgcgacacagatggtacctggagatatgttgcgggggtcatgagaaccttggtgacgtcaggtgggggtgctattgccccaaaacaaactttgaccaatcccgaaccaaacccgggcatagtcagtcagtgagaacttgtgacgtaccttaacagggcgagctcttgtcagttcaccgataaaagaacaaagaccccaagcaaggaggcttgtgtggtggctggccaactatgaatcttgagtgatatttggatatggncctctgtaatcgattacgaagggtgtgttatcgattacaacgcttataaatgaagacctgaagttaagatggcctctggtaatcgattaccaacggtgtgtaatccattacaaggcttaaaat

SEQ ID NO: 152866 - DNA, 394 bp, Glycine max
accaagaaatgctactcttaaaacaaaaatggcatacaacctcctccaataaacacaaacatcaatgtaattttagagaaaactcatgcacatacttccttacgaacattcactcgcaaaagatattcttctaactaagaaaaatgcacccatgcgcaatcaaggcaccttcgttacctagattatttatatgtacttccaaggtgtatttgctacctacatcacatgcacttccttggctaaatttacatacatgcatactcaaagcatcttggctaccaaaaattgcacacgtgcacattctggtatttctaatacctatgcatatacaaactttgtgatgaatcttggctatctacacaataaggtgctacatttcatgctttattcaagt

SEQ ID NO: 152867 - DNA, 385 bp, Glycine max
tatgagcttataaattcagattaaaggagctgaatgctttggatgctggtagttctgacagaaatctgaatcaatcagaagtggagctcatgaagtctctgcaggagcaattgtggcatgctgctaatgcctatgaatctttgctgaggcaaaaggctatagtgaaatggttaaaggaaggggacaaaaattcagcttacttccacaagctgataaatcatagaagaagacataatgccattcaaggattgatcattgatggggaatgggttcacgaccctagtagggtcaaaactgaggctttcaatcatttcaaagatagaatttctgagcaagaatttaatagaccaaccctggatggtgtgcagctacctttcattggtca

SEQ ID NO: 152868 - DNA, 439 bp, Glycine max
  unsure (1)..(439): unsure at all n locations
nggagcttcaaagaagattcacccccaatgagtgttgtaaagtttgtaatactcctcanattcattctnctagtttgtaatctatacgtatcccacattaaccatgtgggttaaatttggttgtgagagaagcgataagaagaacccatggaatgtggatagcttatagagagtctctaagagtgtaaccttaacaagtaaaggaaaatacttgtattgtctttcctaaggccaattgtagtgttatgggtgagatggatttcttctcacgagtgaagaaagttttaaggagagggacatctagtgagagggaaaggtttcctaccaagaatcgtggtggctctatggtgagatgtcttcccttccaggaattgaattactttgtgggttaagcccacttganaaggaaataatacttggtttgtctctgtcatgactt

SEQ ID NO: 152869 - DNA, 425 bp, Glycine max
  unsure (1)..(425): unsure at all n locations
agcttcctaatgggcctagatggtctcatngcttatgaacatcccctatattgatcttttcacccccattttgagtttttgctaaatctccttccgaaatgttgtgaaatcttacagattgtgcggcaattggctttaagcagctcaacgtgaccagcaaaaatctgcatgttgacaaacaattatccccagaaaaaattagggtatgacagctgcccccctttacttatcttttattggagataaaagggaagtaaagataagacactaatttcgttcgagctgaatttccacccgaccgaccactagctcaatcattgaaacctgtcaaaagaaagagcataatagacattaggcgcatcagcaaaagccttattgctttgaaaatgataaaatggataaccgtgatggtcttcacatgctat

SEQ ID NO: 152870 - DNA, 238 bp, Glycine max
atacattctccccctttttgatgatgacaaccacctgtggggtatgagcaacaacacagaaaaaatatctattcgcatatagcttactcccccttggttttgcaatgattgcttatatgagacagctgaagatttcatattgtttatattgtgacaaaatgtctcataaacaaaagaaaagaattcttactattttatcccttatcattctcttcccccctgttaacatccaaaacaa

SEQ ID NO: 152871 - DNA, 425 bp, Glycine max
  unsure (1)..(425): unsure at all n locations
agcttgcttaagaccgtatattgatttctttaatttgcacaccatgtgttccttcccttcaactgagaatctcattggntggtccatataaacatcctcctctaaatcttcattcaaaaaggcagntttcacatccatctgatgtagctccaagtcataatgggctactaatgtcatgataattctgaaagaatcctttcatgagatgggtgaaaacttctctttataatcaatgccatctttctgagtaaatcccttatcaacaagtctagccttgtaacgttcaagggtgccatgagagtcatgtttagtcttgaagacccacttacaaccaactctcttacaaccctttggtaattctacaaggtcccaaacaccattatgttccatggaatctatcttttctttcatggcatttaaccact

SEQ ID NO: 152872 - DNA, 502 bp, Glycine max
  unsure (1)..(502): unsure at all n locations
gtgagccctggnttgagttgtgtcctacagaccctggatactgagcctctagcccaatgacttacctctgtgtatttccttgtagactttcttatccaggtccctttccctgttgtgaagctcactacaagccttaattgaaagaccatgatattaccatatccttaacgaactttggagctctggaattgctttggaaatacagagaggagggttattggttcaatggacaactaagttatgttggctgtgcttcatgatggatattgggccgtactcgatgaacgttgtatatttggtaaatgttggacatgctgaatgaaatgttgttctcaaaggctaaggagtctgataaaaatataagattcgacacatgataatgagaagccctaaaattgtgtgaataacaccctatatggcacaagagtgatgacactcttgttctactctacatgttaacaatatcttacttcctttatttcgtatttatttcttatatgcg

SEQ ID NO: 152873 - DNA, 472 bp, Glycine max
  unsure (1)..(472): unsure at all n locations
attgaaccctgagacccttatgacacgtctagtaccgcgagcctttagttaactgcggcatgcaactganatattttttgtttctcaacactttttgtagtcatggtctagatgattactgtgtgacattgttttcggtaccatatccctctacattctagccggatgcttctaatgtcaatcctcgggagcccacatgagagaactatctcacattcaatgaattgcgctcacagcccacttttcattcggtaaatctgatgagccagccgcattaatgtacttgcctacacaaacgaattattgtgcgccaggaccacttcgactagtgatgtattgccacatttaatgggatcattttcgctcttctcgaccattatcatgtttcttgcttgcctacacagacgaatatgttagccggatgtcccattgaccacgctcgcgtcggcttgagtctcctatcttgaaagtt

SEQ ID NO: 152874 - DNA, 353 bp, Glycine max
  unsure (1)..(353): unsure at all n locations
attgtcgataagcacctttgcgacaatgtgtgccatccatctcaccgacacatgtagagccttgtgtgtcctctccnctcaacgggaatctcttcttccgcaaacgcgatgtagttgtcggtggttatatgattaacgatgccttcgaaaccctccactaagatatcatgtgctacatgggcatcgttaaggaccatcatcaacagcgcacgatgaggctcggagtttatgagtagttcaagcaaggagatccttgctggagttttattcagttgctcgactaccttanactcgctctgttggatgaggcagacgaactcttgcgcctcttccanggtcactggttttccttg

SEQ ID NO: 152875 - DNA, 443 bp, Glycine max
  unsure (1)..(443): unsure at all n locations
ctcataagtgaaatcaggtgcagccatctccctaagagtcctctcatgaggtggaggttgagccatgttctcagtatgaaaattactagttgaatgttcaaaatcagaatattcagaatcaccagcaacagaatgctcataatgctcaaaatgcacagaatgatcaggatgcacactatgcctaactaatctatgaaaggttctatctatctcaggatcaaagggttgtaaatcacctggattgcccctactcatgcactatatgcaacaaataatgtgttctcaaacaagcaagaagggagggttaaaactacaactatagtcaaatgatatccaaatgagctgaaattttgtgagcaacaccctataatcatgagaagatagcacanaaaatttcgaacaacaattcanagtcaaactatgaaaactacttaangcaaagt

SEQ ID NO: 152876 - DNA, 454 bp, Glycine max
  unsure (1)..(454): unsure at all n locations
cagtcacctgcggcatgcaagcttctttcattcctaataaaatccattaaaattattttgaacattacaccctctatattatgttatcatctgtattataaaattaaaataatgttctcatgtatcatatgcatatattttatatttcaatttttctcatctcaataaacttatttgacaagcaagaatatcacaatgtgggaaaaagtaagcaagattacaagtgatatttgttgaatcgattcactcaaagattntgattttctttttgtcagatatgaagcatgtggtacttgtatcactttgacaagtgtaatagttacacatttaatgggatcattaaggctatgcaggaccattacgatgcttagagctggcaacgatcaaagaaaatttaaggagggtgtccccattgtctttgctgcagccaatatgagtctcggatccatgagac

SEQ ID NO: 152877 - DNA, 475 bp, Glycine max
  unsure (1)..(475): unsure at all n locations
gcttcacactaacagagcttcanatcgaagcttcaaaattgaaactatatcatgacggtgaaaaaggcttgaagacacagacgccatcatgacaaactagccaagagctttgcgcacgcacaattgctccccanatttggtttttttttttaccccagatctgatgtttccaactctagatctggttttttcaaccccagatttgtgacaaacaaaaaggttcagagggtttagacacgtttcaccaaagaaccagcacagaagaagaaattgagaagaaggaaggagattcgagggagaaggggtttgtaatgcttcaaagtagtaaactagatgcttaaaagtaaataacaaaattggaagaaaatgttcttaccaaaggcaatagtgatgtcgtgtgcacttcacaaagtgtgagaaggtgtgtgagagagagagagacgaatcaagcacaagagtcaggtcataacagagt

SEQ ID NO: 152878 - DNA, 350 bp, Glycine max
cagctgtagacactggctctccccacaagtacttgggcatactcttgcctttcaacatgcctcctaccatattcaatatggttctgtgttttctttctgcagctccattatgttgaggtgtgcttggaggagtcacttcatgaattatgccttcttgatcacaaaattcttgaaattctgcagaaacatattcaccaccaccatttgttctcaatatcttgatcaatgagccactttgcctttctgccatatttttgaactttcaaagacttcaaagacatcactcttccttcttattacggaaacccatactttcctagtccattcatcaataacggatatgaagtatc

SEQ ID NO: 152879 - DNA, 431 bp, Glycine max
  unsure (1)..(431): unsure at all n locations
cttaatgtctntcctcctttagcttctaatataatgctgtcactgatgtggagtgattaccagtatatttttgttcgattaagtatataattcataattaatggaattaattgaggacaatgaacaagtacaaaaagtatttgcaattatttctatcaccaatttgataggtcagttttaaagatcaaggttaaggagataaacatgccgaagttattaagaataccaacatttattacgtcaaaagtatactaatgttatattgatattattcaattactcttaattattttttaaccttcttttttttaccgaggactctttcacttttatttctttaatttcagtcctcaaatctgatagtattaataataaaaacgtttatgtaatcaccataaaagacaaaatatatgtttaagcacggctatata

SEQ ID NO: 152880 - DNA, 571 bp, Glycine max
  unsure (1)..(571): unsure at all n locations
cacactctccgctcgactcaccttcacntattantaaataactatactacgtattatctatatnnntaatntcnnncnaagcgcggggtttgaacccttgagaccctggattgcaacgttgaccacccgcagccactcatttgaatgctcaatggacgccagatcctgagctttttgaagacctttattggcgattcttagcgcatggacttgcacaggaagatacacgacaagatacatgacgaggcgggatccaccagaggacgacgccatggaagaagaagctactccatcccacagaatgtcttggataagaagcttatataggaagctttaactgcggaagaccacgacagacagagacagaaagtggcatgggaatgaaggaaaggtttggagagaagctgaacgttgaagtgtgtctcacatgactctcattcatcgaaaacaccacaagtgttacacacgcttcgatgtatagcctaggcagctgtcctgataagctagtgttacacccctctaatatctaacctcacccgcatgcgaacacttatgatgagataaagcttcg

SEQ ID NO: 152881 - DNA, 420 bp, Glycine max
  unsure (1)..(420): unsure at all n locations
tatgcatgtgtattatgaaacatcatcatgtatcaagccaaggctatggtgcaagcaatcaatgtggcaaaacacaccaaatgattatgatgatggatggctcanattctcacataggtaaactcatcactttcaaaactatcgtgacatgtagaggagaatcaaggattctaagtcacaaaatgtcaagaacttttattttcaaaacaattacccatttcttgaacatatcctataattcaaagaataacatgcaaagtcgtacatgcacacagaattgacccaaaatatcaaactataaatccgacgaaactaacaacattaacaacttaacacaactaacaaattaacataaccaacaaaactagcacaacaaaagaacactcccccncnccctcctccatactaaaacaacacatt

SEQ ID NO: 152882 - DNA, 371 bp, Glycine max
ataatgctatttagcataatctggcttcatgagcaaccacataatcagctcgtacattaagctttcgagcataccaaaacatatagagaatatgggcacctttttttttggactatttttttgaaaagacaaaatgccctttcccacccaaagcatgatcatcaaatgcgaaacgtatctaatcagagaagtgaaaaaagaaacccctcattctgaatattgtaatcacaacaaaaccctatatgtagtatccacagatcactcacgtacattaatcatatcatgttgataagagtaatagcttgagaagacaggaaagacggataaatattcttatcattcactcctttcccgaaagcttgactatattc

SEQ ID NO: 152883 - DNA, 275 bp, Glycine max
ttgttgcacatcggtgacctgtgcgtatattaattgtgagaaaacgactagcatcaactactgatttttgcatgaatctttgaatgctaaatggatgcatgatatggaaatgatgaaggccatgctgaatgtatctttgctacagagccaaatagccaccttgtataagtaattgaagtagacctttgcacccagtgagccaagaatgattgaatattgtcctcgaccctagctgaagtcaacaattattatcacaccttgttctaagctttacg

SEQ ID NO: 152884 - DNA, 505 bp, Glycine max
  unsure (1)..(505): unsure at all n locations
ccgcccacgtctctagttccatcataattattataatcacaaagatgtgttctccatttccccccaaagaagggaatgaaccttgaacctgcaattccacgatccaagcagcgagcanggcagcaagctgccaaaaaaccagaaattttatataagacttcacacacacaataggagaacactccgatttaaaaccaaactaacgaaaatcttatacccaaaaaaaaccataaatggagagctgaacaactataaagcctaaacacaaaaacaggactatagacgctcaaacaggggtaaaacagaggctgggcaccaacaaaaaataccggtcaaggcaccagcaagggagaccccaaactttccaatggccaaacgcacaacagttacgggccacgaaagcctggactgcacaagaggttagacccaaaggacccctcgggagatagatgagtcaggaggatcaaaaatggctgaccggccggaatctcaccagagaagacag

SEQ ID NO: 152885 - DNA, 437 bp, Glycine max
  unsure (1)..(437): unsure at all n locations
tatcatggaagtgaacttanttattatatggatgtgcggagctaagctctagctacacaaggaatctttctcaaagaagcttctcaaggaagttttctcacaaaagcttctcaaggaagctacctattctataaatagaagcatgtgtgacacttgttgtaactctgatgaatgagagtcttgtgagacacaactcacagtgcaacttctctcccgcttttcctccttcaatttcatgctccccctctctctatctctctctatttcttgttctccattgaagcatgctttccaagctttctatccaaggcacattcttggtggcgaaactccttcttccattgcttattccctagtagatggcgcctcctctcacctcttctcctttgtcttacgctgcatctccatggtggaaaatcaccatagaaggacctcat

SEQ ID NO: 152886 - DNA, 221 bp, Glycine max
tctctacattgcatcaccttttaatgagctggtgaagaaaatgtggcatttacctggggtgaaaaacaagagcaagcctttgctttgctcataaaaaagcctactaaggcacctgttctagctcttcctgacttttctaaaacttttgagctagaatatgatgtctctggagtgtgagttgggagctgtatttgttacacaggtggcgccaccctatttgc

SEQ ID NO: 152887 - DNA, 446 bp, Glycine max
aattctcacaaatgttcatatcaggaatgttgtttttatgctcttagaccatgattttggctgcaacatcaaggtttttataccgattgcgaccacaattggtagcagttgtcagtgatttaccgcactgtcaagaatcattactaaaccgtgtgagtgacaccaccagtaaaaaccttggactatatatataacactagaaatatcaagttcaccacagatatacttatacaacgagaatttgatccataaacgaagaagagataaagatagggaaagctttcatttgaagcttacatcgtcttattcatcaagatatttgttataatattagtattaagtacaaatgtaaccctcatttattcattatgttataacttttatagacatattatacttattactattatttaaactacaaaatcccaatcatacaagtcattaca

SEQ ID NO: 152888 - DNA, 413 bp, Glycine max
agctttataaccacaaaaacggatcctcatgcttgtttcaactagatgatttagcttccctcttgcatatacttgagagcaggaccccccaataagtcccaggccttcaactgtcacaacagactgacacgcgatacgtaattgaagattgcatagtcctcttcctttcagctcccctccaatcattttcactatttccttccatttaccaccctaaacacaatcagcaaaacaatccaagagctccaaaatgttcataatgagcaaaaaaataagtaaataaattccatccaagtccaaccacaaaaattaaactctaatcctaaccaaacaacccacattactcccacatgtacaaatgcacaacattataacatcaaaaacacagcacttagctaatcaacaacgcattt

SEQ ID NO: 152889 - DNA, 434 bp, Glycine max
  unsure (1)..(434): unsure at all n locations
ttacttttacatgtctaactcccttaagtgacatttgtattggctgttatcttatatgttgcatcttagtacgttcatcatcatgtttagtgtgaagaanattttctaaaaagttagagaggtttcttcaagaggcaaaaactctttgttttaatcgattacaggtccatcgtaatggattacaacaagttgtctgaagcttgaagagttgattctcgtattggttcaatcgattattgatatctcataattgattacactgttgtttgagacaatgactgatttattcagaagtctttgctttaatccattaccaagtggtttaatcgattacttctttctcgcttagtagttcagaagtgaacaagaacactntaaccaaatactttgagtatctaatcgattacattgttcttgagttattggtagatgtc

SEQ ID NO: 152890 - DNA, 426 bp, Glycine max
  unsure (1)..(426): unsure at all n locations
gctttacagcagaatttagtaatggcccactattctagaattaaaataacttaatgtcattaacctagggaattaaaaaaaaaacttaatggctgagtctaactgaaattgtggcaaccaaaagtcacccccaacagccaacaagtcagccaccatttggtctcccaaaaggctgatgcctangttgccaattgggcccttattacatcttgaactaaacctactaaagcccttttagttgattaacccaaaacatatttttggtcagccaactttacaaggattgggccattatgtagaaaaactaaacactctaaaattgagacaaagtggtccatttagtcctcctccatttgggccatgatgcaactcacaaccttggacttttctcctcgatacttgggcttgtattcaaatagtatggac

SEQ ID NO: 152891 - DNA, 455 bp, Glycine max
  unsure (1)..(455): unsure at all n locations
taccctgatgaggatgtcccatatgttcttaatactggactgatccatntgcttccaaagtttcatggccttgcaggtgaagacccacacaagcatctgaaagaattccatattgtctgctccaccatgaaaccaccagatgtccaggaggatcacatatttctgaaggtctttcctcattctttagagggagtggcaaatgactggctatattaccttgctccaaggtccatcacgagctgggatgacctcaagagagtattcttagaaaaacaatttccctgcttccaggaccacagccatcagaaaagatatttcatgcattagacaactcagttgagagagcctatatgaatactgngagagaattaaaaaattatgtgttagttgccctcaccaccagatttcatagcaacttctcctccaaatattttatgaaggactcagcaacatgg

SEQ ID NO: 152892 - DNA, 477 bp, Glycine max
  unsure (1)..(477): unsure at all n locations
ntgaaaccttgaaccctcatgataccatctcaaaccccganccttagagtgacctgtggcgtgcagccttactgattctacgcgattttatctactttgagttggaggttattcccttctaacaagaatgcaacgtgatagggggaatagctcttatgttaaatgtctcataacctcttttgatatccgtaattccagacacagctgaacaattcgtagtggaagtaagaagtaatttgttgctactatccattacccatttcaattaaatataatacgtcggtaaatcttgtgctccaattagcatttattaaacataattcgtagctgctgttatattctaatttccgccgaggaccatttgtttggtgggatgcacccttcgcttgatcgctttgacgaacctaacacccattgttatgctatccgtgaagtactgccacatgtttgagatctaaaggaagcatctgcgcccct

SEQ ID NO: 152893 - DNA, 398 bp, Glycine max
tttgagaagtgaccatgagaatgatgtaattttggagccaactctcatctcacacgaagtctataacattgatctaaacttgctcaaactggttttacgactaaaactccactgaatcaaaatttgacccctcaacactcaatttaccctagaaatggctcttgctttcactttggtcactcattttcctcatttgctcagcccaagctttcccataagtcctaaatgacatttcaaactacgattaactcactttaatctcaattaccactaaatccagatttagcctttcaaaccctcaaagcatcacattattccactcatatcactacattctcacttgttaaccctaggttaactctacccttcatctatatcaagtttccatcagcaatttc

SEQ ID NO: 152894 - DNA, 304 bp, Glycine max
tacgcgtgcttagcacactttcaagcattacacatcataaagagattggcgctgagcgcatgcttccccactaagcccagcttgaaagctcaacttacatagagtatctggggcttagcgctggatggcgcgcttaatgcggctacaatatattctttcagagaaaaagtgacacttagtgcatgatccatgttaagcccactgcttaaggatcaattataatgaagatgttgggcttaccacaacgatgtgcgcttatctgaactataccaccaatctatcatgggtctctgcgcttagcgcg

SEQ ID NO: 152895 - DNA, 474 bp, Glycine max
  unsure (1)..(474): unsure at all n locations
ctattacggacctataaaactcagcttgaggattatggngtacccgtcacatgtggtactatgtggcgatcgggcgatggtacaagtcgactctccacgtccacaaatcacacataaatccaccatccccagttgcccaccttcaactgagctcacgtactcccacatagcccttatcctcgttcctctcaacaccgggtccccatcaatccctccaagcttccacaacatccaagcaattaanaatccaaacatcatgaactatcaaaaccaagagaacagggcagaggcaaaaaactctgcccaaaacacaaacaaataccacaactttccttactcanatacctcagtaacattctcttcgttcctattcgttcaccgttggatcgtctcgaaaattntactggaggtccctagtacataaatctacactntgaccgttgggatctgctagaaaacatccagaacccatat

SEQ ID NO: 152896 - DNA, 220 bp, Glycine max
  unsure (1)..(220): unsure at all n locations
ggcggccacgctcaacaaaggactttcgacacctactgtacgttgatntcaccaatgtccgtacgggaatgttgcgacaatcctttaaaaccttattgatacattattagaggatcgttgtcatgtggtcatatcgacgtccttctctatcgtaagccatcgttcatttctcttttgagatgcgattaatccatgttgctatgactggactccagttacg

SEQ ID NO: 152897 - DNA, 376 bp, Glycine max
  unsure (1)..(376): unsure at all n locations
tgacagtgataaatacttgttgatttttatgagattggtggtttgtcaagaactaaacatattctcgtaattgagacgaaccaatataaatcttntgcgccttattctatttattctttttatgttatttgaactaacttaggttttgaattagatctctacttacgaaaaactctattaattgtacaaaagatctaaaactgtcgtctaatctatattgacaaaaattggtatttattcatcttaagtgatacttcatcatacaataactttgttattttacagagaaaaaagttgtaattctagtatataaacacaatttaaccctatgtgttgtaatatttgcctttacaagtagcttatcatgaaaacttca

SEQ ID NO: 152898 - DNA, 417 bp, Glycine max
ccataggcaacaatatctttctttttgacaacaatgaagccaatggatacaagatcactctcaagtaatttgctcacaatgattagcggctgataaggagacacaaccaacacactcttccttaagctaaacctacaatgcttttagcttgttacaataaaagatgacaaaggcaaagccaaaaatacatcaacaaaagatagacaaacaatgactaaaacattcaaagacaattggaatatgtttaaccattaagtagaagcaataacgcaaagcttaaccacttaatagaagaaaacacacttaacaacctataaggcagaagcatatccttgacaaatgcttaaccatccattgcagaagcttgacgcaaggcttaaccaccatggatagcagaaaaaatggttaaccaccata

SEQ ID NO: 152899 - DNA, 419 bp, Glycine max
  unsure (1)..(419): unsure at all n locations
cttgngaacattaccttgtttccaaggaatttgtcattcatagtgatcatgaatcacttaagtacattagagggcaaaacaagttaaacaaaaggcatgcaaaatgggtagagtacctagagcaattttcatatgttatcaaatacaaaaagggaaaaacaaacgtggtagttgatcccttctcttggagacacatattgttttactccctaagagctcanattntaggatttgataacattagggacttgtatgctttagatgaatatttctctcccatttatgagagttgtgggcaaaaggccccaganggattctaattggctgaggggtatttgttcanagagggaaaactttgcataccccaaggatccatcaggaaattacttgtgaaagagagccatgaatgtgggctcatg

SEQ ID NO: 152900 - DNA, 393 bp, Glycine max
  unsure (1)..(393): unsure at all n locations
gagaggattgatggtgacccggtgttgatagaaactgtgatatgggctacgggggagtacgtgagctcagttggaggtgggcaacaagggatggtgggttttatgcgcgatttgtggatgtggaaaactttntgtgcaccatcgcccgaccgccacctagtaccacatgtgatgggtaccccataatcctacaagcttgagatgaggaagtgtagaagggtgaaacttcctgcttttattcgttaaccacagagcggtacctggagatatgtcgcgggggtcaggagaccttggggacgtcaggtggggtgctattgcccaaaaccaagcttgaccaatcccgacccaacccgggcatagtcggtcagtgagaacctgtgatgtacctaaaca

SEQ ID NO: 152901 - DNA, 412 bp, Glycine max
  unsure (1)..(412): unsure at all n locations
tattctcttcctgcaagtccttgtagagtttggacagttcatcactatccaacctggtgcacaaaaacttggccaacacaccgccaactntagaagacagttggtggttccactctccagacaatgagagcagtcaccctccatctgggaacttcagcttacaaaaatgccactttgttcagcatatcttaatgtcactgcccattttcttcaaggattgtcagacttcattgaaggaagaccttggcagaatccgtggtgtgctagaacacgactgacctgataagatttttatcaaaggccgatacaaagccatacggngtcttctgttcgagtttctaccccatacccgacaagtaatctacatcattggaagtgtagatgtgatctatggaaacacatgggagagaaa

SEQ ID NO: 152902 - DNA, 261 bp, Glycine max
ctcacgctgtttcatgtaaacctcttcttcttatcaccattcacgaacgccgttttcacatccatttgatgcagctcaagatcaaaatgagctactaatgcccaaattactcgaagagagtctttcttatatacaggggaaaaggtctctctgtaatcgattccttctctttgagtgaatcctttagcaacaagtcttgccttatgtctctcaatgttggcttctgagtctttctttggtttgaagacccatctacattcg

SEQ ID NO: 152903 - DNA, 345 bp, Glycine max
  unsure (1)..(345): unsure at all n locations
agagacttcccaagctatntatcttctctctcagagaggctctctaactttctagctttcttactctaagaagtggattcactcttgtcttggatcgactcactctacggtggctcactcaagcttgaggatagagacttcccaaactatttatctcaaaaatcctcccaactacttcaaaaatttcctttggactattaacccactctaataatattttttctaagctatggataacactactcaatcgtcaactatttctgttcctatcttcaatggtgaaaattatgatttctggcgctgtacatggaaacatattttcatctcaagatttatggacatagt

SEQ ID NO: 152904 - DNA, 293 bp, Glycine max
  unsure (1)..(293): unsure at all n locations
gcttggntcgaggtacttacccgttgtagatctgttaacgatgaagaacgaatgaagaacgtcgaagaacggttgaaacctttgcgaaattcttcacggaaaacgttacagaaacgtttcggaagcgcctcggcttaaatttttttacgaaaacaattctttccagccaattccaaagagagagatagtggccaggggctgaacccttttcttcttcactttctcccctatttatagcaaaataggggaggtggttgcccgcctactcgcccaggcgagccacggtgctttct

SEQ ID NO: 152905 - DNA, 486 bp, Glycine max
  unsure (1)..(486): unsure at all n locations
tttttgaaccctgaattcaaaccctcattacgcgccttgatactaagcctcagactgagtggggatagagtctctgaagaggaggatagctgaactcattaaatttcacatgaagaaggcccaggatagaatgaaacagctggcagataacatagatctgagaggcagtcagtgtggcgatatgtctatgttaaatggccccttaccggaaattttcgtagctgccagaagcaatgtgaatttgtccccaagtttatggcccatttcaggattggaacagaatggtgcagtggcctacaagatcaagcttnctttcggttcaagtatacatgatgtattccatgtctcttagttgaagacgcatgtangtgaagcagtaacttctttgagtcttctaagtttagtagacggagatcctttattcnaagagcctgagctatttcgatcgcatgacagaaagagatgtgcgagctgtactaacgtctg

SEQ ID NO: 152906 - DNA, 350 bp, Glycine max
  unsure (1)..(350): unsure at all n locations
tttttatgaaatttactatgcccaagtgtactttaagaattatggtccaataaacgaatcggtatcagaagaaaaccctccaatctacagggacattactatgaaagaattcttgacacattattattcaaaaggccttgatgggaactcttgcttgctacctttcaagatctgaatcanatatgcataaatagattggtgcactcttgattctcatggagaaggctctaactctttaatcattataaataacaggagccattgactgtgattctctgtatatagggaactttaaaggacatcttcacatttaattatatatataacatagcttgtgtgtattgataacg

SEQ ID NO: 152907 - DNA, 184 bp, Glycine max
  unsure (1)..(184): unsure at all n locations
actcagcctanaccgncagtacgaacggcgggacaggctgagtatgagagagagaggatgtaccgctgatagcaacggcgggaggaggagagagagaggatgcaccgctgatagcaacggcgggacgaggagagaggctgcgccgtcgtttcttctggcaaactttacaatacaattccttaca

SEQ ID NO: 152908 - DNA, 227 bp, Glycine max
  unsure (1)..(227): unsure at all n locations
gtttattgaatttantggaagatgagaatatggattaaatatagtgaaagggtgacttttatttggtatgatgattatggataatgttatggttanggagtaaatgatgtatatgattgaggtgaattnttatgatgatgagtaattatttatatgggtttncttgaggagatcttnatagttattaatattttatgtagatttggtgtggagttatataaaaattg

SEQ ID NO: 152909 - DNA, 354 bp, Glycine max
  unsure (1)..(354): unsure at all n locations
ctcagctcgtcttaccatccacaatcttacggtcagaccgaggtggcaaatcggatagtataacaatacttgagggccttcgtccatcgcaagccagcgttgtggggacgatttctgttgtgggcagaatggtcgtataatacttcgtgccattcgagtacgggattaactccgtttgaaatcaccttcgccgaaaaccaccagctatccctgaatacatangtggaacatcacaggtgtcataccctaatttcgtccggggaccatccgtttgttgggatgcgaccctcgtttgaccacttcgaggtacttggcacccatcgttaggcaatctgtgaagtttcgtgacatgct

SEQ ID NO: 152910 - DNA, 431 bp, Glycine max
  unsure (1)..(431): unsure at all n locations
aagcttcttcgtggcttctttgagaagctttctcaagaggcttctntgagaagctagatccttatctatccacacctctctgttaactaaattaacctccttaaagataattacagatgaaaataacgcaacanataatcaaacatcaaacataattactaataatatatagatatatatatatcagggttttgcataaaacaccccttagcccattttgttttgacagggttagatgatcctgaatgctattattaaccttattcttgaaatctatactaaattcccttcgatttggtatatagaaatttgcgtatggactgatgaacgtgaacgagaaaggtctctaagcgacatagagaggagctgacnaagagctcacgataggtgaggggagtttagtataatctatggctctgataccataattg

SEQ ID NO: 152911 - DNA, 283 bp, Glycine max
ttacaacagttagtccctagagactcagcataaggatgcacagaccacagatgcgtatgtaaaaaaattgtatgaccaagtgagagtgctcattgcaaagaagaatgaaagctatgccaagcaagcccaaaagaaaacgaaggaagtgggacttgaacccggtgatgatcttggacatttgaggacaaatgctttccaccaatgagggaatgatgagaatcatgaaacaggccatatacagtctataggcccaagtggagaatgacgaatgcccaactggaga

SEQ ID NO: 152912 - DNA, 196 bp, Glycine max
  unsure (1)..(196): unsure at all n locations
catatcaccactaattgctctacttttgaaattagctatggatntaacccactaactcctcttgatcttttgcctatgcctaacgtttctggttttaagcataaagaacgtcaagcaaaggcggactatgtgaagaagcttcatgagagagtccaagatcacattgagaggaaagataatagctatgctcaacaag

SEQ ID NO: 152913 - DNA, 490 bp, Glycine max
  unsure (1)..(490): unsure at all n locations
aatgaaaccattgagnaccctcgtttgaacancttcantngccgagatntcctcagtanacctgctgnatgcaancttntactcttttgtacttatcttaggaataattttctttgataaccctcttgaggcctagatccctatccttgtgttgaagctcactatcaagccttaaatgagaaaccatgagatctccatatccttaacgaattntggagctttggaattgacttgggaataagtgagggggttcttgtttcattggataacaaggtgtgttggctatgcttcatgatgtattttagccatacttgatgtacattgtgtatagggtatatgtaggacatgttgaatgagatgttggttctcacaggctacgtatctaaagaaaatctgaaaagagaaaaaaaagcgataaagttgagtgaataaatcttctatgacacaaaaaggacgagactctttgtgctacgctataggccaacatacg

SEQ ID NO: 152914 - DNA, 450 bp, Glycine max
  unsure (1)..(450): unsure at all n locations
gcttgtgtatcgatacactgatttggtaatcgattaccagtgataatttctgaacaaatcacaagatgtaactcttcaaatactttttgactctttcaaattggttttaagtttttctaaaagtcataactcttctaatggttctcttgaccagacatgaagagtctataaaagcaagactttgatttgcatttcaattatcttgaacaacctttacaatacaatcctttacaatctttgaatctcttggaacttcttcttcttccttttgccaaaagctttccaaagttttctagttttctaaaccttgaaaacttgtgctattcatccttttcattctcttctccctttgccaaanagaattcaccaaggactaaccgcctgaattctttntatgtctctcatctcccttttccaaaagaacaaaggactaatcgcctgaattctttt

SEQ ID NO: 152915 - DNA, 348 bp, Glycine max
atgatgtgacagacgctcttattagagcataagagcatgatgagaactcgatatattgacgatgaacaccatgcactaaatgtggcggaatctgatcgagcgatgaatcattcgaagagacatgatggtccatgaggataatcacaatcgcaatcacgttcactacgagatataaggaacatataatgttactattgcggtgagaatggccatgtacaaccgaagatcagacagatgaacgagaacttgcacatattaagagatatgaccatgctgtgtttttggaaacaaacgatgaggctgcctaaacaaaatgagtgataaattctgctgcctcaaagcatattt

SEQ ID NO: 152916 - DNA, 416 bp, Glycine max
  unsure (1)..(416): unsure at all n locations
tatttctggattgtgtatatacatatctcacatatgctgtcctaatgaactcttcttgcaatatttgcccatcctagcttagcgaagtggctatgaaggttattntcagcattcacatcttctatgcatactttcaacataatctcaatattgttatcacaccattctgctttctttctttctatacacacttgattgaggaacatttcacaagcttaatgagacanacaaaagcataatcctaatccataacaattcataatttaatgagaagaatagaaattattgaagaattggttaacatgtgatgctcacaaaggaagaagaacagacgacgaatgatgaccgaaagatgaccaacgatgatcgagaagaatgacgaagatcggaagcacgggagagtaaggcacaacatg

SEQ ID NO: 152917 - DNA, 415 bp, Glycine max
cccatcacatgtggtactaggtggcggtcgggcgatggtgcacaacaagttttccacatccacaatgcgcgcataaacccaccatcccctgttgcccacctccatctgagctcacgtattcccacgtagcccatatcctcgtttctctcaacaccgggtccccatcaatcctcccaagcttccacaacatccaatcaaaacaacattcaaacagcacaagctatcacagccaagcaaaacaggacaaaggcagaaaactctgctcaacacaccaaccaaaatcacagcttttctcactcaaagaccccagtaacaatttcttcgatccaattcgttaaccgttggatcgactccaaaattttactggaagtctatagtgcataagcctacattgtgaaccgtgggatctactaac

SEQ ID NO: 152918 - DNA, 591 bp, Glycine max
  unsure (1)..(591): unsure at all n locations
agggcacgacggtnaattgatcgcatctattangcgacactatagatactcaagctngtaatcatgtgacaccctctacccctcacatgtatactaatatatgaataaaattcaaatattaattaaaagtatttttaaaacattnttttttccgaaacaagtctttcaaaggggaaaaaggctcacattcattttcttctacatcatattcaaacttgtccaaataaataataaagtaatctcgtctcanacaaggtcgtctaaacttcatacaattaatatagaacttatatcctaatgtcacatcctatcatagtgttgtgttcctgtgtcctctagcatgaggttcttcatagtcatccacctattcatctgtttccccgaacacaagttcaagatcatcacaggatccanacacaacaacacacagggagtgagtcatcacattcatagctaatagagagacaagacaattaaatatagatattatataaatgagataccacttgcttaaacatagctcacgtaatntcaccactntgtcattcannaatcacttttcaatcatcaatcacattacacaagaatccn

SEQ ID NO: 152919 - DNA, 416 bp, Glycine max
gtgtgattcctttctttttcttatcattctcctcatgttgattcagtctcattagttccatttcgtgttcctataactttccaaataaagttgcaagagacatgttagaaagatcccttgattctgtaatagttgttacctttggttgtcattccctacttaaacatcttagaactttattaataagatcctcattgggaaatatctttcctaatgatgcaagatgatttactatgtgtgtgaatctcttttgcatatcatgtatagtttcatttggattcattctaaacaattcatattcatgggttaaggtatttattctagaaccttttacatctattgttccttcatgggttacttgtaaggtatcccacatatcttttgcactcttgcaatttgatactctaaagtattca

SEQ ID NO: 152920 - DNA, 487 bp, Glycine max
  unsure (1)..(487): unsure at all n locations
catgcgcctatntccttacgaacgttctctngcacaagacatttagaccgaaaaatgcacccatatacaatcaaggcagtttcgttacctagattatttacacgtacctccaaggtgtatttgttacttacatcacacacatctccttggctaaattcacatacatgcatactcaaagcattttggggcaccaaaaattgcacctgtgcacatcttggcatttctaatacctatacatacgcaaacttcatgatgaatcttgactatctacacaataaggtgctacatttcatgctcttttttcaagttnttgctacctaaagccgcatgccaattcaagcatattttcctttgctgactaanatngtattcaaattaaaaggtatatanctttttgtaatatagtttcttcacataacatgcaacatatttatatatatttttctgtgagacatcttgactaccaacaatatatatacatacattc

SEQ ID NO: 152921 - DNA, 502 bp, Glycine max
  unsure (1)..(502): unsure at all n locations
cgagccncngnnnttgtagcatctcgaccgcgatccttaagcacctgggctgcagcttgaccaacagagagccataaagtttgtctaggaagtctaagcctatagtgcctggaggcgttgcactctcataccgtatgcgaagagcttgaagcctttgcttggaagacgccatagtggatttcatcctctattctttacccgatcactatgatagctctgcaggtacgcatgtattgtgcatacctatgttattgtagctctggcacgacgttcttcactacatgcgggactgcccacctcagacataggccacgagtataccactgttgatcatatgggactccctctcttttttaatcgcgatggcatcccactccgctgctcgtttatgacatgataagacagctgcttcgattcantgtttaccgtaatagaagagcacaaccctattccagcgaggcacatattattacttgcccaccatgggtctgaattcttgtcn

SEQ ID NO: 152922 - DNA, 311 bp, Glycine max
  unsure (1)..(311): unsure at all n locations
tgagctctntcagctacacatggcggtgacttgtagaggagtgtgatggacgaacctgcacccgacgataacactgacaagagcttatattctccatcttggacaagatatggcagactggtggcaagtctactatcttccatcagccttggaacaactgtgatcgtgatcacatatcagctaaaacttgatgggtatgcaagccatactctcactgtgcttgaatggtaacgagcagcccaatgacactgtgacccacatgtttctccacatgcgttacatcaatgcagtgtctaacgtcaagatcacac

SEQ ID NO: 152923 - DNA, 80 bp, Glycine max
tcctaacgatttctaattatgtgggccattaagtctatcatatgctgacaatagccgagaagcccatgaatctcttcggg

SEQ ID NO: 152924 - DNA, 440 bp, Glycine max
cggagaggatgcttcactggaggagaagacagagggagagatagatagaggcgggagcatgaaattgaacgatgataaacggagagaagttgaactatgagttgtgtctcacaagactctcattcatcaaagatacaacatgtgttacacatgtatctatattatagactatgtagcttccttgagaagctttcttgagacaacttccttgagaagcttctatgagaaaacttccttgagaagctagagcttagctacacatacccctctaataactaagcttacctacttgagaagcttccttgaatagattcctaatgaagctagagcttatctacacacacctctctaatatctatgctcacctccttgagatgagaagctagaacttatctacacacaccctataatagctaagcttacctccatgacacattaca

SEQ ID NO: 152925 - DNA, 566 bp, Glycine max
  unsure (1)..(566): unsure at all n locations
nttgacgcatcttgangcgacactatgatactcagctgggtatgtcaggccaaatatgggtggagtgacaaaagctntaatttactgcttgaagtagtgcacgatctgcttccagagganaacacgttgcctaaaagctactatttggccaagaagatactatgtccgatgggtatggagtatcagaagattcatgcttgccctaatgattgcatactgtacagacatgaatttgaagaaatgtccaaatgccctaggtgtggngcatcacggtacaaggtgaaggatgataaggagtgcagttctgatgaaaactcanagaagggtcctccagcgaaggtgttgtggtatcttcccatcattccaaggtttaagcatctttntgctaatgaagacaacgcanaagaccttacctggaatgcanatgggagaaactctgatggaatggtctatcatccggctgatntcctctagtggaagaagattgatggtttgtattcggatttcagaaaagaggcaagaaatcttaggcttggactagccagtgatggaatgaatcatatggn

SEQ ID NO: 152926 - DNA, 441 bp, Glycine max
  unsure (1)..(441): unsure at all n locations
ataacatccaagaaatttcaacatccaaacatcatgaactatcaaaactaagcaaaaacagggcagaggcagaaaactctgcccaaaacacaaaccaataccacaacttttcttattcaaataccccaatcacattctttttgttccaattcattcaccgttggatcgactcaaaaattttactggaggtccctagtacataattctaaattttgaccgttgggatctcctagaaaacgtccagaacccaatctgtactactctttccacaaccagcaaatacacatcattttctgcatgcacaaagccaaaattctgctgcacatttcaacagcaaaactctgcataatagtgcaaaatttcgaaatcacacttgcccttgtcctaatttgcccaaatngaatcctacaagtcctaaatcatgtataaatcatgtctaaa

SEQ ID NO: 152927 - DNA, 318 bp, Glycine max
  unsure (1)..(318): unsure at all n locations
ataaagagggtgaggatgagggagaaacccatgctgtgactgccattcctgtacggccaagtttcccaccaacccaacaatatctttactcagccaataacaaaccttcttcttacccaccacccagttatccacaaaggccatccctaaatctaccacaaagtctgtctaccgcacttccaatgacgaacaccacctttagcacaaaccanaaacaccaaccaagaagtgaatattgcagcgagaaagcctgtagaattcaccccaattccagtgtcctatgctgacttgctcccatatctacttgataattcaatg

SEQ ID NO: 152928 - DNA, 471 bp, Glycine max
  unsure (1)..(471): unsure at all n locations
agctntgcatggatgccacacgtgaatcttctgtatcatccatcatttctttcattcacaaccccaacaagatgtagtacactagagttatgggcaaagcaatcagcatcccaaaaataacactgcattgggttaaagaagaagctccattggttaggattaaaagagaaagtaattgaatgaaaaggaaaaaggaatggaggggagagaaagttctaattgagccatataagaattagatttgaatactcacgctgtgctgagaatatcaggatgtacattatattccttagcaaagacaaatgggacaattccttggggaagagctgcctatatttttttgacattcagttgccaaacaaacaggacaagcaaacaaacaaacatgtcaactgcagtttcaaatccttggtgtacaatcacaaacatgatcattngaatcctcactactagtactaagatcttcaattt

SEQ ID NO: 152929 - DNA, 338 bp, Glycine max
  unsure (1)..(338): unsure at all n locations
ngctngaganactntcttgagaaacttctttgagaaacttcattgagaagctagagcttagttacacacccctctaataactaagctcacctccttgagaagttccttgagaaacttccttgagaagcttccttgataaacttccttgagaagcttccttgagaatattcctagagaagttagagcttatgtacacacacccctctaatagctaacttcaccttcttgagatgagaagctagaagttagctatacacctcctataatagctaagttcactcccatgccaaaatacatgagaatacaaaaacattcctactacanagaactactcaaat

SEQ ID NO: 152930 - DNA, 375 bp, Glycine max
  unsure (1)..(375): unsure at all n locations
tctatggaggctggatctttgagcttcaatgaggtcctttaatggtgattttccaccatggagatgcagcggaagacaaaggaaaagaggtgagaggaggcgccatccactagggaataagccatggaagaaggagcttcaccaccaagatgagccttggataagaagcttggagaggatgcttcaatgaaggaaaagaaagagggagagaaagagggaggggggagcacgaaattgaaggaagaaaaagggagagaaagagggaggggggagcacgaaattgaaggaagaaaaagggagagaagttgaactntgagttgtgtctcacaagactctcattcatcanagttacaacaagtgttacacatgcttcta

SEQ ID NO: 152931 - DNA, 457 bp, Glycine max
  unsure (1)..(457): unsure at all n locations
ntttagaaaaaatcttataagttagtacatacctaaatagttctttaagatgactatattatgcttaaataatctttagaaatttcaactcaataacccctaaagtcatgatattcaattaaaactatcaattattntaaaagagaatgtcaacatttgtgatattcaattgagacttttcacaactaataaaaaggtattcttctattaaaaaatatataaattttgattaattattttctagagtgaattttgtgtcaattctttagtatgatgtataaattctagactcatccaacaatttcaccaaaactttcctcatttctgttgaaacatacttaatatgaagttntgatgatgtcacaagataagcgtttctcaagtttaatccaagttaagaactcagaaattcaagataaatgaagaagtagtccttaagagtcttagaaagcattct

SEQ ID NO: 152932 - DNA, 417 bp, Glycine max
  unsure (1)..(417): unsure at all n locations
gactaaacattcattggttatttatttgtattcattatgcgatataattcgctgtaacccgtcactaaccaattaatattatcaactactcgtttggttaagcaaggaaattgttggtccaacaaaaatcatttacgcgtacagcatacatcattgtcataattgacaacacataatgacatgcatgcgtgttacagtttgagcgtgacaacacattggtngacttcagtacacattttgaaactagcagtcgctcaacaacacattggttgacttgactacacattagcgacaacacattggctgacttgactacacatttacgcgtgtctatttgttgtgaaacanagttaaacaaaggctcggtcacaaccatctatatatatggcagactangctactaaatcacacattatc

SEQ ID NO: 152933 - DNA, 412 bp, Glycine max
  unsure (1)..(412): unsure at all n locations
cttgacagctctatggaccatgctatcattcttcctgctagcttagtatttcttagcaccttcttgatggggtgatccttcttgacgatgatctaagggctctggaagtacggcttgaggcgttgagcagaggttatgagtgctagcgccactttctcgatcatttggtatctctttccaacatcatgaaggatgtgactgacaaagtagatgggtgtttggtactttccatcttcttggacaagggttgaactaatggctttttctgccactgaaaggtataggaatagggatgctccangcttangtcaacttataacaggtggtgttgcaatagttntctttatagctagganagcttgcttacaggcttcgtttcacaagaacgactcggttttcctgagtagcttat

SEQ ID NO: 152934 - DNA, 408 bp, Glycine max
  unsure (1)..(408): unsure at all n locations
agcttgcttctacactaagaagcactctatattgagtgaatcaccaaagagagaacaaccaccaaaattgaggaccgttttgtaattntgtaatttacaatttacttaccttcatttctttcaagttttgtaacaaaaaggcctttcattggaagtgtgttgggagcctccaataagttaccaaacttccatttgtgtgtaataattctaggcaatttttccttaagatagtgagtgttttgttgggaaccttgaatgtggtcatccaaacactcttangatttgcctagtttacatttcttgcttactttcatagcttatttcctttaccttcccttttaaaaccacctagatagttttccttttaccaattagttnttttaccttatctttcacacctcttttagt

SEQ ID NO: 152935 - DNA, 321 bp, Glycine max
  unsure (1)..(321): unsure at all n locations
tagccctagaggngatggaccttntcatgttntggagaggatcaataacaatgcttataggttggacctcccataagagtatggagtcagcaccacttttaacatttctgatttaattccttttgcaggtgaagctgatattgatgaggaggaactaacagatttgaggtcaaatccttttcaaggtggagtggattttaatagcacacaaaagtcaagtcaatttaactcctttttaatagcaaaacaagtcaattctacatgtaataatacaatagaaattgtctctagctaaattaaaactaagttaatcttgtatct

SEQ ID NO: 152936 - DNA, 463 bp, Glycine max
  unsure (1)..(463): unsure at all n locations
gctttgatcaaagtgttcgagggggagcaagcaaagatagaggataactttcttcttgggaagtttgagctttttgggttcactacatcgccaagaggagttccacaaatcaatgttttatttgatgttgacgttgatggcatcgtagaattcattgctagagataaaatcatgaggatgaaaaaaaggatcatgatcgacaacaagtactggaggttgagtccctaagagatgaggagaatagtgagatatgcaaagaggtataaggcatangatgtggaggtaagggcaaacggaaggccagaacttgcttgagaattgtgcttttgaaatgatggacaaagtgaagaatcttaagaaattagtacccatagcaacaatgttattntttttagtttcattaacaattcagtaaaaaaaaataccgtgcgctaacttgaaatgcccnctgcacacatggata

SEQ ID NO: 152937 - DNA, 510 bp, Glycine max
  unsure (1)..(510): unsure at all n locations
atccttatggcctgcctncagacttcacccncgcgtgccaccccggaagaattaagccaagcccctacttttgacgggaaactcccaccttatgaagactatcccgggcaagacgatggggagggagatacccatcttggccccctgctccacctcaaagatccatccccacatgaactaccccagccgaacatagtccgccatatcccggtctcacccacacccgtaaaagaatctgttcccttcgcggaagataagggaaagattgaggcgcttgaagagaggttaagagcagtcgagggcctcggtaattacccattctcgatattggcagaattatgtcttgtgcccaacattgtcatcccttccaattcaaagtaccaaactttgattagtaccaagggatgacatgttcaaangggcatctcggatgtatttgctgagatggngcatattctgcggacaannagtcgtggtcatttcttttcagacaggttgcttggacngctg

SEQ ID NO: 152938 - DNA, 383 bp, Glycine max
  unsure (1)..(383): unsure at all n locations
agcttagccctagaggggatggaccttttcatgttttggagaggatcaataacaatgcctataagttgggcctcctagaagagtatgcagttagcaccacttttaacatttctgatttaattacttttccaggtggagctaatattgaggaggaggaactaacaaatttgagatcaaatcctcttcaagggggaggggatgatgcaatcctccctaggaagggccagtcactagagacatgagcaagaggctccaagaggattgggctagagctggtgaagaaggccctanggttctcatgagcctcatggtagatttctgagcccatgggacaaggttgggtctaattatctttgtacatattaaactangatgtcattata

SEQ ID NO: 152939 - DNA, 490 bp, Glycine max
  unsure (1)..(490): unsure at all n locations
ngttgttgttgtggacctctatnntgaaaacctccataagagttgttagaaggacctacaaaagaagtgttagtgggacccacatattgtggtttccagccataaggctgatttgatcttgagccacctctatagccttggtagcttccttgaaagttntgttgaggtctagcttggttctgtagatattcggcttcctcttcttgttgccatcaccaggtgctgaacagtggccattctgatggataccaccacaaaaatcacatctcanaattntttgaacttggtgggcttgatatgttttctatggtccaccttcgtgatattgctgagtcagttggcctatctactttgttaagggcctcaattgttgcgtcaagagnttgttntgagctagaatntcactctgagtgtccagctccattatacctattctttgagtcggatcntcatcatgatgactttgatatcactagctactatggagtta

SEQ ID NO: 152940 - DNA, 472 bp, Glycine max
  unsure (1)..(472): unsure at all n locations
agctatgtggcaagtacaaaggtcataaacgcgcccgttatattatcaggtcttgctttggtggccttaagcaagcttttattgctagtggaagtgaggattcacaggtatgaatcttcaatcatcattgatcaaaatgggaaaatattcgccagtgtaattttttataatttgcaaattgaaagccttgatgtttatatgtctctgttaaatgtgttttatttgctaagtttttatagctgtctcaataatttgttaaaataagttcaacatgcacttgatgcatgctatcgaggatcactaaaatattggcataaaagacccatgaaatggttctttgtggtctgatntactggacttgaatgaattgaactacacatcgctataatgttcaagagttcctggcttctgcaatattattctagtttatcttgataaaactaggaacatctcgattgataatgctggaagt

SEQ ID NO: 152941 - DNA, 284 bp, Glycine max
cagcttctccattatctatgttctcgattgtatctagcaaccaagttagggtggagttcttattatgatcttgtaaagctgagccattggataccaattcatccttagcttgcgaggataagtgcgttaatcctcccattagaatatgcatatgcgctatcgcgtgatctctatcaacaaattcgtctctgtcttcgtagtccatggtgtccatcaacataccatcaaacatctcgtctaggcataaattgtctatcatcttttgtcgatcctgcctaggatct

SEQ ID NO: 152942 - DNA, 410 bp, Glycine max
  unsure (1)..(410): unsure at all n locations
tattccatattggggaatctaaaataacagacaattgattgtacaaaacaatgataggagtaaaatctagtaacatcataatttaaactcactgcaacggataaatgacaatcaccatactcaagagcctcatggataatgataagatcttcactaccctaatctaagaaaattagacgataaaacaatntatgtttggtgattacatagtggcactaatatgtaaatgcaaaaatgctgacctggccatgttcattgaaagtatcgagtccaacaattccaaggtcaagatctccagataacaattttcttgtgatgtatttgggcctctaaaaccaaactttgagtttggatagctgcaataatgcaagagaattggtttatggtcatgtagagatatagtacattga

SEQ ID NO: 152943 - DNA, 371 bp, Glycine max
  unsure (1)..(371): unsure at all n locations
tcccagatctgatcatggaaggactnggcaactgccttcattatgcagtaccagtacaatacggacatggctcccgatcggaaccagcttcagggtatgactaaacgagagcatgagtccattaaggaatatgcccaaagatggagagattntgcagctcaagtcgtaccgcccatgatggagagggagatgatcacaattatggtagatacgttacccacattccactatgaaaagctgataggctacatgccagctaactttgcggatctcgtcttcgccggcgaaaggattgaatccgggctacgaanaggcaagttcgaatatgctgccaatatggcccccaacaacaagagaagagccccagtagt

SEQ ID NO: 152944 - DNA, 254 bp, Glycine max
cgcgaactttgaccattgttcttccttcccgcaatgcttcttttcatgtctgcctgagtgggcttatagcctaaaccatacttcccacgatttccttgagtatttatcaggctagttatgccgccgttgttttttcctaaacccatcccgggttcaaaaccgttccccaacataactcgggccatcattaccgctgcatcggacagacaaggttgcccaaagagggagtccacggaggaaatgctgaccacctc

SEQ ID NO: 152945 - DNA, 101 bp, Glycine max
  unsure (1)..(101): unsure at all n locations
ntgagggtgcgtagcccaccatctnttcatagtagagtatcgataatgtgtctaccatcacgattatcgtctccctttccatcattgggggtaccacttgg

SEQ ID NO: 152946 - DNA, 300 bp, Glycine max
  unsure (1)..(300): unsure at all n locations
tttccatatgtcatcaaacataaaaaggggaaagggaatgtagtggctgatgcactgtctaggagacatgctttacttgctatgcttgaaactaagttggttggtctcgagtctttgaaagacatgtatgtgcatgatgtggactttgctgaaatttttgctgcatgtgaaaagttttctgaaaatggttactataggcataatggattcttggttaaagcaaataaattgtgtgtgcctaagtgttccattagagagttgcttgtgagtgaatcacatgaggnggggttgatgggacac

SEQ ID NO: 152947 - DNA, 331 bp, Glycine max
tccattgtcgaatttcgagcgtctcgatatatgatgcgcctaattctgacttccgagtgaagagttatgaccatttgaattactggcgagcttccgttgatcaatttcgagcatctccaaacattatgcgccttaatcggacatccgagtgaaaagttatgaccatttgaagttctcgagagcttccgttgttcaatttcgagagtctcgatatattatgtccgtgaatctgacattcatgagaaaagttatgaccacttgaatactcgagagctttcgttgtcgcatttcgagcgcctccgtatattattcgcattaatcggactttcta

SEQ ID NO: 152948 - DNA, 233 bp, Glycine max
  unsure (1)..(233): unsure at all n locations
aactggggcaaataaagagggtgaggatgagggagaaacccatgctgtgacggccattcctatacggccaattttcccaccaaacccaacaatgtcattactcagtcaataacaaaccacctccttacccaccacccagttatccacaaaggccatccctaaatcaaccacaaagcctgtctaccgcacttccaatgacgaagaccacctttagcacaaaccananaaaacac

SEQ ID NO: 152949 - DNA, 336 bp, Glycine max
  unsure (1)..(336): unsure at all n locations
tccattcccgagagcatntcttatttaagcacnttcagccttgctttcatgtagcttaggaaaaacatcatttcttcttctttctttcttccaaagccaattctaaagttccaagcactttctccatcacccacagccaccattagccaccacaaaccatcgttgttctccattgaaaccccacaccgagaggaacccttcaaccgaagtggaatcttccaacttggcttgcggtttcggtagagaacaaaaccctaatctgacctttcgttttcttttgagactatnttagtctcaaaattatcaagaactacgtaggtctgagttcctcatcac

SEQ ID NO: 152950 - DNA, 563 bp, Glycine max
  unsure (1)..(563): unsure at all n locations
attgaacccatttaangccctctattagctgaactctcatacatacgtctgagccggactctgactctgcattaccttgtcccangtgataatgtcaatccttactcttcgaagcancgaggaaacgagagaaggataatttccactctaaggacataaggagaggaaaggatattcctcatcaaagagtgggagatagctatacgaccagatagataattcccaatccaagactgtgagagagaacaagagaccgagatgacngaaggatagctcctgatcaatgatcgaaagataacagaagaaatgtgcagaggggatctctggacagacaatatctatacaaatacagaattgtcaccaaatgaacacaagagagaaaggaaaccataacctacaagtggtcttctgccttcgattaccaaccaaaatactgtgcgtcngtgacttttgtcgctcgcgtcagacaanaactgaaaacgaaaacagccacactaaaactatcaaaagccataacaacaanagccgataacccactaaagagtcatcgcacgggagtctat

SEQ ID NO: 152951 - DNA, 471 bp, Glycine max
  unsure (1)..(471): unsure at all n locations
agcttccatcanatggtatcaaagcacaagagcttaaagtacgtgctccttaaacctccattaacctttattggtgtttcttcatttttctccatgtatctcctcacgtgtcttgtgctaaatgttgttcacatgattttttagaatttcgacaattaaacttgctatagaagctagatttgattttctatggttcaaatttcttgttcttgttcttgaaccataattgtgttgactntangtttctttgagttttgtcttgctatttatttgtggctgaaacttaaaccataaaattcttacaaaaatattaatgtataagaaaacctcaaaaatctagagtgacatgttcacctattgtagttntgtcataaaagtcatgtctagtcatgaaacttgccatatatgattctttatgtngngctgaattctcattttcttggttctttgtctaactcatttgctcctgag

SEQ ID NO: 152952 - DNA, 461 bp, Glycine max
  unsure (1)..(461): unsure at all n locations
tcaacatcagaccacttccagggtgctggaactacttcacatggacttgatggggcctatgcaagttgaaagccttggaggaaagaggtatgcctatgttgttgtggatgatttctccagatttacctgagtcaactttatcagagagaaatcagacacctttgaagtattcaaggagttgagtctaagacttcaaagagaaaaagactgtgtcatcaagagaatcatgagtgaccatggcagagagtttgataacagcaggtttactgaattctgcacatctgaaggcatcactcatgagttctctacagccattacaccacaacaaaatggcatagttgaaagggacaacaggactntgcaagaagctgctanggtcatgcttcatgccaaagaacttccctataatctctgggctgaagccatgaacacagcatgcttcatccacaacagagtcacac

SEQ ID NO: 152953 - DNA, 465 bp, Glycine max
  unsure (1)..(465): unsure at all n locations
agcttgaccaatcccgacccaacccgggcatagtcggtcagtgagaacctgtgatgtacctaagcaggcgagctcctggcagtcaacagataaaaggaacaaagaccacaaagcaaggaggcttgtggtggctggccagctgtgaatcttgtgtgatatatgggtttttgcctctggtaatcgattaccaagggtgggtaatcaattacaaggcttaaaaatgaagacaggaggctaagatggtctctggtaatcgattaccaaaggggtgtaatcgattaccaggcttgaaaacgaggtcaggaggctatgagggcttctggtaatcgattaccaagggggtgtaatcgattaccaggcttaaaaatgaangcagcangttgtagaggcctctggtaattgattaccagtctgtgtaatcgattacacagaggaatgggtcactggtaatcgattaccacgtat

SEQ ID NO: 152954 - DNA, 238 bp, Glycine max
tttgggctagcccatgttcgatactctacatagaggtagcgtggaacataccttgcaacagtgtgtatacataggtaaatataatgagcatgaaattcctagtaaagtgtgaatgattgtcttcctaaatgaatgtatgatagtgtggaatgcctttttgaatgcaaatatgtgcatgatgtaaatagctatccaatatgcatataaataaatatgagtgaaacaataacaatttgta

SEQ ID NO: 152955 - DNA, 419 bp, Glycine max
  unsure (1)..(419): unsure at all n locations
agcttgtttccctctaagtacttgattcttggaaagtgatgtgccatcattttcttctattttctagaccctttttgcaccattttaattactgattggccttaattgtcaattaatcaggcagttttattatttgggctcatttagctaatttgatgtttttaatctaattttaggaattaatgaaacattgggcttaatccggattttggttatggacttgaagagggcaaataaagcagcgcttatcttagttaatttctaattaggaaattttgcaattttattttatgttgttcagtgtttatttcgttntgggccagagtattgtaatagagcccagtgactttgagtgactctttntaaatagcagccttgggattcgtgcaaggcattctattatgctattttcattattc

SEQ ID NO: 152956 - DNA, 402 bp, Glycine max
  unsure (1)..(402): unsure at all n locations
tatccncataagagtgcagaacagctggcgagtcagcattgattataggaggctaatccaggtaaccaaaanagatcattttcccctgccattcattgatcanatgcttgagcgcttggcaagtatgtctcattacaatnnttttatggttnttctggttatttacaaattcatattgctcctgaggatcaagaaaacaccacattcacctatccctttggcatttttgcctataggaggatgccctntggcctatgcaacgcctctggtaccttccaacggtgtatgcttagcattntcaatgattntttagagagttgcatagatgtgtntatggatgattntactgtttatggatcctcttntngatgcatgttggatagtctagatagagttcttaat

SEQ ID NO: 152957 - DNA, 396 bp, Glycine max
atcctctgagtcacctgcggctgcagcttctatccaggctcatcttggtggtgaagctccttcttccatggcttattccctagtggatggcgcctcctctcacctcttctcctttgtcttccgctgcatctccatggtggaaaatcaccattaaaggacctcattgaagctcaaagatccagcctccatagaagccccacaagcaagcttccatcagaggaggagctcacccctcttgagccttcttattttgatgcaggtacgcacatggctaaggaggaggatacctccacaaaccagattcatgagccatcttctacacttgtacctgatgatgccacaccatctgcaccagcacctgagtcagagcatcctatctcttaagattcaccaact

SEQ ID NO: 152958 - DNA, 354 bp, Glycine max
  unsure (1)..(354): unsure at all n locations
tgtcatgaccacgctctctggtgcataattgatctgtccaaacttaacagctcattctnttcgaacatactgaataatcagccaggagcttacaagcgtacaagtggaaaaattactcaactcttacagtatgttctaagtctgagtaatggaaatacatattgcttactatttaactacaacgcttacttgacagatgagcagttcatcatagctatcggaaggtgacattatctcttattcttaattaccccttaatttgtacatgcattattaaacaaccttttaaaacaaaaatacttcatcaatattagctctcaagtctaaattagatgccatgtatcatatttatat

SEQ ID NO: 152959 - DNA, 446 bp, Glycine max
agcttatgctgcaaacatctacaatagaccttctcaacctcaacaacaaaatcaggcacaacagaataactatgacctctccagcaacaggtacaatcccggatggaggaatcatcccaaccttagatggtcgaatccgtcacaacaacaaccttattttcaaaatgttgttggcccaagcagaccatatgttcctccaccattccagcaacaacaacaacaacaacatccccagaaacagcaaacagttgaggcccctccgcaaccttcccttgaagaacttgtgaggcaaatgactatgcaaaacatgcagttttaacaagagaccagagcctccattcagagcttaactaatcagatgggatagttggctacacagttaaatcaacaacagtcccagaattctgatagataccttctaatctgtcagaatcccaaaatgtgag

SEQ ID NO: 152960 - DNA, 360 bp, Glycine max
tgtccgcaaaagatcactaacaacgattctaatgttcgagacctcaattttctctcaccaagtaaaaatggatcattctaaggtccaacgccttataatgaacaccttccaagtaaaaaaaatagcttgattcacccttaaaaagaactacgtatgtctgatttcctcttcgatggagggtacgtagaagcaagagccctgcttttgtcgacctcacaaataaaaaagaaataaaaagtttatgtacacaatttcatacaattcaataattaaggctgttgtcctttgagacaaacgtgagaggtgctaataccttcctcaaacgtaaatacaactcccgaatctggaatattcttcatg

SEQ ID NO: 152961 - DNA, 449 bp, Glycine max
  unsure (1)..(449): unsure at all n locations
agctnttaaccttgcttctgtgtatgcaattttaacaggggacatattttatgatgctagtgaagatttttctggcactgtatctgttgatgatggtgatgataatatctgcagaattttgactgttgaagatagtttgggtaccaatgttggagtatatactgatgatacagaagaaacaacagacatgctacatgcacctcctccttctggaccgaataagagaagaaaattaatgaattcctttagtgctggagttgaagttgatagctactcgacagctgaaattgataactcattggattattctcagacctctagctgtgtttctgatgatacagttgaaaccactcaagatgatacactngaaaccactcaagatgatatagttgaaactactcaagatgatacagttgaagcaacacaatatagtgatggtctactgtcat

SEQ ID NO: 152962 - DNA, 399 bp, Glycine max
  unsure (1)..(399): unsure at all n locations
ntgagggtgcgtagcccaccatctnttcatagtagagtatcgataatgtgtctaccatcacgattatcgtctccctttccatcattgngggtaccacttgngccgccagatccctcaaccttttgggcgtgttctttgaaagatccgtccccctttntgcaaatgttctgtagttgcatcctatccagaaccatatcaaaattgtactaatactgcctaacaaaggcaaccaataggtccttccaagaatggactcgggaaggttccaagttagtgtaccgggtaacagctaccccagtaagactttcttggaaggaatgtattagcaattcctcatcttttgcgtattcccccatcttctgacaatacatctttagatggttcttgggacaagtagtc

SEQ ID NO: 152963 - DNA, 565 bp, Glycine max
  unsure (1)..(565): unsure at all n locations
attgacgcatctttangcatcactatcgatactcaagctngcctanagaggtccagganagacaaggcggccgaaggaactagttccgccccgtagtacgacagtcaccgctttaggagcgttgtacaccagcagcgtttcgaagccatcaagggatggtcgtttctccgagagcgacgcgtncagctcanggaggacgagtatanctgattccaggaggaaatagggcgccggcggtgggcaccactggttactcccatggccaagttngatccagaaatagtccttgagttntacgccaatgcttggccaacagaggagggcgtgcgtgacatgagatcctgngttaggggtcagtggatcccgttcgatgccgacgctatcagccagctcctgggatatccgatggtattggaagagggccaggaatgcgagtatggccagaggaggaaccggtctgatgggttcgatgaggaggccatcgcccagctgctatgtatanccgngtanngatttgccngactgctganggagagagtgcgatcatcncaccatatgacacccg

SEQ ID NO: 152964 - DNA, 381 bp, Glycine max
  unsure (1)..(381): unsure at all n locations
taggggggagaagtgaagaagaaaagggttcagcctctaaggcacttctctctttctcgaaattgctgaggaaaattattttcgtgaagaaaatccaagccgaggcgcttccgtaacgtttctgtaacgtttccatgagtaattacgcgaagattctcgaccgttcttcaagattcatcgttcgttctgcgttttcttcagtcttcaacgggtaagtacctcaaaccaagcttttcaattcattctatgtacccgtggtggtccacattttgtttcatgtatttttattctcattttcatttactttntatacccccttttgacgtgcttaagccatttatttaagtcatttctcgcttaatctaanaataaaataaatct

SEQ ID NO: 152965 - DNA, 387 bp, Glycine max
  unsure (1)..(387): unsure at all n locations
cccatcacatgtggtactatgtggtggtcgggcgatggtgcataatgattctccacatccacaaatcacgtataacccaccatcccctggtgcccacctccaactgagctcacgtactcccacgtagcccttatcctcgntcctctcaacgccgggtccccatcaatcctcccaagcttccacaacatccaagtaattcaacattcaatcatcacaaactaacacagccaagaaaatagggccaaggcagaaaactctggccaaaacacaaaccaacatcacagcttttcacattcaattacctcaataagagtctctgtgttccaggtcggtaaccgctggatcgaactcgaaattatactgggaagctctagtacataagtctac

SEQ ID NO: 152966 - DNA, 130 bp, Glycine max
gagccttgtttccctttccttgttttgaagctcactacaagccttaaatgaaaaaccatgatatcaccatatccttaaggaattttggagctttggaattgttttgggaataagtgtggggggggggggg

SEQ ID NO: 152967 - DNA, 417 bp, Glycine max
  unsure (1)..(417): unsure at all n locations
tattacggacctatagatactcagcttcaagacaaccttgaaaagatggtaattagctttntccttcacattcagcanattcagcatttaaatgtgatatttaatgttatgctnttttatgccatgataattggtggaatgaatattatttatttgtcaaggtttcatgatatcgaatattgatacctaanaagggtaatatttcaagttgtgtgattagtgttattttgagatgaaacaccaactatatgtaatcttatctttgcattatcaagttggtattaaaaatttgtaatctattcgttggatatgatagtagtagggactcataaggatntacttagtaagaggcttaacctaaagtaagaatttgtttttctgagacaaaactgcagagatcatcntgttttattatta

SEQ ID NO: 152968 - DNA, 465 bp, Glycine max
  unsure (1)..(465): unsure at all n locations
cgtgcattcaatatcctgatgaggaggttccatatgtctcaagactggactaatacatttgctgtccaagtttcatggtcttgcaggtgaagatcctcataagcatcttaagaagttccatattgtctgttccaccatgaagccccctgatgtccacgaagatcatatctttctaaaggcttttcctcattctctggagggagtggcaaaagattggctgtactaccttgctcccaggtccattaccagctgggatgaccttaagagggtgttcttggggaaattcttccctacatctaggaccactgccatcaganaagacatttcaggcatcangcaacttagtggagagagcttgtatgagtattgngaaagattcaagaaattgtgtgcaagttgtccccaccaccagaattttgagcaactctttctgcaatatttctatganggacttancaacatgga

SEQ ID NO: 152969 - DNA, 588 bp, Glycine max
  unsure (1)..(588): unsure at all n locations
gggaccacggggnnnnaattgatcgcatgctattangccatactatagattactcaagctcgagttgaggaagtgtagaagggtgaaacttcctggctttattcgttgaccacagagtggtacctggagatatgtcgcgagggtcaggagaaccttgggacgtcaggtggtgtgctattgcccaaaaccaagcttgaccaatcccgacccaacccgggcatagtcggtcagtgagaacctgtgatgtacctaaacaggcgagctcctggcagtcaacagataaaaggaacaaagaccacatagcaaggaggcttgtggtggctggccagttgtgaactttcattgatatgtgggttatggcctctggtaatcgattaccaagggtgggtaatcgattacaaggcttaaaaatgaagacaagaggctaagatggtctctgngtaatcgataccacggngtgtaatcgattaccaggcttganaacgaggtcaggaagccatgagggcgtctggtaaatcgataccaaggggtgtaatcgattaccaggcttananagggggatggacattgtganggctctgtaatcan

SEQ ID NO: 152970 - DNA, 267 bp, Glycine max
  unsure (1)..(267): unsure at all n locations
agtatgacagtcaccgctttaggagcgttgtacaccagcagcgcttcgaggccatcaagggatggtcgtttctccgggagcgacgcgtccagctcagggacgacgagtatactgatttccaggaggaaataaggcgccgacggtgggcatcactggttactcccatggccaagtttgatccagaaatagtccttgagttttatgccaatgcttggccaacagaggagggcgtgcgtgacatgagatcctangtaaggggtcagtgga

SEQ ID NO: 152971 - DNA, 361 bp, Glycine max
  unsure (1)..(361): unsure at all n locations
tacggatggaatacttacttggtgtgatgaacaagagcgcgatacagaatctataaatgtgcaaaatgatgaccctanggctgctaactcgtaaatcccgtgggtatggctcttgaaaggcggaaaaagaagtttatgaatgcaaaaacgcgccccctttcgtcattcttatatattggtgcangggtggctcgcccaggcgagctaacctgcattattttttttgagaggaacattaaccatgtccactccttccttttagcgctttgcctaacttgaacttacttaagttagaatcaagcgttgattacttatttttaataacaaacagatagtaagataactgcgaatacaaaggata

SEQ ID NO: 152972 - DNA, 471 bp, Glycine max
agcttctcctactgcaattgtcaaacacggtgtctaaatgtgagttcgaataacaacttcttttacatggtgatcgcggatgtacatcccaactttagtcatattcagattctcgttcaaactagcgtccaccattgcactccaacctactcaatataggagggctccatatttcaattgtgctataaccacgcattctctctaatctccccctgcaccttttttcattgaaccaatcctagaaaaaatatttgcataatgaatcacctccgaatctgtactatccttattgctccaaagcttttcattccatctcctccaaacactccataacatcatagcaacacgtttcccttgccggactgataggacttgaattaatctgaatatgaattcaaagcacgaactctcatcaaatatcgttaggtcctcaacaacatcccaagtggaagactcttaagttaaatattt

SEQ ID NO: 152973 - DNA, 409 bp, Glycine max
  unsure (1)..(409): unsure at all n locations
tatgcattgtggaatttcaccagagagagcattgtttgaaacatctcaacttgttgatgctttcagcttaaccgacttcaaagggtaggctttccattgaacgagttgtgggacaagttcaataacaatgacaagtangaaagaccaatgacttgcaaaggaatagttccactaattctgttgtgtgaaaggtcaagggtattgtaaatttggcaattcccaacaccaggatgtatgcttccttccaacacattatttgacaagtcaagttgaaacaaaagactaaggttgccaatggataatggaatttctcctgacagtttgctcacatttaaattcaatgactgcatcttttggaacatgacaaaagaagcaggaatagtcccagtaatctgatggccaccaatat

SEQ ID NO: 152974 - DNA, 442 bp, Glycine max
gatcttaagcacctgcggctgcagctttgcttaagacattgtcttggttgtttgcttctttatttttttctggaaattgctagtttagtataggtccttgatttttggtttatttgtaataaatgtgtactccttgtgtttgaggcttaaagcttaagtatagagtagttgctttcaagaatagtgttgctatggaaatttcctttaaatttcgcggcaacgtcaaaccaaaatcctacccaatgttttgaaatccatcatactgcgcctttagaattcgaagaatggtacaatgattttaatgggtcccaccactgggttatactgtattaaatatccaataaatatacataaataatggaatcacgtcttagacagaaatgttacataacaatactacaaataatcacatactactatgctacgaataatcactgatctg

SEQ ID NO: 152975 - DNA, 524 bp, Glycine max
  unsure (1)..(524): unsure at all n locations
ngagatgaggaagtgttgaagggtgaaactttctgctnttattgttgaccacagagtggtacctggagatatgtcgcggnggtcaggagaaccttgggacgtcaggtggngtgctattgcccaaaaccaagcttgaccaatcccaacccaacccgggcatagtcggtcagtgagaacctgtgatgtacctaaacaggcgagctcctggcagtcaacagataaaaggaacaaagaccacaaagcanagaggcttgtggtggctggccagctgtgaactntgattgatatgtgggttatggcctctggtaatcaattaccaagggtgggcaatcgattacaaggcttataaatgaagacaggaggctaagatggtctctggtaatcgattaccacggngtgtaatcgaataccaggcttgaanacgaggtcaggaagctaaggaagcctcttgtaatcgattaccaaggggtgtaatcgattaccaggcttanaaagggaactgggagatgatggaagcctctggn

SEQ ID NO: 152976 - DNA, 305 bp, Glycine max
ggctgcagcttattgctacaagccacttactcttctagccccaagagactcagcataaggatgcacagaccaaagttgtgtttgtaaaaaaatgtgttgaccaatggaaggtgctaatggcaaaaacaaatgaaagctatgccaagcaagcccaaaaaaaaaggaaggaagtggttcttgaacccggagatgatcttggacattcgaggacaaatgttttccaagagggagggaatgatgagaatcatgaaacaggccaaatacagtctaaaggcccaagtggagaaggacgaaggcccaagtgg

SEQ ID NO: 152977 - DNA, 353 bp, Glycine max
tcattgcctaacaagccaacttacaacatctagccccaagagactcatcataatgatgcacaggtcaaagttgagtatgagataagattgtatgaccaaatgaaggtgcatattgcaaagaacaatgatagctatgcctagcaagccaacaagataaggaatgaagtggtacttgaaccctgtgatgatcctggacatttgaggacaaatgttttccaagaaggagggaatgatgagaatcatgaaactggccaaatacacgctaaaggcccaagtggagaaagactaatgcctgagtggagaatgacaataaccctgagtggagaatgatgaaagcccaagtggagaatgat

SEQ ID NO: 152978 - DNA, 404 bp, Glycine max
actcagcttgtcatgacccgtctctttggtgcattattgatctgtccaaacttaacagctcattctttttgaacatactgaataatcagccaggagcttacaagcgtacaagtggaaaaattactcaactcttaaagtatgttctaagtctgagtaatggaaatacatattgcttagtatttaactacaatgtttacttgacggatgagcagttcatcatagctattgaaaggtaacattttctcttattcttaattaccccttaatttgtacatgcattattaaacaaccttttataacaaaaatacttcatcaatattagttctcaagtctacattaaatgccatgtataaatattatataaaagttgttttcatatgggattgataagcgtgtgtgtgtct

SEQ ID NO: 152979 - DNA, 453 bp, Glycine max
agcttggcggcaaccacctccctttttttctctataataggggaaaaagggcagagtaatttggctcaacccttctggaatttaggattctcttgaaattagagagaaaaattgtttccgtgaagaaaatcaataccgacgcccttccgtaatgcttctgagacattttcgtgagcgattttgtaaagattcttcaccgttcttcatcgctcttcgttcgttcttcgtcgctcttcggtcttcaaccggtaagttcctgaaataaaacctttcaattcattctatgtgcccatagtggtccccacctgtttcacgtgcttttattttcatttcgtttgtgttccgtacccctttttgacgtgctttaaccattatttaagtcgctttctcacctaatcaagtaataaaatgagattccaccaatcatttgagttgtaatatcgtttaatctct

SEQ ID NO: 152980 - DNA, 419 bp, Glycine max
  unsure (1)..(419): unsure at all n locations
gcngcaccgctnaaggtaaagactcttcctgtggccttcaaacttccaatatggtcattcaggccctcaccattctgctccttcttgggatatgggcaatctctctaaatatgcccctcttgtcaatagttgatacaagtcgcgcctttatcagcataattcgaggaaatgtgccctggcttaccacatttgtaacaagtgatctgagttgataaagaagtgggtttgctaccattaccaccagcaaaccccatagcatcagtcctctgattgttggggcgattaccatatgtcttaagaggggttgagtacgatcttccccgttggtgaggtccattctttttgttcttcattgngcctgcactcctataatacgctgccttgtatcagaagcttcatcccaatccggacatgttacc

SEQ ID NO: 152981 - DNA, 245 bp, Glycine max
  unsure (1)..(245): unsure at all n locations
cacaacaagctttcacatccacaatgcgcgcataaacccaccatcccctggtgcccacctccaactgagctcacgtactcccacgtagcccatatcctcgtttctctcaacaccgggtccccatcaatcctctcaagcttccacaacatccaagcaaaacaacattcanacagcacaagctatcacagccaagcaaaacagagcaaaggcagaaaactctgctcaacacatcaaccagaatcaca

SEQ ID NO: 152982 - DNA, 397 bp, Glycine max
  unsure (1)..(397): unsure at all n locations
cgcctaattaacctgatattgagaganaatgattattaaatacacaaaatggaagtactaagtatttattatctatatttaatagaaaatacttataacattacaaaataaccataaattggaagagtttgatacaatttacacaagttttatacacaaaagttcgtcgtattcaccgactaacatagcacaagacatatccgtggagggtttcgagggtatagtcaataacatcacgaccaacaattacctcactttcgctgacaaagagatactcgtcgagggcaggggacacaatgcacgtgtctgtcaaatgtttggacaacatangggccaaagtgctcatcgacaatggctcttccctcaatgtcatgcncaaagctactttggacaagct

SEQ ID NO: 152983 - DNA, 406 bp, Glycine max
ggctgcagcttctcgatatattatgcgccagaatcggacctcagtgtgataagttatgaccattttgaattttcgagagcttccattgttcaatttcaagcttctcgataaattatacgtctgaatcggactttcgtgtgataagttatgaccatttgaattcctcgagagcttccattgttcaatttcaaacttctcgatatattatacgtctgaatcggactttcgtgtgataagttatgaccatttgaatttctcgagagcatccattgtttaatttcaagcttcccgatatattatgcacatgcatcagactactgtgtgaaatgttatgaccattttaatttctcgagagcttccgttgttcaatttcgagcgtctcgatatattatgcgcctgaatcgga

SEQ ID NO: 152984 - DNA, 393 bp, Glycine max
  unsure (1)..(393): unsure at all n locations
ctattacggacactatagatactcagctagaattgaacacggaagctctcaagaaattcanattgtcttatactttcacacggaacaccgattcaagctcataatatatcgagactctcgaaattgaacaacgaaagctctcgagaaattcaaatggtgaaaacttttcagacgaaagtcggattcagacgcataatatatcgagaagcttgaaattgatcaacggaagctctcgagaaattcaaatggtcataacttgtcacacggaagtccgattcaggcgcataatatatagagacgctggaaattgaacaacgaaagctctcgacaaattcaaatggtcataactattcacacggaagtctgattcaggcgcatactatatcgagactc

SEQ ID NO: 152985 - DNA, 382 bp, Glycine max
  unsure (1)..(382): unsure at all n locations
atgccccacattatttccatgacacaaatgccaaaatgatgatttggaaacttcatgcaaaacttgtcatgcatgcatctatgcggacactcaaatgtcaaatttttatggtcatgtgatgctaaggctcaggattcatttcctctatttttaatcaacccaatgtttccaaaatatgttcttttatcaatttgtgcattcatccgagtccatttcgggcgtccgggaaatttcacagcattcacccttcaggcgtagacacatttcccaaaaattggttatggtcaatgaatnttttcaaagaaaagttggaaatcgtctcttttcaaaagcatgtcatttttagctagacaacttattttctttntttctccttcttctt

SEQ ID NO: 152986 - DNA, 386 bp, Glycine max
  unsure (1)..(386): unsure at all n locations
nggttcgaggtacttacccgttgaagatcgaagaacgatgaataacgaatgaagaacggttgatacctttgcgagattcctcacggaaaacgttacggaaacgtttcggaagtgcctcggcttagatnttcttcacggaaacaattnttccaagcaaattcgaaggagagagaagtgcctaaggggctggacccctttcttcttcatttcctcccctatttatagcaaaataggggaggtggttgccgcccagctcgcccaggcgagctcagctcgcccaggcgagcagggttgcttcctccagaagcaaccgccttctggaggaatattccagagggcccaagtgggcctgggtgctatttgcacccnncattttactaagtaca

SEQ ID NO: 152987 - DNA, 82 bp, Glycine max
  unsure (1)..(82): unsure at all n locations
catttcaaaatctcattcggcttcaaatattacagttgcgtttgtgcggaatgtttaggttaccaagtagctntgtcatgat

SEQ ID NO: 152988 - DNA, 419 bp, Glycine max
  unsure (1)..(419): unsure at all n locations
cgccatnntttgtttaatatgtntnntttttcaataaatggaacttcattttatacataattggtattagtataactatcaagtttcaactattagaaattaaactagacattataacttttaaagcagttactattataagaattaatattttttcataatatatagcaatccatgattagtttacagtatacaaaatatntatttcattaatatatttcaattaaattcttgataaataaagacacanttttaacatgatctatcgtgtatatgaaagtgtcttcgggcagaatataactctaacaaaatttctaaaacatagatatatacaatatcatataaaatataaaataataaaattttaaactacaatggcaaggtntataatgttataacttcgggtaacaaaaaaaaaa

SEQ ID NO: 152989 - DNA, 438 bp, Glycine max
  unsure (1)..(438): unsure at all n locations
ctggtttaatgaaacatgcagnccatgtgcgccactggtgcgagtagaacctgaaagtgtggcgtagctgcttactgtgaaggcgccgaaactgtgatgccacaaacttcaagtcatcggctttcagggcaaaggcttccacttctgaaagggtttggacagtcctggttgaggtangaaggttgggtgaagaatgaggatccaaagcccacgtgagaagctcctctccacagaagtcaccagccttgaggtactcagagttgaagaagccggttcttccaccgttagttgtcatggtcaatagcttgccacgcattatgaagagcatctcatcaaccggatctccctcccggacaatgtagctttcttctgtgtaagcactggcttgagaaagcgcacattgatncagaagtgttcgtcatttctcaacattggacn

SEQ ID NO: 152990 - DNA, 491 bp, Glycine max
  unsure (1)..(491): unsure at all n locations
tagtagcagttaccagaagtcaatattgtgccaatgactatcatcatttctatcttacctantttgaattatggccttggtttgtgtgtctagattgacaccagactcctaaatacacaatatctttcattgcaagcttagcaactgtcccaaaacccaagtttattcgaaaccaagtgtcatgatttctatattaccaattntgctagttgttaatgttgaatcatagttttgctctctcatctgccctttgtctcatctctttaccttacaacttagtcaattctatcattaccctttttcaatatgcagaatcagcaacatgcaaacatatctaatccagcaaatgccaccatcaatagccaggctatggtccagaaccaacaaaatgcctcatgtcccatttctttcatcttctaaatntattggagcttctgcagattaaaagaagcattngttcttcatttcacatgaatctactgggttagtta

SEQ ID NO: 152991 - DNA, 348 bp, Glycine max
agaagaagttcatagagattgattggattgtcagaaagattgaattgattgaaaatgcaaaacaaagccttgcttttatagactcttcgtgtctggtcaagaagaccacttagaagagttataacttttagaaaaacttaaaaccaatttgaaaaagtcaaaacctttttgaagagttacatcttttgatttattcagaaacaaacactggtaatcgattaccaaattagtgtaatcgattacacaaagcttttgtgtgaaaggatgtgactcttcacatttgaatttgaatttcaacgttcaaaggcactggtaatcgattaccaaaacattataatcaattacaac

SEQ ID NO: 152992 - DNA, 408 bp, Glycine max
  unsure (1)..(408): unsure at all n locations
ctgatcanatgactaanattaatcggcacaacagatatttagcagtaggagggaggcctccaacatacacccgcctagcatatcatgtaccctgtaaattcaatacataaagacaggccataatcagggaaagtcatgctaaacttaaaatgaaacttatataagactgtacttagtctcggcatgcctccatactcggaaagactaaacttaaaacgttttgtgttgaggaagttagtgtgtctctactctgtatgtataatgactctnttcttctcaatgaaagagaatatcttcttccagtagcacaatgatactatacaaacaagagcgcaatatanagaaacacatggtaaaagaagaccacacacctttcatctacagcagcacatgatactgtaatatatg

SEQ ID NO: 152993 - DNA, 455 bp, Glycine max
  unsure (1)..(455): unsure at all n locations
agcttctcacatctgactctctagttccaacgtggtgttttctcttgatgcacttcctccgatcaccttgaccaatggaatctccttccctcttaggtgctttgttcgcctatctttgatcctcaaaggcaatgttccatatgtcaagttcttcttcacttgtacgtcatccaatttgatcacacgagatggatcatggatatactcacgaagttgagacacatgaaagacaatgtgaaggttagaaagagacaggggtaatgcaatttggtatgcccacagtaccgactttttttagaatttggaaaggacagataaaatgaggtatgagttattgngatttcaatgctcgaccaactccagtccacaaagtgactctcaagaatacatgatcactaacctcgaactccaagtctttcctccttcttgtcctgatagctttctacctactctga

SEQ ID NO: 152994 - DNA, 328 bp, Glycine max
  unsure (1)..(328): unsure at all n locations
tctacttcataaccccttgaactacttcacattgatctatctggtccctctagaacaatgagtttgggtggtaattactatggcttagttatagtagatgattactcaaggctcatatggactttgttttaaccaaaaatgaagcttttggtggcttttaaaaacttgccaaggtgattcataatgaacaaggtctcaacattgtttcacttagaagtgatcatagaggtgaatntcaaaatgagtcttttgaaaactnttgtggagaaaatggaattcaccataatttntcttgcccaagaacaccccaacagaatggttttgtgga

SEQ ID NO: 152995 - DNA, 445 bp, Glycine max
  unsure (1)..(445): unsure at all n locations
agcttggagatgatgcttcaatggaggataagtaagagagaaggggggagcacgaaattgaaggaataaaagagggagagaagttgaactttgaagtgtgtctcataagactttcattcatcaaagttacaacaagtgttacacatgcttctatttatagactaggtaacttccttgagaaaacttccttgagaagcttctttgagaaaacttccttgacaagcttgagcttagctacacacactcctctaataactaagctcacctccttgagaagcttccttgagaagattcctaaagaagctagagcttagctacacacacccnctataatagctaagctcaccccatgccaaaatacatganaatataaaaaaaagttcctattacaaagactactcanaatatcctgaaatacaagggtaaaaccctatactactagaat

SEQ ID NO: 152996 - DNA, 458 bp, Glycine max
  unsure (1)..(458): unsure at all n locations
nttaactgaatntgtagcgttccaattgttttttanatggtgtaatcgattacaatatattggtaatcgattaccagtgtatctgaacgttgaaattcaaattcaattgtgaagagtcgtatcttttcataaaatgctttgtgtaatcgattacatggttttagtaatcgattactagtgacaagttttgaataaaaatcaagagatgtaactcttctaatggttttctcaagattctctcaagtttataactcttccaatggttttcttgaccagacatgaagagtctataaaagcaagaccttgacttgcattgtaagaacttgatataactttntacacannattttgaacatcttcttgaacttcttcttcttcttcttttgccaaaagctttctaagttatttggtttcaaaccttgtttttcacaaanacaaaagtgtgtattatcttttta

SEQ ID NO: 152997 - DNA, 401 bp, Glycine max
  unsure (1)..(401): unsure at all n locations
agctnttctttacaatcaatctgtctgctaactaacaattctaaatgcaagttcacattcttgttctttctttgtctaacatacatactagctcaaactcatgaaaagaaacacaaactccatcaaaatcatgcactcaatttaagtacttgtagtttttcgtgagggaaaatacttgtacttgggggcatgtcactcggtttggaactcccttgtgactcgggcttatcaccattgggggtggggtggagttgcctgtgcacaacaggatgaccttgacacttgctacccagctttcttgggtgtgagtgtcgtgtgggaatgctcangctatttcatgacgaatggtactacattgcatttgagagttaaggtcaagtgcatgcatcatactaagcatg

SEQ ID NO: 152998 - DNA, 422 bp, Glycine max
  unsure (1)..(422): unsure at all n locations
tcacacttgataatggagaacacatgatcagcgctaggcaatgacattcatggtactccgaacaaaggtggagtatggaggattgccttgagggtccgcacttangcaatcatgaaactcagctccaaactcgaaagtggaggacacatgaacagccctaagcaataacattcatgtggctccagaaaaggatgagaatggaggattgccttgagggtcctctcttangcaatcatgaaacacaactccaaactcaaaagcggaggacacatgaacagccctaagcaataacattcatgtggctccgganaaggacaagaatggaggaatgccttgagggtcttctcttaagcaatcatggaacacagctccagactcgaaaatggaggacacatgaacagccctaaagcataacattcatg

SEQ ID NO: 152999 - DNA, 506 bp, Glycine max
  unsure (1)..(506): unsure at all n locations
ntttgctcatctcgtccagngatccttgagtcacctgcngcatgcagcttgaagaaaaattagtattaatgtatgtaatgtataatntagtggngaatattaaggctatattaatgatgatatangatttcattagaattagaaaaaggggtaattaacgtcatatagagtctaaaagtggagggcatttttggtaatgactatacaactagtttaaaaataggattttaatttaattaattggtgactaattaaagtgtctaattattatgatgtaaataattaanataagttagagttgaacaccctgaanattataactcagactgacataaaactctatgtngggcatctgtgtgtgtatgaagttaatttcagtagctataccgttttaatcatagaantntcgtgctatgatatatgtatgtgactggtttagtaagcttgactgngaatagaactacctttgctagattcatcagtgcacatttgactgtgattaagcn

SEQ ID NO: 153000 - DNA, 397 bp, Glycine max
  unsure (1)..(397): unsure at all n locations
ngtanggttaaagtctcacgatagtcacgtgctcatgcaacagttgttagccatggctatacgagacatcttgccaaacaaagtcaggttagcgataactcacctgtgctttttcttccatgctatatgtagcaaagtcattgatcctgtcaagtttgatgagttggaaaatgaggccgcaattatactatgccagttggagatgtattttccccctgctttctttgacatcatgattcacttgattgtgcatctggtcagagaaatcaaatgttgtggtcctgtttatctatggtggatgtacccgattgagcgataaattgcanaagaagccattgaatttttttcagaatacttagagaatngctaaacctgtggccttctgagtctcgcatga

SEQ ID NO: 153001 - DNA, 204 bp, Glycine max
  unsure (1)..(204): unsure at all n locations
ngcgcnnngccgnnaccaattntcatgtntacacgttatatcgaactctgccattcttctgttatatcacttattcacgcgtaccaccaggcgttcacgtcaccaactacttgcttaaaacaatacgcctcgcctggcagtatccagctctgctccaatcctacacatttgcgacccgaagcctccacaccgatcaccaccccg

SEQ ID NO: 153002 - DNA, 422 bp, Glycine max
  unsure (1)..(422): unsure at all n locations
agcttgtaacttatataatatatacattttattgtaattatattttaacacatcagaatggtgcgcccataacccacaggtcccaggatcgaaacctggttctgataaagagtggcttccgatctatcacatatatatatattttatgcgtaaaacatatatcattacgcaatgacatttgagtataataaaaaatagttctgcagggcctaacatttcagtgcttatattaatttagttaccatttaaattttattattgagtcaactttttaacgtatattcatattttctctttggtaattntattttaatttgcttaagtaaacatattttttatggataataatggcttccagtttcttagtgaaccacatctgaaaaattatacttgaacaagaagatgtgttcactatgtcatag

SEQ ID NO: 153003 - DNA, 427 bp, Glycine max
  unsure (1)..(427): unsure at all n locations
ggtagagtccctntgtgtctctagcttcacacacatgtagnggaacatctatgnaaacctgcaacgtgtaagcattgcgttagctataatttatgaagaaccacttctagttctataattgtacaacatattagcatatgccaaactatgtgtatcatttggatcaccaaaataagaatattacctcaataaaatctccttttggcattagtgctctgcatgcatctctantcctttggtatggtgatattaaactagtgatgcaaataacaccagcatctgcaaagagtttagccacctcacctganaattntatatcgtgatgtctaattattaataaaacaataaaatataatcggaagatatcagggaaagcatttagaaagcaacataagaaaaaacagataaactcaccaatccttctaat

SEQ ID NO: 153004 - DNA, 119 bp, Glycine max
tgcttgagagacttctatggatgttggatctttgagcttcactatatgtccttcaatggtgattttcaatcatggagttgcatcggaagataaaggagaagaggcgagaggaggtgtca

SEQ ID NO: 153005 - DNA, 473 bp, Glycine max
  unsure (1)..(473): unsure at all n locations
agcttgtgtcattaagcgatattccactnttggcgttgagcacgacctcttgtattgagcgaattacctcctcgggttgcaattgcacttagcgcacaggtctcgttaagaaagttgtccaaagatgttatttgaaaaatctcaatagtaaaaaatgtaggcatgaatcaagaaagttgcagttcatgtttgaaggtgatccaacggttaacgagtctgggatcatggttttactgaaataggttaaacaaactccacataaccttattgttcacaccaagcaaccgcacacaaataagtcacacaacacctcaactaatccaacttaatcaaagaatgcaagaattatattaaacatctattttcagttatcaatattntaggctgttacaaaagaccttttcttgggtatcaacaccaaagtattcaagaatcttggagatcagaactgcatagggacacctganaaaaac

SEQ ID NO: 153006 - DNA, 357 bp, Glycine max
  unsure (1)..(357): unsure at all n locations
tagatactcaagcccattcaaatgaaaggaattcataattaaaaagttgagaagggttcacngaagagaatntcaaaatgactctgaattgttttgtgaacaaaatggcattaatcgtaacttttccgctccaagaacaccacaacaaaatgggattgtggggaggaaaaaaaagtcccttgaggaacttgttagtgtttagctctactgagctntaaaagattggctaagatcttgttaaaacataagcacttagacaatgaatgaaagctggagttgctgcacatgatgtccaacgctatgtcaaggaataagatncggctgcacaatgcacaaggcaagataaaatgtcaaatg

SEQ ID NO: 153007 - DNA, 437 bp, Glycine max
  unsure (1)..(437): unsure at all n locations
tatctctagcatgcattgtatgttggtctcgtcctttgtcacgggaagccggaaggtccatatcaccttcttaattgtacacatggggcacttgccccccaaatgcgcgaagtagaagagataattttccgggctctcgtgtccgtaaaatgcattcatatcatgcatcgcataagcatctcttcataacatcataatggacatatcctgcatttgtccgttatcatattccagcctcacattttgcatgagtcatggcatcatcatgcatatgcgttcaacaaactttntgatctgcaaaattgcataccatttgttttcatgtttgctcatccttgcgttttcctctacaaaacaaaaacaaagaagggggaagcgtgaaacttcacactacattcttagtttcatgtgttaggagccaaccatgttgggatcat

SEQ ID NO: 153008 - DNA, 349 bp, Glycine max
  unsure (1)..(349): unsure at all n locations
ctaacctcatcatctctcatagtctntagatntgngagccaatccaatccttgcgtccagactctcagccacttatgatagccgccgatgctcccattactgcttcccctaagctctatgtcctttcttcacgccgcatcccatgccttgcgaactccttggagtaccctcgcgttgtggtcactgaaaccccgtgcgatgaaaggcgtgatgctttcgtctgatggcactcctctcatggggtagccaagctgtcttatggcgaggacgggattataattaatacaaccccttgttccatcaagggaacatttggacatccttcgcatgaagatagaatcctgattct

SEQ ID NO: 153009 - DNA, 156 bp, Glycine max
cattctctctcattatcatattagcattgtaggggggttcagagcatttatacttcttctgtatctcgaggaatggtctacaaaccttgaagcctagcgttagttgtcttatacgactaaattctgtatagaaaaacctttgtcacagcatgtata

SEQ ID NO: 153010 - DNA, 387 bp, Glycine max
  unsure (1)..(387): unsure at all n locations
atctaaggggttcaaaatggaattgtgcatcgaaaactagttctcaaaacttggatacagtagtgtagaagtaacttatagaaaagagatagttatatagaagagtaaagaaaacactaaggttttataccggttcacctcaactcttgggctatgtccaattgtctttcaaaccttgaagggttccattaatcaattctttgattacaatcaggtattctctatgtcacttctggctataatgagtactttgtaccactcatggcactacccttaatctcctcatgagttaagacttaagtattctttgtcactaagtcattcctagccttcacaaacaatatatgtttgatagaaaatgattctaatcactcanagagtgttaca

SEQ ID NO: 153011 - DNA, 400 bp, Glycine max
  unsure (1)..(400): unsure at all n locations
tcacacatacacacaacanatcanagcanaacaaacatccaatcactgtataattacatactacaaaagcctccataacataacatcatcctcaattctcaaaccctaaacaacaaagcacccccgccaccaaacacgcacacacaagcagctaaatatcattcaagaagtaggatattgccataatccacaaacctaagaaaccacaaaactaaaccaagcaccaacaccattccaaaaacacctcacaaaacattcacacacacacaacaaaccaaataaaaaacacacccaccaccaattcacatccaaatcccaatcaaacaccaatcaataacaccaaaatcaacttccaacaaatccaagccaacanacagccatcaactactacanaccaact

SEQ ID NO: 153012 - DNA, 384 bp, Glycine max
  unsure (1)..(384): unsure at all n locations
cgccagcttcttatccaaggctcatcttggtggtgaagcttcttcttccatggcttattccctagtggatgacgcctcctctcacctcttctcctttgtcttccgctgcatctccatggtggaaaatcaccattaaaggacatcattgaagctcaaagatccatcctccatagaagccccacaagcaagcttccatcaagtggtatcagagcacaagagcttcaagtaggtgctccttaaacttccattaattnttttgctttaccttctcttccattgttggttcttcattntttctccatgtatctcctcacatgtcttgtgctaaatgttgttaacatgattctttagagtttccaccaattaaacttgctatagaagcta

SEQ ID NO: 153013 - DNA, 341 bp, Glycine max
  unsure (1)..(341): unsure at all n locations
tttctacttcttccctgccattgtacaataaatgtagcttatagcatattccatagaagaatctcatggctacttatatctgtgtaatgtgatattcgacaaaataaagtttcccattgtgtacttttaagctaatagttgaagacactcattgtgattgtcgttgcgctttatctcctttatgtttaattactcatttgacccctatagttatagaaactttctcttttagtccctatacttaaaaacatcccctnttagtccctacacattccatttttattccctttcagtctctacacatcattntaatcccttgtagccgctatggtgaggactaa

SEQ ID NO: 153014 - DNA, 464 bp, Glycine max
  unsure (1)..(464): unsure at all n locations
agctntngngatacttggttcatagcaatatgttgtttgtcttgaaatgatattttagcagatatgtgatgcagctctgggatctcttgatttccttgagtttcaatatttgttagcatttactactgttttgcatcaattttgtcttctgtgacccccttataatgtggattaattcaattgagcaaatctgttcgttntatgctcagcttctataagtcttttcatttacagatatattgtaatattgttattgagttcttggtttaaaactagttattgttattgtatctacccttgatttaaaactagttaaatttataagatactataattcaaaagggcagatagatccaaacttgatacacattttcacttgagagaatccnagtctgtgtgtaatcatcgccttccatttcaatgggattaggtgatggttttactcatgttatgactctatcata

SEQ ID NO: 153015 - DNA, 309 bp, Glycine max
  unsure (1)..(309): unsure at all n locations
tgagcttaatgaattaattgattgattgaacctggagcctattcagttgtatcttctgctaccttattttaagttgtaggagagcatcatccacagaagatggttcaaggaaaatttgtcccaaatttgggggaggtattatcaacgtaaatntgttccaaatttggggaaggcactcggtaacgattgaaatggtcaaagaaaatagtatatacacactggctctattatctgtgttaaaaaaaaaccaataaaaaactgtacgtataaataaagttaataagtgtgtatgctataaattcaggcatg

SEQ ID NO: 153016 - DNA, 481 bp, Glycine max
  unsure (1)..(481): unsure at all n locations
ggatccttaagcactgggctgcagcttaagaaaaggccaaactctcctttccaaaatttgattttaggcttaaataggtggctttgttcgtgcttgagcgcttagcgcaactctgaaccgcttagcacgaattagtgaatttcggcttaacgcgtgcttttctcgctcagcggatggactaaagcggtgcgcttaacgagatgaccctttgctcagtgaacatgcacagctcatccttcttctagattcttcctcgcgctcagcggatagctcgctaagccagtagattggcttagcgagaaggtgaaaatcagcacctcacaaactttcctaattaacctgaaattgagagaaaatgattattaaacacacaaaatggaagtactaagtatttattacctatctttaacaaaaagtaattacaacacttacaaataaccataaattggaggattntgttacaattatgccagtttataca

SEQ ID NO: 153017 - DNA, 436 bp, Glycine max
  unsure (1)..(436): unsure at all n locations
gggattcctagggcctaagtcatatttggcactntattctagcttctacaaactgtccacacactcaaanatgcagtcacatatgtacaaattntttccacaagctaaattccatataaacacacgcaaatgccattgaggcatgtcaccgaacacttgatgggtgcatgtttagacatgaaaaaaataaggaacggngggaatgtgacatgcccattcatctcagagttcacaataggcttgcggccatcccatacaaccccccaattcaaacaaacaagcatgaatccaaacattcatttcctcatgaaatntgaaaatacaagcaaacaaagcactaaaatacagcaatggcaagccaaagatcanaggagaatgacacttaattgtanggagtggaacaaaatgcataaaggagaacaaaaactcaacaatg

SEQ ID NO: 153018 - DNA, 384 bp, Glycine max
  unsure (1)..(384): unsure at all n locations
agcttgtcttctctagcctctnttgngcttttctacatttccttagtgacaagtcatctgcctagaagtttcttgtcttgacctggttgttgtgtctttctcatctgccatgcacttccatgtttaatttcgagtgtctcggtatattatgcgcctaaattggacatccgagtaaaaagttatggccatttgagtttgcctagaacttttgtgttcaattntgagcatcttgatatattattggcctgaatcggatatccaagtcaaaagtaatggccatttgaattttccttctgcttccatatataattntgagcgtctcgatatgctatgcacccgaatcggatattcgagtgaaaagttatgaccatttgaatttcttga

SEQ ID NO: 153019 - DNA, 437 bp, Glycine max
  unsure (1)..(437): unsure at all n locations
ntgaacaatatacttggtcttcatttaactgtctttgggcttggcggccacgctcaacanagtactttcgacacctactatacgttgatttcaccaatgttgttatgggaatgttgcgacaatcctttanaaccttattgatacattctgagaggttcgttgtcatatggccatatcgacgtccttctctatcgtaagtcatcgtccattnttcctttgagatgcgatcaatccatgttgttatggctggactcagttcacgaaattnttctaaattttgatcacaaatgtgcttgcatggagtgtangcctgcataaataactatgaataacactttaagtttaatgaagcaaacatacgtgacatcaatatgaatctacccatttgtcacattttttttgttacttattgaatttcattgaagtcgcttgtatgt

SEQ ID NO: 153020 - DNA, 525 bp, Glycine max
  unsure (1)..(525): unsure at all n locations
atttttatgatgcgtctctgtacacagccatcctctatagtcgcactgcntcantgcaagcttgaacacacattgtgcgcgtgggtgatatccactacacaaggtttgaagtagaagagaccttctaccctatcacacaacgtggaggacatacgggggcccgctacatgaatggccatcattggcaatgctgaagggattctgcgcctcactatgcgagtgcacacaataatgcagattgtgcgtacgtgagcatgaactactaccactatatagatgtgtggtacacacaagagcacatcttagaagcttactccgcacaatggtggcctacttggaatgaagcagacatatctccttttaatgacgcacggacacttatgcctgacctaactacgattcacgcaacatgtcagcgcagatcaatacggataangactgatatggactggatcataccatntgatcgccgacngacacgtaatacacgtggagcctaaggggctacatgcatgctgcctacga

SEQ ID NO: 153021 - DNA, 523 bp, Glycine max
  unsure (1)..(523): unsure at all n locations
tctaattaacctacatatgagagaagatgattattaaacactcataatgaagatactaagtatttattacctatacttaatagacaatacttataagcttacaaaatagccatatattgagagagtgtgatacaatttatacaagtgttatacgtataagttagatgttctcaccgactaacatcctatcaaggtcatcaaaattagaccagtttccattcttgaatgaccctaacaaagcatgcatgtacgtgatcaaggtaaaggcatactagaatgaatagctgatagcacagagaacacaccaaacatcattaaatagatagaatgatatttacatcaagtacctacaaggaagatccaacagaggattntagctttccatatccaggaagccttctttacaacanagagaagaataagatgacagagtgctgctatacaagcggtgaggatgtcttcttcacctgtaggatctcacaaccactcaagaactcatctcagactcatagaaacggcttcg

SEQ ID NO: 153022 - DNA, 304 bp, Glycine max
atcggtgagagtgtaaccttaaactgtgagtgaacgactagctgtgagtaataatctttgcatgaatctctgaattttagaatgaaatgtataactgagaacatgatgaaggccatgattgtacatatacaagctcttttgaccaaacaacttaccttgaatgataattgcatcctttgctccctttttgagctgaatgatgttgtaaaaaatttgaaccctaaactaaaataattatgtcttgataccttgtttagattttaggagagcatatggttcaaggcaaatctactctaaatttggg

SEQ ID NO: 153023 - DNA, 344 bp, Glycine max
  unsure (1)..(344): unsure at all n locations
tctggtgggacatcttgacttgctntccaatctgacattcaccacanattctgccttcttctattttcagaatgagaatgcctctaacaacacctttgtcaatgattttcttcatgcctcttaagtgcagatgtccaaatctttgatgccatattctgacttcatcttctttggaggatagacatgtggaggagtaactggtttcttgaggtgtccataggtagcagttgtcctttgatctgctgcccttcattagaacttcactcttctcatttgtcaccaagcattctgactttgtgaagtttacattgaatccttcatcacacagctgactgatgctgatc

SEQ ID NO: 153024 - DNA, 385 bp, Glycine max
  unsure (1)..(385): unsure at all n locations
gtccatgaggaatctccttgggaaagacatctttaaattcctgcaataagggttgaacactaggagaaacataaatagtttactgattagaattatcactctctctctcttgtgtatcactccatctctcaagtgtatcactcttcctttttctattcctctgtgatgcctcactattggccctctcttggtctctcttttctctccttctgattcggacatcacacacttctctgagggataaagttttatgaataattttctggtcatggtgctggagagaaatcttgtttgagaacccatcatgcactgctttggagtcctcctcaatgatggccctcactagtgccatctccatctncttatcactaacaatcaaactttc

SEQ ID NO: 153025 - DNA, 247 bp, Glycine max
  unsure (1)..(247): unsure at all n locations
ggtagaatggccagacatgatacatgtcagggattggtttggttcataggtaatatggatgtcccacattatttccatgacacatatgcaaaaatgatgacttggatactntatgccaaactggtcatgcatgcacctatgtggacactcatgtgtcaaatttttatggtcatgtgatgctagggctcaggattcattctctctattttaatcaacccaatgtttccaaaatatgttcctttatcca

SEQ ID NO: 153026 - DNA, 357 bp, Glycine max
  unsure (1)..(357): unsure at all n locations
agctttaaagtttaaaaaatgtaatgtaacatttaatagagttcaaattcataactaacatggcataatcaaactaaaataaataataaccaagagtcaataatcctttcacgtgtcatgaggacgataaacctgagcatcattaacatggtcctcagttccatctgttatggtagtggatggactangagctagcatgatagactgaatatgcaagtgttgtagtatatgctgcatttgctcattntgttgacaaatttgctcattntttcttacatctgttgtcgcatctcttgactntggtggtcatgagtctccattagttgcaacatcttttcctcaagtgtcttctcctta

SEQ ID NO: 153027 - DNA, 406 bp, Glycine max
  unsure (1)..(406): unsure at all n locations
cgatgtacactaagcctcacatcttaggctaagcgcatattgcagaaagaattttggtgttgcagaaagcgctaagcaccgctgctgcactaagccccaaatgcttattggaagttacaacttcaagttgggcttagcgcggngctaggctaagcaccagtgttttaaactcaaatgtcatgttggcacgctaagcgcaccatacgaatttcagttntttaaaagtagaggcagaggcacttgggttgctaccttggcacccaaacctctgcactctctcatctctgagcatatttctatttctgctttgtgcttattgatcctctacatctntcttcacactctgcattacacaatccaagtaagtaacttgatttcttttcacttttattttcatgtttcacag

SEQ ID NO: 153028 - DNA, 330 bp, Glycine max
aaaaaaaattaaaaattaaaaccagggtaagggagcttacttggtggtgaccctttttcacatttcctttttcccaaatttggaattactctttttatgccgaagccggttaccggaaagtggctcggatcggccaagtaataattaaaacggaatgatccgagtgtcaacacagggaacttattcctttggcaaagctttgttcaacaatcatgcattttggtgacagaaaataataattgtgaattgaagtaaaagtatgatatatcctaattgaaaagcagtaaacgtgagcaaataagtgtgaaaacagtgatctaaaagcattgg

SEQ ID NO: 153029 - DNA, 421 bp, Glycine max
  unsure (1)..(421): unsure at all n locations
tgattntngttctgattgcatgatgctaggatagttgatagttaanatagtgttaggaattatattttcatacaatgtatgttgttctggttaggaattgatggcctaattgtagaagcaagcttcatgatgatgaacctagcaattttgacgatgccaaaagaccaagtgattgattcaagacttcaagatcaagcatcaagaatctaatccaagattcaagattcaagagaagaaatcaagaagcaataagtcaagacttcatataggataagtattaaaagaatttttcaaaaacaaaatagcacagttttggtatacaaaagaattntctcaaattntttaagttaccagagtgattactctctggtaatcgattacctgttatcagtaatcgattaccagttgtcataccctaatt

SEQ ID NO: 153030 - DNA, 488 bp, Glycine max
  unsure (1)..(488): unsure at all n locations
atccttaagtcaccgcggctgcagcttataaactgtttttaaaactacctcatattttagtttttagaagtaaaaaacaaaaacagctttaagatgttntgcttttcagtttttgtttttctttaaaatctacaaaatacaagaataaacagagaatttacagttttcattaatggaatttatttaaatatcttctctttatcatttctgaaacttttgtaagcattnttttgggatatgattatttcaattggccatgatgttatgttggtgccttgctaattatgttaatgggtggtttaatggcctattaatatgagaaatatagcttgagtgggtgacactcactcagctgaagcttcttatattatcacacaaaagccaaccagtacatatgtatatagagaggtgcagactaagcaccttatcaaacggctacagcagagaanaagacatgaaaggactgactattacaatntacaagaata

SEQ ID NO: 153031 - DNA, 355 bp, Glycine max
  unsure (1)..(355): unsure at all n locations
ttgaattgctttntggccttctggngtctccctgcctccaattaagactcgatccgggttgaaaagatcttggattgcagttccctcagcaaggaattcacggtttgaaaggatttggaacttgattccctttccattgtgagtcaaaatcttctctatggcctcagcagttttcacagggacagtggatttctccaccacaatcttgtcactcttgnagacatcagcaatcatgcgtgctgcactcttccagtaagtcaaatctgcaaccttgtcggcttcaagaccacgagttnttgncggcgtgtngacggagacgaacactatgtcagcctcatagacatgtttctcaaca

SEQ ID NO: 153032 - DNA, 483 bp, Glycine max
  unsure (1)..(483): unsure at all n locations
cggggattgatgcatctgcactcgagatcctctgagtcacctgaagctgcacgctctctcaactactggacacatggttcacagatgaaagcaagaagaatgactacaagatgatttatgttgtaaaaaatgtaaggatcaccaagtatttgaacttgtaatggttctctcggtaagcttcaactttcccaatctactcgaagcacaagattgtcaaagttggtggaaatgaaaggagcctttcatccacagctagtcaagggtttctacagctatgcacttgttgacccttgaagtaacctctcttctaaataaatggagtaaaatagtcttgatctattgatggaagaagtactggctggatatgggggagtcacaattctataaacgatgatgggacaacagatgagactatgangatgttctgacctttagaactgaaaatcctaaagtgtggctgttgagagcaaatgtgttattctt

SEQ ID NO: 153033 - DNA, 376 bp, Glycine max
  unsure (1)..(376): unsure at all n locations
ntgtcctcagatcactcttgttggactcagcccaatcgagatactcctcttaggtttagactaacttaaactgagtttcatctgcagatccctcttgtaccaatgccaaatagtactctaacaggagattctttggtggaagtagtggattataccatcaagacaagagagcagataacaaagttaattacttcaccacaacttgcttcgcgcccaggaaagaatgaaacattatgctgacctcaaacgagtggacaaggagttcaaatgtggagacctagtctatttaataattcactcatacaagcagcttactttggcanactatgctttccacacatagcagccactagcggtctatgtaaagaaacatcat

SEQ ID NO: 153034 - DNA, 338 bp, Glycine max
  unsure (1)..(338): unsure at all n locations
ngttatatacggaagacaagaaaatgggatatgaacgaaatgatgatgaaagcttagaatctagacatgaattgaaagtctcagattcgaaaacttacccgttgaataatgaagaacgaatgaagaatgaatgaagaacgacggaaaaccatcatggatttgctcacgataacgtctcggaagcattacagaagcacctcggcttggattttcttcacggaaacaattttttttcaccagaacagctgaaatgcatagccaggggatccgggatccttggaacaaccccctttttctctctttataagaaaaggcgagaggatgttgctgcccagctc

SEQ ID NO: 153035 - DNA, 393 bp, Glycine max
aagatctaacagattcaacctaatgttcatgagaatgattgttgcagataatattaagataactctccctaagactgataatgctaaaaagtttatggggttagtgggagagcgctctcaaatagcttataagtctcttgctgggacattagtgagtacattgaccatcatgaagtttgatggttcacgtactatgcatgtacatgtcacttagatgacaaacattgcaataagatttaagacctcgggaatggttgtgaataagaacttccttgttcagtttattttgaactcattaccatttgtgtatgacctgttccaaatgagctataataccatgaaagataaacggaatatgcatgaattgcatagtatgttagttcaagaagaaac

SEQ ID NO: 153036 - DNA, 277 bp, Glycine max
aggattgatggcgacccagtattgagagatacgaggatatgggctgcgtgggagtacgtgagctcagttggcggtgggcaacaggggatggtgggtttatgcgcgcattgtggatgaggaaaacttgttgtgcaccatcgaccgaccgccacctagtaccacatgtgatgggtaccccataatcctacaagcttgagatgaggaagtgtggaagggtgaaacttccttgctttagttgtgaccacagagtggtacctggagatatgtcgcgggggtc

SEQ ID NO: 153037 - DNA, 457 bp, Glycine max
  unsure (1)..(457): unsure at all n locations
agcttctagagagttctacactactctaatattctcctttctacactntnttaaaaagttataaaattttttagaacctctccaatcaagaaggaatcccaacacattccttaatgcggatatcttcatttcaagaagaattaagtgatgaaaatataaggttggcttgatgataaagggtgaaggaagagagggataggaatcttccggttaacaaaaactaataaattaacaactaacatttaccgataaaaaaaaaaaagatagaattaagtgattagttttatctccttttcacattataggttcttcaatgtttcttcacaatttctaaaacattgtctgtagactgctccaagcccagttccttctcaaacagccccagagaaatgacattgatgtgtctaatataagttctctcttagtcttaaaatttcaaatgtagtgtttactatac

SEQ ID NO: 153038 - DNA, 577 bp, Glycine max
  unsure (1)..(577): unsure at all n locations
attgacccatgtgaangcgatctattangcgacactacagaagactcagctcagtccacatagtcggcagacttatctgaatcttttgaagatgagagaacacgccaattaanaagagaaagggagaaacttcaagaacatggtcttcactcttcacgtccaagagaagaatccccacaaatatcacaaacaactcttccacggatttcaccaatccaagcactcacgttcaaagcaaataacaagagcaacagaatcaaacccatcattgtcttttgtttttccatgggtgagattgaaaaaaaaacaacaaanaatggtatctttcacaagcactatgtctttggattctatgagtagttttcttataaccataatgctcctaaaggatgtttatggctcatagtgcatggattntttcaccgacatgatatcttatattatgtgtaagactatctgaactntatgttaagatcacttggattctcaattttaatggatggttntagctaataaaagaatcttatattgtacgcctacaaataaaagaacaaatcgtntaactttacattctttn

SEQ ID NO: 153039 - DNA, 460 bp, Glycine max
  unsure (1)..(460): unsure at all n locations
agctnttagcattntaccatattatataatggctagcttgttatatattctcctaactacatggcatgccaagatatcactaatatgtttaatgtccacggttgtttctgttaagtttgggctacgtgagttgactctgataccattatcattatcatgatgtactgttcatggacccaactatatattatattattaattactaaaataagagttagttttaaaacactacaacttttctactataaatgtattggtgaaatcattcattgaaatgataatgctacttacatatattaattatttaaaaatgtatattataactntaccacttctctaaaaaaacaaaaaanaaaacttttccattttacataaatatgtaatatggtgttaattgatatgtatcaagcatttattttcactaacccaagtctgcaggaattctatgtactttgtcatt

SEQ ID NO: 153040 - DNA, 307 bp, Glycine max
  unsure (1)..(307): unsure at all n locations
tgcataaatgagaggaaacttgagtaagttntatttataaatatatattacagatgatcatcttttaatttcgaaaaattatattcacttttattctgcaataaatgtttagttattttctgttgaattagaatttaatgctgatttttcaattaatcatttctaaactaatatcatggcttgtggacattggaatctattacattagtttccccacgctaaaaaaaaaatagtgatggtcaacaattgcggcgttattccatgtgcatggagatcaatacaccgacaaaatagtgaatgcacccat

SEQ ID NO: 153041 - DNA, 260 bp, Glycine max
  unsure (1)..(260): unsure at all n locations
ctttgatagccctttntgagccttgtttccctttccttgttttgaagctcactacaagccttaagtgaaaaaccatgatatcaccatatccttaaggaattttggagctttggaattgttttgggaataagtgtggggggtttttgtttcattggacaacttgttttgttggctatgcttcatgatgtattctgggccatacttgatgtacattgtatattggttaaatgttggacatgctgaatgaaatgttgtttctc

SEQ ID NO: 153042 - DNA, 401 bp, Glycine max
  unsure (1)..(401): unsure at all n locations
tgaagggaagagagagatcgatcacgagcacatagcatggtcttaanagaagagttagcagcttgcttaaggtccaaaaggaacttgactcagcgtttgtgcgagacagagatcaacatgttggctatcatcaccaagtatcaataagaactaagtctagccacagcccacgagcatagggtggcaaacgagtatgcccaagtgtacgcggaanaggaggctagaggaagggtgatcgactcgttacaccaagaggcaaccatgtggatggaccaatttgctcttaccttanacgggagtcaagaacttccccgattgctagccaaggccaaagcaatggtggacacctactccgcccncgagggagatcacagacttctcgactattgtcagcatatgat

SEQ ID NO: 153043 - DNA, 363 bp, Glycine max
gcagctaactaccatgcactacggatatactctaaggaacgcaaaaagtaacaacaaagaccacattaagaactacatatgcagcgacctcaacgcaaaagtattaccttcactcctcgcaaccaaagggaacaacacaccaaaggaaaaatggaaaacaaagggaacttatccaaaaacaaagcatgaaagtcagcaaacaacaaaaaaggacgcgaaaagatagaacaagaaggaaaaatttagtaaagaatcatagaacgtgaagtaaacaacaaaacaataacaaaccgggtagaaaaacagctacagccgcgccaaacacagacatgcacaacagacgtaaaaaacttacaccttgaa

SEQ ID NO: 153044 - DNA, 366 bp, Glycine max
  unsure (1)..(366): unsure at all n locations
cgctcgtggagcttctatggaggctggatctttgagcttcaatgaagtcctttaatggtgattntccactatggagatgcagcgaaagacaaaggagaagaggtgagaggaggcgccatccactgtggaataagccatgaaagaaagagtttcaccatcaagatgagccttggataagaagcttggaaggatgcttcaatggaggaaaagacagagggagagaaagagatagggggagcaagaaatcgaaggaataaaagagggagaatagtggaactttgaagtatatctcacaagactctcattcatcanagttacaacaagtgttacgcatgcttctatntatagactaagtagcttccttga

SEQ ID NO: 153045 - DNA, 514 bp, Glycine max
  unsure (1)..(514): unsure at all n locations
tgcnttattgctctatctactcccgngatccttgagtcacctgcggcatgcagctntcnggtgcggtctaggacacaatgtcaattcatacgatatgcgaggatgactccccgagcaagttggatttggtatgaccatgccctcctggtttctgactangaaattggcgagtggaggagcgcccacacatttacgcgacaagcataatgtaaccctttgtggctnttaaactctacggnggggcctangctntagagattccttttgttatggcattatgtcttttgttcttgaatttataaatataaagatctttcttcatctgttcctgcacctctacccattctcattcatttgcatgtntatttctntacgcttaanacactagatccaacaacgagtccctcnaaggtactaatacctgngaccctgncatcgattcatgcaagaagcgggcacacagagagtgagaggacgatgatgtgtactttcccacagtngagaaatagtactn

SEQ ID NO: 153046 - DNA, 369 bp, Glycine max
  unsure (1)..(369): unsure at all n locations
gcatttggacacctattatgtatctcctatgctgtacctacatacgtatcagcagggccaccatctcaatatttacgagatcatattcatacaccattggggcatttcaccaagcacttggtgagcgcatgtttggacatgaattgcaagagaatgggagcaatgtggcatgccccattgcttcaaaatacaacctatgcctaagaccttttcattcagattctcaattcaagataacaagcgcctaagctaaccataactgcctcacaaatataatgcatgttctcacaatttagggcaccaaaagatgaagaaaacacatcantgggaagcatatacatcaaagatcgaatacttacttgttggagt

SEQ ID NO: 153047 - DNA, 419 bp, Glycine max
agcttcgctgatttagttttcaccgacgaaatgatcgaagtgggtctaaaaagaggcaaatctgatcatcatgctttgataaatgcaaaaaaaattggggcaagtgaagagggtgagaatgaaggagaaacccatgttgtgactgccattcctatacagccaagtttcccaccaacccaacaatgtcattactcagccaataacaaactttctctttacccaccacccagttatccacaaaggccatccctaaatcaaccacaaagcctgtctatcacacttctaatgacgaacaccacctttagcacgaaccaaaacaccaaccaaaaaggaattttgcagcaaaaagcctgtaggattcaccctaaattccggtgtcatatgctaaacttactctcaaatctactcaataattcaat

SEQ ID NO: 153048 - DNA, 423 bp, Glycine max
  unsure (1)..(423): unsure at all n locations
nggatggcaatagaattaaccaattattagtttggccataggaagttcgattgccttattntatttcgattntgatttcattatgtttctttaattntgtttcttacgtaaacaaagcaactgccaaatgcatttccctggaacaaatttatttgaatatgtctttgggtttgttaaatcaattnttaactnttagtagacttacacaaatatgttatgttatccaatgggcatatgtaacgggtctaaagattagacaacgtatattcttcattaagaaaaaggaaaaggcgattataattntgacttaagaagttgttntgattctgtttactgattcanaagttggctgattgtttnttagttntctactggattttattatccttgaggacttgtggtgtcctcacatagtgtattttc

SEQ ID NO: 153049 - DNA, 311 bp, Glycine max
  unsure (1)..(311): unsure at all n locations
tctgttgttcaatttcgagcgtctggatatattatgttccatattcanacatccgagtgaaaagttatgaccattagaatttctcgagagcttccgttgttcaatttcaagagtctagatgagttatgtacgcgaatcgaacatctgtgtgaaaagttatgaccattcaaatatcttgagtgcttccgttgtgcaatttcgagcatcttgatatattatgtcccacatttggacattcgtgtgaaaaggtatgaccattcgaatttctcgagagcttccattgtttaatttcgagagtctagatgagttat

SEQ ID NO: 153050 - DNA, 575 bp, Glycine max
  unsure (1)..(575): unsure at all n locations
attgcacgcatctattangcgcactatacgaatactcaagctcttccggagcccatgaatcngcgtttcgttcatgtgtctccacctttcgagttggagctatgcgtagggattgcttagtgcaattctccattctcaacctttntcggagccccatgaattgcgttttcgttcatgtgtcctccaccctcgagttcggagctatgcgtagtgattgcttagtgcaattctccattctcaaacttttttggagccccatgaattatgttttcgttcatgtgtcctccaccttcgagtttggagctatgcgtagtgattgattagngcaattctccattctcaaccttttacggagcccatgaattgcgttttcggtcattgtgtcctcaccttcgagtttggagccatgcgtagagattgcttagtgcaattcttcattctcaaccctttttcggagcccatgaattgcgttnntcgtcatgcgttctccacctctcgagttggagctatgcgtagtgattgcttagtgcaattctccattctcacaccttttcagagcccatggattatgtttg

SEQ ID NO: 153051 - DNA, 415 bp, Glycine max
  unsure (1)..(415): unsure at all n locations
gtatatgacatgtcccacttgtactttntttttttatctaatttgcatcccacaaaattagaatctctggatcttgattcatccactgatttacctttctcatttaagtcaaggtaggttgatgtagccataagaatggacgcttctttgcattnttccataccaaatttttttattagttctatgcagtatttattttgaccgaggaaggttccatgtttcattttcttgacttggagtcctagaaagaaatttaattctcccatcatagatgtctcaaattcttttttgcatacaacatgaaaatcccttgcataaggtttcattagtatagccaaatataatatcatcaacatatatntgaacaattaacaaatcattgtttactttcataatntaacaaagtttgtcaact

SEQ ID NO: 153052 - DNA, 260 bp, Glycine max
  unsure (1)..(260): unsure at all n locations
cgatgataaagactccccaagctatntatcttctctctcagagaggctntgtctcactctaagaagtggatcactcttatcttggatggataggaatgaaagctcctacacttatttatactactccatctncacaataaatggtggagattacttgtctcataatgtgaagattaattctctataatgcttcacacattctaagagtttctacactcttccatattctttcataaggttccagaaagttttacacatct

SEQ ID NO: 153053 - DNA, 181 bp, Glycine max
  unsure (1)..(181): unsure at all n locations
tactttgtcaggtacatggtcacttgcaatttcattccttagctccttgtcccttgtcaagatcttccaagatactattataacttctttaggaatctcttctgaagcctatccttcaagggtagcagccttcttttttgcttcttcttctgctntcttcttcatggtcttttatgctctt

SEQ ID NO: 153054 - DNA, 585 bp, Glycine max
  unsure (1)..(585): unsure at all n locations
agggtacacagcacaaaaggacngctgcgtaangctacctatcattactcaagctcgaatgaggaagtgtagaacggtgaaacttcctgctnttattctttgaccacagagtggtacctggagatatgtcgcgggtatagtcagtcagtgagaacctgtgatgtacctaagcaggcgagctcctggcagtcaacagataaaaggaacaaagatcacaaagcaaggaggcttgtgtggttgctggccagttgtgaaacttgattgatatatgggatgtggcctctggtaatcgattaccaagggtgggtaatcgattacaaggcttanaaagtgaagacaggaagctaagatggcctctggtaatcgattaccaaggggtgtaatcgattatcangcttgaaaatgggattaggaagctaagagggcttctggtaatcgattaccaaggggtgtaatcgattaccangcttanaaatgaangcagcatgtggtggaggcctctggtaatcgattaccaggctgtgtaatcgattacacaggggaacatgccactggtaatcgttaccaggtatgtgtaatcgatan

SEQ ID NO: 153055 - DNA, 320 bp, Glycine max
  unsure (1)..(320): unsure at all n locations
atcctctgagtcacctgcngctgcagcttacatggagctacgtcattgacggtttctcatattccttgctacgttaataagcatacctctgtatgtctccatcttgatgtagccttncattgattcctcaaacttgcagactcccccatatttagtcctgcaacttgctttcaaactgcaacatcaatgatcatctctacatcattaacagtagagtataaattgccttccatatcaacacgggcacatgtgtagaaaacctttaccaactcaaggtagaagattnttatcttctacaccaatcttaacaaaccatatgc

SEQ ID NO: 153056 - DNA, 126 bp, Glycine max
tatatcatccagttccagtcatggtatatagtataaaaatttaaacatcaacacaacatgcaatgaagcctagcttccaaagacaacaaggttagggttcaacaagtggaaagaccccccccccct

SEQ ID NO: 153057 - DNA, 248 bp, Glycine max
  unsure (1)..(248): unsure at all n locations
attcccttagcaatcccccaaattaagaacttatcataacttgaaacccttatactctcttagaaccctaaaacaagatcaaggttatcaaaattaggctcaggggtttattcaaacaaatcattattacttttggctcaataggggtgcaagggataaattcatcacaggttggctntttggctgagtggctaanataaaaagaaacnatggcttgatcatatccaccttatgcaaataatcaaata

SEQ ID NO: 153058 - DNA, 305 bp, Glycine max
tatagatactcagcctcattggagcttgaggcctaggatcttcttatcaatggattctcttgcttcttggaagatgaatggaagcggaatggagaaagggagagagagaggagacgccacttcaaagagaagatgagtctagaagaagctcaccaccataggaggccatggataagagcttggaggaagaaggagatgaatgaagggagagggagagaagagcacgaacatttgtgctctacatgagctttgagatctgaagtttaatattcaaatgatcaaagttgaaaaaaatgcacacacat

SEQ ID NO: 153059 - DNA, 362 bp, Glycine max
gcttgttggccgcgattgacaaagggtgcatatatacgacgttagtctctgcatgctatcatgcgttgactgttagcgatagcaaaagaatgtttatactaataaccacttgggtatttctgccggccccctaacttcacgacttagtaccgacagagtttgtaagcgtggaagacgacgtaaatctccgcatgtgaacgagcttgttggccgcgattgacaaagggtgcagaagacgacatttgttttttcatggtatcatgcattgagtcttagagatagcaaaagaatgtttatagggataaccacttgggtatttccgccgacccccaacatcacgagtttgtattggagaggttttt

SEQ ID NO: 153060 - DNA, 416 bp, Glycine max
  unsure (1)..(416): unsure at all n locations
nttaggaccttatgtttagttnnttggcttctaaatcttttgacttgtaaacaaaaagtttctttgtaatatttcaatgcttaagtgaagtgttcagattatgatgtttacaattacttcaacaagtccttcgataataaattgttctttctttttgcataagcataatcatgcatcattctgcattcatagtttccgcatcaagtctcacactgtgttcaccacttcaaaaggataatcagccgccgtccgaagaaagtggcccgacgaattctccgcanaccaactcgcattttcagaaatggatctaattgagcaagaaaatcagagtctcaaggaggaggttgccactntacgagaaggaatggataggttgacgaccatgatgaatgcactcctgtccgcccagaattctc

SEQ ID NO: 153061 - DNA, 435 bp, Glycine max
  unsure (1)..(435): unsure at all n locations
agcttgaggcacttgccttttaacctagtgtctccaaagtggccttacccaagtatcttgttttccattgatgtgccatcattttcttctattttctaaaccctttttgcaccattttaattattgattggtcttaattgtcaattaattaggcagttttattatttgggcccattcagccaatttgatgtttttaatctaatttcaggaattaatgaagaattgggcttgaatctagcattgggcttgaatctagaattgggcttggacttgaagagggcaaactaatttattctataaaattagatcttatcttatctagatattatttagatttgatctcatctagatatcatttcaattagatcttatcttatcttatcttatctagatntgatttgattntacttatgggcttggatttaaaacatattt

SEQ ID NO: 153062 - DNA, 243 bp, Glycine max
tgacactacttatcttaccctacttctaccaccaaaattaagtataacctatagaattttactcctgaattaattaattaaacgaatgtgtatagaactttctattttcttttcataagtaaacattcctcgcttagacgcttcgctatcttcatagcgctccaatcatattaatagttattccaccccattctgtgatatacaacctgaaaagctctgaatatgcttgatacggaattagtt

SEQ ID NO: 153063 - DNA, 257 bp, Glycine max
taatttatctcaccctcatttgtcacaagatagtgacatggagttgatggtcaatatttgtcacaacaaagtatgtttatctcaacctaatttgttgcagcactccatttctatatattacaattattcatgttcggcattagcatgtacgtccctgcaactattgttccacccatagcaaggaataagctaaccataacatgagcccaacaaaggaagaatgctgatatagatgatgcagtataaagaaaactgaa

SEQ ID NO: 153064 - DNA, 522 bp, Glycine max
  unsure (1)..(522): unsure at all n locations
ntanatatntcagatgaagtcattcaattattgttacttcatatgtagcagctgggaggagatttatatgtttgtcaaatgttgttgacaatgtagaaacattgttaggcatgacaaccggatcgggttctgcttatcctatctcagtccccgattcctcatttccttctctacccctgtccccgaaattcaatgggagtgcatatttatgtccatcccagtctccagtggggttgagtttttcccgtcccgtcctgcccccgacatatttataaaattntattaaaaaatctaattnttcataaaatgaagaatatagatttaaataaaaatcacaatattgtacatgacaacatanaatccaattcaacattagcatanaattcaatataataatttcatggtttaatgtgttatatatatatatatatatataatgatatntttgtacaataattattagcgtggaggaattggaggcgggtattaataatctcatccctgaccccgaacctgattttg

SEQ ID NO: 153065 - DNA, 267 bp, Glycine max
  unsure (1)..(267): unsure at all n locations
ctcgctgcanaattcatttcttggttgttgctcttggtttgtgctaaaggtggtgttcgtcattggaagtgcggtacacagactttgtggctgacttaaggattgcctttgtggataactgggcggtgggtaaggagaacgtttgttattggctgaatcatgacatcgttcggttggtgggaaacttggctgtctatgaatggcagacacagcatgggcttcatcttcatcctcaccctcttcatttgccccagttttctcattcgt

SEQ ID NO: 153066 - DNA, 360 bp, Glycine max
tattccgaggacagttcattatcatgcacagcctgcaagagttggctcacaatacgccaatcatatctatggagcattttctagagccagtagcctcgcctgaagctcaacttccattggtgaaaccaaacgaggttgctccgcctgagctcacacctgagtaggtcaattcagagccagctaacccacaatctccagtggcgaatccaccttcttcgcttgagcttgaagcaagtcccccatctcctcctctgaatgtcatttctgacgcatcattagatgaagcatttgctccttctgatttaccagctgcagatacagctgaccaccttgtttccccaatcggaggacatgctgatc

SEQ ID NO: 153067 - DNA, 237 bp, Glycine max
agcttgcttgagaagcttctatgtaagctggatctttgagcttcaataaattccttcaattgtgattttcagccatggagttgcagtggaagataaaggaaaagagatgagaggagacgccatccactagagaataagacatggaaagagaagcttcaccaccaagagagtgtcttggataagaagcttagagaggaagcttcaatagaggaagagaatgagagagagggagggggg

SEQ ID NO: 153068 - DNA, 243 bp, Glycine max
  unsure (1)..(243): unsure at all n locations
cttganatcgaanactaactggttgaagatngacgaacaatgaatatcgatataagaatggtgaagaacactagtataattcatcacgaaaacgtcacgaaagcatctcggcttggattattttcttctttcttcttctcctcactaattgtaagtgaattttgagtgccaaaggtgttgaaccctttttcctcagccccccatgccattttattgaaaaaattgagggggggggggggtctc

SEQ ID NO: 153069 - DNA, 315 bp, Glycine max
  unsure (1)..(315): unsure at all n locations
gcttcctccacaagcaacagccttctggaggaatcttctggaaggcccaagtgggcctggttgctatttgcacccccatttttactaaatacacccccttctatttttttggtgattctttttccgtaatgttacgaaactttacgaatttcgtaacgatacttattttttcttccgcaaggttacgaacccttacgaattatgtatttactctnttttagctttcgaagaagttacggaaacttaccgattgcgccaaaacacctcttttcgacttccgtcacattatggaatttcacggatcgcgcaagcctg

SEQ ID NO: 153070 - DNA, 446 bp, Glycine max
  unsure (1)..(446): unsure at all n locations
tattatggtctaagctggttacacgaacatntattcccatcatatataataaataaaaacaaaaattgagctccaccaaaaacaatagtttgaaaatcaacttcactaatgttggagaagtcagagaaagttgctagacaaaaaatatctttgtcatatagctggaatgatcatccgtgagagaaaattcatggcaagcatagcaaggttcattcttcttgaaaccacaattggaagcttcaaactaataatcttggagaccatattatttaagcttcaaattaatgcatcttgaacttagtcacgactagtacactagagacacgataaagtcaccaganaacacgcaaaagtacttaataaanacttataagttaatggttagattaataacatttagtttaacatggttttaggttgtcaaattggtccgtcaaaaaagtttc

SEQ ID NO: 153071 - DNA, 115 bp, Glycine max
ccgcttatggcaccattacgtgcttaaataaactacgccccgccctgcactcatcgtgagactcgtgcgactcattaatcattctgtcgaatgtgagccatccaactgcacgtcg

SEQ ID NO: 153072 - DNA, 497 bp, Glycine max
cgcatgatacatctgacccgcgatctctgagtcaacttgcagctgcgcagcctggtggcccatgaaggatggcttgcggttatattgcatgaaaaagcccttcgattatatggatatatgtgaatgggtagcataaaatggcttgcgaaatggtgaataaaatggcttggcaaatatgaatatatattgcctggaaatggcttggattatatgaatatatattgtatgaagtggcttaccaaggggtggatggatagccgaaaagtggttttcaaaatatgtggatttgtgaagagggagcaaaagaagccttccaaaaaaatgtgtgatatatataggatgtaacgtgaaagggttgcaaaaaatatgacatggatgtgtgtcgaaagtgctttcacaaattttatgtgtgcaatgatatgtgtataaaatacatggcccaaatgtgatttataagtgctgtgacactcgccccatgagtgtgtttgctcttgttg

SEQ ID NO: 153073 - DNA, 441 bp, Glycine max
  unsure (1)..(441): unsure at all n locations
tattaagaagcttcctccagaagcttcctcatggcttctntgagaagctntctcaacaagcttctttgagaagctagatccttatctatccacacccctctattaactaaattaacttccttaaaaataattacggatgaaaataatgcaacaaataatcaaacatcaaacataattactaataatatatatatcagggtgttacacatggtatacttgagaccgtatagtaagcataaaattgagtataccaagaacaatgcctttttattgactacaaccaaagctataagggtcgccaatgataggcactaagttgtaagatcaatatttctatacatgttgaatttcaagagttgtagttcctttctaaactangaacaaaananaaaggataaaaaacatgccacccctctaaaatatcacacaactntntttaaa

SEQ ID NO: 153074 - DNA, 444 bp, Glycine max
  unsure (1)..(444): unsure at all n locations
agcttctagccaaatattagtctctcaaagagtcgtcttttcatggaggattatctgtttctagagtctcatcaattcgaggtgtccttggttttatggagactcatttctatttaactatcttggagtgccaatctttcctggaaaatcgagcaaaatatatctccaaagtgtgtttggatgagaaaattttaaattctgagaaattttaaattctaagaatttcaaatacttcaattgaaattcttttatttttaaaattgtgtttggataaaaaaaaataaaaattgtgagggtgaaagaaaatgaatgcaaagggaagagaagatatgattggtgtgtttttaaagagaagaatattgacacggcatggagagtcacacganaactgggacacgacgacatacaccaccatacccgaccacaacattcagtcaatgacac

SEQ ID NO: 153075 - DNA, 470 bp, Glycine max
  unsure (1)..(470): unsure at all n locations
tactcaagcttcaacaacgaggttcagtgaatgattacctcactgagtctgaacgtttagcgaatcggattgttggtctgtctcccacggtgctcctaagctgttttatttcgggcctttacccagacctccgtcgtgaagtccgggctctgcaacctatgtccatatcacaagtcgtggcgcttgccaagttgtaggaagaaaagattcaggaccgccatcgccatttccgcacatcctataccccttctggtccgccactgtcaccgccaccacccaccgcggttccttccatcgttctcaccccggtacgcccttcagttaagcgcctttcagcagaagaacttggtgtctgtcgtgacaaggggttatgttatcattgtgacgagaagtggattctcgacaccgttgccgtcctcgcctccacttacttattgcanacgatgatgatgatgactgcacaaatccat

SEQ ID NO: 153076 - DNA, 417 bp, Glycine max
  unsure (1)..(417): unsure at all n locations
ttggcttattccctagtggatggtgcctcccctctcctcttctcctttgccttgcgctgcatctccatggtgtaaaatcaccattgaaggacctcattgaagctcaaagatccagcctccatagaagctccacaaccaagcttccatcaggacgaagtttggattgattcaatctaactagggattgaggtttagtaatttaagctatagcatagaacacaaaagcatgatngattagagaaacatctttatatacatcagttggttggttagaaagactcaacatctttacctactggctgcaatcttacttactttgcattttactggttttagcctagatntagtntaattctattctaaatcatccattatcaatggttctctcacaatgacttattctgaattaaccctatc

SEQ ID NO: 153077 - DNA, 391 bp, Glycine max
  unsure (1)..(391): unsure at all n locations
tctcaagggaagtttcttaagaaagcttctcaaggaagctacctagtctataaatagaagcatgtgtaacacttgttgtaactntgatgaatgagagtcttgtgagacacaactcanagttcaacttctctccctttgtcttccttcaatttcgtgctcccccctctctatttctctccctctttcttttcctccattgaagcatcctctccaagcttcttatccaaggctcatcttggtggtgaagctccttcttccatggcttattccctagtggatggcgccgtctcttacctcttctcctttgtcttccgcttcatctccatgggggaaaatcaccattaaaggacctcattgaagctcatagatccagcctccatagaagctccac

SEQ ID NO: 153078 - DNA, 332 bp, Glycine max
  unsure (1)..(332): unsure at all n locations
ngaccaatcncgacccaacccaggcatagtcggtcagtgagaactctgtgatgtacctaaacaggcgagctcctggcagtcaacagatcaaaggaacaaagaccacaaagcaaggaggcttgtggtggctggccagctgtgaaacttgattgatatgtgagatatggtctctggtaatcgattaccaagggtgggttatcgattacaaggtttaataatgaaggaggctaacatggtctctggtaatcgattaccacggggtgtaatcgattaccaggctcgaaaacgaggtcatgaagccatgagggcttctggtaatcgattaccaggct

SEQ ID NO: 153079 - DNA, 348 bp, Glycine max
  unsure (1)..(348): unsure at all n locations
gcttctatggagctggatctttgagcttaataagggccttcaatggtgattntcagccatggagttgcagcggaagataaaggagaaaaggtgagaggaggcgccatccactagagaataagccatggaaggagaagcttcaccaccaagagagtgccttagataagaagcttagagaggaagcttcaatggaggaagagaatgagagagggagagagagagaatggtgtggaaattgaaggagaatagggagataagttgaactttaaagtgtgtctcacaagtttctcattcatcaaaagtatgacaagtgttacacatgtttctatttatggcctagcacatggg

SEQ ID NO: 153080 - DNA, 375 bp, Glycine max
  unsure (1)..(375): unsure at all n locations
cgaagaagttntttcttttacatgcccaactctctcgagtgacattngcattgattggtgtattttatgttgcatcttagtctctatcatatcctatgtgcatcatgcatcatcatgtgtgagtaaggagaaaatttctaatgttataaaatttcttcagaaggcaaaactttttggtttaatccattacaaccttacagtaatcaattacacaaagttgtttaagcttgcatagctatgtcttgtatcgatttaattaattacagccttatcctaatcgattacaccaattgttttaagacaatggtttatttatntaatagtctatgctttaatcaattaccatgtgatataaatcaatacttctctttctat

SEQ ID NO: 153081 - DNA, 400 bp, Glycine max
agctataacctcatcgtccctcacagtctttattattgggagccaatccaatccttgtgttcggactctcagccacttatgatagccgccgatgatcccattactgcttcccctaagctctctgtcctttcttcacgccgcatcccatgccttgcgaactccttggagtaccctcgcgttgtggtcactaaaaccccgtgcgatgaaaggcgtgatgctttcgtctaatggcgctcctctcatggggtagccaagctgtcttatggtgagaacgggattataattaatacaaccccttgttcccatcaagggaacatttggacatccttcgcatgaagatagaatcctgattcttccttccttctagcgagggaaccaattaacagacgcccccccatgc

SEQ ID NO: 153082 - DNA, 267 bp, Glycine max
  unsure (1)..(267): unsure at all n locations
tattacaagccttaagtggaaaaccatgatttcacnctacccttaaggaattntggagctcttgaaaatgtttgggaataagtgggagagggggtatgtttcattgggtgatattgttttcgtggccatgcttgatgatgattttggccatgcttgatgtatatacatataatgcctatatggtgctttatattttaaatgctttgcaatgctactggtcacgttcaataaaaaattaaatagaagaagaatgatgttgaataaatg

SEQ ID NO: 153083 - DNA, 389 bp, Glycine max
  unsure (1)..(389): unsure at all n locations
gcttgcgagtctcctttggcatttccttgacatatgttctccttatgtctaaggtctcaaggttatgaagtttgccaataaatttcagaagctgcgttggcatcactgaatatcgtaagtttaaatacttgaagtgtgctagatttccccaattttcaggaacagaactcaatggactatcttgaaaatcaagtaccttcaatagcctgtactttgtagggattttttgcacaaagttgttcattaatgctgattctttatctgcaaaaacaaacagtgatcgggtgtgtgaattntccgtactccccattaaaaatcattggagaacggtgctattgataagcgttgaatcatcccacttggcattggctcatcttctttactaatat

SEQ ID NO: 153084 - DNA, 291 bp, Glycine max
  unsure (1)..(291): unsure at all n locations
cacagacacacttagtggttgacattaactattagtagtggaggataatacaaccagtttaatgcgtggttggtttgacgttggagaattgattntgagtctaaaattaatattagatatatttgtaaatatctggttttatgttggaaaagaattcgaaattaattctaggtccataattgattttggattgaaacaatattgagtagtatctgccctagattcaaaaatttgtattgaattttatttctaacttgattttataattaaacattcagacataaatcatat

SEQ ID NO: 153085 - DNA, 383 bp, Glycine max
  unsure (1)..(383): unsure at all n locations
agctaggttntgggcaatagcaccccacctgacgtccccaaggtctcctgacccccgcgacatatctccaggtaccactctgtggtcaacgaataaaagcaggaagttcacccttctacacttcctcatctcaagcttgtaggattatggggtacccatcacatgtggtactaggtggcggtcgggcaatggtgcacaacaagttttccacatccacaatgcgcgcataaacccaccatcccctgttgcccacctccaactgagctcacgtactcccacgtagcccatatcctcgtttctctcaacaccgggtccccatcaatcctcccaagcttccacaacatccaagcaaaacaacattcanatagcacaagctatcacag

SEQ ID NO: 153086 - DNA, 396 bp, Glycine max
  unsure (1)..(396): unsure at all n locations
ntatcanatggatgtaaagagttcattcttatatggctntattcaagaggaagtatatgtagatcaacctcctagatttgagaattcagacaagcctaatcatgtttttaaattaaaaaaaaggctttatatggcttaaagcaagcccctagagcttggtatgagcgtctgagtaagttccttttagaaaaggatttctctagaggcaaggtagatactacccttttcataaatagaaaatcacatgacattntactggttcaaatttatgttgatgatattcattttagatctactaatgaattattatgcaaggaattctctcatgacatgcaaagtgagtttgaattgtcaatgatgggagaactctaattgtttcttggatacaaattaaac

SEQ ID NO: 153087 - DNA, 325 bp, Glycine max
agtgtttcttttgcaagaagaagggacacatgaaaaagaattgccccgggttccacaaatggcttgagaagaaaggtgaatcaatctcattagtatgttatgaatctaatatgggtagtggtaatattaacacctggtggattgattctggatctactattcatattgcaaattctttacagggtatgcaaaacctaaggaaaccagtgggaagtgagcaaagcattttatcaggcaataagctaggctcacatgtggaggccattggaacttgcattttgactttaagtagtggctttattttaaaattagaaaggacttttta

SEQ ID NO: 153088 - DNA, 381 bp, Glycine max
  unsure (1)..(381): unsure at all n locations
taggagttntccaaccatcaagttgaccttgcttgaagacctccatccttcatgttatacttgagagttttccaaaaatatcagacaagatggaatatgtaagggaacttcatttgcagtacactgccataagtatatctgtctatttgtggagttgttcagttaccaagtagcactgtcatgttaccagaactgactgatattatagctnttggatggaaagggtagcaatggctaaatcacgaagatggtgaagaaaaagcgggttcaatagtatcttcaaaggtagaacggctntgtgcctaatgatgcaaccatttattaatttttcanaacggttcatgcacgttgttcatgtgaaagatttagactgattgatat

SEQ ID NO: 153089 - DNA, 289 bp, Glycine max
  unsure (1)..(289): unsure at all n locations
gcttatctttggttntacaaccaaagtccatgtgaaccttgagtaatcatctactataactaagccatagtaatttccacctaaactcagttctagagggaccaaataaatcaatgtgaaaaagttcaaggggttttgaagtagaaacaacatttttactttgaaaggagtttttaacttgctttcctttnttacaagcttcacacaatttatttttctcaaacttaagttntggaagaccaattactaagtctttcctaactagatgattaagatgatgcatatttat

SEQ ID NO: 153090 - DNA, 410 bp, Glycine max
  unsure (1)..(410): unsure at all n locations
ctcaagcttatgattggatngataaatgtgaacgtgagagacctctgagtgatgcagagagtagctgacgaagagatatcgataggtgaggggagtttatttttggtttatagctcttgataccatacttggngttagtaaacccaactatggggatgtatgattctccctatgcatgctagttttcaagaaaactgtgtttntgactaatgggatgcgatatatttcttattgatgaatgaaattgtgaatgatattgttgttttatgaaacttgtgttgtctgaagacctgtgaaatgtgaatcctangcatgaaattatatgtatatatgtggaatgcgattactgatgatgttaatattgatgataatattgatatgaaatgatgttgatattgagatgagatgat

SEQ ID NO: 153091 - DNA, 360 bp, Glycine max
aacaaaacttgtgctattcatctttttcattctcttctccctttgccaaaaagaatttgccaaggactaaccacctgaattctttttgtgtctctcttctcccttttccaaaagaacaaaggactaaccgcctgaattcttttgtgtctcccttctcccttgtcaaagaattcaaaacgacacagtctgagaattcttttgattcttccctttcccataaacaaaagatttcaaaggactaaccgcatgagatatcttttgtttccccttcacaaagtttcaaaggactaaccgcctgagaactttgtcttaacacattggagggtacatcccttgtggacaagtagaggacatctactt

SEQ ID NO: 153092 - DNA, 409 bp, Glycine max
  unsure (1)..(409): unsure at all n locations
tctatggaggctggatctttgagcttcaatgatgttnttcaatggtgattntccaccatagagttgcagcggaagataaaggagaagaggtgagaggagacgccatccactatggaataagccatggaaggagaagcttcaccaccaagacaatgtcttagataagaagcttagataggaagtttcaatggaggaagagaatgagagagagaaagtggcatggaaaattgaaggaagaaagggagagaagtttaactntgaagtgtgtctcacaagactctcattcatcaaagttgtgacaagtgttacacatgtttctatntatagcctangtcactaacatttcacgtgaatctaagaggaatattccaagaatatcccanatgcatcttaacatattccaagaata

SEQ ID NO: 153093 - DNA, 521 bp, Glycine max
  unsure (1)..(521): unsure at all n locations
ctttcgttccgtctatngcgngcccgcgatccttagagncgcctgctgcatgcaagcttgangaganaaggngaatattctttttcttcttggatgacccaangtggcaacgtgcttcatttagttaaatatcgtacacaggctcattcattgtggacggtaacccagcggggaattctaagacaatgatgactcacaccttcaattcgttggaagctcttctaacctaaatttgacatactacactggaagagcacttattcatttgcaccgangggtggcatatgctgccatgatgaatcgaacatctagggaaccatgcccaactcacagaatttaatatgcggcacactactaagcccaacgtgaattgcacaggaaatcatggttgcgcgctttagaattgacttcatcacaagggtagatacgataagacatgtactgtgtttgatacacctcaagctccaattgatcggcgagtcatctaggagatgatcgtgaatgcagacacaacctcacct

SEQ ID NO: 153094 - DNA, 87 bp, Glycine max
accttcaggcgactttctctaagcgccgcaccggaatcttcaagaacgcaagtgagcttgccaccctctgcgacgtggaccttgctg

SEQ ID NO: 153095 - DNA, 324 bp, Glycine max
  unsure (1)..(324): unsure at all n locations
ttgtctcccttatggcctccttaacatgtttattctgtcgcgggatgatgatctgctgatcacatgctagtgcctgctcgtacccatccctgaccatcgctggaaatgatcatgtccctgtcttttgattcacaagataaaaaaatgcatgtgaatgtgtatgcatgagcagtttcaaatgcaataattcttttgcaaagaccgctggtgtagtttaattaatcgctcgggcatccccatggatcgagcgaaaaggcttgggttttaaaagaataatatcttttatgcacanagcatggatcaatacaatgaatcatcaatccc

SEQ ID NO: 153096 - DNA, 187 bp, Glycine max
atgtattcgctaccattccacacatacaaccggaacataagtgtaaagctgggtgctatgaggactactacatattggttcctactgccctttcatcggaactgcggccactgatatgaatcgcacgcaccttgcgcgacggcgtataataagatcacctagttattattgatcatcgttttttttt

SEQ ID NO: 153097 - DNA, 424 bp, Glycine max
  unsure (1)..(424): unsure at all n locations
gcttcttaattggctggattattttatccctcattcttattccgactatatatatcatgactatgagggttcgtttattgtattgctgctgcttatgagtgactcattgtgttttgtcttggtttgggagagttaattagatggggtagaacttagtaggtacttaatttaatgcatattcaggggaggctagcttgttctatgagcaatttattaattggatttggtgttctttttggctgggcgcacaccggccctgtgcttttaaccaaacgatttctatttaaataaaatgacttcacttatcctacaaataaatcatgattgaattaaatctacacgagcatgatcatttgatggagaacagtgtttccttcatgaacttgagcaaaattaaatttactnatagataataatgtattaa

SEQ ID NO: 153098 - DNA, 479 bp, Glycine max
  unsure (1)..(479): unsure at all n locations
gctgggtaatcgacggtttgctgattgtgcaaagcctgcttctcttatcaaaggatccaaatgagagaatggaataatgtggagagaaaatggaagagcagagagagagagagagatcaatagcataccatgttttgtgtaggggagaaagaaagagcgaacggtgaagaaagtgatatgtattaagagagattggaaagaaatgaagccaagggtttataaaagttcgtgtttgtttctagagagagccactcttagcgttaacctcacgcacctcttccacctggactttgctttttcacttttaaatgggcctgcaaacataattacacggacagcccanactagcaattaccacatataaatatctttttgaataaaatcattttttttggtttgttggccagtgtcttaattcatttttnttgtcaacgaataatgtaattgctgaaattntaatttcttgtcactgtagtctt

SEQ ID NO: 153099 - DNA, 384 bp, Glycine max
gtgcaaaactcctatatgtcggtatgatgatggagaagcagtacttcttggacctgaaatgctacaacagattaacgaacaagtgaagttgattcgagagaagattaaagcatctcaggataggcagaagagctattacgatagaaggaggaaaccactatattttcaggaaggagaacatgtgtttttgaaggtttctcccgtaaccggggtcggaagagctctcaaggctaggaagttgacacccaagtatctaggtccgtatcagattgtgaagaagattgggcctgtagcttatcatatcgccttacctgcgagtttatcgaatttgcatcctgtgtttcatgtctctcaactgagacggtacaacccatatccatcaca

SEQ ID NO: 153100 - DNA, 406 bp, Glycine max
gctaggagaattacgatataattcaaggaaacaaacaagcataaaacatgaaattaaagagctaagttagagatactagactgctcatatgagcacttctttaacatctttatccggacgcatgttgatgatcaatcgatcatgggcctagcacctgttcgtacctaccccatagattgaacaaagaaagtggcatcatgcaaatgtgaaacaatactacacgatgcatgcattacctttcacttacccttattgcttatctcaaattggtgtggtgttgaccatcactcaaaatgactctttattcatcctctgatttgcatgatcccagatgacaagatggaaatgcatgcatgtttatgattgaacgttaaatgcatcaattaaacatgtattaacgtgttca

SEQ ID NO: 153101 - DNA, 475 bp, Glycine max
  unsure (1)..(475): unsure at all n locations
gctgcttgtggagcttctatggaggctggatctttgagcttcaatgaggtccttcaatggtgattttccaccatggagatgcagcggaaggcaaaggagaaaaggagaggggagacaccatccactagggaataagccatcgaagaaggagcttcaccaccaagatgagccttggataagaagctnggagaggatgcttcaatggaggaaaagatagagggagggaaagagagaggggggagcacgaaattgaaggaagaaaaagggagagaagttgaactttgagttgtgtctcacaagactctcattcatcaaagttacaacaagtgttacatatgcttctatttatagacaaggtagcttccttgagaatctttcttagaaaacttccttgagaagcttctntgagaaaacttccttgagaagctagagcttagctatacacanccctttaataactaagaatacttccttg

SEQ ID NO: 153102 - DNA, 389 bp, Glycine max
  unsure (1)..(389): unsure at all n locations
gccttggtcaacctagcaactcaacttgccatgatatcaganatttgcatctgcacctgttgcaaagtctgtggtctatgttcttctgcagatcacaatacaaatctatgtctttctttgcagcaatctggagtcaatgagcaacctgaagcttatgctgcaaacatttataatagacctccttatcatcaaaaccaacaacagttgaataattataacctatcaagcaatagatacaatccaggttggaggaatcatccaaatctgagatggacaagtcctccacaacaacaacacctgtccctccttttcataatgtngttggcccaagcaagccttatgttcctcctccaatacaacagcagtcacaacatagacaacaagcaact

SEQ ID NO: 153103 - DNA, 389 bp, Glycine max
  unsure (1)..(389): unsure at all n locations
gacttgatcatctagtgattatattatgtgaccatggcatgagtttcaactaaccaatcaacatcaatcatctctgaaacatctatctttcaatctttacaacatcatctctcaacatctttcaatcaatctttcaatatcttttctatagaatattctaattcatttctcttcatctttctaaaagntttttatcaacactttctcttcaagaaaagttctttgttcaaaacttgtgctattcatctttttcattctcttctccctctgccaaaagaacgaaagactaactgcttgaattcttttgtgtttctcttctcccttacaaaagattcaaaggactaacccgctgagaatcttttgattcttccctccccttaagcnaagat

SEQ ID NO: 153104 - DNA, 486 bp, Glycine max
ctcttgagaaaaattcctcgagaagcttctttgatataacttacttgagaagctagagcttatcttccacacccttttcataactaagcttacctacttgagaagcttccttaagaagattcctaaagaagctagagattagctacacatacctctctaatagctaagctcacctccttgagatgaaaagctagagcttagctacacaccgcctataatatcttagctcacccccatgacaataaaacatgataatacaaaataaaaagtccttactacaaagactactcataatgccccggaatacaaggctaaaaccctatactactagaatggccaaaatacattgcccatacgaatgataaacctattctaatatttacaaagataagcgggctcatacttagcccatgggctcaaaatataccctaatgctcatgagaacactatggccttcccttggtctctagcccaatctacttggag

SEQ ID NO: 153105 - DNA, 450 bp, Glycine max
  unsure (1)..(450): unsure at all n locations
agctntttggagtagaaacatgggaccaactcattntatttcaaaaaggaagtcatatctagtcaaggtctgagagaccatacaagtttcctaacgatttctaattatgtgggccattaagtctatcatatgctgacaatagccgagaagcccatgaatctcttcgggggcggagtaggtgtctgccattgccttggccttggctaacaatcggggaagttcttgactcccgttcaaggtaagagcaaaccgatccatccacatggttgcctcttggtgtaaagagtcgatcacccttcctctagcctctttttccgcgtattcttgggcatactcatccgcgattctatgctcgtgggccgtggctagacctaactcttcttggtacttggcgatgatagctaacatggtggtctctgtctcgcatanacgctgagacaagcttctttt

SEQ ID NO: 153106 - DNA, 489 bp, Glycine max
  unsure (1)..(489): unsure at all n locations
acacttaaatctcagctattctctatggacataagaatatatttttttgtttccttttgtttatgtcttgcataagcttggctgtgttattatttattcatacatatgttggttttgttgactatgaatattgtattatgtgtggcaccactttttgtttctctattaaattttaaccttttccatatcgttggtgattattggatatggctgcaatttaatataaaggctaatagagtgactcaactaggcatgtatcgtgtacattaaaaacttggtgtgtgtttgaattagtttatttttgtatctagaaatgctgttagtcaaactactagagaacttctatcgaanagctatcttatgaaagaaatattagcaaaaccaaagaatgttcttactaatttgtgtgcatccaaaaatctagtaattaactagttatgctaaggatgggttgttgtgatgctaatcacgtcgtagtatgaaaacaat

SEQ ID NO: 153107 - DNA, 376 bp, Glycine max
  unsure (1)..(376): unsure at all n locations
agcttgacatcttttgatatatcatacaatcagttngagggtccacttccaaacattctagccctccaaaatacttcaattgaagcattgagaaataataaaggcttgtgtggcaatgtcactggcttggagccttgcacaacatcaactgcgaagaaatctcatagtcatatgacaaagaaagtcttaatatcagttttaccccttagtttggtcattctaatgcttgcattatctgttttcggagtctggtatcatttacgccaaaattcaaagaataaacaagaccaggctacagatntactatctccaaggagtccaaacttattattaccaacgtgtgagttgggtggcaaaatgatgttcgagaatatta

SEQ ID NO: 153108 - DNA, 400 bp, Glycine max
  unsure (1)..(400): unsure at all n locations
tgctcttggtaagtctcgccaaaatttatgacagacgtatcgctggtcgttcaccaaaatgctcgcaaaacctaatgttcatcactggtgagtcctacatgtcgattctccaaagccttgtttaccctatgtctgcccttggttagtctctccaaaacccatgatagacaattccctggtcggttctccaaagggtttgcaaaacacaaggtttgctcttggtgagtcttacaagttgtttcccccaaatggctcacaaaacctaatgtctgcccttggtgagtcctatatgtcatttctccaaaggactcgtgaagcccaatgtccgcccttagtgagtcctacatgtagattctcaaatgctcgtctaaccaaggtttatncttagtgagtctctcca

SEQ ID NO: 153109 - DNA, 444 bp, Glycine max
  unsure (1)..(444): unsure at all n locations
agcttctatcataacataccaattatataaatttgcattcttttacgaggtactacaaaatgaacatgcattatgcaatgccaaaagaagaggaagcatttattgcatgagcaaacacttcaacctctcttgttaaggtcctacacaatacaatgcacccacaattntgacgttggaccaaagcaatccaactggataatgaaatttccaaaacaaccctctctacaaaagctcaataattaaaagccccttcttccccttagggcaagatcgtctatatattattatgcgtaattgcttatagtcacctaagaactaattaatcaaatgtcaaacacataactggtaagggatacctctctttcgcttatcgtatacccctccgcacgtgatcactacccncttccttcttgtttatngtttttcttaatgcacaattttctc

SEQ ID NO: 153110 - DNA, 443 bp, Glycine max
  unsure (1)..(443): unsure at all n locations
ttcaccatttttttcgtgttcttctaccctaatgttaaactatctctatgtcaactatcctaccctaaatgcttcacatatagtgcatatcaaatccaaatctaagaagatagcccctacctcgaatgcaaatgggtctaatggctggcggagaagcctcgcggagaataataccaacaccgagctcgtcacggaagagagaatagaaaggaagctttcgcggaagagagaaatgaagaagacagaatgcttccgaaagagggaaaaagttttttaagttgttaaatgaagggcaaaattgacctttaataaatcgctgggtgcaccagcaatatcgctgggtgcacctatcatatccncaagttggcgcatgttgctgctgcacctctaatcttaatatntttttctccatcactctacgtgtgcaagttccaataaatgaa

SEQ ID NO: 153111 - DNA, 453 bp, Glycine max
  unsure (1)..(453): unsure at all n locations
agcttctccttcaacaaatgataccctacagttttccctaacaatntgatgagcaatgtgtcctcccaaggagcacacaacccttcgtaaatagaatcatcaatgaaaaccattggtttcattggattgcctccctcgtacttaatccttgccagtttttgctgaataagatccacattaggatgtggactaagaagttgtctctgacttaccaccaccacctccatcgtccgaaggatctttacctgagcctaaaccattcaaatagtcactggagaaagagaaatcctgagtggcttccatttnttagaatacttttatacatgataagatgtgattaaatgataatntaaaaaaattatatattgtcaatgtattctaattaaatttcagataaaataattgtcaaggtaaagacgttcatgactaataatatgaaaataatctaaatac

SEQ ID NO: 153112 - DNA, 321 bp, Glycine max
  unsure (1)..(321): unsure at all n locations
tctgcttagattattttgttggctgatacactatngcgtaggacttacattctctttctctgtaatgccagcagggggagaattgggattgaaacctgttattgttatagtagacagtgatgatgagtgttattcacaagcaacattgaacaaaaaagagactacttcatgtattaatattatagatgatgaacatagaagttcatcatcaggagcaccccagaataatcttctaacatgactggctgaacgcattggaaatctcaaaagaaaatttgtttcttcgcgcgaattggatgcaaatatcaatgccttggatga

SEQ ID NO: 153113 - DNA, 383 bp, Glycine max
  unsure (1)..(383): unsure at all n locations
tttcacttgagcctacctttgaagattggtgatcgtgaaagaattaatgcttgcatcaatgcagtactcttcatctagaaacaacccatgagctttaatggtgatcatttcagcagaaaaccactttgcttgagtgaaatggggtttgtcagaagcagtgcacatcttttaatggtggttggaattntcatatcttgaactntnttgttctctctttnggctctatttctcaaactttttagcttatgtgctcaattgttcacacttaactaatacccacgagctttgcgaacaaaataagatcanaacanngataaataggaccaaaattatggctcanagatagtcanataaccagttatgaactaccccacacttgatca

SEQ ID NO: 153114 - DNA, 456 bp, Glycine max
  unsure (1)..(456): unsure at all n locations
tcatcgcctctcacagtctntagatgtatgagccaatctcttctcttgtgttcggactcttagccacttatgatagcgccgatgatcccattactgcttcccctaagctctctgtcctttcttcacaccgcatcctatgccttgcgaactccttatagtacctttgcattgtggtcacagaaaccccgtgtaatgaaaggcgtgatgcttttgtctaatggcgctcctctcacggtgtagccaagctgtcttatggcgatgacgagattataattaatacaaccccttgttccatcaatgtgaacattggacatccttcgcatgaagatagaatcctgattcttccttccttctagcgagggaaccaattaacagacgcccctctatgctagccaagaagtggtcccaattcgtctttctttttttcgacgcacgagcggtgaccttgtatcggat

SEQ ID NO: 153115 - DNA, 446 bp, Glycine max
  unsure (1)..(446): unsure at all n locations
aatatgcatgtgtattatgaagcatcaacaagaatcaagccagggctttgtgcaagcaatcaatggggccaaacacaccanatgattatgatgatggatggctcanattctcacaaagttaaactcatcactttcaaatngagctttcaaaactatcatgacatgtagaggagaatcaaggatttcaagtcacanaatgtcaagaacttttattttcaaaacaattacccatttcttgaacatatcctataattcaaagaaaaacatgcaaagtcgtacatgcacacaaaattgacccanaatattaaactaataatccgacgaaactaacaacattaacanattaacacaacttacaatataacaaaaccaacaatactatcaaaaccaaagaacacttccccccccatacttaacaacacattatcctcaatgttcacaattaa

SEQ ID NO: 153116 - DNA, 293 bp, Glycine max
  unsure (1)..(293): unsure at all n locations
gtcctcagatccctcttgttggactagacttataccaaacagctttatttttatagcatacttaataccaaaacttaatcacagattcctcttgtaagactaagtttcaattctgcttcattcaagttataaggcaacaatacatttcccaatgttaaaatcacctaactaggcaagcaaatggttgatcagaccaagagcatacaaaatttaatcactgaagaagcatngtacacaagaaacaaaatcaattagatatgaaaataattagattagttgttcattagaaatct

SEQ ID NO: 153117 - DNA, 458 bp, Glycine max
  unsure (1)..(458): unsure at all n locations
gcttncatcactacttatgtgcgatgcaactacttagaggcaacaactgtcaagaaaaatggactaaaagagtgattaattacaatcatgaatatgaacatctacgattgatgaatgactacttctcagaanattcagtatacacagagaactcaatttgatgtaggttttgaatacgaaaataattattcattcaaattatcaatgctcttagtaatcataatgagtatttccaaatgagacctgatgttgttggtagaatgggtctctcgccattgcaaaagtgcactgcaactattcgtatactagcatacgaatcacctgttgattgtgaggatgagcatgctagaattggcgaatgcactgcaactcaatgcttacaaanatttataaggggtgtcaatgagaatattggacaagagtacttgagaaggccaaacaacaatgatgcaatccta

SEQ ID NO: 153118 - DNA, 491 bp, Glycine max
aacatgctcatctccaatgactaatgccacgacctctctttctatggaagagaatgtagcattcaaaaatctcaattggatgagttgatggaaatgctcagacaataaaagatagtggtcaaggagcaacacatattgattgcagatttgtgaacgggaaaagaagatatgtagaacaaacatttgaaagctatcaaatatgaagtagattcgaaggcaaagaaaaagcatatcataaataagatgagcaagttgaaatcacaaattccattgaagtctaggaaaatagagtctccaatcactgtcatcacgaaagtagaaggagaagtggattatgatgaaatcattcctttcaatatgccattctccaagcgcttaataaaaatgtatgttccaaaacaattatggcaacttccgacagtggatgtgtacaatggatctactaatccgaacgattatgtatctgcgttcgagtctacattgtcgtacaa

SEQ ID NO: 153119 - DNA, 484 bp, Glycine max
  unsure (1)..(484): unsure at all n locations
agctntntcttatgtatccactgaaacagatatgatcaatgggcaactttgtatatccaaataaagttatgatgttgtttgtctcacaactgattcagaactcaaacatggcaaaccaaggtttttaaaaatgtaagcttttgtcttgcgatacattagaaaaccaaattaggtatgtaattatgcacatgcaagatcaaaatgcaacaaaggcccacaaaaatggttgattacaacaaaccaacaacgaaagataaaatgttgcgtataggaaaacataccgttgactgccgttctttctagttctccttntcagtttctttgtttttctcaggaaacatgcacgcaattaaaaacatataagaattattataacaataatgtaagcaactccaaaataaaacaggattcacaatgaagatgtaaccttttgtattgcgataatccaacaccaaaaaaggtctggaagccttgttgtacatat

SEQ ID NO: 153120 - DNA, 477 bp, Glycine max
  unsure (1)..(477): unsure at all n locations
gatggcctcagcaaactccttatttccagaatggtattctatcaatagtcctccaatctttaatggagaggttaccattactggataacccgaatgcaaatttttattgaggcaatagatctaaatatttgggaagccatagaaatagggccttatatacccaccacagtggaaagagtttcaatagatggtagttcatcaagtgaaagcataactatagaaaaacctagagatagatggtctaaagaggatagaaaacgagtacaatacaacttataagccaaaaatataataacatctgccctgggaatggatgaatatttcangggtttcaaatgtaagagtgctaaggaaatgtgggacactcttcgattaacacatgaaggaactacaaatgttaaaagatctatggataatgcactaactcatgagtatgaaatatntagaatgaatgcaaatgaaaatattcaaagcatg

SEQ ID NO: 153121 - DNA, 443 bp, Glycine max
  unsure (1)..(443): unsure at all n locations
caagctgcaaccaaacacccacgcttctctctccattaccccacctcccaagacttccctctttgtgatatttgccaagtacgtactcactccttcctacttccttctcaaacaaatatctacatgttctctcaaaagatcattcaacgttaaaacagtaactagtacttaaacatgtgatcggaaattctatccattgagtagtctctatgtataaaaagaaacatctatctcagtctcttacccacgagtctgtgtttataagaagaaaaaaacatgtcagaagaaatcaatctcttacatgaatcttcctacttccagagattagtttgtgtgtccncggggaataatacccttgaatcttggatttaagaaaaaaagacacagtaatataattaagtagtaaccatttttatttatttaacaggagaggcgtgcatatc

SEQ ID NO: 153122 - DNA, 499 bp, Glycine max
  unsure (1)..(499): unsure at all n locations
ctgatgcatagcaatacatatagagtcaactgtatcgaagaaggattattgaactaatcattataaccattgtggaacatatttgatttgcatatgattcatatatggttataggtacaaggataagactaatctgaaataaggtaaataatggccagaatctacgtgttcattgtcatgatttttattagttgatagcttttgcatgattttatcaccatggaagatattgacggttaactatatcaaaaaaaatgcattcaacttcatatagtttgaaataaaatggaaagaaaaacctgaagtacagatgttgaataaagaaatgcattcaatntcatatacttatggatgaatttatcatcatggaaggcttttgtaccagacttttttccacacagtgtaattaagtggttgtcatgtnttaatttatagaatntctcttttctgacaagcatagatccagtctttggagatgtctcaattattttaatcaatg

SEQ ID NO: 153123 - DNA, 170 bp, Glycine max
cacatatataccatttgacatggtaatttgcaagggcacgtgaaaaaggtctacatcacaaaactagcccaaccttgatttcatgctctggctattggttgcattcttcattggatgatggagaaatgtggcttgggtcacgccaaccagtcatgtcacccacctataat

SEQ ID NO: 153124 - DNA, 404 bp, Glycine max
ccacaaccaaagatatcggtctaatcttctcatatcagccgttacaaagtagtaggtatggctgtacgggtagaacagcgttccatacggtatatatatgtatataatcatcgtaggctaaaccaatacatgtctacatttaaccctattggtcttatacgagccatgaagctactttaattatacgcgtaccgcattaaactaagcgaaagttctatattacatctatattaatacgtgccgctgcacttctgtgaatgatagatagaagggcaaacgtcaatagttgaaattctcaaaagtttatcacactgatgaagtgtcatctaaaagaatcaactatttctaaaagtaggtagatcgagtggaaagatacaaaacacttgcatttatatttacgctat

SEQ ID NO: 153125 - DNA, 354 bp, Glycine max
acagaccattctgccacaaaacaactgttccagcttcttgagcctaccagctcaaaggaatagacctgtaggctatttcatatagaacaatcacaactcaacatacctaactcggtggatctacagacgcttatatatagaggacaggctgagcctttaagtctcccaaagaagcaggcaagaaccgatttctggatctgcaaccccaacacagcaattgcgcattctcaatctttaggaatttccaacatattttgtccctctgtctagagactagttggaaacttcccagtcagggaagcccctttctgatatcaaagaaaattttagcatgagtctactccaggatttcaa

SEQ ID NO: 153126 - DNA, 133 bp, Glycine max
aaaaaataatacattctagccgcgtctcaaatcccttggataataattaattatttatgttgtaacaaaagaattacttctagaccggctctgaaaatcgtctgattatcgacttcaagacgtgtctaacacc

SEQ ID NO: 153127 - DNA, 476 bp, Glycine max
  unsure (1)..(476): unsure at all n locations
agcttcttccagtagtcatactttatccctctttatagaagtgctntgttggtagtgaatccttcttccatatctttgatatataggatcttttccttagtattgtcagatacttaacccttgacaccaagctctgataccaactaaatttgcaagaaacacgctaaaaaggggcgaggtaagtagtgtgtatatcaaagatgtaaaattttcacgatataaaagataatatagatgatatggtgttaaacattggttatccactaaggataaaacaaatatataatgaagaatagtatggtcgtccagtgatagataaaaggttcttaanatagtttttcaaataaacactcggtgttaaaaggtgataggaagtgtaataagaatgcttaatanacctttatggagagaagtagatacaattggtttatattggttcgctcaacccgagctatgtccaattctcctttactcac

SEQ ID NO: 153128 - DNA, 466 bp, Glycine max
  unsure (1)..(466): unsure at all n locations
agctntcacctaggacattcatcaacatagtcacttcaccaagtagtggttgtggcttgtcaaccagaaaataggtagtggcatcatcaaagtgaaatgccctataaggtttaacttctccttctcctcttggaagaggtttgagctatcaccttgagctctttgttcctagagatgctgctactaaacatgtcttgcatcatcttcaaagaactcattcccttcttgtaatgatcgcttcaattttttagcactaaggaagaagtatatatgccacttaatagcatgcctaataggaaacgttggtgcaataagctttgtcttcnttcttcctgttggagtcaagggtagcaatcttgcacacnaccttgtaggatagaacttcataagtgtggacattnntgataagagaatgggaggataatatcccatgtagaactcanataggttctgagccttgatgaca

SEQ ID NO: 153129 - DNA, 477 bp, Glycine max
acacctataatactcaagcttcttcacgatatccacgacattcttcttcttcttttgtccaatttttgtctaaatatgctatttctctacatttgcttttgtttcctcaagtaatgaagcaactttctgctttagctcttcattctcctcaatgtacctgaccaaatcacttccctctgcagaaacattgttcctatcatcagaaaggatcttctcaacagagtttggaatccacttataaaatcggcgagacttcgtatcctgcaacacataacataatatagtacaacccaacaagatttaacccataaaaattgatagagaagacatttgcttacgttccaatatatgcatcttccaaaactattcctcgggttcttgtcaatgtgcgatgtgtacagaatggctagtcttttacattgtcattccaccaatccggataccgaagacgtggatgacgacccacccattgcactc

SEQ ID NO: 153130 - DNA, 465 bp, Glycine max
  unsure (1)..(465): unsure at all n locations
agcttataaaaacaaaattgccttaatcatttccaaatatgcatgtgaattaagacgcatcaacaagaatcaagccaaggctattgtgcaagcaatcaatggggcaaaacacaccaaatgattataatgatggatggctcaaattctcacaaaggtaaaatcatcactttcaaattgagctttcaaaactatcatgacatgtagagaagaatcaaggatttcaagtcacaaaatgtcaagaacttttattttcaaaacaattacccatttcttgaacatatcctataattcaaagaanaacatgcaaagtcatacgtgcacatgaaattgacccaaaatattaaactgaaaatccgacgaaactaacaacattaacaaattaacacaactaacatattaacaaaaccaacataactagcaaaaccaaagaacactcccccnnccccccatacttaaacaacacat

SEQ ID NO: 153131 - DNA, 319 bp, Glycine max
ctatggtaactgccgattggcccgttgctacttcccctaagttcctcgtccttcttttgcaccctttaccatgccttgcggtccctctgaatcacccccgtgttggtgcccctctcatatggttgccaaattgtcttattgcgatgacgggattgttattaatggaaccccttgttcccataaagggaacatttggaaattcccgcatgaaataagcatcccagttcatccttctttccatcgatggaaccaattgacagacacttcttctttgcttgctatgagtcttttctcaatggccttctatcgggaaaacgtg

SEQ ID NO: 153132 - DNA, 425 bp, Glycine max
  unsure (1)..(425): unsure at all n locations
agcttagctctttctcagtctctccacaaccaataactcacaaaaagctcaacaaccccttagaaatcgtgattttagcttaaataggcaatcctgtcggtggatgcgtgcttaacacatgtaagtaacttctgacttagcgccagtcatactcgctcagcctaaaggtgaagacggtgtgtgtcataccctaatttcgtccggggattataatttgatgataaacaaccattgattggctgcttcgagatatttgacaccctttgttgcacaatatgtgaagtcccgagacgtgccgaaaatcaaaaggaaggatgcttacgcgatccgtgaaaattccgtgatgtgacggaaatcgaaaggaggtatttttcacaatccgtgagtttcataacttcttcgaaagcctaaaaagagtanatata

SEQ ID NO: 153133 - DNA, 459 bp, Glycine max
  unsure (1)..(459): unsure at all n locations
gactccctcgacatcttctgaacctaaaagttgttgattgangggtgagtccttcgttcctcaaacaccacatacaacaaacaaaatcataatatattatctacgtaaccactatgtgtggttgtctaagcaaataacactctcgcgtcctaagcccataactattccacttatctcataatatggcccaaccactgccaccaagcttcccaagtcatgctggtcttacacttatatatggatgacagttgggagtgatcatcacatacagatacaatgtacatcgatccctagatctcaacttaaaaagcatagtttcagagccaaccaggaataataaagtgaggcttgtgagctcctcgtgccaaatgagtgcaccaaatgtcaggtagtcaccactcgcaaattccactatgtcccgtgtgtgacaccctctaccccatacatatatgtactaat

SEQ ID NO: 153134 - DNA, 463 bp, Glycine max
  unsure (1)..(463): unsure at all n locations
agctttngaaggaaatataaaataacataaaaagcttacttggattgaggtgaaagatgtaagatgagaacaagaatgcaggagaatagactcaaagcacacgtagaataatgcacacaagcacaggggtaggcacaagcacaagagagtaaaagcttcttggtaaaaagaaactgccagagcctttgtttttaagctaaaattcgtattgctcacttagcgaatcaatatgacgtttggttttaacaaagccttgcgcttagcccaacctcgcgctaagcccaattccaaaattttaaattccaaagagttttggggcttagtgcagtaggccggcgcttagtgttgtctgcaactcataattgttctgcaatctgcacttagcgtgagatgtcaagcttagcttctaatcaagctctaacttatagggatagtccaagcttagcgcatcaaccgcactaag

SEQ ID NO: 153135 - DNA, 308 bp, Glycine max
tagcttgagccataattctgactcaccataattcttaccctcggaagcttataagaatagaagggaaatttccaatcaaagaataagagaatgaaaatgtccaatgaaaagcaaaaaagaatagaagggaaatttccaatcaaagaaaaaaaagaaggaaaattccccaatcaaagagtgggagaaagcaaaagaaaagaaaggaaattcccaatcaaagagtgggagaaagcaaaaaggaaagaaagaaaattcccaaccaaagaatgggagaaagtgaaaaagggaaggaaagaaagttcttgatc

SEQ ID NO: 153136 - DNA, 468 bp, Glycine max
  unsure (1)..(468): unsure at all n locations
tgcagcttgcgtcactcgttagcgactgatgtttctaacaatttcctaagacacccctaaattgattagttcaccctcattttcattcacctcgaattgatcatggaaacgttacaaaagaagtacggaagtgccccggccttgattttcctttccgttctccttcttttcacttaatttaagtgaaatatgctggccaagggtgctgggatccttccctcaaccttccatgccccttttatagccaaaatggagaggagtttgccgcccagctcgcccgggcgagctgacgaagttttctgagtgcacccccaaattgattagttcacctcccagcttgatgagtgcacccccattntgtgtntctgactgatttctttctgaaacattgtaanaattacgaattacgcggcgatgaagcgtaagcatcttanatctgttagccacagtctgtacattgacaaacaa

SEQ ID NO: 153137 - DNA, 479 bp, Glycine max
  unsure (1)..(479): unsure at all n locations
tgtgtgtntaaatgtctaatataaaagaaaaangaggtttttttgtctatnngttattatnnnancagngaaaataaatatgttgaatatgaattttgtagtatttttttaattagattaggttggtgttaatgatttattagtgtgttaataattgatgaacgtttcaactttcatttaaaaaaaaattagatcatatttatttgaagaaagtattttgagtacgaaatttattttaatatgaaggtgtagtattttttaattagattaggttcatctttttgtgtgttaaaaattgataagcgttcaagttgaaagtgttaatngatgaatgttttttggttcttggtatcatattaatttaatatattggtagtaattttgtaattacctattttcattnntgngttatgcattgtaagaataatattttactactaacttcgtcataataatttatttgtggtaaaataatatct

SEQ ID NO: 153138 - DNA, 391 bp, Glycine max
aaaaatcttgagcttgtccttttgtgaacaagtcgagccgagccgatccttacataggccgagccaaaggtcctcgacaagctgctcggctcatttccacccctacgagtaagataccgtctgtgaacgtaaatgtgagtcatttttttgttggacgaaaatttaatatatttttattgaaggataatgcatctttaaaagatgaaaatataaaatatagtatccacaagtgtaaaaaatgtgacaaatatatctgatcattaactttcttccattactattaataaaatagtctatgtgatacaaaggaacgaatatttcactaaaataattgtcaactgggttgtcatgctgactatagattgggacaaaatgtcagtaagatatcatc

SEQ ID NO: 153139 - DNA, 397 bp, Glycine max
  unsure (1)..(397): unsure at all n locations
ggacatagaaatnttgggaatatatactttatttcctatattttttccagaaataatctcagctgcaatgacatgngtggttagtcttgtaacaattaatctagtccaattacaaaggccttcactttgatctaagtttcttaacagcataatgggtgatccaaccttaagtttgatagaatgatttggtacgccaaatgttgtcaatgaattgagaaattcagtagttagtgagctgaaatgacaactgtctatggtttctgatttctctactgaatcggaacttagatactccatantgtcacctatgacaatgttagaaattaattcattatactaaagactaatattaagtattaaaaaatagatagatgaaagatagatgttagtttctcat

SEQ ID NO: 153140 - DNA, 330 bp, Glycine max
gtatatacatttcttatgggcaggggaaggggtgtaatgtaaagtatcttaagccaccttatgcttcgaaatggaaacaaaatacttaccatccactccttatgaccctgtaacccttcatgcttgagtttcttaacagcaacaaccattcctgatccatgttttgaagctgtaagtgtgtgttcatcaatccaccccttgttaacaaaaccatatcctccttcaccaataaggctgtcggggcgaaagttcctggtggcattctttagctcgttaaaggtaaaggccttaagatttggggaagacaagatttcaccctcggacctcggt

SEQ ID NO: 153141 - DNA, 385 bp, Glycine max
  unsure (1)..(385): unsure at all n locations
ataaccttattccatattcctagctccatctctgacaagcccaccgagtttttcgtcttttgtaccttagcctgccatcctaactctttattctcaaaaagttgaactggagattgtagagtgttcacttcagtagtcaacttagtattagaattgatggtactctgaaggtcctcgacaaactcaactactttcttcttcaaactctccacctcttcgacttgtgaagggacttaggaatgttctataacccaatgctgaataatcatcaaaaagtgagtgtgcatgtcaacaaacgtctccgaacctaaaagaataccagtataagcaatgatttccttggtggccgaggaagtagcanaacccaatgcaacaacaatgttga

SEQ ID NO: 153142 - DNA, 415 bp, Glycine max
cctgagtccaataaccgcagcagtatccattatatcccttcctagccactatgtacaatcaccatcatatttacctaatataacaatgatcctaaaccgtatccactactcctttgataaaccaaagaatataaaaaatattaattattgtaataatataaataatgaattattcaagattctctttataaagaagattaataatatacctaatttccctatgtacattcaatcatatcaaatcatatattacagaggctaatcgcagcaaatgatccataaaatcgaccagtacttggaatcaagggttattggattgtccataattctgacaccagagtaattgaaatggttatgaaggatgataatcatgcagttaacaagtacacaatgagtttgtgaattgcaagcttac

SEQ ID NO: 153143 - DNA, 421 bp, Glycine max
  unsure (1)..(421): unsure at all n locations
gatangctangaaggtgaggagtcccttgctaagataattntatgaacgactttgaatgttaatttaactctacaaaccatatacgaatattgtttttgatgcaataaagcaccatcttttatatgtcttttatgttgtagtttgtaactttgtgtacctgtgtttttactcttctatnggttgtttgcacagaattgttttgcaatatttcagaatttagtggaccacccacacatggtgatagagtatggttatgttatctgtatttgtgctagtaactggctcagctcttagtcatcttctagcttctagatagttgcaccagctgtcattcagttatgactgctggagttaggtacaaatcagttaagtatcagttagtagcttctactatattgtagcctagcctatctgtatata

SEQ ID NO: 153144 - DNA, 122 bp, Glycine max
  unsure (1)..(122): unsure at all n locations
ttatcactttttcctttatgtnggatacatgtaagtggtacactaatggtggttgttacttattcatcattctaattatattcatgagtcaatggtattcttccctgggtggtgactgcaaa

SEQ ID NO: 153145 - DNA, 469 bp, Glycine max
  unsure (1)..(469): unsure at all n locations
agcttgactaggcgagttgattntagccttagtttcactttagttattagtcaattcgattaagaatgagaaatcccaaagagaaaacgtccgattgattntccgctttattttactaaaaaagatgttntttgattattatattattntttacctcttttttatttccaacgtggttacgacacgaccgaacggtcggaatttattttaaccgaagttaacggataatacaattcaaacgatcggtggaaatttattttatttttaagttaagcgagaaatgacttaagtaaaatggcttaagcacgtcaaaagggggtataaaaagtaaatgaaatgagaataaaaatacacgaaacacaatgtggaccaccatgggtacatagaatgaatcgaanaacttggttcgaggtacttnacccgtgaagatcgaagaacgatgaagaacgaatgaagaacgtcgaagaac

SEQ ID NO: 153146 - DNA, 479 bp, Glycine max
cttgtcttgagtcatcaagagattataaatatgtgaccatggcatgaatttcaataatataattaactcatctctcaaacatctttcaatatctttctacaaaattttcagattcatttctcttcatctttctaaaagtttttgatcaacactgtatcttcctagaaaagttctttgttcaaaaacttgttctattcatctttttcattctcttctccctttgcaaaaagaacgaaggactaaccacctgaattcttttgtgtctctcttctcccttaaaaaagattcaaaggactaaccacctgagaattcttttgattcttcccttccccttatacaaaatatttcaaaggactaactgcctgagatatcttttttcccccttacaaagattcaagggactaaccgcctgagaattctttgtcccaacacattcgaggatacatcctttgtggacaagtagagggtacatctactgg

SEQ ID NO: 153147 - DNA, 470 bp, Glycine max
  unsure (1)..(470): unsure at all n locations
agccttcatgtgttcaattggttcagattgttgcacagaagggcaaaggtctgtgtggtggtcggcagaggagcataaaccacagagtctggcgacaggtgcagaatttttatttcaggttaaccaaggcatctaatttaccttcaagcttcttagtctcgcttgatgaattcgtggctacttcatgcacttctctaatgacaatagcatcacttctggcactaaatttctaggagtttgaagccatcttctcaattaaatntctggcttcagcatgggtcatgcctccaagggctccaccactggcagcatctatcatacttctctccatgttgctgagtccttcataaaaatattggagaataagctactctgaaatctggtggtgagggcaactggcacataatttcttaaatctctcacagtattcatataggctctcttcactgagttgtctaatacctgaaata

SEQ ID NO: 153148 - DNA, 429 bp, Glycine max
tataagaacaaaattgcctaaatcatttccaaatatgcatgtgaattatgaagcatcaactttattaagccaaggctattgtgcaagaaatcaatggggcataacacaccaaaagattatgatgatggatggctcaaattctcacaaaggtaaacttatcacattcaaattgagctttcaaaactatcatgacatgtagaggaaaaacaaggatttcaaatcacaaaatgtcatgagacttttatttttagaacaattacccatttcttgaacatatcctataattcaaagaaaaatatgcaaatttgtacatgcaaacagaattgacctaaaatattttactagaaacccaacataactaacaaaaattaacaaaacttacataactagcataaccataaccgtataacttccgccccccccccccat

SEQ ID NO: 153149 - DNA, 472 bp, Glycine max
  unsure (1)..(472): unsure at all n locations
agcttgtgtgcaaaaaataaaaactgattttgtatttgaaacgttggctaagcgcgcgaatccgctatgcgagcctcgttgagaaaccaaacatctctctggcttgcttagcatagcggactgctaaacnagagtgtcaaaaactacttaagtgagtgtaacagcagttatactcacacttgccagatttcggaaacttcatctctgcattcactctctccaaaaatccgcatattttgcatttgtgctttctttttgcattatcaactttgaagcaacaaccatacacaatccaagtaagttccttgattccttttctctttttcttggctaaaaactttaggatagaagacttcacttggtgttttagaattttagggttttaatggtttgttagaaaatagttaagaataggactatatacgctggtatactggattgagtatgatgcacacattgcatgtctgatatg

SEQ ID NO: 153150 - DNA, 420 bp, Glycine max
  unsure (1)..(420): unsure at all n locations
tacggacactttattctcagcttacggatntggtcttcaccggcgaaaggatcaaagtgggtctgtatagatgcaaatttgatcatcctctctgacgaatgagataactggggcaaatgaagagggtgagaatgagagagaaacccatgctatgactgccattcctatatggccaagtttcccaccaacccaacaatgtcattactcaaccaataacaacccttctccttaaccaccacccaattatctacatatgccatccctaaatcaaccacatagcccacctacctcacaaccaatgttaaacaccacctttagcacaaaccataacaccaaccaataagtaaattttgcagcatataagcctgtatgattcaccccaaatttctgtgtcatatgctaactngctcccatatctac

SEQ ID NO: 153151 - DNA, 445 bp, Glycine max
  unsure (1)..(445): unsure at all n locations
agctttagtcttaaatgctgtttnttttttcttttctaaaatatcatntttggttgggttcttttctaattataccaacttaaacaatgctgttccccattattctgaatggcacattggcattagcatgtattcccatgttcatgcccaaaatagataatagtttatattaatatgtttgcggtttaagatttgatagattaataagcttacatatgagtatggcaatntatcaatattgacttggtcctattcctttcttcaagcattccaacaccaacttagaatacaagtgaggcttatcaattatntacttgcccaatcctttntctttatattgggtatgtaattttagtctttggcagtagactnttaaaactgatnttctcttcacattntntaagtcttggcttgttggttatcctacanatatatcatgtatact

SEQ ID NO: 153152 - DNA, 474 bp, Glycine max
  unsure (1)..(474): unsure at all n locations
tacggacactttatactcaagctggtntactaataccgccatccaagcttattcggactctgtcttctttgtgtcagcaggttctctaatccatctttgttccattctatcttcttaattgcatcaattctctagtaaatttgttgctgacgtaagttattcttattattatttgggtatggcttcagtagccaacaccccaatcaattgattggggtacgacttttatttttagcatagggaaaatgagataaaaaaaaaaaaactgaagaaataatttataagttcattctgcaactccatgaaaactattgtggcacttaatatgttcatctttttgtttcaatgatataaaacgcatagagtcaagtctctctaatgttcatgtgatcataatgtcattcaatcattccttctagtatttacctaacagctgcaatgacttaacaacntacatatcttcatcttttgtta

SEQ ID NO: 153153 - DNA, 454 bp, Glycine max
  unsure (1)..(454): unsure at all n locations
agcttctggaaggcccaagtgtccctgattgctatttacaccccccgttttactaaatgcaccacccctttctatttttgtgtaattctttttccgtaacgttacgaaactttacgaatttcgtaacgatacttattttccttccgcaaggttacgaatacttacggattatgtatttactcctttnttacctttcgaagaagtcacggaaacttacggattgcgcaaaaacacctcttttcgacttccgccacattacagaatttcacggaacacgcaagcctgcttcctttcgatttctgagacgtctcgggacttcatttattgcatgtcatcaagttttaatccccggacgaaattagggtatgacatanagcaatcgttactgatcaaggaacccatntttgcaacaaatcaatgcataccttgcttaaaaagtacgaggttgtacaca

SEQ ID NO: 153154 - DNA, 410 bp, Glycine max
  unsure (1)..(410): unsure at all n locations
gtggtagatatagtagtcttataagctntcatatatatatatatttgtattatatatatatatatatatatagtagtctttcaagctttggtagatgttggttgttcttttactttcatatgcaaaagtgttgtaccccaacataattgttttagaagtaatataataactaaaaccagaaccatgtctatagacattataaattattatacagaaacaaaaaatttcactatccaattatctacaaattgtgatattttttgcaacaaaatttttgtaaataaagcagacgttgtatatttgcaaccagccaaagaaaaaattattgtatgacttgactgtatcgcacatgataacaaattattcactattacaaaagattacttattaatttctacaaactcataaat

SEQ ID NO: 153155 - DNA, 405 bp, Glycine max
  unsure (1)..(405): unsure at all n locations
aattattttaactaaagtatgtaggcttttaattttctttttattgcaaattatgggaatgcaatctttgttttgtagtgtcataagcccacttgtatgttcttcaagaaaaatatgagctctaatcttttcacaaatttcgtagaagaaaatctactatttttcaatctggtttaatctggcttccaaagtgaaaatcatgttatttaataatttatttcctggaatcatcttcattttaanatcaggaaacatcaattttaaaattgtctgtacgcaagtgtttgcaaaattcttgtagcataaactacaatgagctctntaacatttgtgaggatatctntngcaaaaatgcattctttgtgatcgggtcctatatggaattggatctcatggtcacaatca

SEQ ID NO: 153156 - DNA, 455 bp, Glycine max
  unsure (1)..(455): unsure at all n locations
agccgactcttggcatcanaggcttctaagaattttgccatactcccttcaaaaaatctaatttcaagttaaataggtgggttggtccgtgctcgcgtgcttatcacaaatcttaatcgcttatcgcgcataagtggattttggcttatcgcacttctctcgcttagcggatgagctgaaggggtgcacttgatgacctgtagcggtgcgctcagcgaacctgacagctcatcttcttctggattcttactcgcacttagccactgagtgtcgcacttaatgaatgctcgctaagccagcatattggcttagcgagaatgtgaaaacaacactgttgccaatgtgcctaattaacctgaaattgagagttattattattaaacacaanaaataaaagtatgaatgttctatgacctatatctaacagaaagtacttatatatgacaaaacaatat

SEQ ID NO: 153157 - DNA, 456 bp, Glycine max
  unsure (1)..(456): unsure at all n locations
tctatcattacttccatatagagcatggtagcgttgaatgccacgatcttgcatttttgcgaactccttggctaatggatagcttataacaaatcctcccccaccatatgccatagcataagagaaatgaatgttttgaacgtggctctcagatgagctcccaacataatagaattgagtgtggtcatacttagaaagaattctaaccacattatccacaataaatattgtatcatcatctcccatcatgaaccatctcacgtcttccattccaagcttcaatgtctctgttaccacccttgaaatcctcaaagcagatctttgcccttngtgtattgtatatttaaatatagaggtgtcccagaaatcgaatctctggtacccctcattgcttgagtctcacttgctattaacacaccaccctctgttgatatgcttcacacactttatgatctt

SEQ ID NO: 153158 - DNA, 440 bp, Glycine max
  unsure (1)..(440): unsure at all n locations
actctnttctctctttntctctcaactgttcttcgttcttcttcctcttttctctttngntnttcctttctttgtacaaatttcgtggaatttccattggtgatgatcatgaaaggctaaacacttaatcaatccaaggatccattgcaagcaagaagtgaattgagttctggtttggtatttctaatctttgtgaatgttcattgttttcttcaatcctattttttattttcatgattatgattatgcttangattgaaaactgattaggttatcaatctatttccaaattgtgaaatttaatcacaaattggtttgatgattttctaacctaatttgcgatatcaaacaatttaaggattaattctattgaacagtctctaatgcatttgactgaactgtcacactctgaacatcattncgaataatggtgataattc

SEQ ID NO: 153159 - DNA, 483 bp, Glycine max
  unsure (1)..(483): unsure at all n locations
cagctngctactacaaaagtccagngggattaaatttattattntggtattatttgttgatggcatcctactagcatcatacgatttagtgttgcaaaatagttatatcgcaatttatcatgaattctgggtgtcctaaggtgatatatgagtaatcttggtatgcaacactggaaagtagtaaaatgtattatgtgctaatttaatagaacaagaaattgcatgttttcatatcgaaattctacaagtttagagatcattgggtattctaacttcattttttacagaatatcttaatagcaatcactctacataagaagccatcangtgtttattgggacaatatnttagcagtctcattaaggattaaaccaagtaaaagtttgttgacatanagtatttggttggtaaataaagaattcaaaatatacaaatttatatagaacatatagggactcattccatgctaactgatccacttat

SEQ ID NO: 153160 - DNA, 430 bp, Glycine max
  unsure (1)..(430): unsure at all n locations
tagcgacacttgatacttaactccgttatgaatccggctatctacacaataaggtgctacatttcatactttattcaagtgnttttgccacctaattctcctgcaatttcaagtatatttccttttgctgactaaaattgtattcaaattaaaaggtatttttttgtaatgtattttttttttttgagagaaacattaaccatgtcccctccttccttaagggttagtgttttgcccatcttgaacttacttaagttagaattaggcattgattacttatttttaaaacaaacaaaaagtaaaagaaaactgcgaatacaaatgatacatggctgccttgcagcgacgttctctgcttgtttatcgtggataatgggcgacgatcagtctgtcgtgaccccatccccacttgcatccgtccctgtgtacc

SEQ ID NO: 153161 - DNA, 358 bp, Glycine max
  unsure (1)..(358): unsure at all n locations
gataataagcttaaagaggaagtttaatggacgaagagaatgagagagagagagagagaangagagcctatgtggcgtgggaatgaagaatagatagggagagaaattgagctttgaagtgtgtctcacaagactctcattcatcaaagctagtgttacaccccttcaatagctaagctcactcctatggcaaaatacatgaaggaagaaagcttccttgagaagcttccttggaaagcaagtgttacacccctccaatagctaagctcacccccatgggaacacacacccctccaatatttaagctcacccccccctcctcccccaaaatacatgagaatacaaanaaagtctctac

SEQ ID NO: 153162 - DNA, 402 bp, Glycine max
tcctttgggttagatatatggacttttgagttcactattactatttcgtacgatacattgcccgtgtatgagcctaacatattttatgtatcaagtttctggtgtcgtttcctataactagttgctgaattcccaattagtttaattttgttaaaccaaatagttctgttcatataaatgattgtattctttatttacttatttgtctaatatctattcttttatcttctattgcacttgatcttctgctctatatatattgcatgcaaaccatgtcccaatattcaccattgctgtacgaacctgatattaacaagcttatctgtaaagtttttgcagatattcgtgaagagagagaaagagcaatggtagttaatctggcttggacccttatggattacc

SEQ ID NO: 153163 - DNA, 431 bp, Glycine max
  unsure (1)..(431): unsure at all n locations
agctntntatccaagacactctcttggtggtgaatcttctacttccatggcttattccctagtggatggcgcctcctctcaccttttctcctttatcttctactacaacttcatggctaaaaatcaccattgaaggaccccattgaagctcaaagatccagcatccatagaagcttcttaagcaagcatccatcaagtggtatcagagcacaagagcttcatgtaggtgctctttaaacctccgttaattttcagctataccttctcctccattgttgnttctgcattttttttctccatctatttcctcacatgtcttgtgtngaatgttgtaacatgatccttagaatttcaccgataaacttgtatagaactagattgatttctatggtcanattcttgtcttgtctgaaccataattggtgagttgg

SEQ ID NO: 153164 - DNA, 476 bp, Glycine max
  unsure (1)..(476): unsure at all n locations
attccttcatctgacttatcatcaaactttcctaagttatcttttacattgtttatacanaacatttataaccaaaaacatgaaggtgtgaaatggtgggttttctaccattcaacaattcatatggaggtttctttaaaatgaatcttattaaagccctattcatgatatatcatgcaatattaacggtttcagcctaaaaaatatttggaagaggagtgtcatttaataaggttctagcaatttcttccaaagatctatttttcctttcaacaactccattttgttgaagggttctatgagcataatagttatgttcaatgccatgcttatcaaaaaataattcaaattctttattttcatattcacccgcatgatcactccaaatagatatannatttgagattntntcttgctttgaatgattatttctagttcctaaatgcttgaaatgcatcatcttataagtgataaat

SEQ ID NO: 153165 - DNA, 468 bp, Glycine max
  unsure (1)..(468): unsure at all n locations
agcttcttaaggaagtttctcaatgaagcttctctaagaagnttctcaaggaagctacctacgctacaaatagaaacatgtgtaacactttgtgtaactttgatgaatgagaaacttgtgagaaacacttcaaagttcaacttctctccctctttttctccttcaatatcatgctccccccttctctctctctctcattcttttccttcgttgaagcttcctctctaagcttcttatccaaggcactctcttggtggtgaagcttctccttccatggcttattccctaatggatggcacctcctctaacctcttctcctttatcgtctgctacatctccatagtggaanatcaccattgaaggacatcattgaagctcanagatccagcctccatagaaagctttcaagcaagcttccatcacaacataccttcacaaaccanatncaatctcaattctatgacattc

SEQ ID NO: 153166 - DNA, 376 bp, Glycine max
  unsure (1)..(376): unsure at all n locations
ccttgganagtgttatttttcatctcctcgcttattctattgctatcttatcgagtgtccgctaatcctacacttctgggctaagcgcgaggaagactctggaagaagatgagttgtacatgttcgctaagcgcaccgcttcagttcatccgctaatggagaaaggcgcgctaagccaaaaatcactaatgtgcgctaagcggtccatacgtgcgctatgcgcacgatcacgaacaatgccacctatgtaagcctaaaatcataatttgtgaagggagtttggactgggattcagagctntgcatgtctagggtttctagattgagaaaggtccaagttccatagagttntgagagaatttgctgtgtgaagatct

SEQ ID NO: 153167 - DNA, 468 bp, Glycine max
tgtgtacatctgcactgagccaaacttgttctattggcttttgttattcagcatgtatttcctcatacctccgaaacttgtgcgcgttaacgtctttcaagcatgtcatagaatttgttaaaatctgagttaacacttaacacagtgatagataatacccataacacaactaaacttactaacgcttcaataaacttctttacaagtaattgtaaaagaagataatattattcttatattcaaaatcacaatgaatcacgaactataatttatgaacatgtttgatcacaaaccaagtaaagacatgtaaaattataacttatctgcatagtatgtacaaagtcctcataatataacatgatcgttcaaaattaatttgaacaatagattcaacatgcttgttttgtaagataaattcataaactcacccagagaatgaggaatggatgtgatgttcactcactctca

SEQ ID NO: 153168 - DNA, 475 bp, Glycine max
  unsure (1)..(475): unsure at all n locations
agctagagagactgttggcatgttcggcactttcccatgccatatnccatttgtataattcggaacgatcccctcacatataagatgagatcttatgtcatttactacttggcgtctcccgtttccacatttgacacatggatagaaaaatttcccccgcaaagatggtgcattacatttagtaaattataggaattcttcaacaccattctcatattctttagttatacattatgctttcatccaagtttgatccatgtttcccctttgatgtgacacttgattaagttatctgacatgcatganaacctcacttttttaattaaaggtgtggccctatcccattcaggaagacattgtttagagtagatttataataattatattttgttaattntgacataaattcgatagcaattcgcattggtcttcangtacactacatgaaaatggtggcatgttatgatccacaata

SEQ ID NO: 153169 - DNA, 408 bp, Glycine max
  unsure (1)..(408): unsure at all n locations
gagactcacactngaatgagagacgggtagagttcanatgtaaagatgaagtcccaaattggtaggaatgagcaagttggataacttatacaagtgaaagaagtgtaaacctaatgcctcaaaaggtttanggttgaatgtaatatcaaattcatttgtgtggttagcctgtggaccattaacaaagaatttcctagtatttgtcccctcgtattctcaacatttcagaatttagtttatgaaaatgggtaattttgagtaaaagtataaaattacatgagggaggtatagttaacaaacaaagaggagcatgtaccaattggaggcatatttcacttgatgttgcactgtatactnttaacatgaagacacatttaattatcaatgttcttaatgaccaaacaatgt

SEQ ID NO: 153170 - DNA, 290 bp, Glycine max
  unsure (1)..(290): unsure at all n locations
aaggaagctacctagtntataaatagaaacatgtgtaacanttggtgtaantttgatgaatgagagtnttgtgagacacaactcaaagttgaacttctctccctttttcttccttcaatttcgtgctcccccctctctcttgctctccctctttcttttcctccattgaagcatcctctccaagcttcttatccaaggctcatcttggaggtgaagctcattcttccatggcttattccttagaggatggtgcctgctctcacctctactccctttgtcttctgtacatc

SEQ ID NO: 153171 - DNA, 462 bp, Glycine max
tgtgttctcacttgtagaactactaactgcagtaacagttgctgtccaactatccggttgtgtgacaatagaatcaattccttcacctcatcctcaaatttaatttgcactgactccaactgggcaagaatagtattaagttcattaatatgattagttatagagttagcttctcccatcttgaggttgaacaaccgacgcatcaagtatactttcttggctgcagatggcttctcgtacatatctgataacgccttcattaagtctgcagtagtcttctcgtttatgatgttgaatgcgacgttcttggctaatgtgaatctaatcacgccaagagcttgtcgatctagcaagttccattcttcttgcctcatgtcatctggcttatccactgatcaaggttgatacaacttcttctgatatagataatcctctatctgcatcttccaaaagctgaaatct

SEQ ID NO: 153172 - DNA, 457 bp, Glycine max
  unsure (1)..(457): unsure at all n locations
agctnggaaagaatgcttcaatggaggaaaagaaagagggagagaaagagagaggggggagcacgaaattgaaggaagaaaaagggagagaagttgaactttgagttgtgtctcacaagactctcattcatcaaagttacaacaagtgttacacatgcttctatttatagactaggtagtttccttgagaagctttcttgagaaaacttccttgagaagcttctttgagaaaacttccttaagaagctagagcttagctacacacacccctctcataactaagctcacctccttgagaagcttccttaagaagattcctaaagaagctagagcttagctacacatacctctctaatagctaagctcacctncttgagatgagaagctagagcttagctacacnacccctataatagctaagctcacccccatgacananaacatgaaaaataaaaaa

SEQ ID NO: 153173 - DNA, 486 bp, Glycine max
  unsure (1)..(486): unsure at all n locations
cttntattgtaatcttgatattcaggacaacactctgatttctgatgtttttgggataaaaatggtcatgaccagtcccttttccatgacttatccaaattacccattgactgtgtaccatntgaatgtacactgaatgacgactggaagtttgatttctctgcccatgatgcctgccatttggtttgcaccaacaatgcggatatgaccggacgtcttcttgtcgagtcattggctttngaaagccgcatccttcactatttaattgtgcgtattatgcttccacggtcttccaaccttgcccaggtttctgaggaagatctaattatcatgtgggtctttaatacagggcgtcaacttgactgggcacacttagtccgatattgcatgcataatgcattgcgattaaatgctccactaccatatgcacagctggtcactctctttttccgcattgtcaattactcttattctgacctatgtcca

SEQ ID NO: 153174 - DNA, 387 bp, Glycine max
  unsure (1)..(387): unsure at all n locations
agcttctactaagttatgatggttggattgattatactaggctacatttgtgcccactaggggtctgatattcaagagtgagattaagtgtactagatatccctttcatccatttgtgttctagatagtccttggttttgattcaatgttcattatgtatgtcaactaaacttgaagctttttgtgaccttaagttttgatgttatgttacaaatgtcactgtagacaagtgcttcgaatttctacattctcagaacatgttgggattatntatgtaaaactaccttggagtatgccatgaatttataattcaatagatattctagaagttacttatcatgttnntgtggtgaaataaaaataactaatacacttttgaagtatgtg

SEQ ID NO: 153175 - DNA, 329 bp, Glycine max
  unsure (1)..(329): unsure at all n locations
caaagatcaaagaacaactcaagtgaatcaaagagcatctcaagtgaatcaagaacaagtcaagagttcaagaatcaagaagaattcgagactcaagaagaaagtctagaatccagaatcaagattcaagattaagatcaagattcaagatcaagattcaagaatgaagaaaagactcaatcaagataagtattaaaaaggtttttcanaactttgaatagcacatgagtgtgtgacaaaacctttaccaaagaagttttactctctggtaatcaattaccatattggtgtaatcgattaccagtagccaaaataagttgaaaaagttt

SEQ ID NO: 153176 - DNA, 461 bp, Glycine max
  unsure (1)..(461): unsure at all n locations
agcttatgcactanaccataatntaatcaaatttaacacaaaatacttaacatataagcaagaattaagaaaaaaattagtcttcccaaactgtccaaatggacaattcaagattcaatacaacgattaatccaaactgtctgtattaatcgttgtattcaatttcaaacgaggaactatggttcactcacaatgcaattttttttaatattaaactatactcatatatgaacaacaattgtaataacgacataagtgttagaatgacatacatatctcgaaagatgctagtaacaaaaactatgaggcggtgccgacaatgataattatacgagtttatctttactcaatcaacaacaattntttcagtagcctacttcctatgtcagtcaaataatagtacctacaaccaatacaaattgtctaacattaaaggcggaatgcaattgtcataaaaatat

SEQ ID NO: 153177 - DNA, 447 bp, Glycine max
cttcgagcgtctcgatatattacgggccttaatcatacatccgaattaaaagatattggcgtttgaaatggctcaaagcttcaacattcaatttcgagcgtttcgatatattacgggccacaatcagacatccgagtaaaaagttattgtcggttgaattggctcagagcttcaacattcaattttgagcgtctcgatatatgacaggactcaatcatacctccgaggaaaaagttattgtcatttgaatttcctcagagccttaacattcaatttcgagcgtctcgatatattacgagactatatcagacatccgagtaaaaagtattgccgtttgaattgctcataggtcaacattcaattcgagcgctcgatatttcgggcctcatcagactccaataaaaattttgcgttgattgctcaagctctacattcattcagcgttca

SEQ ID NO: 153178 - DNA, 421 bp, Glycine max
  unsure (1)..(421): unsure at all n locations
ttatcaataaacacaagttgagttttattcataaaattagagtgtatctcttttatcttaggagagtgattctcctaaattcttgagtgattcaagaacaccttggctgtatcaaatgactttcacaacctttgtgtgttgccctcgctggaaagagtgattcttccctttctttcatcatcacccttgttctttcaaaccacaattccagaatatccacctctgcccaaaattatctcgtggccataactcccattgtacgcactcaaattaagtgattcttgagcctaaattgaatttcaaaacgagacctttcacctcgtgttggaatcacctcattnggagccatgtagcttcagttattgccatttctatatttctgtccagccaccacttaacctacgtcttaccatcccattca

SEQ ID NO: 153179 - DNA, 463 bp, Glycine max
  unsure (1)..(463): unsure at all n locations
ctgcagctttatagagggtcgtcctaattctctacaatgcatcatcttctangaacttcaagttgtatcatctgttctaaaagagagaaatcattatgttcatcttataaaactcagttgtaatcaagagattgtttgtctcttggcatgtgagaaactcgaacataagggtgagggatcccaaggtgtgttcaaagattgtaaaggatttacaaggatagtggaaaatattaagtaggttacttaaggacaggacataggcacgggaagtggccgaaccaatataaatcaagtttgcaattctctcttcccttgtcttgnttattnttattgcaatttactttgtcttgcacattaaacaatattgtaaattgctattgcttctcttctcattctaaactatcacatatcattaaaggggataaaacttttagtggaaatttaaagactattcaccctcccc

SEQ ID NO: 153180 - DNA, 455 bp, Glycine max
cattgtgcacctagtttgaatctcctatgctgtacctatatataagaaacatgtccactctcccaatgttacaaatcatattcatacatcattggggcatttcaccgagcacttggtgagcacatgtttggacataaattgcaagatgatggggacaatgtggcatgccccattgcttcagaataaagcatatgcctaatgccttctcattcaaatcctcaactcatgataacaagaataaaaacataccatatctgccccgcaaatataagcacattctcacaattgggagctccaaaagatgaagaatatataccaatgggaagctaataacatcaaggattgaatacttacttgttggagtgaataatgacaccaaaaatgaaagcaaaaggcaaccgaaagtggcttgagggagcaagaaccgcaagccttcgtgttcttttcttttgaat

SEQ ID NO: 153181 - DNA, 383 bp, Glycine max
  unsure (1)..(383): unsure at all n locations
agcagaagatgaagttgaaactgccaataaatcacagagaggagagaaagtaaaagatttaggacatgtgaaatgtgaaatgggtcgggttagcaaacaggtttcatttcaaaacccaagcaataggaagatcgagactgagcggatcttggacaacgaagatcatgattcagaacaaccttgcagcaaaacaataccacaaccgattntgcacacgaattggttggaaaatcatagaatcctgcaacctttaacacaattntgacgacattggctcagaatcttccatttgcagctatcctctcttccttctttcctttctcatctttgcatanaatttctttcaattaaaagcagtcaaaagttcttcattntcacatcat

SEQ ID NO: 153182 - DNA, 484 bp, Glycine max
  unsure (1)..(484): unsure at all n locations
tgtgtggcggctngccaactatgtatcttgagtggtatctggatattatcctctagtaatcgattaccattcatgggtaacgattacaggggttaaaaatggagacagaatgttaaatggctactggtaatcgattaccaattgtgtgtaatcgattacacatggtgatagggcactggttatcgattactagttgggtgtaatcgattacacagtgttacctgctactggtaatcgattaccatttatgtgtaatcgattacatagtgtaatttttagtttccaatgtgcaaaggctgagtaattacgttttgggcattggtaatcgattacatactttggtaatcgattaccagagaggaaatcccttgaacaaaacatcttgactatgcgtatctgttangggacgcattgtattgttacctgtgtagttagatttcttgtgaaagagtctaccctctttctttcatctcttgtagatcgc

SEQ ID NO: 153183 - DNA, 473 bp, Glycine max
  unsure (1)..(473): unsure at all n locations
agctntntatccaagacactctcttggtggtgattcttctacttccatggcttattccctagtggatggcgcctcctctcaccttttctcctttatcttctactacaacttcatggctaaaaatcaccattgaaggaccccattgaagctcaaagatccagcatccatagaagcttcttaagcaagcatccatcaagtggtatcagagcacaagagcttcatgtaggtgctctttaaacctccgttaattntcagctataccttctcctccattggtgtttctgcattttttttctccatctatttcctcacatgtcttgtgttgaatgttgttaacatgattctntataaatttcaccgattaaacttgctatagaagctagatntgattttctatggttcaaatttcttgttcttngttctggaaccatgaattgtgttgagttggttcctttgagtttgtcttgtctttt

SEQ ID NO: 153184 - DNA, 378 bp, Glycine max
  unsure (1)..(378): unsure at all n locations
gagatgtgatgagatacggtgtacagagaagcttagaactctcttacgagtcatcgctaaactaatgccacgttgtatcctaccagccttgtattcttgatgatattnctttaattgataaacatctatttaagactctctagaaacctttgtcttctaaagatgttaaaacttctatctctgctatgagtcctttcaagtctgcatgaatatattgattccaacttttttttatcatactattgggatgcgtgggaataacagtctggagatgattgtcataattttactcaagcccattatcctgcttatggatacttattgttctattctaagtgacaccaatgaccttaagatttagctatagttgtgcatgtc

SEQ ID NO: 153185 - DNA, 395 bp, Glycine max
  unsure (1)..(395): unsure at all n locations
atcttggtgacacgcgtgttattacntcnacttttgtgctcacaagaattgtcatactgacatctgagtcacgttgacgggcggagataccctagtggttatccgtattaacattctttcttgctgtctgataaacgaaaagcctgatagcatgcagagactaacgtcgtcttctgcgcccttcgtctatcgcggccgacaagcccgttgacacgcagagatttacgttattttccgcgctcacaagatctgtcatactgacatttgagtcatgctgacggacggatatacccaagtggatatccgtataaacattcttttttcctgtctgtaagacgaaatgcctgatagcacgcatagactaacatcgtcgtctgggctccttgtgaatcgtg

SEQ ID NO: 153186 - DNA, 312 bp, Glycine max
gtcctccgtgtgacaacatacgtgtgtatggatatgaccatagcaaccgctggtgagttccaatgtcaaatttcgagaggctcgatatatgaatatcctgattcggagatccgagcgtaaggatatgaccacttgattctgtgatgagcttccatcggtcaatttcgagagtctctagatatgatgctcctgattagaacatacgagcgataagatttgaccatatgtatcgctggagaacgtccggcgctcaatcatgtacggctcgatatatgatcagcccgaataagacatacgagtgaaaagatatga

SEQ ID NO: 153187 - DNA, 311 bp, Glycine max
taaagcctattcaagcaatgactttaggcctcctcttctcacgaggactaacacacataaaataagttataattaattggtaggcaataattaagagaaactacttttctcttaaaaatagactctgcaagccaatattataattggaatatctcctctcctataaaatatagtgtgacaaaagtaatcatatattttctctaattagtcaatgggtagctctaaaagtaaacgacttcctcgtaaataattggcttcattattattatggtccctcttaaataataattatatgaaccctctcttcaatt

SEQ ID NO: 153188 - DNA, 457 bp, Glycine max
acccaacggacacgcttcttcctgatcaaactctcacctataactccaaccttattttctgagaagcggaaccaactattcttctggtttctacaagctcttcttcgactccgataatgttctccgcctcatgtaccaatgtccacgtgtttcaagcgtttactggccagacccttggcttcttaacaataatttaagtattggtggtacgggtaatggtagaacctcttacaacgatagcagggttgctgtactagatgagtttggccactttgtttcttcggataacttcactttcaaaacaagtgattataggacggtgctccaacgtatattgacgcttgatcccgacggtagcgtgatggtgtacagcaagaacgatggagaagacaagtggtccatgtcatgtgaattcaatgtacatccctgttatgctcatgggatgtgtggatccaat

SEQ ID NO: 153189 - DNA, 408 bp, Glycine max
  unsure (1)..(408): unsure at all n locations
agcttcanngtgttcaattgcttcacattgtttcacagaagggcaaaggtctgtgtggtggtcgacagaggagcataaaccacatagtctggcgacaggtgcatatnttttattcatggccagttgggttaccaggttaaccaaggcatccagttgaccttcaagtttcttagtctcggctgatgaagatgaattcatggctacttcatgcactcctctaatgacaatagcatcacttctggcactaaattgctgggagtttgaagccatcttctcaattaaatttatggcttcagtaggggtcatgtctccaagggctccaccactggcagcatctatcatacttctctccatgttactgagtccttcataaaactattagaggagaagctactcagaaatctggca

SEQ ID NO: 153190 - DNA, 433 bp, Glycine max
  unsure (1)..(433): unsure at all n locations
agcttganataaaatatatattgagtggtgaattaagtgtctacactattgaactacttgtacaaaaacaaaatacttaaagctataaaatgtgacaactatcaagataaaagcattggggagtttcctactgaaatttctcttgccgtacaaaaggtttttctctatttaacattatcctagtgttcttacaccgagaaaatactcaaaccatgattccttacatgaatgagcctaactctcttagcttttgttcttgattcctcaacaaacttgttctaaaagagttgcactaagcatacaatgtaaaatatactagatcactacactccattcctagacatacagatttctagcttgctctatcaagttctaanggtttaaaacattttcgaatactaaaaagcctaactacacatacaaataggtgatc

SEQ ID NO: 153191 - DNA, 350 bp, Glycine max
  unsure (1)..(350): unsure at all n locations
tgtaaaaatggaagcaagttaaaaactcttttctatgttaaactgtgtctacttcaaaaccccttgactacttcatattgatctatctggtccttctagaactatgagtttgggtggtaattactaaggcttagttatattaaatgattactcaaggttcacatggactctgttnttgaaaatgaaaaatgaagactttgacgacttttgcaaacttgccaaggtgatttaaaatgaaaaaagtctcaacattgtttcatctagaagtgatcatgaaggtgaatctcanaatgagtgctttgaaaacttctgtgaagaaaatggaattcaccacaatgtttctaccccat

SEQ ID NO: 153192 - DNA, 421 bp, Glycine max
  unsure (1)..(421): unsure at all n locations
agcttctnccccaattttctataaatagggggagaagtgaagtagaaaagggttcaaccccttatgcacttctctctctctcgaaatagctgaggaaaattagtttcgtgaagaaaatccaagtcgaggcgcttccgtaacgtttccgtgagtaattacgcgaagattctagaccatttttcaagattcatcgttcgttcttcattttcttcagtcttcaacgggtaagtacctcaaaccaagcttttcaattcattctatgtacccgtggtggtccacattntgtttcatgtattttttattctcgttttcatttactttntatacccccttttgacgtgcttaagccatttatttaagtcattgatgtgccatcattntcttctattntctaaaccctttntgcaccattttaattatt

SEQ ID NO: 153193 - DNA, 376 bp, Glycine max
  unsure (1)..(376): unsure at all n locations
tgtcgctggagctgacccatcaactgccctaactcttttagactgttgatcctatgctcttgaccttgactggatagaacctctttntaagtgaaggcttttgacttgatcccatgttttactaaagtgaaacaaaacccagtgcgaatcataactccgacatctattatgggtggaatggatgaatgcatgaagaaatgcatatgatacagatgtaatttatgaatactggggcccggaaaattgtctccttcttagatacaacgtcttggggtcgcatagtgcccaacgtatgtatttaatgatggtgacacggacccttcgttggtttggtaaagagaggggatcaagacggaactcgtgcgtgatgcatatg

SEQ ID NO: 153194 - DNA, 374 bp, Glycine max
accacatgtgatgggtaccccataatcctacaagcttgagatgaggaagtgttgaagggtgaaacttcctgcttttattgttgaccacagagtggtacctggagatatgtcgcggtggtcatgagaccttggggacgtcaggtggggtgctattgcccaaaaccaagcttgaccaatcccgacccaacccgggcatagtcggtcagtgagaacctgtgatgtacctaagcaggcgagctcctggcagtcaacagataaaaggaaaacaagaccacaaagcaaggtggcttgtggtggctggccagctgttgaatttgtgtaatatgtggatggtggcctctggtaatcgattaccaagggtgggtaatcgatta

SEQ ID NO: 153195 - DNA, 476 bp, Glycine max
  unsure (1)..(476): unsure at all n locations
tccattcacgagagcatctcttatttaagcatttcagcacttgctttcttgtagcttatgaaaaatgccatttcttcttcttctttcttccaaatccatttctaaagttccaagtactttctccatcacccacatgcaccattaaccaccgcaaaccatcattgttcttcattgaaaacccacaccgagaggaacccttcaaccgaagcagaatttacaacttggcttgcggtttcggtagagaacgaaaaccctaatctgatctttcattttctttcgaggtaaccatggttctatgcttgtttcttgttagttccatcttgtctttgcatcttttctaactntgcaaccgccattgcatgtcttatgctgtctttgaaaaccttaagaaagagattttgaaacgttatctttatgaatacatgtatttcgaacctacatgaacccgcacatggcgggcgaattcaaatacgttc

SEQ ID NO: 153196 - DNA, 345 bp, Glycine max
  unsure (1)..(345): unsure at all n locations
tttgatggaaaaaaatggaaatcaatggcttccattggacccccagagtaaaaaccacttttcattgcatttctctccattacaaaataaatcttttctctgctttcaagagccaaccccttcaatccatcttccatctctacaaacctganagattcatcaagaatttgctccgggtgctgcagaaaatcactatgcaaccccaaataccactgcatcccttgaattatctttaaaggtagaacatgctctctggtcatcaatatcatcttcctcaacctggaccttaagtcctccctgcattcttcatatactctcttctcatccctgtcaatctcagcaact

SEQ ID NO: 153197 - DNA, 403 bp, Glycine max
  unsure (1)..(403): unsure at all n locations
ctagttctcanacacatacccaattatgttttttatcatgcttaccgttcatttcactgtaaactgcatcatgttcttcaactttaaagaatctgcagtcaaaacaattaaactctcctttaaatatcattttttgcacatccagagatacagttatgtgaatgtgtatatgaagtggaaaaaggattcatactatgactcaattgagcacatccactactccgttcagctcaagcctatcattgccctcaaaaactgcattgtccgggatcccaatggctgcattcctatctctgcagtgtcatagaggggattagagttagatgttcccatgaaggttgcaaggtttatgatgcagtatccatccatctttgatgagttacgggtcctgatacaatcttct

SEQ ID NO: 153198 - DNA, 361 bp, Glycine max
  unsure (1)..(361): unsure at all n locations
acctcatcactttcttctgaagcttaacctcatggctctcacanctttagattgggaccaatccatcttgtgtcggactcttagcacttatgaagccgcgatgacccanactacttccctagctctctgtctttcttacgccgatccatgccttgcaactctggataccctcgcgtagggcactgaaaccccggcatgaaagcggatgctttgctgatggcctctctcataggagccagctgctatggcgggacaatatataatacacccttgtccatagggacttggactcttcataaatgatctgccttcttctctacgaggacnatacaaccctctgcactaagtgccattgcttctt

SEQ ID NO: 153199 - DNA, 469 bp, Glycine max
tacccatcacatgtggtactatgtggcggtctgtcgatggtgcacaacaagtgttccacatccacaagcgcgcataaacccaccatcccctgttgcccacctccatctgatctcacgtactcccacgtatcccatatcctcgtttctctcaacaccgggtccccatcaatcctctcaagcttccacaaaatccaagcaaaacaacattcaaacctcacaagctatcacagtcaagcaaaacatagcataggcagaaaactctgccaaaacaccaaccaaatcacagcttgtctcacttaagaccccagtaacaattccttcgttccggttcattaaccgttggatcgactccaaatatgtactggaagtctctaatacttaagcctacattttgaccgttgggatctactagcaaacatgcagaactcattctgcactactctttccacatgcaaccacacacaagcac

SEQ ID NO: 153200 - DNA, 465 bp, Glycine max
  unsure (1)..(465): unsure at all n locations
taatcatttccaaatatgcatgtgaattaggaagcatcaacaagaatcaagccaaggctattgtgcaagcaatcaatggggcaaaacacaccaaaatattatgatgatggatggctcaaattctcgcaaaggtaaacttatcactttcaaattgagctttcaaaattatcatgacatgtagaggaaaaacaaggatttcaaatcacaaaatttcaagagacttttattttcagaacaattacccatttcttgaacatatcctataattcaaagaaaaatatgcaaagttgtacatgcaaacaaaattgacctaaaatattaaactagaaacccaacaaaactaacaaaactaacaaaactaaccaaattaacccanacaatactaacaaaactaacataactagcataaccaaagaacactcccncccatacttaaacaacacattgtcctcaatgtagcacaat

SEQ ID NO: 153201 - DNA, 364 bp, Glycine max
  unsure (1)..(364): unsure at all n locations
tggcggatctcgatgcccagctgaaagagtcagagttcatgctggatgattccgagctgcangctgctaatatatggaggccaacaaggagcttgatgaggaactgctcattttcaaaaaaaaggccagagagcagaatgaaaagggcttcaacaaggtcgtcatgtatgccatgttcttcgccaaggactttgacttgggtctctttgaccttttcaaggacatgaagggtggtgttttgcttgatgaagatgatattgttgctgaagaagaggtcgacaaagagcagtatggtgctgaatagtaatgcgatgatgccactgtttangctgcctttcgattatttcttcttttctccatttgt

SEQ ID NO: 153202 - DNA, 325 bp, Glycine max
  unsure (1)..(325): unsure at all n locations
tgcaactcctcttgcttgggcactagaagaattattgcgatganctttttcttcgcngtcataggagtgagacgtacagtgaagaacctttcctcttaaggcatctaggatggtcatgtatagatgcggagatgaatctctccttatctgtgtttagctatgtgtaatatattgattggctcaagtgttcctgacgtgctttctttcgaaaagatatatatcacctgatacatcgggagggtaactccacacatatctatctatctacctatctacctatcttgtgatatatgagtcacacatatctaatatgtgggtctacata

SEQ ID NO: 153203 - DNA, 431 bp, Glycine max
  unsure (1)..(431): unsure at all n locations
actatgtngctccaacaaattctagtagtatgaggcctggtatgtttggtgtgaaaaatatagagggagaagcccatgagtggctgtggttcccacatggccaaacttcccacaaaccccttataaccctatgtatcaatatcccccacaccaataccactactcatccaatatcagccctccccctgcccaatacccctatgaccgagagcacccaatcaaccacagagaccacccctaaatcacccacaaaatccaccccttatacaacctataccaaacactactcccaatcccaacatgttgtaattctggtattgtctaattaagtatgtaacagaattaaaacttatggtgtttcccctcgaatattctccanaacgaaaaananaactaanaatganagagagagagagagagagagagagaga

SEQ ID NO: 153204 - DNA, 413 bp, Glycine max
  unsure (1)..(413): unsure at all n locations
aggagaatgctggatggcgaacttgattgtggagagcattatcatgaattgaccaaattattacttggatatccatatgcggggagattgactaaagctgaaaaaacacttattgttgatatgacgaagtccatggtgaagccaaaaaaacattctactaactctgaaggaacacaatgacgatagttgtacgaccattatacagatatacaatgcaggaagtgcatttcattcttccataagaggaagcgatcttgaaatgcaacatctgatgaaacttcgtgaacgtgatcagtatatacattggcacaaaattaaagatgaagacgtggttcgtgatatcttctggtgcaccctgatgcagtgaagtcagtcaatgcatgtaatttggtgttttngatagacaacaccta

SEQ ID NO: 153205 - DNA, 471 bp, Glycine max
acaagccagttcgttaactaataatattattaataataatatttataataataataataacaatctattttatcaaatcttatattatccagatgttattctatctaaattttattctatccaaattgtattttgctcagaatttatttcatccaatcttatcttatattgtccagatcttattatatttcgtttatgggcttagacttataatagatttgagagctttggggctgatgacctatataacagcacatgattttatgttagggacgttttttcgaagacgagaataattctaggattttataattccaattattattactattcatgcacactgttcacgtataatataattcgtcttctgcaatttcggttcagcttcaatctgtgtcgtttccgttctactgattaatggaacgctaagtctccatcattgttgtctcttgaggatcaagcatagttctc

SEQ ID NO: 153206 - DNA, 404 bp, Glycine max
gaattcatcaacctagctttccaaattagagattgacgggcttctacggttacctagaaatggatagaaggaagaattcttggaatatgattagaacacttatagaagataaccttttcctttgtgcatatttggtgattttaattatttgctttccaatgatgaaaagatgggcttggttaatcacccatcgtggcttattaatggctttcaagagactataattgattgcaatttccatgcacatcgagggataccaatatacttggtcaagacagaaaggaaaacatgatgcaattgaagagaaattatacaaagggtttgtgactatggattggttagacttatgtccaaactctagctaatcaatggcatagcaacaaaagtagatcatttctccatta

SEQ ID NO: 153207 - DNA, 388 bp, Glycine max
  unsure (1)..(388): unsure at all n locations
tacttaanagaataataatgctacaaagaatgtaatcatggttagtatctccatggngtattgtgaaattcaagggagcatgacacatagatatgaaaaaatgaaatgagtcgataattaagcgtgttggaggagaaaacgaagcatcaaatggaaaaagaatggataatgtgaaaatcattgaatatagaatgtaaattgaaaaatcaattaagaggtaaaagaaaattgaatgaatgaaataaggtgagaaagagaaaagacactaacattaaataagttgaatggttatgggtattcatttagataagtgtgttgacattaatgagcatcaataacaaagagtcttttgtatgttgtagaaatgtgcctcaacacatatgaatca

SEQ ID NO: 153208 - DNA, 435 bp, Glycine max
  unsure (1)..(435): unsure at all n locations
agcttcaaaagcaagcttacattaaagccttatgtgtctcatgaaccttanggtagatttctgagcccatgggccaaggatgggtccaattatctttgaacatattatattaggatgtcattatatttgggccttgtatntagggctccatactgtaagtagggtaccttagaaatgtatgatttttcagcccttgtattttacggcacctagactggattttgtattaggggtagttatgaaatttcacatgcatttaatgaatatttgatgtgtgtgttgggaaataaatataattgaagtgggataagcccaatccagataaatgttagagggcgggtgagcatttgcgtgctacaacctcattgcacatcatagtatcacactttgtgcatgtccttcatgctttatatgccgtatgacacctaagcacac

SEQ ID NO: 153209 - DNA, 220 bp, Glycine max
tgaatgcatgtaacccaccatcttctcatattagatcatcgatatcgtgtctactatcattgttatatctctttctccatcattgggggcactacttgagctgccatatccctccatctttgggcgtattacttgaaagattcatgctctttcatacacatgctctgtatctgcatcctatccggaaccatatgagaatggtactaatactgcctatcga

SEQ ID NO: 153210 - DNA, 466 bp, Glycine max
  unsure (1)..(466): unsure at all n locations
agctnggaggaagaatgagatgaatgaagggatatggagagaatatcacgaaattttgtgctctaaatgagctttgagatctgaagtttaatattcaaatgatcaaagttgataaagatgcacacacatgacctctatttatagcctaagtgtcacacaaaattggagggaaattcaaatttcacttgaatttgaaattgaatttatggagccaaaattccactaattatgattagtgaatattagttatggttcagcccacaaatccaagaccaattccaagattctccactaagtgtgcttaggtgtcatgaggcatgaaaagcatgaagggcatgcccatagtgtgactatatgatgtggcaatggggtgtagtaagcaaatgctcacctccccctctaaaattaattgggttgggctttaccaattcaattaaattattccaaccacacacatcaatatcac

SEQ ID NO: 153211 - DNA, 416 bp, Glycine max
  unsure (1)..(416): unsure at all n locations
agcttattcaatgagctctgtcataattaacttaagcaataagtaatgaaatgcaactaaaagagtgtaataacaaatttcaaatttacagctggcaaaatctggatacttttaatttaaatagtaatgacacatgtacctatagacatgaattggtaggattgataaggaacttcatatcaagtatgttgcgagcaatagaagtagcgttcattcattgataaaatatttagcctcggcttctttaaagtcatatcttgtataatatttaaaaagttaatgacattacatgatgaatacatgacagccatatntgtttcttcttgtatacatgcggaactggataccagaatttgtctgacacatataatanatngacttaaattaaattaaactcaggctattaagctcgatac

SEQ ID NO: 153212 - DNA, 442 bp, Glycine max
  unsure (1)..(442): unsure at all n locations
tgcgccttggtgatattgctgatgaagttggccaatctgctttcttaatgcctcaattttgtttgcaaaagtttgttttgtgctagaattgcactctgagtgtccaactccattatagcttttctttgggtcaaagctctacattatgactttgataaccattggctgctatggagtcaatgatcacaatagcttcctccggactcttgaacatcatattgccttcagctgatgcatcaaggattatcttggtttaaggtttcaaaccactatagaagatatgcagctatgcaccatcatcaaagttatggtttgggcaccttcacaacaaaactttgaatctctcccacgtctcatagagagtgtcatatcctaatntcgtccggggaccatctatttggtgggatgcgacctttgcttgaccgcttcgatgtacatgaca

SEQ ID NO: 153213 - DNA, 458 bp, Glycine max
  unsure (1)..(458): unsure at all n locations
agcttggtccncaacgctctgttcangctcctccaaaatctagaggtaaacctaggatctctatcagacactatgctagatggcacaccatgtaatctgacaatctcactaatatacagggaggtcaacttttccaaggaaaatgtgatattaatgggaataaagtgagcagactaggttagtctatcaataataacccagatagaatccaaacctctgggggtcctaggtagttctacaacataatccgtggaaatactgtcccacttccattgnggtatctcctagggttgtaacttccttgaaggtctctgatgttctatcttagccttctgatagactaaacatgcatacataaactcactaacctttctcttcatgttgatccaccaaaacatcatctntaaatcctgatacantttggtagcaccaggatggatacttaaattactcctatg

SEQ ID NO: 153214 - DNA, 433 bp, Glycine max
  unsure (1)..(433): unsure at all n locations
ctgcttgtggggcttctatggaggctggatctttgagcgtcaatgtatgtcttaatggtgattntcctccatggagatgcaacggaagacaaaggagaagatgtgagaggaggcgccatccactatggaataagccatggaagaaggagcttcaccacgaagatgagccttggataagaagcttggagaggatgcttcaatggaggaaaagaaagagggagagaaagagagaggggggagcacganattgaagaaggagaaagagaagagaagttgaactttgaattgtgtctcataagaatgtcattcatcanagttacaataagtgttacacatgcttctatgtatagactangtagcttccttgagaagctttcttgagaaaacttccttcagaagctagagcttagctacacatacccctctcataact

SEQ ID NO: 153215 - DNA, 451 bp, Glycine max
  unsure (1)..(451): unsure at all n locations
agctttatagggttgttttgaaaatgtaccctcttctaattacttccttttcttataggggttgtacacttngtgggattgattctttgttcttgccatcatcaaaattaaacacaataaaaaatatacaagttcatcttgttagagaataacgagcatagaaagattgatcaaagaggagtggaaaataacattnnttgcattaggtgatcatttcaccttggcaagaccaatggcaaaattgaaccatgaatctcattgaagcttctggaagtgcattcaccaaggcgaagcatacattcaccattgcaatttaaaacttggaactaaaatagcccctggaagtcatcttgctgtggctaaggctagcctcgctatatcanaaggaaccttgaaacaaagagaattttgtgaagtcattttctagatcaagcatgggttgaataatgac

SEQ ID NO: 153216 - DNA, 275 bp, Glycine max
taccttttcttaatataagcatgtgtaacacttggtgtaactttcatgaatgagagtcttgtgagacataacttaaagttcgacttctctccctctgttattctttcaatttcatgctcccccctctctctttctctccctctttcttttccttcattgatgcatccttccaagcttcttatccaaagctcatcttggtggtgaagctccttcttcatggctatttcctagtgatggaacctctctaactttctcctttgtttcgctgatctcat

SEQ ID NO: 153217 - DNA, 420 bp, Glycine max
  unsure (1)..(420): unsure at all n locations
taaaataactattntactccctatcaagtgaataaataaaatatcatttntattttctaaaaatatatatttattttatttaccttaaaatcattgttttaattaataaaactatttctccttatttatttaatcacaaaaacctcattatttttctaaaactctatttattttcaaataaaatcctttttaatttattttacgaaaaatagagtgttacatgtaaccacaacctagtgtcaaaaagattagtggggtcgtgtacatggactcaagagatgagtgaacactcangttaagggtgtngcaaatcttgtgtggtggtaacaccatccacgtatgcctgtcctaacaaaccacttatttcttttcacaaatcatatggatgnttcctcanatggtngactgataatctattgt

SEQ ID NO: 153218 - DNA, 393 bp, Glycine max
catttctgtgtgttcattgatccctattctataatattggtctgtttttcttaccctgtagatattaatttcacaatggagtaaatgccattagaaatctagttgtctaattgtttataattagccaatggacaattgtactaggatactctagttgataaattcataacccttgccgatggcaacgctgtggtggagccggatagctcgggcttgcgattccactggaggaggacaaaggtgggtttgggttttggaggggaagacgggagaatggtgcggaggactaatgctgatttgggggcggatgactaatgctgagtttgtggctgttgttgccctaaaataatgttgttaatcatattctaaaggtaaactttcacctgtaacata

SEQ ID NO: 153219 - DNA, 492 bp, Glycine max
  unsure (1)..(492): unsure at all n locations
gcagctgacantcgagtcagaacaaacataagtatctaataaatgttaagctctatgggtctcacaggaagcagtgtngcttgctttttcaataagaaaacaattaaacatttaacaatagtgagcaacatagccgataaaaaaaaaagtgagcagcatagttcaatagataataacacacatcatcctttatgcctaagtatgtgaaaagatactgggattaaaaatggcaataacaaagtctacttaacatcctaaaattaaggaaaatagttttcaaaaccatcatcaaattcagaccgtgcttacaaatggtggcgtgatatatntgatttcagtgtgaatccaaccacaccatctgcagtatatcccaatctcctcattgaaatagtgtcgtgcttgcactgtgaggctgaattttcttcattttcccctactntatcaatctgcagattataacatacaaagttggttaatatntctcctctctaa

SEQ ID NO: 153220 - DNA, 499 bp, Glycine max
cttatataataaatatataaataaataaaggctatggaataatattcttctatatattggattaaataaatggttggcgggttgatatatttatacacacctaaagtcacttcaatctcattttcacttaactcttattttttttttctttttatttatcataaagagaatattgataatatactttttaacatatttttatgacattgtttattggtgaaaacttattaaaaatcataaatgttgtaagttagatttatttaaagagtgcctcttcttattttaaattgtgtaataaatgtttaaataactaaaatttgtgttaaaaatgttaaaaaagtgtgttattaacccttctcttcgaatcatttctcacattgagtaatgttttcttcttgtattgtgttctcactctatttcccactgtattccacctatacacaccccatacttctgatatatgtttagctttctctgtaccggtgagattcaacaaacg

SEQ ID NO: 153221 - DNA, 507 bp, Glycine max
  unsure (1)..(507): unsure at all n locations
ttaagtcacctgcnngcatgcaagctaaaatcatccatatacaacttgctctatagtatatttcaaggacataacatntaagtagccaaagaacatcatagcaaagcagcaactggttgaaaatggtttactaaaaaagaacagatacattatcacaaggaaattcagctcgtgttcccacttattccaagtaagacagcaaatcatgccatcccactttcccacctaacacatcgaaaactttaaataaagtagagcaaatgtacaagcgcacatgtgcttgaggaaaaataactagaaatgcaacatggagtgaacctaaccttaaagctgtaaccctgatcaattaaaaattgctgcctcttagtggagtaatacatctcctgcanatacaagaacgacaaagtttataatacagcatatatatcccatatgatagttcaagtattaattttcaatgaatgcatgaccggatgaatgaatatatgaacctgcatagaataaatg

SEQ ID NO: 153222 - DNA, 415 bp, Glycine max
tagcttgcaccattatgattagccttgatcgactgtaaccgttcaatctcttcatccttccttgctattacatccttgatagatccaactgcaagaataatacaagtcagtgtgcatttgtaaatgatattgcaatatcagcttaacctacagcaagagtgatggcctgaatattgatgatggggcataagtgtaaaaacaaaatgaataaataaaattataattcctaacatttggtgctttgctgataactagaacatccaagttaaatgcaatcaaaaatagaaataacctgctccataagttctctcacatccattccctctttgttgctacgagcagcgcctaactccacgccggaaacccgctcagcaaacttcaaggtgcttacaggttcagaatatgaagcaacatc

SEQ ID NO: 153223 - DNA, 411 bp, Glycine max
  unsure (1)..(411): unsure at all n locations
ctgcacgcatgcaagctntaaccagtagttattggatgctantatttatcattgccaaaatatttgtttaatcaacatgtatatgataataatatataatatctactttaagctagcacacttgtcgtaactaacacaagtgactttgaggtgagtaagcttgactagaactacaagttttgaattgttttatcaagacctcatgtatcatttattggagataattatgttcaattcaaatgggataagatcaccagtgacaaaactctctttatgcacgtatgtncattctaaaattcggaaatcaaattttttggtttaagttgaaaaatctttcaactattttatacacttagtagtataagttgtggaataagtcataataatgaaataaaattagaaaagtttgat

SEQ ID NO: 153224 - DNA, 487 bp, Glycine max
cagctgcttctacattactcgtactacacaagatatatcataatccatatctcatgagttaatctatttcaagatcccattgtcagggtataattcagtctacaagtgtctatgtaatacatttcacaaggatgtagaaaatagaaagcaacattctcaccatgcactagcagaaagtctatttaactattaatgtctttaagaaacataaaagaattctacacttgatgcttaaatagattcaattggcaaataaaagagagagactcactccattggtggtgcttgttcttaaaataacgtagttattggcagtcacacacaaacgtttagtaaactagtataatatcattaacatatcttgtagaaacaactaacaagctcaaagtataagtagcatgggaattaacccatagatgattgtatgtcataaaactagaagacacacaaatataatggaggttcttaattacttggaaatgtcaca

SEQ ID NO: 153225 - DNA, 471 bp, Glycine max
  unsure (1)..(471): unsure at all n locations
agcttggttatctncttcttcacaacattaagaatcaccgggttgagtcttctctgtggctgtcttactggtttagctccatcctctaaatttattcgatgcgtacatgtggatgggctaataccaggaatgtccgccagggtccagcctatagccttcttatgcttcttgagaacagacaacaacatctcctcttgctcatcagcaagggtggcagatataatcactggaaaactcttgctatcatccaagtaagcgtattttaaatttgatggaagaagcttcaattctggtgtggttggctggatagtggtagaaagagatgatttctcagcctttacctcataaagaaagtcagaggtatgtgtacttcttgaaacatggttagtcctatctgactctataaaatcaatctcgagaggtanaacaccaccaccagacatgcaatcaatatcactcttagattcactc

SEQ ID NO: 153226 - DNA, 411 bp, Glycine max
  unsure (1)..(411): unsure at all n locations
ngagatgaggaagtgttgaagggtgaatcttccttgctttattgttgaccacagagtggtacctgatatatgtcgcggtggtcatgagaccttggngacgtcatgtggtgtgctattgcccaaaaccaatcttgaccaatcccgacccaacccgggcatagtcggtcagtgagaacctgtgatgtacctaatcaggcgagctcctggcagtcaacagataatatganaacaagaccacatagcattgatgcttgtggtggctggccaactgtgaattttgtgtaatatgtgagatatggcctctggtaatcgattaccaagggtgggtaatcgattacaaggcttataaatgaagacaggaggctaagatggtctctggtaatcgattaccacggngtgtaatcgattacc

SEQ ID NO: 153227 - DNA, 312 bp, Glycine max
atgggctagcttaagctatcctggtaacttccaagttcttcattagaatagctagcttaaaagtctgcccctaatgatctagcttaagctagcttggtaacttccaaattctttacacttttctttcaatgatagctttaaatatctcttcaaagagatccttaatgtaattcctacaaagagactaaacaacaaaaaccacaaaaaagcaataaaactaagttcttaaaatatttctctaaagctgagtttattcaaggatcaaccaaattgggctcaaacaaggttcaaaagcatgagaaacatataata

SEQ ID NO: 153228 - DNA, 488 bp, Glycine max
  unsure (1)..(488): unsure at all n locations
cacttaaatctcagctttaanacattttactagagtattggcttattatatgctattaaagatcacatgtgtaatagtgttcaagaatcaggttcaaagatcatgaatcgaataataagaaagttcctgagtagtaataataacgagtgatgttaaaaatccatctatggagaataatagaaccaaaagtattaaagaagaataaagagttcaatggaatctttcttggtgaaaaaacaaaatggataaaaaatgaagttaaaaaagaaaaaagaaagttgaaacaatgacaaaaatattcctaagatgattattatattcgtgatctcatgctatgaatcatggttgggcaaaagatataattggagaaaaaattaaaaaatagaatgtattgaaatgagaatgattgttacatcaacaaattaacatagcttatatataatangaaactattaactctaactaatgtcacttaatatatcttaatg

SEQ ID NO: 153229 - DNA, 448 bp, Glycine max
  unsure (1)..(448): unsure at all n locations
agctatatatgtttcatatttaaaatgaaatctaatgtggaaagtgatccccatgtccaaagataaaatgaagtgtggagttttatcccagaccatcttcacctaatctcacacttcacaattctccaacctatatttgtcttcttctatagtcaccacctaagaatgacaactagtaggtcagggacatgtttgaattttcttatcctcatccctataaaaggcaggacaaatacgcgtntaggtataaaagatgtgggtttaaaaattgaatacccatcttcattctcatggaacttaagtatatgtgacaccctctacctcgacatacatataaataaataaaacatataanaataaagggtaacaaattcacatgggtaagaggttcacattgacttcactattaccaatataaaattattaaaagcatatctggctcataaca

SEQ ID NO: 153230 - DNA, 114 bp, Glycine max
cttgacggattggtctgtgccagtggaatgatctaatcgagtctgataagaggcaaatttgatcatctactttcatgaatgagataactggggcaaatgaagaagatgagaatg

SEQ ID NO: 153231 - DNA, 456 bp, Glycine max
agcttggctacctgtcttgttgtgccatcattttatcacttctaccagctggctggtttcttccctcaccgccttcttcctgaattgatagatactaaatttgataaattggagagaaacaaatatgtgccgactatacgttaggtagaataattacctcgactgacgataatgggatgtcagttaccagtggtgccactgcatcagctccaccaattctactcatgctcaaaacctgaaaggcagatgaatcagcactcaacagtcatagaaagtctttatgcactatgttcatattgttgacaaattcagatcctatgaaatgccttgctggcactctcatatgccaacagccatatgtatctccacacatgtcaaagagaaattaatgaaactggttgctgtgcttgtagaataggctttactattcacaatcacaaatattaaaaatcagac

SEQ ID NO: 153232 - DNA, 278 bp, Glycine max
cttcgttctgttgtcatagaaatttttatacggatggatgtaatgaactattggttctccacaataaagagagataagaagtgttgtataatctaactgccataattctgtctcggaatatcatgttagaattatctccttggcttcattaatctgttggtactggattctttgcaactttctttgtgctgtcatattttaacggatctagcacttgcgagtagcatatctttcgatgattgtgctagtgttttaccttatcattatgctgcaatatt

SEQ ID NO: 153233 - DNA, 382 bp, Glycine max
  unsure (1)..(382): unsure at all n locations
ctgcacttatacaatgtagtcttctttatgctcgctgaatttaattccttttgttggtgatggtcaatatattagtttttgatgaacaaattaccatgcacacattcattatcatgaacaagagttgcaatgctttacaatgcacccactagcacaacatcaatgaactttgtttagcatggccctcaacaataatctacaacatttataagcaaatcatatctccaaagtcggtttatagaatatcaacatgcacaaatgcaaaagggctataaatnggaaacattattctcccttaaataacacattatggtacaaagatatacaaatatgagagatgaaaagaaagagacaaacataatcaaacatgaaatctaaactc

SEQ ID NO: 153234 - DNA, 390 bp, Glycine max
  unsure (1)..(390): unsure at all n locations
atgaactcgtactcacagacttgtccgtatctgcgtgaatatgggttaaagagtataatttatctaatacgaaaacatttttgggttaatatgacaaatccacggacttgtgttacctaatatgcgaaatccatggataacctgaagtaaataaatacctttaaccttaatcactttacacgtatatttgatgggttagaatcgtttantttatattaggatatattagtctgaaaaggttgatgtttatttagagttaaaagttaatattacttaaatcttatattcttgttaggaataggctacaataatgatatgtagagtagaatgttatatttattgatgttatatatattttaggatcttatcccatttactgaaatttgaaaa

SEQ ID NO: 153235 - DNA, 418 bp, Glycine max
  unsure (1)..(418): unsure at all n locations
agctttgaattctagtaaaaaaaactcctcattcatattataatactcatgcatcttttacattcaaaaccagaaacttggattcctaggcatgagtcatccttttggcactttagtctagcttctacaaactacccacacactcacaatgcgcacaatttatttcgcaagctaagttccacaaaatcatgcgcaaatgccattgaggcatttcaccgaacacttggtgggcgcatgtttaagcatgaaaatcaagggaatggnggcaatgtggcatgccccattatctcagaacgcaccctatgcctaaggccatccgctacaacccctcaattcaacaaaaacaagcaataattcaaggataaatccctcacgttttgagcaaatacatgcaacttagagcaccaaaatatatcaa

SEQ ID NO: 153236 - DNA, 222 bp, Glycine max
gaatgaactgaatctcttgaaactagtgaaaagaatgaaacgacagtcaacacatgactcacaccacttaaattgtgattaaagtcttacctgattatataaatgtgaagtatggagcagtaatgtgttatcaaagtctgctagtttcaaaataaaaaatattaattatatcgtgcgttctgttcaatgcaatgacacatatatattggtcccaaaaaaata

SEQ ID NO: 153237 - DNA, 465 bp, Glycine max
ggatccttaatcacctgagctgcaactgtgatcatttatttttatactctctcttaaccaacaaagcatgaaactcccgatacatactatctgagaatgaagctttcaacagagcattgtagctcaagcaagcacatgcagccatatagaacaattcttgatgttgaatataacacataacaatgaatgataaatgggttaagctttccgatgcaaaggatctatccaatgaaaaatatcacgacagtggagcatttctatcaacaacattattgcaccacaaaacatgttctcatgggaaccatttccccacaaacacataatcataattagacccaaatcacatgtgaacacaatcttcatattccataaactataacatataacttggagaaatgttgtaataatgtgaaactgcgagaatgagagaagaagtgctacaatagaaattgttgaacttgagaa

SEQ ID NO: 153238 - DNA, 360 bp, Glycine max
  unsure (1)..(360): unsure at all n locations
ttgagcgtctcgaatatgacaggactcaatcttacatccgagtaaaaaagtattggcgtttgaattggctcaaagcttcaacattcaatnttgagcgtctcgatatatgacgggactcaattagacatctgagtaaaaagntattgtcggttgaattagctcagagcttcaacattcaatttcgagcgtctcgatatatcacgagactctatcagacatccgagtaaaaagttattggtcgttgaattcgctcagaggttcaacattcaatttcgagcgtctcgatatattacgggcctcaatcagacatccgagtaaaaagatattgttcgttgaattggctcagaacttcaacattca

SEQ ID NO: 153239 - DNA, 309 bp, Glycine max
ttactcggatgtctgattgtgtcctgtcatatatcgagacgctcgaaattgatgttgaagctcttagccaattcaaacgacaataactttttacacggatgtgtgattgagtcccgtcatatatcgagacgctcgaaattgaatgttgaagctctgagccaatccaaacgacaataactttttactcggatgtctgattgagtcccgtgatataacgagacgctcgaaattgaatgttgaagctctgagccaattcaaacgacaataactttttactcggatgtctgattgagtcccgtaatatatcga

SEQ ID NO: 153240 - DNA, 484 bp, Glycine max
  unsure (1)..(484): unsure at all n locations
gcaagcttatctttctggattgtttttttccctatccccttccccctttggagtatgagagcaggttggcttggaggagcttatgctcaagaggatgatggtctcggatgagagcctggagctactctcttggtctttcacacacttcaagtcttttgtgtggcaattattgcacctgtaaatatagatctagaaacattctttttctaaaaatacgaataagaaaaataaaaaattgtggtaactntttatgtggcatntgcatatataagttgttgaaatctttgacctccgtatgccttatagttgatagactgattctattgttatttacaaatgaagaaatattgtattacctcagtgcatgcccatnttaaaaatgtaagaattatattatttatacaataattcttataatagtatttnttttctttatctccatctccattacatcatctnatggtataagtactataacatactt

SEQ ID NO: 153241 - DNA, 475 bp, Glycine max
  unsure (1)..(475): unsure at all n locations
attaaactgcacaagctatcacagcgcagcaaatcttttcttaggcagaaactctctcaaacaccaaccaaaatcacagcttttctcacttaaagaccccagtaacaattccttcgatccaattcgttaaccgttggatcgactccaaaactttactggaagtttatagtacataagcctacattgtgaccgttgggatctactagcaaacgtccagaactcattttgtactactctttccacagcctaccacacacaagcattgttctgcacaaagcaaaaattttgttgcacctattttgacagcaaaattctgcataagtgtagatttcgaaaatcacccttgctctcatccaatcttgcccaaatccattcctacaagtcctaaatcatgtatcaatcatgtctaaaccatagccaagcttcanaacacagcaacacagaatctatgtgttcaacacccctccattcaatg

SEQ ID NO: 153242 - DNA, 459 bp, Glycine max
  unsure (1)..(459): unsure at all n locations
ctgcagcttaacttggaagtaactnttcaattgtatttgaggcaactaaatccctatatctattttttgcaaatgctgacctcaacacacacttcaactaaccaaaggaatttcataattaacaagaaagcagaaacttgatttcctttttttatatatttatttttcaaaacccttgaatggtaagagtaatgatattcaaggcttgactattgactatngactagtgactagacttgagaaaaatccatgtaattntattaagaccgtaacgctccattgattaggaatataactaattgaacacgatataacacgtatagcatctcgatattttctatatagaaactgtatgagagaattaacataaaagcgaaatattaaaaaagtaacaaatgaggcgcgtgagaggaatatataattaccgtgtcggtggtgatgtcaaagaggcttgatcta

SEQ ID NO: 153243 - DNA, 382 bp, Glycine max
  unsure (1)..(382): unsure at all n locations
tatacttgccattnttcagagatttagtaagagtttattaattatggttcaanttgtggtttgatcttcagttgcgggattagacagtgtttcctcgtcatcttcgtcgtnggacacctaaataacgccgtggacaacaaattaacttcccaaactataataataacctaattgttccgaaatattaaaaccagccactttcactatttggcgcataactcaaactcactttgtcgttgtcgtttccagaaccacgcaagatattggaattatccttcaaccactcttcctgagaaaccataatgcaaagattacacccttagattttgagcaagttgctaatcatgagttataacanacgagaattaccttgagctcctga

SEQ ID NO: 153244 - DNA, 437 bp, Glycine max
  unsure (1)..(437): unsure at all n locations
agctttggacccatgaaactaaattgcagggtttgggaagcagtctttctacgctgatgcctgagaggcagctcgcanaacataggtgcccattgccttggaatttgaaactccaaaaagtattgtaaatctccaggagaaggcttatctgcagagagtaagtgaatcaatggagtgttgtgcacctcaacagtaaagaaattaaacagtggctgttcaagtagtgatggcttggaaacttcatgtaaagaaaagcaaagcatacaagaacaatctaagagccaaaagccaaaaacatattggttnttttgggggggaaattcagttgacacccttcaacttcacactatatacggcttatgccttaaagttcaaaagacatacaagatggtccccagaattcctaacacatgtgaaatgttccatgattaacacat

SEQ ID NO: 153245 - DNA, 462 bp, Glycine max
  unsure (1)..(462): unsure at all n locations
ctctatattaattttatttttttttgggtataatgttcataaaatgtttttgtgtccttctttttaagatatttcattttaatgtgttgtaaaatttgatatatggtttaagatactcattcagttaaataaatattattgtgctatttatctcttaaaatattttctctttcttataatgttagtacgtatttttctattgctaacttctataaatcattttttgaattaattctccatagattgatatacaacttcaattcttttttatgtattgtttaaagattgaaaatgaatngattntcaatattcattgttttgtatagaaatcgggaatatgtatatgacctcactgtttatgtattatagacttatcgtcaatttttttagacaattgtttttatctcatacctgattcactttattcattatgctgctcatttctattgaattatattttac

SEQ ID NO: 153246 - DNA, 359 bp, Glycine max
  unsure (1)..(359): unsure at all n locations
gcttactctngcgttgttgtatgtgtggntcttgcttgtgangatcatatatctaatgtacgtgaggagcatatggttaagaggtcatcccgtgtcttcgaagacttcgtagatatgcataccaagatgtgaagatgtacttcccgtttgttgttatttcttaacatcctgtataatgttgaccagtttagagtctatgaattttactaaaatcacactagaagagggacttgaataatgtgttagataaactataaacctttttttttcgcaagatggtgtttttatacaagttaagaagggtttaaacctatcatccacagacaaatacangttttacttcaatagatggaattttc

SEQ ID NO: 153247 - DNA, 387 bp, Glycine max
  unsure (1)..(387): unsure at all n locations
aaaaaaaaaattgtacttaattgatacttgtattcggcctttaaactaagcttggtgagtattctgctaaaatttataggagcttcttnngaaataagatttttaaatattaatggagtaaatttttgttacatgaatataatgctagttaagttatagacaacaatagatttttattgatgatccaaatattaatgaagaatattgtttattaaaaaattatacggagttaacgataatttgaattagttttacttgagtattaatatgtaatattacagcgtcaatttacatgatctttattttgagtaaagaattgaacgattaagttaattaatataataacagcaacagattatttaacacctgttatatatttatttgtat

SEQ ID NO: 153248 - DNA, 346 bp, Glycine max
  unsure (1)..(346): unsure at all n locations
gcttaagcctgatattaggcatttcttgaatgtttcaaatttaaatgcctagaactgaacacaaatattatatttaaaagcatgcatcttgtgatgttaaaaacttcttttgaaattttcattgtgttactgatatttgacaagaattacatatattttttaattaaaaaaagagacagacagaataagttgttcttggaaaacaaattgccaaagttcccagtgaatttgtacaccaaatagattaatgggttacaaattgcacatattagaagctttcanattgtagcattagattagatacaagcatttatccccatcaattatgataaatacctattacaac

SEQ ID NO: 153249 - DNA, 440 bp, Glycine max
  unsure (1)..(440): unsure at all n locations
agctntcaaccgttctccgacgttcttcattcgttcttcatcgntcttcgatcttcaacgggtaagtacctcgaaccaagcttttcgattcattctatgcacccgtagtggtccacattgtgtttcgtgcatnttgattctcattttgtttactttttataccccctgttgacatgcttaagccattttacttaagtcgtttctcgcttaacttaaaaataaaacaaatttccaccgaacgtttgaattgtattatccgttaacttcggttaaaataaattccgaccgttcggtcgtgccgtaaccacgttggaaatcaaaaaaagaggtaaaaataatataataatcaaaaaaaaataatatctttttagtanaataaagcggaaaatcaatcggacgtgttctctttgggatttctcattcttaatcgaattgataat

SEQ ID NO: 153250 - DNA, 432 bp, Glycine max
  unsure (1)..(432): unsure at all n locations
tcctatcggtttctaattatatgggccattagatctatcatatgctgacaatatctaagaagtccgtgatctcctcgatggcggagtatgtgtccaccatcgctnttggcctggctggcaatcggggaagttcttgactcccgttcaatgtaagagcatatcggtccatccacattgttgcctcatgatgtaatgagtcgatcacccttcctctatcctccttttccacgtacacttgtgcatactcgtccgccactctatgctcgtgggacgtggctagatntagttcttcttggtatttgctgatgatggctaacatgttggtctctgtctcgcataaccgctgatacatgtttcttttggaccttgagcaaaccttcaactcatctttcataatcaaactgtacactcgtgattggtccctttcctttc

SEQ ID NO: 153251 - DNA, 468 bp, Glycine max
  unsure (1)..(468): unsure at all n locations
agcttggcacctattttctttgtatcactatgatccaatcccttgcagttaattntcaccaaaatacttccttcaaaagcatctctgacatcctttacaagggatgtatatactccatttttggctgcaacaggaaagaagtaaattagaggtagaaatttagaaataagaaccttaattcatgtctcaaatgaatgttaatcatctaaaaagaagaatgtaatatcaataataatttatactatgggttctatttgaattatctatattcttactctactaaccaggaacaagtattttatntggacagagtgataacccatgaaagagaaaagagaacgttgtagaaacacaggacacacacaatnttattgatagagaacttgatagaattcnacctgtatagaatctcccttcacanagagtngtccttttcatacaaacttntaaatgttctgaatagatcct

SEQ ID NO: 153252 - DNA, 407 bp, Glycine max
  unsure (1)..(407): unsure at all n locations
tactcaagctcgaatgtctgaagagattgtgaatggcctgtaagaaaataatagttgtgaatgtatgaattgtnttactganttanaaacatccacgttcttatgatgggtgactcacacgtggcaaagttcggcttataagtcgggaagaatgagaaaaatgggttcccaatgggactatatcctgcaatatacaatttctttgtgcagctccaaagtgttgtttaggtcagtcacttatctgtggcttaaaattttattaagaacctggtttgaacttaacaaactatctttctgactacagtctcgacttagtagattatcaaaacaggatggaatgagtntgatgaagtctgtccaaagaaaaggggataagtctttcaattactctgatgctgaactaaatg

SEQ ID NO: 153253 - DNA, 318 bp, Glycine max
  unsure (1)..(318): unsure at all n locations
agcttcaagaggaacctatacagggatgctatcctaccatttagtttctgaacttcttgaatgttggtggggatgcgcatctccaatataatggtgcatttgttggggttggcttcaatcccctagtgtgtgatcatgaagccgaggaactttcccctgcctaccccanaagtacattttttagggttaaggtgcatttcgtatttgcggagttgcccaaatacttcttccaggtctgccacgtgttgggatatgctttgagacttaacaaccatgtcgtccacctatacctcaacatttcatgttgatctgttgttg

SEQ ID NO: 153254 - DNA, 319 bp, Glycine max
  unsure (1)..(319): unsure at all n locations
caattgggcttggttgctatttgcacccccatttttactaaatacaccacacttgcctttttttggtgattcttttttcgtaaagttacggaaacttacgaatntcgtaacgatacttgttttctttccgtaatgttacggtaccttgcggattacataatcatccctttttttgacttacggaatgttacggaacctcactatntgtgcaacgatgcttccttttgatttccggtgtgtcacggaaccttacggattgtgcatcaatattttcttttgatttccggcacgtcacggaatttcacaaatttgctaatga

SEQ ID NO: 153255 - DNA, 448 bp, Glycine max
  unsure (1)..(448): unsure at all n locations
agctntaagccattatcaaagagttggtgtctcatccaaaggatntgtgcacaaaaacttccagcaaaaatatattccgcttctgcagttgataaaacaacactattttggttnttactatgccatgatactaaagccaaaccaatgaaattacaagttccactagtgctttttctatcgattttgcatccagcaaaatcagaatcagagtatcctactaagttatacgaagaattcttaggataccataatcctaaatttatagtgcccaataaatatctcattattcttttaacaatacttaggtgagattctttgggatgggcttgatatctaacacatacaaacactaaacatgatatcaggtctacttgccgataaataaagaagagatccaatcatgcctctatatttctttatgtctactgatggactagcttcaccttta

SEQ ID NO: 153256 - DNA, 134 bp, Glycine max
gatgtaatatgaacctatacctatttatgggtgtgtgtgaatctctcataagtcacgttcttcacttggtggacaaccaacttctgcaagataatattttgatgtgtgacaaaaaagttgctatatattgggct

SEQ ID NO: 153257 - DNA, 81 bp, Glycine max
  unsure (1)..(81): unsure at all n locations
agcttctaaactntatacaagaatgaagctttgataccacttgttagacaagtggcctcagatatcttaagaagggggggg

SEQ ID NO: 153258 - DNA, 318 bp, Glycine max
tcatgatgttgtatcaagtttgttcaatatagtttgataatgacgtagatgcgacaaatagcccaaagaatgatttctagatttaatcaagaacaattcaagaatcaagagaagtgtgatttgcagattcaagaatagatgaatccaagtttcaagagaagaattcaagaagacttcacaaggggatgtattgaaaagatgtttcaaacaacaagtatagcacaatctttgttttcataaagagttttcacaatattatctaagttaccagagttgttactctctggtaatcgatcaccagtttcctggtatcgatta

SEQ ID NO: 153259 - DNA, 479 bp, Glycine max
  unsure (1)..(479): unsure at all n locations
anngctttaacttcatattcatgcacccaaggctgtttttatcatttcatggttcccttcgctatggtaggttatttcatgattactctggtgctttcttaagaggatatgttttatatgtgggtatctttctttctttacaactgaactagagggagttttttagtaaaatttgcaattttatctttatttttttttagtcaaattatatcatttaaacgacatgaaaataccctttgcacattgttccattaaagtcctctacttattatattntgtgatctgaaaaacaagagcataccttctcctactcttgtgactattggccatagtaatttaaaaacaataaatcgggactgacgacaatgccaccttgagcaccgtcatgtacaaggtatgaaatangttgatatcttctaactgaattggtgacaagggtattnagcaggtacaaaatatttccatcatctttctcctct

SEQ ID NO: 153260 - DNA, 406 bp, Glycine max
  unsure (1)..(406): unsure at all n locations
tacacatgcaatcttaattctcaacacatcttttggatgagtcttccaggattgtgttgccttctctaacttttcttccttttccagcaataagggaaagctacaaaattgagtctcccaatgtttgatataaattttgtaagaccatctttaatttgaacaagtggcttaaaggtgtaaatgcacagtccttccaagcgagcaactcaaaggtgtaacaccatcttagaatttcgtatgagcatcttcattaaaaatggaagactcgaacgaaaatnggtggctggctcctcattgctctgggaatagataaggatctatataatgagcacaatgtatgaaggatggaanaactgcaatctatgtaatcccacgttaagacttgtagttcacactaatcaatgac

SEQ ID NO: 153261 - DNA, 390 bp, Glycine max
  unsure (1)..(390): unsure at all n locations
agctggttngaatagtgtaatgattgaatcatgtgttanngttntgttcgatatgaaatgagtgttggtgaatgacttgaatgagcaaatgtatgaattgagaggactggaatgattagatgtttgttttgatcaaccttgcaaccattataagaaaaagaacatgtgattacaagtatgactgaaaatgttagtcagcttgtcagattgattgggaaagaatgcattgaccatatcccggcgagagtgtgatccttacatttggagagaaaggactatcatctacaactgatctttgatgaatctctgacgttggactgaatgcatgaattgaggatgatgaacgccatgtnttgattgtgatagctacttagccaaaaagctgacctt

SEQ ID NO: 153262 - DNA, 353 bp, Glycine max
  unsure (1)..(353): unsure at all n locations
ataaggaattacacataatattgcgattaactgctctttatataattatttctattccataggaattcttattatattcatataattaattgagataaaatgatgtattatttttcatagcttaccgacagggatcatgaggtatgtataatctttcaattttatcataaaataaatatttgtgatagaaaataaaattatcttcatgttcgacacgtaaaacatgaatttgagtatgtaatttgattattctatcataaggtttaantgtttcttattgaattagaaatttagcctaccaacaacttttatgtcacaagaatcaattctctaatatgtttacattggtaaaa

SEQ ID NO: 153263 - DNA, 415 bp, Glycine max
  unsure (1)..(415): unsure at all n locations
tcttaaaacanaaatggcatacaaccttctcccataagtacaaacatcaatgtaatattagagcaagcttatgcgcatatttccttacgaacggtcacttgcacaagacattctattaactaagaaaaatgcacccatatacaatcaaggcagcttcgttacctagattatntacatgtacttccaaggtttatttggtacttacatcacacacatctccttggctaaatntacatacatgcatactcaaagcattttgtggtaccaaaaattgcacatgtgcacatcttggtantctaatacctatacatacacanacttcatgatgaatcttgactatctacacaataaggtgctacattncatgcccttttcaagattttctacctaaagccgcatgcaaattcaagtatat

SEQ ID NO: 153264 - DNA, 515 bp, Glycine max
  unsure (1)..(515): unsure at all n locations
ttaagacacctgcggcatgcaagcttgggattgtgggactgtttcatatacataggggtttctttaaggatttaaaatgagagtccgaatgttattctatgcctatgaacccaagtttttaatttcaatgcaaggaagcatgacttatgcctatgaatctaaatttttggttttgaatgtaaaaaaggcatgaatattaggacatgtttgagggtcttttattaaaatttaaatttggctgccccatgaggaataccttgcacctaggtagcatggaaaatacctttcaacggtatatatatatatgtgaatatatagcatgaaaataccttgcaaaatgagtgaatagtaaataatgcctttcaaatatgtatatttgtggatcggtagcataaggagcctttcaaaanatgtacccatgccaaagatggcacaagaatgcttcccaaatgaatatatgatgtggaatcgcccctcaagtgtagattaaatggcatgaaagtccatttgaatgc

SEQ ID NO: 153265 - DNA, 491 bp, Glycine max
  unsure (1)..(491): unsure at all n locations
agctntacagcacagcaacacagaatctaggtgttcttttttcctcaattcaatgggttttctaggtttgaaaagtgaaatttagaatgaggtaaatttgaagcaaactctcacctcacaccagtccataacatcaatctgaacttgctcaaactggatttacgcttaaaattccaccgaatcacaatttgactcctcaacacccaattttgccctagaaatggctcttggttcactttggtcattttgttttctctctagcacagcctaacctttctcataagtcctaaatggcatttcaagctaagattaactcactctaacctccatttaccacagaattcagaacttaaccttcatctctcanagcctcactctttttccactcataacatcacattctcactttctaaccctaggttaactctacccttcacctctatcagtttccataagcaatttcagcatataaacatcacanacatcatcac

SEQ ID NO: 153266 - DNA, 440 bp, Glycine max
  unsure (1)..(440): unsure at all n locations
acctacctaatggtccctatgtacacacaccatgtatatgttaggtgtacgagtgattntacaaaagagggttgcaccactcanagcattcatcataccaactattttagggacttggtgcctaataatacctattttgggcaccaacaaggcacaaggatttaagctcttgcgaaccaaaccctcatccaacaacttctttacttgaggaataaactcaagcccaagaggtgtggcaatactagcaaatgtctttttacaaaagagaaaatgtggaggttgtctaaaagggaaagtttctttaatgtttgtctttattgtaaaatgagtttccttcttagctaacctcttggaggagacacttacctncttacacttctcttttaccacaaatggttgtccatcttctttggggagatttcttactagatcttcccttt

SEQ ID NO: 153267 - DNA, 492 bp, Glycine max
  unsure (1)..(492): unsure at all n locations
aagtcacctgcggctgcagcttacgccgtcttctactaaacgaattctttcttttcttcgcaaattgccccgccattctccccacctaaacaaacacacaacacaaattctcatttcacaccttacaaaacaaactttatcctcttttatgtcaattcacaatggaaaatagacacattaacaaattgacactttaatatttcatcactcccttcggtccatttcacgaggaatcaaatggaactngctgagttttgatagtggtcttattcgattcgagaagatngtataaaaaaatatgtttctatttgttaccatttaccttgatgacgggcatttggccgncgaacatcatgacgacgctcatctggaggatgatgcggaaggtgtcacggatgttgttgcattgaactccttgagctctcgcacagtctccgccctgaggaggaaagcattccatgcggcctcgcgggtgctctcagtgtcggcctc

SEQ ID NO: 153268 - DNA, 419 bp, Glycine max
  unsure (1)..(419): unsure at all n locations
atgtttttttttatattcactgcagcttttatagaagtaaaatggaagcatctttattaattacaattgaaatatataagttggttttaacatataggagataaggtttaattacaacagggagtggttattcaaaataacatgangtggaaggtgggggatagagagaaaattatattctggaaagacaaatggattaatcaacatgaatcactatcagagaggtaccccacgctgtttatcatatcctcacagcagaatcacaccattatgcagatgggaattcacaatgacaagggctgggaatggaaattntcatggagaagactgctttntgacaatgaaattgatacacgcatcaattttcttatggaggtagaaggacaaagcatacagcaacaacaaattgacattttgga

SEQ ID NO: 153269 - DNA, 471 bp, Glycine max
  unsure (1)..(471): unsure at all n locations
agctngaactgaaacttatagtccaacaactgctttctttttggataattatttggcactaggttttggaaaagtctaaaagaaatgctcttgggtcatggctggaatagaactttgagaaagaaatatgtctgagcttagtcctaacaaattagagtcattaattgtagttattattcaattgataccattgttaggaacaacatagtgttaggatgcaaagatggcaatgctggtggttggctctaacttggtccacttggaagcttaggaacagcatagtgttctctaatgcaacctttaatgctaacaaactgtttgaagatgcaatattcactctatggacgtggctcaggcactntgagaaagatttactatccatttaatcaatggcaagtagcatacacacggctnttgcatagtagaggtacatattttnactaatagatgtaatttactgtcncatatact

SEQ ID NO: 153270 - DNA, 463 bp, Glycine max
  unsure (1)..(463): unsure at all n locations
tatagcatgtgcctaccatagaagataatgggcgagttntcttatgcgtatngtactatccagctngacctttccaagaaagggactntggcantttggtaattnttgggttcattattcaaatttaacttattcctcattgctttgaaagacaagcacgtgaatccaattggctaaggttcttatccacttccacatgtggaaacgcggcaaatacacattgaatgcacaaaaagttgattgaatgtgatgtgtggaaaaaaagacaaaacgaatacttaaaatataaatactcataaaatttaatgtcagaatatatgagattaaagataacgttgatatcacacaataatgatgttcggaacataaaagtaataacatgtgctgtcttggtgtcgttttctttttatcaatagaatattgttgaactgaagatctaatggcacctatttaaattttccta

SEQ ID NO: 153271 - DNA, 274 bp, Glycine max
acagccaaagtcaagctggccctgaaagaattagacattggtacggcgaaaaatagatataaaaaatgaagctcggatgaacatacattccataacataagcctgctctatgatatatgctcgaaaatccttgcagactccaacatatatatacatccatcggaggcaatttttcttttgtattttctttcaaaaggatgtgcataatcaccaatatctatttggacaaggacatccatccttgatcaatctgattctccgcgtaacatatatg

SEQ ID NO: 153272 - DNA, 421 bp, Glycine max
  unsure (1)..(421): unsure at all n locations
agcttccagcagggtccttataaccaacaatgaattggatatcacaccctggcaatcaattcaacaaggaccagggtggaccttccaacaggccaattcaacaagggcctaacatctttcagaggactactaagctggaggagactttgactcagtttatgcaggtaataatgtcaaatcataaaagcactgagtcaacactaaaaaaccttgaggtctaggtgggacaactggccaagcagatagctgacaagtcatccaatagttntgtggtgaatatagaaaagaatcccaaggaggaatgcaaagctgtgatgacaaggaataagaggtttatggaggcgtaggatgagtatagtgttgtatccaagaagaaagctgctgaaaagaaatgtactgatgaacagaaagatgatgtgag

SEQ ID NO: 153273 - DNA, 390 bp, Glycine max
  unsure (1)..(390): unsure at all n locations
cttctttgtgggttgatgggttctgtctcgtataatggcatgatctctgtctgacatgttctcaattagctcagttgcttctttcggggtcttcaattttatctttccccctgcagaagcatctaacagttgcttggtttgtggtctcagcccatctataaacatattcaattggattggctcggaaaacccatgagtaggagttcttctcaacaagcctctgaatctctccaatgcttcactcagagattcatcangaaactgatgaaatgaagagatngcagctttcccttctgcagtcttggactctggaaagtatttctttaggaacttttcaacaacttctttccaggtttttagactattgcccttgaatgagtggagccaccc

SEQ ID NO: 153274 - DNA, 420 bp, Glycine max
  unsure (1)..(420): unsure at all n locations
gtcacctgcggcatgcaagcttgcctcanagaggtccaggaaggacattgcgtgtctttgaactagntccgccccggagtacgacagtcaccgctttatgagcgttgtacaccagcagcgctttgaagccatcaagggatggtcgtttctccgggagcgacgcgtccagctcagggacgacgagtatactgattttcaggaggaaatanggcgccggcggtgggcaccactggttactcctatggccaagtttgatccagaaatagtccttgaattttatgccaatgcttggccaacagaggagggcgtgcgtgacatgagatcctgngttaggggtcagtggatcccgttcgatgccgacgctatcagccagctcctgggatatccgatggtgttggaagagggccaggaatgcgagta

SEQ ID NO: 153275 - DNA, 353 bp, Glycine max
  unsure (1)..(353): unsure at all n locations
ctactcctgcctaaggagtgatattgagaagtgtgcttgacagataaattgaagctgaaaagattacttgttagaacagttagtgcacccttcttatgaatgggagacttcccctacaggctactaaaatacaataccgcaagaanaaaagaaagcataattgtgattttgattatctagcaaaatgagaaataacattaatgttgcattatgagctcccacattcctattntctagtggtgaatgggaataactccaactcatgatgaaatanaagttctctctaatgaccattttccaatgtttataaatagtcaatatagtttgctatgaagaaagtaatggacacattt

SEQ ID NO: 153276 - DNA, 144 bp, Glycine max
  unsure (1)..(144): unsure at all n locations
attagaatagctagcttaaaagtccgcccctaatgatctagcttaagctagcttggtaacttccaaactctttacacttttntttcaatgatagctttaaatatctcttcaaagagatccttattgttactcctacaaagagac

SEQ ID NO: 153277 - DNA, 437 bp, Glycine max
  unsure (1)..(437): unsure at all n locations
ttatatcacacgngtaatagtgattcaagaatcatgtcataagatcatgaatcgaataataataaaggttcctgagtagtaataataacgagtgatgttcaaaatccttctatggagaaaaatacaaccaaatgtattaactaagaataaagagttcaatggaatctttcttggtgaataaacacaatggaaaaaaaatgaagtatcaaaagaaaaaataaagtcgaaacaatgacaaaaatattcctaagatgattattatatntgtgatctcatgctatgaatcatggttgcgcacaagaaatattggagaaaaacataaataatagaagtgtattgaaatgagaatgaatgataccttcaacaattaacatagctcatgttaaataagaaactaattactactcactaatcttcacgtaaatatatcttctatg

SEQ ID NO: 153278 - DNA, 418 bp, Glycine max
cctgcggcatgcaagcttagcgacttcatcaaaactcataaaatgaattgttgtattgctgaaatggcacatgctcgctaagccataaatgtaggcttagtagttcgaacacaagccagagagtaactagttccactgtagaaacagctaaaccaacaaagcctaggtgaaacctaaaaaaaaacaaccctaagatgaacatgaaaaaaatgaaatgtagagaagaaagtaatgcacagatgcaaacatgactggtaaactcaatagaaattagaacatcacaaaaaccatgctttcatggacaatatgcacagaagatgagaaaatggacaaagaaaatgcacgaggatgaggtagtgtgtgtgagaaagaaggaaggagaggaagtgggaaagaaagagtgaagtgggaggaatgg

SEQ ID NO: 153279 - DNA, 392 bp, Glycine max
  unsure (1)..(392): unsure at all n locations
ctttgttccaattgttatgcaaagattgttatgccactctcatgcatgtagaacacggggctacaataatattgaaattgggtcaaagataaacaatacactaagttgagcaaaaaaatgttaagggtaaagacacacaattattatgtttaaatgtgttttagggttaactaagttttcagttcctacaattttttgaaatttaatatttagttcttaaacaaaagtttgaccattcaatatttataaactctttttgaaatttgacttttaatttctaaacaaaaatttaactggtcaagatttctcaactcntttattataagttttagcccataaacgtttaaaaaaattcgggtttttatccctgaattctcattaataaataaata

SEQ ID NO: 153280 - DNA, 310 bp, Glycine max
  unsure (1)..(310): unsure at all n locations
cacagccaagcaaaacagagcanaggcagaaaactctgctcaacacatcaaccaaaatcacagtttttctcacgtaaagaccacagtaacaattctttcgatccaattcgttaaccgttggatcgactccaaaattttactggaagtctatagtgtataagcctgcatttgacccgtggaatatactagcaaacatccagaactcattctggactagacttttcacagccaaccacgcacaagcatttttttgcacttgtgcaaaattctgctgcacaatttcacagcaaaaattctgcataagtgcata

SEQ ID NO: 153281 - DNA, 457 bp, Glycine max
  unsure (1)..(457): unsure at all n locations
agatatgtcgcgggggtcaggagaaccttgggacgtcangtggggtgctattgcccanaaccaagcttgaccaatcccgacccaacccgggcatagtcggtcagtgagaacttgtgatgtacctaaacaggcgagctcctggcagtcaacagataaaaggaacaaagactacaaagcaaggaggcttgtggtggctggccagctgtgaactttgattgatatgtgggttatggcctctggtaatcgattaccaagggtgggtaatcgattacaaggcttataaatgaagacaggaggctaagatggtctctggtaatcgattaccaaggggtgtaatcgattaccacgcttgataacgaagtcaggaaactaagggagcctttggtaatcgattaccagcctgtgttatcaattacacagagggatgggtcacttgtaatcgataccacgtatgtgt

SEQ ID NO: 153282 - DNA, 283 bp, Glycine max
  unsure (1)..(283): unsure at all n locations
aatggatcatcttcaaggtccaacgccttaaaatgatcaccttttaaaataaaaaagaatcacttgataagaaagaactacgtaggtctgatttcctcatcacaaattgaggaatacgtangagcaaagggaaacaccctttgcgaccaccataaaggaaaaatactaaaagggtataaaggatataatgacctagaagggaacatataaaccacagtcacgtttgcacattcgattaaaggctgcccgtcctcgggacggacgtatggcgtgctaatacctt

SEQ ID NO: 153283 - DNA, 460 bp, Glycine max
  unsure (1)..(460): unsure at all n locations
tcctgcaaggcaacatttggaaanngtagtttttagacatataacaatcattacacacatgggccaaacaacacttctcatggcacgagtgtcaacatgcactatataaaataatcatattgcggtcgtgctattttatgacacatacgtatttgcacacataaaaattttgtgtgaagcattttacgacacctatccatgtacatattttttgacaaccttttcatgctacatcctatatatatacacacacatatttttggaaggcttcttttgtacctactcacaaatacacatattntgaaaaacactnttacgctacccatccaacactttgtaaagcacttcatgctatatatattcacattatgcaaggcgatttattcaactttctgcaaggcattttattcaacattttgcaaggcatgtcatgctatatatatttacatatatacatacc

SEQ ID NO: 153284 - DNA, 394 bp, Glycine max
  unsure (1)..(394): unsure at all n locations
gcaagcttatgcanagctgcgttccactgagacagaattaatttttctataaccggctgatataaaggggatcacggtcggagaccatgcttcatggtagcccatggatttttccgacaatattcatgaataagcaggcgatatcatgggctgtgtgagaagagggaagcatacccaaatggatacccttagaaaagtgatccacaactacgagaataatagtgttctcctaaaaaggaggcaagaccataatgaaatctagggagagatcctcctatggccgatgcgaaaccggaagagggcaaagtaaccctgccaccctctttgactcatacttggtgtgctgacaatcaaggaaactctcgaaaacttgtaacatctcttgcacccttcc

SEQ ID NO: 153285 - DNA, 406 bp, Glycine max
  unsure (1)..(406): unsure at all n locations
ggtctagtatagtttggttaacgatttttttgttttagtatctcctataagnntgggtcaatcaaaggaagataagactttgctaattaacatatccaggnnnnggtcactcaaaggaagaatagttaaatatttgataccaaagatcaagttagcagaacacaaacaatggccttcaatatatacttttgtgtttgtttntaccaattcacataaaccagtttaatttaaatgacaaaaaatagataaagtatagaaagaatttacgtactgcatcctatatatcaatttagtttgggttcttaaaatacaaaatatatcattttattccgcaatgtgtgtaagaaacacatttnntttcttcacttatattaccttcaaacaatataaaaatgcatcctgggat

SEQ ID NO: 153286 - DNA, 416 bp, Glycine max
  unsure (1)..(416): unsure at all n locations
agttggttccacaggtacatntctgaatcattatccgttggttccacagaatctccttttgatgttcctaatacttcttataggattggggatggaaaggatggggagagatatcttatggaggttatgaatgtgttaaacgtgctaaagcagcagaatatctggtaaccttaactaccttataaccatcttctagatcagtgtgctagtttcatttttttatatataatttatgttagttctccttcactattagaggtacatctagcttactattgattaatatattcatctcttcatatgcttaattaggttagatcatggatggaagaaatatttcctggtcttaatcaccgtatactttcttatataattgggcttgatagccttaaagctaccacccggaatggaaatga

SEQ ID NO: 153287 - DNA, 459 bp, Glycine max
  unsure (1)..(459): unsure at all n locations
agcttgccaagcgnttttatgggccattccagattatattaataatgggaccagttgcctataagctggcattaccagagcatcctcgcatccatcccgtatttcattgctctatcttaaaacccttcatcggatctccaacatcagaacaagctatgcaccttccgtccttggccatggacaaccaaccggttccagttcccttagctatcttggctcacaagatcgtgccctcggacataggcccaaagcacccagtgttagttcaatggcagggtcttcatcctgatgaagcatcgtgggaagaatggtcaacccttaagtcccttcatcaccttgaggacaaggtgttatttgaagacggtggtaatgatacatctagcagaaacgaagtacaaatagcanagcccaaaagacaaagtantactcccttgcacctgaggactatgtacttgatag

SEQ ID NO: 153288 - DNA, 320 bp, Glycine max
gagagaagttgaactttgcattgtgtctcacaagactctcattcatcaaagttacaacaagtgttacacatgcttctatgtatagactacggagcgtccttgagaagctctcttgagaaaacttccttgagaagcttctttgagaaaacttccttgagaagctagagcttagctacacacacccctctcataactaaactcaccttcttgagaagcttccttaagaagattcctaaagaagctagagcttagctacacatacctctcttatagctaagctcacctccttgagatgagacgctagaacttagctacacacc

SEQ ID NO: 153289 - DNA, 228 bp, Glycine max
  unsure (1)..(228): unsure at all n locations
atcttttatgatgaagcagctatgatgttttnttactaggcgaggctagctgcataaatcaaaagacaccatngttttctatcttcaactaaaccctttgctagtccatttagataaaatatcaacataaaaaaaaaatccaggttttcatgtctactctagtcatgatgatcaggttttgggtaatgaaacacaaataactctgaaattctttgagagaactaaata

SEQ ID NO: 153290 - DNA, 311 bp, Glycine max
  unsure (1)..(311): unsure at all n locations
aagtggaagagagaaaaatggagataatggaaaactgaatatctatttggataatgctcanatgagcaaaactcacctttacatgaatacattgtgccttataaaactaatactagtaagttgttacataattggttaccagaataactaacttgtaactaactaaaactaacgctagtaacactagtaatctatatctctaatacccncgcaagctggaaggtgttgaagaagataatacatctacatcanacgagaaggaaataaagtctgaaaaaaaattagaaatagctaaacatgtcggatacatc

SEQ ID NO: 153291 - DNA, 340 bp, Glycine max
  unsure (1)..(340): unsure at all n locations
ttaagcaccgcggctgcagctataaatttcctgatcgccttcatttgtgtttttttctacatccaaagatgaacttccatgctattcgagtaatagatgagatgaagacatttacatctctagaacgatatttgcagccaaaaaatacatatgatgatcaaaagtgaaacttccatgctctcttgggttagaattatatgtaccattctgttngagttgaatatctcttagaatatgataacattaaatctgctagtgagtctctttcttccatataactcaaatctatgtgtgcgtgtgtgtgttgttttgataaatgtcctatccctcagtgatttat

SEQ ID NO: 153292 - DNA, 307 bp, Glycine max
  unsure (1)..(307): unsure at all n locations
atgctaatcgatgcccacctgtctaatttctcatctcttgtcatctnacaagacgaagtataattgatgctcctttggtctcgtattctatttaaactccagaaggggaggacagaaattttattcggttgcgtgttatattgtcatccttacattgcatattgggagaatcttctggcaaataaacttattatatgggtacaggtgggtatattatcactattgtgctatggtgatggccctcgtgagtctcacttgggagattaaggacaaccatactgtgcaaaaagcaggtgagttctaccct

SEQ ID NO: 153293 - DNA, 467 bp, Glycine max
  unsure (1)..(467): unsure at all n locations
acctgcggcatgcaagcttatctaaatgtattgagcgaatcttttttttttatgtgatncgactcttccttttaaaaatatgtcaagacttctaaatatttattggataaacacgaattaaatgtgtnttgtcaagttagttagttttaaacggtgttagtagacacttcacgactatgatcaaaagagtaaaaaattgcaattataagcatcaaantatatgttttaactatagagattaaaaaatgttagcataactataggggaaaaaagttttttttttttattttgcttcttttatatcctatagcaagttcattatattctttataattttgaaaaaatttacactgtcaactgtgtgaaagaacaaccgctaaaaggctaagagtggcagaggaagtggngcagattaaatgatgtagtaaaaaaaacaataaatcttattgcngtgatatattatatgg

SEQ ID NO: 153294 - DNA, 451 bp, Glycine max
  unsure (1)..(451): unsure at all n locations
agcttagtcaagatgcaaacaagggaataatggattataatgatcgcttgntaaatattttttcaaaggaaacatcaacaagattgttgtatgtggagaatccaatttctttatttggtgctcttcgaacaagaaatggagctccagttatagttctcgaagggcatcttgaaatcaatccaacactgagcattaaggtgatctatgtatataaataactttaatttccatcccatgatgaatgctctttntaaatgtcatttatattcatttatctgatgtaccaacatagttgataaatgttttcatttcacttgtttttccttttcattggcatttattngatatttaatgttactatggcatcttaagttatttctttttctactgtanatgattatcaattatctaatgctctanattagagttgtccatgtaccctgactccatg

SEQ ID NO: 153295 - DNA, 416 bp, Glycine max
  unsure (1)..(416): unsure at all n locations
ctaagcctcaaaatatggacttataaactactagtttctcgaaggaaattctataaatagacctcccatctttaatggagtgggttaccactactggaaaacccgcatgcaaatctttataaaggcaatagatttaaatatttgggaagccatagaacaaggaccttatgttccctctataatagccagaagtgcaacaatagaaaaacctagagcagattggactgaggaagaaagaagattaatacaatataatttaaaggccaaaaatattattacatctgccttatgaatagatgaatactntagggtttcaaattgtaaaagtgctaaggatatgtgggatacactacaagttacacatgaaggcacaacagatgttaaagatctangataaacactntaactcgtgaata

SEQ ID NO: 153296 - DNA, 489 bp, Glycine max
  unsure (1)..(489): unsure at all n locations
agcttgtaggattatggggtacccatcacatgtgtgnatttatgtggcggncgggcgatggtgcacaacaagttttccacatccacaaagcgcgcataaacccaccatcccctgttgcccacctccaactgagctcacgtactcccacgtagcccatatcctttnttctctcaacaccgggtccccatcaatcctcccaagcttttccaacatcaaagcaaaacaacattcaaacagcacaagctatcacagccaagcaaaacagagcanaggcagaatactctgccaaaacaccaaccaaatcacagctnttctcacttaaagaccncagtaacaattccttcgatccaattcgntaaccggtggatncgactccaaaatttactggaagtctataatacataagcctacattntgaccggtgggatctactagcatacatccagaactcattctgtactactcttttcacagccacacacacacaag

SEQ ID NO: 153297 - DNA, 384 bp, Glycine max
  unsure (1)..(384): unsure at all n locations
gtagttttccaagaatgcttccttaagacacanatggcgtacaacctccttcaatatacacaaacatcaatgggtaattagagcaaacttatgcacatatttccttacgaacattcactcgcaccagatattcttctaactaagaaaaatgcacccacgcacaatcaaggcaccttcgttacctagattatntgtatgtacttccaaggtgtactacctacatcacatgcatttccttggctaaatntacatacatgcatactcaaagcattctggctaccaaaaattgcacacgtgcacattctggtatntctaatacctatgcatatacaaactttgtgatgaatcttggctatctacacaataagggtgtacatttcatgc

SEQ ID NO: 153298 - DNA, 369 bp, Glycine max
agcttatgctcttgtagtcttaggctgccatatacttcaatttctcaccacaccgcttgcctcttccaacccacctccatatgcacatactgatggtcattatgcaaacatgaaccttccaatagtcatcattccacaagcaccaaataccacctatatgcccgtgagcaggctgaatgaaactactatcgaaaccaagcttatgtaaaatcctctccaccccttcttctttgcttgcatgagtttcaaacagaaacagtagggaagtctcatattccttacaaatatccttaatcaaatctccaagccacatgctcccattccgtagcaattccatgcaagcacaatcatagggacagattatgagat

SEQ ID NO: 153299 - DNA, 457 bp, Glycine max
  unsure (1)..(457): unsure at all n locations
agcttgagaagcatgtgatccttcggcatcatctttttattagcttgatcctttgtctacaatctccccctttgtgatgatgacaatccttgaaatcaagacaagctatatacaagatgatagcacgttcacacaacccttactccccctatcttttggcatgtatgcctaactttaaggattgatttttaatgatagatttctaattgattntaattgatttctaacccaagttctctccccctttggcaacatcaaaaagagctaagcaaaacaatcaatatctaaacagagccaaacattaaaccaaaataagtccatacattgtcataaccaaccaaagcaaagtcgagaaatataatagaagtgcaagattacgataactagagcaacanaaagccaaatacacggcgaataaacaaagtactaataatacttaatcataataaaaaaaata

SEQ ID NO: 153300 - DNA, 508 bp, Glycine max
  unsure (1)..(508): unsure at all n locations
aatggggtcttcccttctcgctaagccaatctgctggcttagcgagcatccgcttttcgcaacactcatgggctaagcgcgacgaagactctataagaagatgaagttgtatagggttcgcttagtacaccacttcatctcactaagtgcaccgcttcagtccatccgctaagcaagaaaggcacgcgctaagccaaaactcactaatgtgcgctaagtggtccataattgcgctaagcgcacgagcacgaacaaggccacctatttaagcctaaaatcagaatttagagagggagtttggactgtgattcaaagaatttcatttctagagattctagaaagagacaggtccaagttccagaccagtttgagagattntgctatgtgaagatctgtagagactatagcttgaagcaggagccggtttgagagctcgagataagtctgtgagtgatcttgagatcctagaggtgaaggagacatcctcaccacttatatttttgcaatc

SEQ ID NO: 153301 - DNA, 280 bp, Glycine max
  unsure (1)..(280): unsure at all n locations
cgccaaaaagacagaagatggtaagaaatntctaaaacaaaggttttatgcagatatagaacaagccnacaccttaatattctgtgaatcaatcagtgacatggggaaccgatcaatggccaaaccccaaccaccagtaggtggttaaccatactctagagccgtacaaaatgtttcatctancgccattgcttcatcatcgccagattggcgatcctgacatgtgaaacaaataacaaacaggtgcaactaatatttcctattaagaaaagctcacaat

SEQ ID NO: 153302 - DNA, 438 bp, Glycine max
  unsure (1)..(438): unsure at all n locations
agacaacatatgtgcgcangnaaaagcatagataaattctatatttagctaaacgcagaagataacaagaaacaaattagttattaagtcagaaagctttacgacttgctcaagggggactaaaatgcaatgacaatgaaaggactaaaggaaagcaaaaataatgcataaaactaaattatatatttgtttaaattctaaataatgaaattataaaaaatttaaagaggaaggcattactaaaatggaaccttagtctctatttttgatgccacatttgaagtttattgtctcagatgccaaaacctattcgccgtttgcactgtcatcaatagtcaaaagtattaataaaatcgtcatgtacttcttcacgtgtcacaccttacttcttttccacctgttgtttcagcagtccgactactctttgttttttttttt

SEQ ID NO: 153303 - DNA, 266 bp, Glycine max
catctatgcataaagagaagcataatacatcattttccatgagttgcaacaggatgacactatatgtattgacaattatgctcgtggctacacacttaaagttactcaggtctaccatgtgctagtgaacttgttgaatctatcagtatatatggctttattcccttgaagtgcatccatgtacattggaagatgttatccattcatatcttatacaataagggtgactcttagggggacttaaccctgacacataaggtcgatgc

SEQ ID NO: 153304 - DNA, 454 bp, Glycine max
  unsure (1)..(454): unsure at all n locations
agctngtcgggttcaatatcaattaagcgcttgttgttcctatggactaagcgaaaaggcttaggtcatcaaatactacgcactttntaaagcacaaagcgaggatcagaacctcaaccctacgttcttttaaaagactgcgatgagaaaattacagaggacaggaatccctgcggtaaaccaagaagaacacacaaaaataaaaacatgcagcgacttccttaattgccccagatcttaagagtagtatcgcttgacaacgtcggagatcacggatgaaggtagctcctcgtcatccatgttggcaagcacaagggcctctccagagaaagctcattttacgacgaaaggcccttcgtagttcggggcccactctcccctattgtctctcaaggcttgcgagacnnttttcagcaccaagtccccttcgctgaacctgcgcgagcgtaccttg

SEQ ID NO: 153305 - DNA, 424 bp, Glycine max
  unsure (1)..(424): unsure at all n locations
ctgaattacaacgttccaatgattgtanaatgtngtaatcgattacaatgatttggtaatcgattaccagtgtgtttgaacgttgaaattcaaatgtaagtgtgaagagtcacatcctttcacaacaaagctctgtgtaatcgattacactgatttggtaatcgattaccagtgatagtttctgaacaaaatcaaaagatgtaactcttccaatagttttcaagttcttctaaaagttataacttcttcaaatagtttntaagtttttctaaaggttataactcttctaatggttctcttgaccagaaatgaagagtctatataagcaaggctttgatttgcattntatcattcattcaacaattcttttgacaacaactttttcactttgatntctanatctctttgaactttcttctcttcc

SEQ ID NO: 153306 - DNA, 140 bp, Glycine max
  unsure (1)..(140): unsure at all n locations
agccctagagaaagaacaatatggatgacataaacaaattctaataattaattagacacagtagagattcaagttgtgaacctgtagatgtgcagtacgcagatctgctccncagaagctngagtctactaagcaagcct

SEQ ID NO: 153307 - DNA, 314 bp, Glycine max
  unsure (1)..(314): unsure at all n locations
ctcctttcttgatccttagaaaaatgttcaaagatatatgatgatagatatggtnttgaccaataaaagtagtttagactttagtactttctctaaagtggatagagtagctcagaaaaatgcatcaaattncactacttagtataagattaactttctaaggaaacacaggaaattgattttttatatgtgaaatgtgtgccacataatacagaataaatgtgtaaatggtcatgagaattctaattaaatatgatcatgtntacgaatcatccaaacgccgtaccccactctttaatcttattctgccacta

SEQ ID NO: 153308 - DNA, 332 bp, Glycine max
  unsure (1)..(332): unsure at all n locations
agtcacctgcggcatgcaagctngaagaaagtttgtcttttacatgtcatactccttgtttgacatttgnattgattattggattgtntgttgcatcttagtctctgtcttttcatatgtgcatcatgcatcatcatgtaggagtaagaagaaaggttctaaagttagaaaatttcttctacgtttaaaactctgttttaattgattaccggctgatcctaatcgaatacataagtgtttgtagcttgagagaagttctcgtatcggttaatcgattaccagtcatcgtaatcgatacatagttcgatgtgcaatgatcgcttctcagagtc

SEQ ID NO: 153309 - DNA, 391 bp, Glycine max
  unsure (1)..(391): unsure at all n locations
agcttcctccacatgagtatattgccctttttctttataggagtcaaatatcctcattntctgttttagaaggtgctgggagaaccctcaaaggtagggatcttagcaaagtgaggaatgttgtactcccaaaaattggtttcctcgaaacactataaaggggtctcttgagtagtgatgtatctttatggtaaaacataatcaattaatttttcatggtgaatgtaaaaacaaaaaatagttgcttctactttcttatggcatcacctaattttatgcgatagaattgattcttatgtgtcatccaaacatgatagcagctcttttacatctgggatgtataatacggtctgtagctagaggttatctacgaatggatgttgtgttcata

SEQ ID NO: 153310 - DNA, 482 bp, Glycine max
  unsure (1)..(482): unsure at all n locations
ggatccttaagcaccgcggctgcagctgtacatgacaatacctaaaaaacttgtatgatngtngtcttcatattgtttggaaggcaaaccgccctctactacttcaactactgtttgaggccacttgtccaataattttaaaacaatatatatatttgggttgaatggttcatgctataatagctttcaaaaattcaccccccctcttaagttattgaggccacttgtccaacaattntaaaaatatatatatatatatatttgggttgaatggttcatgctataatagctttcaaaaattcttgaaaataatataattggatgttagaaggtttgaattactaaattatgaagtttaattccttcaaaaaaaaaaatcacgttgtgtagttgctggaattctttgtccttgttctaagcctttgttagcctaaccctaagccttttccttgcacaaattggtggtaaatttgtgaaacttc

SEQ ID NO: 153311 - DNA, 358 bp, Glycine max
cctttttggtcattttttaagaaccgtggcattcttcccatatatgacctcccctaagtgcttcacattccatgacttccagctagtgctgactgcgaatgagtctgaatatatactgcgatgcccactgtgaggaaggaagccatatcttttctctaggtgctatccttccacgacaacgagttgccaacgtagtgaatatctcatcacaagagttggaccgcgtaaagctaaacatgaatggggtagtcggagtaccaatgaagtgttggaggaaatgcatagccttgaaatcatgcatggcttcttatgcatctgccttgacttggagtgtccttcaaatgaggtaagactacag

SEQ ID NO: 153312 - DNA, 447 bp, Glycine max
  unsure (1)..(447): unsure at all n locations
gatttataatgccttaaattgctttttatttatttcaaattaattgttagtaaaattttatatttcaaaagttttttttttactttcatataatgcaccacatcgacaaaatactaactttagcaaatgataactagtaatagtcaaactaacatgataaccaaaatataattntagagactatttttttntaatttttttagattagagattacgggtggttcataatttattggaagactaattttattaatgatatgtgactacataaaatttaacataaggtggaaatcaaacatgtattcattaaataaattattctcaaacatataaaacaaatatctctttacaccattacaacaatcctttaaaatattnttcanatttttctcaatctaagaattaacatgacaacggataacaaattaaaatattaaagtgaccgat

SEQ ID NO: 153313 - DNA, 472 bp, Glycine max
  unsure (1)..(472): unsure at all n locations
gcttgcacanagaaataagtggtnttgtctcattaaaaacaacatggcgcgctttctaaatacttgaaacggatgggattcacttaactagtataaaagtgttttttttttatccttaaccgattcctcacngaaaataaatccggactaatcacgtgattntaacagcacatattattggaaaaattatctcatcatattgtatatttattttacttgaataagtgtcttatatatcaataatttaaacaaaacaaaagaactaaatatnttttttcaaagtcattaaactttactaaagagatctagctcaagtcaattaaatgagcaattaatatacataaattattattaattttttattcttggagttgactcctatacataaaanaaataanaatcactacactctatacataaggtacgagcttagagtgcacctatgtgcagaanaagacatataaatcatatg

SEQ ID NO: 153314 - DNA, 448 bp, Glycine max
  unsure (1)..(448): unsure at all n locations
agcttaaagatattgtatcatcacgtggcttatatatttattctcntgaaattctgcctccgntntcaccaaatccatagtcctgacaacgcaagatgcagcagtcaaaaagttaagcacatgatcccacatgaacgcaatatggcatcttatcccattatccttgtcatttcagacagtaataactaatatataattcagaattcactctcagaacatgggatctttagctttacttgactcactatgcaacaagcatcgcgaccataagaaccaagatcctcctattaccatgaagagctggtccatagcactgactgctctggctctgctattctcaaactggcgtaccacggccaaagctgagtctctccatcaatacatgtgcactcattggcactcaacatgactttatcttcttcgcacgctcatagaaagaattttctaa

SEQ ID NO: 153315 - DNA, 302 bp, Glycine max
  unsure (1)..(302): unsure at all n locations
aacctcatcgtctctcacagtctttagatttgttatctcatccaatccttgtgtccgaactctcagccacttatgatagccgccgatgatcccattactgcttcccctaagctctctgtcctttcttcacgccgcatcccatgccttgcgaactccttggagtaccctcgcgttgtggtcactgaaaccccgtgcgatgaaaggcgtgatgctttcctctgatggcactcctctcatgagggagcccagctgtcttatggcgaggacngggataatacaaccccttgttccatcaagggaac

SEQ ID NO: 153316 - DNA, 461 bp, Glycine max
  unsure (1)..(461): unsure at all n locations
tgcanactacattcagtagctntctagacactgtaaatctttcatccttcaatgacttattcattatatcagccaattgaacttttgacttgcaatgccttagtttaattctgtctttacttactcgatctctgaggaaatgaaatttagtgtctatatgcttgcttcttccatgagctactggattcttggccaaatctatagctgatttgttgtctacaattagttcaacggcttcatctgaagatactttcaattcattaatcagggatgaaagccaaagtgcttggcaagcagttgaacaagctgcaatatattttgcctcacaggttgataatgccaccattgattgcttctttgagctccaggatatgggagagccagacaatagaaatacttgttccgtagtgctttttctatcaaccacatctccacaccaatctgagtctgaataggctaca

SEQ ID NO: 153317 - DNA, 357 bp, Glycine max
  unsure (1)..(357): unsure at all n locations
agcttataatatattgatacgctagagattaaacatcttgtatctctctaganattcaaatggtcatgacttttcagacggatgtccgattatggcgaatcacatatcgagacgctcaaaattgaacaacagaaactctggagaaattcaaatggtcataacttttcacacggatgtccgattcaggcgaatcacatatctagacgcctaaaattgaacagacgaagctcttgagaaattcaaatggtcataacttttaacttggatggccgaatcaggcgcatcacatattgaggctctccaaaaggaactatggaaactctcgagaaatatatatggtcataacttttcacactg

SEQ ID NO: 153318 - DNA, 361 bp, Glycine max
  unsure (1)..(361): unsure at all n locations
tagagctgttcatagctccactaattgttctccttttgaagatgtntatggttttaacccactaactcctcttgatcttttgcctatgcctaatgtntctggttttaagcataaagaaggtcaagcaaaggcggactatgtgaagaagcttcatgagagagtcaaagatcaaattgagaggaaaaataaaagctatgctaaacaagccaacaaagggagaaagaaggttgtcttcgaacccggagattgggtttgggtgcacatgagaaaagaaagggttccggaacaaaggaaatcaaagcttcaaccaaggggagatggaccatttcaagtgcttgatagaatcaatgacnatgcttac

SEQ ID NO: 153319 - DNA, 268 bp, Glycine max
  unsure (1)..(268): unsure at all n locations
tagtaacagtgtttatggnacctcctacctatatgctgtgagtaaaagcaaacgactagagaagacttctaacatgactaactaacgtgcttcaacactatgggccttcttgttaaagtaaccccacacaggagaggaggaataatggcatcttgggaagtgaagtggagaaatatgttctgcatgtctcacacagaggggatacttatcaccacgatattggagaggatgacgcancaagcatgagtggcgcgtgagggtgaatttt

SEQ ID NO: 153320 - DNA, 491 bp, Glycine max
  unsure (1)..(491): unsure at all n locations
gatccttaagcaccgcggctgcaagctgagagtatgtctcgatcgngtattctactactgtcttatcataatcgattacatagttattnttgagacaatgattgattcattcagaagtctctatttaatcgattaccatgtgatataatcgattacttttctttctataagtgtttcaaaagtgattaagaactctttaatcaattagattgaggatctaatcgattatattgttcttgagttgtttccagcttttgggaagaacactctaatctattaaaaagataatctaatcggatactttgttgaattaatcgattacattgtagatttaatcgattacaagcgattataaatgtctcttctataaatatccaccttgtattctcacttctatgaagaacaagaataacttctaactgagcctgatcatgtgctgatatcgtaacggaagaagagacgaacgtgttataatagtgagtataactcct

SEQ ID NO: 153321 - DNA, 400 bp, Glycine max
  unsure (1)..(400): unsure at all n locations
tactcagccttgaaagcacaatacagaagtgggctactctcactatgggggttgatagctanacatagatctctctctaagatatctagcacaatgtgttgcatatttgaaatgcttcaacttattcttcatggcctttgaaaatgtcttataaagccctcaagaagattgttggagtaggcttcacatagtttacaagtttctaaagtaagtaggggaattttccagctatcaagatgtgatagcaaatagaaccatnttgaggaaccttttcaatgggcattctgacanaccatcataatagtcattctaaagcttcttgagaatgaatccatactntatcacattttgatgtagtgcagatttatcactcttaacaattcttcacaacttcaaagca

SEQ ID NO: 153322 - DNA, 269 bp, Glycine max
  unsure (1)..(269): unsure at all n locations
atacaagngctcatgcaaagcattctcaaacactcatttcataccacacaatccactgcatatcattttcaatcaatatattgatcaaacacgctttaggtacaagcaaacaactcaaagtgcttgaaatttaaataactgaaatttaaataaatgagtcatagaactgaaattaaatattggacctgaatataaataactcacttatactcaaagtcacgatgccaaatataagtctattctcaggtcgtatctcataataccagtgt

SEQ ID NO: 153323 - DNA, 390 bp, Glycine max
  unsure (1)..(390): unsure at all n locations
atcagcatatactaatggatcacatccagacagcttagcaaaaggtgttttaattgtgtcggaatatttcgacagactacaaaaatctgtcgattaatatttctgacgaccatttttctaacggatttgtgtccgtcggaaatctatcggaaacatccaattagcgacgggattttagtgttaccgacagattattgccgtcacaaaaatggcttttttgtagtgttaggcacatgcattntaatngaattttgggtccaaaatgcccttatcttcttcatgaagacactctgattttctcagtttcaacanattcaagaacatcaagaacagccttaaatagattcaanacacagtttcaatgcacataataaacacaacccaaatcat

SEQ ID NO: 153324 - DNA, 328 bp, Glycine max
  unsure (1)..(328): unsure at all n locations
agcttctcccncaattatctatgaatagggggtgatgngttttacaaaagggttcacccttcctggtaattcagaatcacttaaaattagtgagaaaaattggttccgtgaaggaaatccgagccgaggcacttccgtaacgtttccgtgggtgatttcatgaaggttttcgaccgttcttcgtcgttcttcggtcttcaaccggtgagttccctagatcaaacttatcaattcattctatgcacccttagtgcgcctcatttgtttttatgtgctttcattcacacttcatttacttttagtacccctctttgatgtgctttaatca

SEQ ID NO: 153325 - DNA, 436 bp, Glycine max
  unsure (1)..(436): unsure at all n locations
tgtctcagcgttgatgcgagacggagacttacatgctatctatcttcgtcaagtaccaagaagagttaggtctatccacggcccacgagcataaaatcgtggatgagtatgctcaagtatatgcggataaagaggctagaggaagggtgatcgactctttacaccaagaggcaaccatgtggatggaccggnttgctcttaccttgaacgggagtcaagaacttccccgattgttagccaaggccaaggcgatggcagacacctactcctgccccgaagagattcatgggcttctcggctattgtcagcatctgatagacttaatggcccacataattagaaatcgttaggagacttgtatggtctctaagaccttgactagatacgacttcctttttgaaatanaatgagttggtcccatggttctacttcaaaa

SEQ ID NO: 153326 - DNA, 218 bp, Glycine max
tttcggccgacattggcatgttcccatgcactcggccaagaaaacattatcccacatcgaaaagaaaaaataaaacattaatcaccgatattgatcggaaaaaatgctggttgacgtcggccaggatagatgaccgatcgaggtctatagataaaagaatcaccggatgacgccagatcgagcatttctacttgacatcatccatatattgtctaggg

SEQ ID NO: 153327 - DNA, 287 bp, Glycine max
  unsure (1)..(287): unsure at all n locations
ttaagtcacctgaggcatgcagcttctctgccgaaaaagagaaaactgtctttgtttgtataaanagcgcaacgtccgctgaaaaatatacgtccgggctatttaactaccgatgtccgctattgttttttctattccacccctgaattatatttggatgatgcctattaagaaatgttcggtcggggtcactcgggcatgcttctttttgaggcctcgatctcgtctctttcctagccgggccacgtcngctatcatttctctcgatcaatatctgtgtgaatcat

SEQ ID NO: 153328 - DNA, 322 bp, Glycine max
atattgtagccgatgctctttctcggcgtcatgcattactttctatgcttgaaacaaaattgattggtcttgaatgtttgaaaagcatgtatgaaaatgatgaaacttttggagaaattattaaaaatggtgaaaaattctcagaaaatggtttctttagacatgaaggctgtcttttcaaagaaaacaaattgtgtgtgcctaaatgttctactagaaatttgcttgtttgtgaagcacatgaaagagggttaatggggcatttttggggtccaaagactctagaacattacaagaacattttattggcctatatgaaaaa

SEQ ID NO: 153329 - DNA, 383 bp, Glycine max
  unsure (1)..(383): unsure at all n locations
agctngcagcaaatattggttaaccgagtcaatgaatctgacactagtttgagaaaagaggcataccccaagccgaaatgcagtcccctgattgcggcaatcttcagccaatattttagtagcattcaaggcttcttccatactagctccggaagcaatcacagcacaaactatagctccagctgaggaaccggctaacggtggtgtttcctgcacatgcacatgcntcgcactctcattagtatatcaatccacgaatacgcgatacttctttatggacaaatgttaatcgtcactttcgtagttttttcatgtagtgggaagatcaaaaccgcaaactntacctccttccgtttcttgttacccactcacccaacgctata

SEQ ID NO: 153330 - DNA, 249 bp, Glycine max
ttgtatcatctcatgccagatgatgctcgccttgtgtgggatcgcttgctcgtgagttcatgctcacttctcattagttattgcacaaatcctttccgtttgccccctttatttgggccccatttagtttgtaacttgaattcccatactgagtatcattacagacgactgtcgcttttacatcaatcatggcgatattcatcattgagcggattgatgagaggaacggaacactttcaattatacctc

SEQ ID NO: 153331 - DNA, 486 bp, Glycine max
  unsure (1)..(486): unsure at all n locations
agctntgcagtttatactttattcagntcgaacattattgtctctggtagagaatatatatgatttcgtactgaaaacaaaaattaatccatggatttataaaattaaaggtgtgtttgggaaaacttgttttttgacaactaattgttttttttttgtgtgtgtgtgaattttttcttaaaaaatgattatgtcttcaaatttcaaaataggctaattaaaacacttagcctcgataaattcaggaggtgcagcacaagtgaaagatactgcaagtgtctatttctatgctgctatttttttattattataattatcgctattgttataatgttaatgattagcgttcttgattggatattatattattgcaaatacgctatagatgggtggnggatttatgttatggtgcatcgggcattggtcttgagcttgaaatggtgaaaaggggaaagaggaaatggacatttcgtattgagtatgggt

SEQ ID NO: 153332 - DNA, 440 bp, Glycine max
  unsure (1)..(440): unsure at all n locations
aagaaagagggagagacagatagaggtgggaggacgatattgaacgaagtaaaagggagagaagttgaactctgagttgtgtctcacaagactctcattcatcaaagttacaacaagtgttacacatgcttctatntatagactaggtggcttccttgagaagctttcttgagaaaacttccttgagaagcttctttgagaaaacttccttgagaagctagagcttagctacacacacccctctcataactaagctcacctccttgagaagcttccttaagaagattcctaaagaagctagagcttagctacacacacctctctaatagctaagctcaccctcatgacagagaaacatgagaatacataaaaaagttcttactacaaagactactgataatgccccgaaatacaaggctaanaccctatactactagaat

SEQ ID NO: 153333 - DNA, 256 bp, Glycine max
  unsure (1)..(256): unsure at all n locations
ttaagtcacctgcggcatgcaagcttgtaggattatggggtacccgtcatatgtggnattattgtggcgaacaggcgatggtgcaaatcaactctcccacattcacaaatcaaacatgaacccaccatccccaggtgcccacctttaactgagctcatgtacccccacgtagcccttattctcgttcctctcagcaccgggtccccatcaacccctccaagcttccacaacatccaagcaattcaatatgtaaaca

SEQ ID NO: 153334 - DNA, 314 bp, Glycine max
cagtatcacactattctacagttgtattctcttgacacatgtcttgcacgtatttctttgtctcacaagggtatcttttcatcttattgtaagttactcgcccgcttctcacctcttccccacaaatattacacatatattcggttatattcatgtggtactgcccatgtctaaacactaatataataaacatcataatttgtctcagataatgggttcaccgaagaaaatatgaatgataaacgctacggattccataacccatctatatgtttgtaccgaataagtgcttctgattaagaatcaacaccata

SEQ ID NO: 153335 - DNA, 495 bp, Glycine max
  unsure (1)..(495): unsure at all n locations
agcttgatcaacatcttaatgggaacgttagaattcttctctttgtggctcaacaattcccattctgatactggnttccaagtcacttaaagttcaatggattttaaacgaaaaatcatctattttggtgtagcaatatgtcgaaataatagagttcgccacacaaaaagtatttaatttcgtcaagatttccacgttctttgcaatagggaaagaaaaattatcttcatacacattgaataatccatcataattccaaatgtncacaaataataataaataacagaccctcgaaattagctgaatttccatgatgtttatgccttgctgtcgatattcatcgggtgggcatccttcgacgctggtttctgcatgttaaacgatgtatctattaaaaacacagtacaaacaanattcaaaccggaaaccttattccactaaactcaaccttgaagaatggaacaactcttgtataatccttaagtaatatggtac

SEQ ID NO: 153336 - DNA, 234 bp, Glycine max
tgacctttttaaagtggaaaaaaaactaggataggaatgtatatagagaagtcaaaaaaaagtaaaaagaaattaaaattaaaaagaaaagaaagatatagttatctaataatcatatggagtaaaaataccccttaagactctaccttatctcaaaaatagacctttacgtttaatttaaaagatattcttgaagctacaatctgcaaatctagatttataaagatctacata

SEQ ID NO: 153337 - DNA, 314 bp, Glycine max
aacgcatactttacctacagagtaagaaatacacattacgactcagttcgttggggaatgtaaattatgaaaaagagcgtgataactcatcgagtcccacatggagcccatcacaaaaatcggagtgccataactcatgtctccttaaagagattacgagtgtgtgagtcacaatttatagccacaactcatgcatacacactttattccatgatgtacaattaacacgtaactcatttatgacatccacaatgtatcacatgcatatctaaactgtataccctatggggtatccaaactgcgtttaacaactt

SEQ ID NO: 153338 - DNA, 368 bp, Glycine max
  unsure (1)..(368): unsure at all n locations
agctngctaacccatggaagctactaatatctcctacatcttttttgggtgggccattcttggatggccttgattntctcagggtccacttggaccccatttctaccaactacaaaacctaagaaaactatattatctacacaaaaggtacacttctctatatttgcatagagggtgtttttcctaaggactgaaagaacttgtctgagatgtcctaagtgatcatctaggctcctactatacactaaaatatcatcaaaataaanaactacaattctacctatgaaatcccttaagacatgatgcatacacctcataaaggtgctcggtgcattagtgagcccaaaaggcaccactatccattcata

SEQ ID NO: 153339 - DNA, 404 bp, Glycine max
  unsure (1)..(404): unsure at all n locations
caacaagtttctaaatctgtnnttgtacataatgaagtaactaactaaatatctaactaaatccattgatacatatagtgactactcataagaaaaggatgggcattgattangccctactaatctacctaattaaaccaattacacaaagcatagcccaatttcgcaacccaattattcaagtgcagagtttctaacatccaagcccatttgaccctcgaaatggcagaattggcccaagcttatttcntaacaaatgaatatctttttcttagctttccaaggactactcacatgctccatttggagttctgtagtatcctataggccatgcctcttcaatttttgtgtgtaattgatgccaagacctctccctttatactattcctttctcttctgttctc

SEQ ID NO: 153340 - DNA, 300 bp, Glycine max
ggaccatactctttccaaatatagaggggctagtgggtttaacaacaatccacactttcttgcttatcatcacatcaagaaaagcccgaccgttggttgtttggccaatgcatatgacacattcgacttgagatgcgaaaagagtagcgtcaggattgtttgttgcacgcccacactttatgtgtggttggtctcccacgtgcttcgacatgaatgtagacctgtctgtcctctacaaggtcatcacatgtgcgccgaaaagggacaagcatatcggaatgaactcttggcaggtatgct

SEQ ID NO: 153341 - DNA, 411 bp, Glycine max
  unsure (1)..(411): unsure at all n locations
gcttgtgggatnttgtgatagtgactctgccggagatgctgatgatatatatagtactatcggatgngnattattatgggtgatggtgttgtacatggagttctaagaagcaaggcattgtgacactttctacttgtgaagccgagtatgtagctgcaacttcttgcacatgtcatgccattnggctaagaagactgttggaggaactctagttgttgcacaaggaaagcacaaagatctatgttgataataaatatgcacaagagcttgccaagaatccggtgttccatgaacgaagtaagcatatagatacaacgtatcatttcattagagagtgcattatcaagaacaaagtagaattgactcactgtgaaaatcaagatcaagttgcggatantttcaccaagcctc

SEQ ID NO: 153342 - DNA, 193 bp, Glycine max
ttcagcctctcgcatgtatgcgcctgaatcgacatccttgtgaggagaatgattatatgaatttcttgagagctgacgatgctgaagttcaagcgtatcgatatattataagcttgacctggacctgccagtgagaagatatgaccatattaatttcacgagagcttacgttgtgtagttccaagcgtctcta

SEQ ID NO: 153343 - DNA, 345 bp, Glycine max
  unsure (1)..(345): unsure at all n locations
agcttgtgtattccatggagagtcacatcatgacttgtttatcgattngcgtccggaaaattgggaatgatgatggagaaaaatcattgaatcaatttaggatcatgagtgttgggttggatgnnnactnnnnggtgtttgattatggatcattgaaggttacacattccatgaggttccccgcgcctcttttgtcagtcgcttactcgccggattgttccaccagggcaattgtgactttcaatggagtgatctatgctagcaagaagaacataatggaaaatgacatggagagggatagtgaggctaccttgttatgaatatatcacctgtggagaacactga

SEQ ID NO: 153344 - DNA, 435 bp, Glycine max
  unsure (1)..(435): unsure at all n locations
agctngtctaaattattatattacgaacttgtgtcttatattaactagatgccactaatatgcagcccaaatgaatggaatgtgggtaagacaactgggatgacaacaaagaatcgctatgatgaaactgccccaatcagtggcacaacataccctggagcataccctgaacagatgagggttgtggatatggtcataagagaaatgagaaaccctgcatatcttttggacatcacaatgttatcagcattgaggaaggatggccacccttcaactacagtggtgaaatgagtcctctgaagagggctactgaccctaatcgagctgattgctgccattggtgtcttcctggatcgcctgatacttggaatgaactattctacactgctttgttctactacactatatactagctaattaacattggtcactcat

SEQ ID NO: 153345 - DNA, 341 bp, Glycine max
aactccactaactctaatacccatacgcttcgttaagagcttaacacgttctgaactaattatttaccatatctatgctaataaacattattgtaatttgcctcaaatataactcaaatattctattttaacatatctatgtcacatccagcatcagattaatataaactatttcgtcacccttgatatgccctgcattccatgaactggtgaccaaaaaattaacacattatcatacttgtaaatgttcctaaataccaatcaaattcagaagttcactatatattcttgttctgaatcagtccaacactgtgtgcaattgtgactagacgaaattctct

SEQ ID NO: 153346 - DNA, 346 bp, Glycine max
  unsure (1)..(346): unsure at all n locations
gcgagagngggcattttgtgtgagggctgtgtaattttccttgagaagagacggataaacacaaaggccataaactggtgtggcctactaattgtctttattccttagaatataaggagaagggaaagttagttaacatagttagactattaataagttactacagttaggatattgattagctaggtaaggggtttattagatatagatcagggaagaaggataggagagagggggatctcatcatttgtagatggagcattaactatttgtgaaaagagaaatcctttgtgaaggggaaacccttgaaggagaggtttctctcttactttctgtacttttctta

SEQ ID NO: 153347 - DNA, 451 bp, Glycine max
  unsure (1)..(451): unsure at all n locations
acgagtgtcgtcagccatggcaacgatgatgaaagcactaaatgtagtagctggtcttcgaggcccaccaaccttctcaagggaaagagagattagagagatangagagagatngagaaaggagtattatttcttcttctcttttgcaaagcgctttcaaacatttatagtttgttacaaaaggaaccaagcttaacgactataacagaaagcctaactaccagttagttattctaacagaaagcttcntaatggtgtattcttcttgaagatgctngcctatttcgtgtacgtgtatggcttatcaagtacgtagtccttgaggtgcaaaggaagtatactttgccttttgngccttgctattttgtagctcgttctgctagatgtatcagaaagcttttggtcttattaaataaataaatatttanacatatattattaaatanaatat

SEQ ID NO: 153348 - DNA, 445 bp, Glycine max
  unsure (1)..(445): unsure at all n locations
agtcacaccacacgaatgggagactagctagcacgtggtgaataggttctcgatttatcatgtccaacagtntaacgtctcatatttgccaactaataatgagcactntggtcgccttcttgtctctatgcaaccatccttcttctatgggttgagaagatatctcgtaatcacatatttactagatcgttatagacgcattggtcgcctatccttctctttagatgaaaaaacaaaatacagttaataagttatgatagcaatgcataaaaggcaaatatgcaaaactaattacttcacacatgtgctatacatgttggacataatatatgttctatttaaatctgttggctaaacaaacattgttgttatcgacatttttaaaaaatatgataacagaactatctaatgatactttggctctaatgaacttgtatacaatgtt

SEQ ID NO: 153349 - DNA, 412 bp, Glycine max
  unsure (1)..(412): unsure at all n locations
tttttattttccacgagtcctgcaaggataatctggttgttgaaagtaatggagacatttacgaatgcgaccattttgtctatccacagtacaaaattggaaacattaataaatctgaactcaaaacgatgaacagggtacaactgacagcgcaaaanaaacggattccagcgaaatgtcagcaatgtgcatataaacctatctgcaatggcggttgtcctaagcatcgtattactaaagtaaacaatgagactgtttcttatttttgcgaaggttataaaatctctttttcaaccatgggaccttatatgaacgccatggtagaagtagctaagaacagagtaccgctttaccacattatggatgttgcacaacanatggagaataantaataacgctctctttaactcca

SEQ ID NO: 153350 - DNA, 416 bp, Glycine max
  unsure (1)..(416): unsure at all n locations
gcattgtaaaaagcattatttcattcgtttaaccagacttttattnttaccacgccaaggatcatggcgaggataataatgataaacaacactgaagttttattattcttacgcagcccaaatggctttaacagacagagatactttgctatcaacatacgaagcgtaatgggaatggttatcattagcgaaaattgattgcgccatccaatgattatctatggcaatgatttactgatgaaatttatttaagtatcatttaacaatatgaaatataaaggaatatttcattntcagcggttatggttatgctattgataatcaaggatattgcttatgccctgatgcataccacgtaagccangattntcgcatgggaagatgatgatgacgaaacaccctacatgaatntatgt

SEQ ID NO: 153351 - DNA, 129 bp, Glycine max
  unsure (1)..(129): unsure at all n locations
gatgtcggcgccaagttagaataagatagaacactccaggtttgggccacagtggtaaaatctttcctcatgagcttncacggtagaccctcaatattaagtacaaatcccctcccaaagatacacaac

SEQ ID NO: 153352 - DNA, 428 bp, Glycine max
gactacgctgctgtgggctttatggggctggagcttcaatgggtcctttaatggtgtatttttcccatggagatgcagcggaagacaaaggacaagatgtgagaggaggcgccatccattaaggaataagccatggaagaaggagcttcaccaccaagatgagccttggataacaagcttggagaggatgcttcaatggaggaaaagaatgagagaaagaaagagagaggggggagcacaaaattgaaggaagaaaaaagagagagaaattgaactttgagttgtgtctcacaagactctcattcatcaaagttgcaacaagtgttacacatgcttctatttatagactaggtagctttcttgagaagctttcttaagaaaacttccttgagaagcttctttgagagcacttccttgagaagctagag

SEQ ID NO: 153353 - DNA, 483 bp, Glycine max
  unsure (1)..(483): unsure at all n locations
gcttacgggtccatattgttcattgttatgacttttattattggaatcaacaaaaataggctgattctatttggttttaattgcacttttaacttttctaatatcctcaatgcatgaatttgtcctaccccttttaattctgttatttttgtctcccctattaataaaataagcaaaactaatttacgtagtatttgattgtacgaaaatagaggaggagggatttttntatttaagcctctcatatttggcttaattcttagaagagaaggaaagtaaaatttcttctcatataattttttcttacctaaaacatctgaggattctgggggaaggggagatttaaattattttataatgtattgagtaagacaacctagttagaaaagtaaattaattntttaaatcagtctcctccttgtaaccatataaaaaaacatactctnctcccttattaagaccatacctactctcctctaacca

SEQ ID NO: 153354 - DNA, 364 bp, Glycine max
  unsure (1)..(364): unsure at all n locations
gccgcgctccattttntcacancctctctatgaaaacgcttcaccctacactctcatctctcgtactcaaaccctaatcctcaatataaacacactcaaaaaccctgtnttttttcttattcatcctctagatcttctatgacattcacaatgccttcaattccagaagagccattgttggcaccgaacccggaccggttctgcatgttcccaatccaatatcctcaaatctgggaaatgtacaagaaagccgaagcctcgttctggacggcggatgatgtggacctctcgcaggacctccgccactgggactccctgaccgacggcgagcgccactttgtcagtcacgtcctcgccttcttcg

SEQ ID NO: 153355 - DNA, 491 bp, Glycine max
  unsure (1)..(491): unsure at all n locations
agctntacttcactgcttcaagtagttcatgagttgtttccataggaaaacacgttgcctaaaagttactatcaggccaagaagatattgtgtctgatgggtatggagtatcanaagatttatgcttgcctgaatgattaaatactgtacaggcatgaattctaagaaatgtccaaatgccctacgtgtggggcgtcacggcacaaggtgaaggatgatgaggactgtanttctgatgaaaactcacagaagggccctctagcaaaggtgttgtggtatcttcccatcattccaaggtttaagcgtctntttgcaaatggagacgacgcataagacctgacctgtcatgcaaatgggagaaactctgatggaatggtctatcatccagctgatcgctcccagtggaagaagattgatggtttgtattcggactctggcaagaggcaagaaatcttacgctatgattagccagtgatggaatgaatccatat

SEQ ID NO: 153356 - DNA, 450 bp, Glycine max
  unsure (1)..(450): unsure at all n locations
cgtaatcctttatantaagtaatgatgcttaacgaaaggggagattattatattctttccctcatccctagagttaacttttggggttgagttaggcctctcacattattcattctaagaatattcttacttgcatgatggcattggtagtataaataggcatcaaaattgnggtgaatttcttgacataaaactcaaggtctctcttgaacaattatatcctaagtntacttaaggtcaaaatatgattcaccattcattagcgtaggctaattnttttattgttggcgttgaccaaggtcaacacttaatgtttcaagttgtcccaatatatgatatgtaaaaagtcattattatacatattacgcttaaaactagtatgtaattaagaagtagcagttatcataatactgtcaaatgcatttgaccactattgattagatattaact

SEQ ID NO: 153357 - DNA, 288 bp, Glycine max
cccgcaacatatctgagacgctcgaaattgaatgttgcacctctgagagaaaacaaacgacaattgcgttcttctcggatgtctgagtgagtcccgcaacatattgagacgctcgaacatgaatgttgagactcctaactaatacacacgacaataactcctttcactgatgtctgattgagtcccgtggcatatcccgacgctcgaaatggaatgctgaagctctgagctcattcacacgacaataactattttctcggatgtctgattgaggtcccttatatatcg

SEQ ID NO: 153358 - DNA, 497 bp, Glycine max
  unsure (1)..(497): unsure at all n locations
agcttcttttggaccttgaacaggcaacttatcttctctntcaaaaccatgccatgtgctcgcgactggtccatttcttcccttcgcaacttgagttcattattgctaccccatagagctccgcgaaatttgttccggccatactcttccttgcgagccctcttggtctcttgttcaagggctcttgcggtaattgcattctcttcccgtaacccggcgcactccttccgaacgtgtgtagcagccaacttgaacttctccttggcgagttttgcctttcctaactcgcttttgagagcttggacttcttcgtcctcttccggtgcttcaaaattctcttcgctgacgacttttaacttggcgagccaatctaaacctcgtatgcgaactntcagccattcgtggtacccaccaatgatgccattacgaatgcctctaagctcttgatctttcctttacggngnttccatgccttatggactctnggtatagtcttg

SEQ ID NO: 153359 - DNA, 372 bp, Glycine max
  unsure (1)..(372): unsure at all n locations
ctcttctcctttatcttccgctgaaactccatggttgagaatcactattgaaggaccttattgaagctcatagatccagcttccatagaagcttctcaagaaagcttccatgaagtggtatcagatgacaagagtttcaagtaggtgctccttaaacctccattaattntcaactttaccttctcctacattggntgttcttcatttttctccatgtatctcctcacatgtcttgtgttgaatgttgctagcatgaatttttagaatttccactgattaagattgctacaaaagctagatttgattnttatggttcanatttcttattctttgtcttgaaccatgaatngtgttaagttaggttcctttgag

SEQ ID NO: 153360 - DNA, 405 bp, Glycine max
tgcaagcttgagccaaaatcctgactcaccatatttcttgactccaggtgagaatgccaatccttaccctcggaagcaaaaaaagaatagaggggaaatttccaatcaaagaaaaagagaaggaaaatttccaatgaaagcaaaaaagaaatgaaggaaaattccccaatcaaagagtgggagaaagcaaaaaaaggaaaagaaggaaaattccccaatcaaagagtgggagaaagcaaaaagaaaagaaaggaaaattcccaatcaaagaatgggagaaagtaaaaaaggaagaagaagaaggaaagaaagctcctgatcaaggatcgaaagaaaccagaagaaatgtgcagagaggtctttggaccagacaatatctgaaccgtacagaattgtcaccaaatg

SEQ ID NO: 153361 - DNA, 253 bp, Glycine max
aatgtttgccttctcaagaatggccccgacgaagcttgcctcaaagaggtccacgaaggacaaggcggccgtaagaactagttccgccccggagtacgacagtcaccgctttatgagcattgtgcaccagcagcgcttcgaagccatcaagggatggtcgtttctccgggagcgacgcgttcagctcatggacgacgagtatactgatttccaagaggaaatacggcgccggcggtgggcaccactggttact

SEQ ID NO: 153362 - DNA, 385 bp, Glycine max
tctacgtctatactccgcactcctttcacagccaattaactcaaacaaagtctgtcctctactacttgtgtttgtgttcgaccttataatcaccaccacaaatccgtgttatgagcaacggatcgagcccaccgtcaaacatgctctcggctatcaaacacctacaaagcaatccacataatttaagttttctaccagtattcattttattaaatcactcacaaacattaacattataacctgagaagtattgaacgcatcggaacaatcaacatgtgcttcattcgcaccacatgcttcatcattttgataatccatatccgcttcttcagacattatactatcatacatccactgatcttcgtgcatctaactaactcaaata

SEQ ID NO: 153363 - DNA, 329 bp, Glycine max
gaatgtcaatccttaccctcggaagctaaaaaagaaaagaaggaaaatttcaaatctaagagaaagcgcaaagaaaagaaaggaaattcccaatcaaagagtgggagaaagcgaaaagaaaagaaagaaaattcccaatctaagaatgggagaaagttaaaaaagaagaagaaacaggaaggaaagaaagttcctgatccaagaagccgaagaaatatgcagaaaggtgttttgaccagacaatatctgaacaatacagaattgtcaccaaatgaacaaaaggaaggaaaggaaaccatgagctaaagtggtcttcttcctttgattgc

SEQ ID NO: 153364 - DNA, 339 bp, Glycine max
  unsure (1)..(339): unsure at all n locations
gagagaagtgaactttgagttgtgtctcacaagactctcattcatcaaagttacaacaagtgttacacatgcttctatttatagactaggtagcttccttgagaagctntcttaaaaaaacttccttaagaagcttctttgagaaaacttccttgagaagctagagcttagctgcacacacccatataaaaactaagctcacctccttgagaagcttccttgagaagctagagcttagctacacacacccatctaaaaactaagctcacctccttgacaaaatacatgannaataaaaaaagtccctactacaaagactactcanaatgccctgaaata

SEQ ID NO: 153365 - DNA, 352 bp, Glycine max
tgccatttttgctttaaagagaaacgtcccactggtaaaactaactttccaaatgtttgccttcgcacgaatggccccgaggaagcttgcctcaaagaggtccaagaaggacaaagcggtccaaagaactacttccgccccggagtacgacagtcaccgctttaagagcgttgtacaccaccagcgcttcgaaaccatcaagggatggtcgtttctccgggagcgacgcgttcatcttatggacgacaagtatactgattttcaggaggaaataaggcgccggcggtgggcaccactggttactcctatggccaagtttgatccagaaatagtctttgaatttatgccaatg

SEQ ID NO: 153366 - DNA, 354 bp, Glycine max
  unsure (1)..(354): unsure at all n locations
ctcatcgtccctcatattctntagatttgggagccaatccaatccttgtgttcggactctcagccacttatgatagccgccgatgatcccattactgggcttccctaagctctctgtcctttcttcacgccgcatcacatgccttgcgaactccttggagtaccctcgcgttgtggtcactaaaaccccgtgcgatgaaaggcgtgatgctctcgtctaatggcgctcctctcatggggtagccaagctgtcttatggcgagaacgggattataatttatacaaccccttggtcccatcaagggaacatatggacattcttcgcatgaagatagaatcttgattctctctttct

SEQ ID NO: 153367 - DNA, 394 bp, Glycine max
  unsure (1)..(394): unsure at all n locations
agcttgttaatcatgtgacaccctctacccctctcttgttttctttaaaggaataaaattcacatattaattaaaagtatttttaaaacattnttttttccgaaacaagtctttcaaaggggaaaaaggctcacattcattttcttctacatcatattcaaacttgtccaaataaataataaagtaatctcgtctcaaacaaggtcgtctaaacttcataccattaatatagaacttatatcctaatgtcacatcctatcatagtgttgtgttcctgtgtcctctagcatgaggttcttcatagtcatccacctattcatctgtttccccgaacacaagttcaagatcatcacaggatccaaacacaaccacacacagggagtgagtcatcaca

SEQ ID NO: 153368 - DNA, 460 bp, Glycine max
  unsure (1)..(460): unsure at all n locations
aaataaaagggttctctctcttgtctattatttatttgagcaatgccacatgtctctctntgagtggagcaagaagggcccactttccctttttgattgtgacccatactcagtcacaaaagtgaggaaaatctgacctttgaaacgctaaaatcctgcatcgatttgcgtgccgtttctctggctccaattcctcgcgtttctcttgcgccgtcggggccaagttttgaaagtgagcaatatatatatcaaaacactcagaataaaaccccgagcgtggttcagaggttggtttcgttaaatattaagtcgcacgcaaaacgatgattctttagactagttaattatagaattaacccataacctcctagttatggacttctcttccttaattagcctaacccgcatatcttgcccccactattcctacttctaccaagaacatatatgcatatacatt

SEQ ID NO: 153369 - DNA, 343 bp, Glycine max
gatcctctgagtcacctgcggctgcagcttcccaagttttaagttcttcctcacaactgtttctattcttatgttcccaaagtcctattaacagctttcgtttgcccatcggtttgtgggtgacaagtggttgaaaataacaatttattgccccacttgctccacaaagtcctccaaaaatgggttatgaacttataagtcctatcactaacaatgcttcttggcaaaccatggagtctcacaatcttctttgaaaacaaatcagccacatgggaagcatcatcaacttttttacatggaataaaatgagccattttagaaaacctatcaacaccacaaaaat

SEQ ID NO: 153370 - DNA, 394 bp, Glycine max
  unsure (1)..(394): unsure at all n locations
attagtgtttatctcttgtatcttagtgagagtgattctcctatattcttgagtgattcacgaacaccttggctgtatcaaaggactttcacaacctttgtgtgttgccctcgctggaaagagngatactttccttcctttcatcatcacccttgctctttgaaaccacaattccagaanatccacctctgcccagaattatctcgtggccataactcccattgtacgcactcaaattaagtgattcttgagcctaaattgaatttcataacgagacctttcacctcgttctggaatcacctcatttggagccctgtagcttcagctattgccatttctatatttgtgtacaggcaccacttaacctacgtgttaccattccattcgttcattt

SEQ ID NO: 153371 - DNA, 414 bp, Glycine max
  unsure (1)..(414): unsure at all n locations
ccatcatggatgcacgtctctacttggagtcatcactgtaccaccaatatagattccaaagccgnttcttccatccctcttggctacaaatgcaaccccacgtttccatgagcttttgttggcccanagagtgcttagtggacgcgaacgaagagttccacgctccaatggtggaccttggatggttcctaatgtgtgatgatgactatgccacaaaccgagccgttagtgcttagcgcaacgcgtgctacagccacgggtagttcctacagatcaaccatggcgttgatcacttttcatctaggaacattcgatcaaatggcccttcttttagacttctgatcgtaaaaactgattgctcgaatgactctacgtcagtctgcgaaattctcgtgccatgctgataagtctcct

SEQ ID NO: 153372 - DNA, 356 bp, Glycine max
  unsure (1)..(356): unsure at all n locations
aaacacattgcctaaaagttactatcaagcaaagaaaatattgtgtcccatgggtatggagtatcaaaagattcatgcttgcccgaatgattgcatattatacagacatcaatttcaagaaatgtcgaaatgccctaggtgtggggtatcacggtacaaactcaaggatgatgaggagtgtagtagtgatgaaaactcaaacaagggccccccagcgaaggtgttgtggtatcttccgatcattccaaggtttaagcgtatgtttgctaatggagacgacgcanaagaccttacatggcatgcaaatgagagaaactgtgatggaatgcttcgtcatccggctgattccttgcaat

SEQ ID NO: 153373 - DNA, 460 bp, Glycine max
  unsure (1)..(460): unsure at all n locations
ctgagttcttaaaagtaaacttcattttcttccctttcaaactgaattgtgatgtaaaattgaggcagaagcagnaactcagtttattgagtatacagagtagaaaatcaaacaagagagtttttgaagtattntaggagcactcccaacttgttggatgaatcatgcatgaaaatttgcacgctcctctgctctgtagaaatacaagggaaaaggagaatagagtgatgcacaaggtgtagtacctgaggcaaggtcggcgacacagaggtcttgaagaaggtcangatctgatgagatngcggtggctaagagctgagccaaagtcacgagaaagcaacaagttggcatcttcatggtatggttagccatcatatgatgagtggtaatgaaaataaaataaatcctatacactattactgtanggaggcagcagcaatagttgacaaatggaatgaaa

SEQ ID NO: 153374 - DNA, 478 bp, Glycine max
  unsure (1)..(478): unsure at all n locations
agcttataagaacaacattgccttaatcattttcattattcttgtgaattangacgcatcaacaagaatcaagccaaggctattgtgcaagcaatcaatggggcaaaacacaccaaatgattataatgatggatggctcaaattctcacaaaggtaaaatcatcactttcaaattgagctttcaaaactatcatgacatgtagagaagaatcaaggatttcaagtcacaaaatgtcaagaacttttattttcaaaacaattacccatttcttgaacatatcctgtaattcaaagaanaacatgcaaagtcgtacgtgcacatgaaattgacccaaaatattaaactaaaaatccgatgaaactaacaacattaacaaattaacacaactaacanattaacaaaaccaacanaactagcaaaaccaaagaacactcccncccatacttaaacaacacattgtcctcantgtagcacaat

SEQ ID NO: 153375 - DNA, 453 bp, Glycine max
  unsure (1)..(453): unsure at all n locations
tagctacacccncnctataatagctaagctcacccncatgacatttaacatganaatacaaaanaaagtccttactataaagactactcanaatgccccanaatacaaggctaaaaccctatactactagaatggccaaaatacaaggcccagacaaaggaaaaacttattctaatatttacaaagataagcgggctcatacttagcccatgggcttgaaatctaccctaaggctcatgagaagcctanggccttcccttgaatctctggcctaatctacttggagtcttctatccaatgcccttgcggngtaagattgcatcatcaagcttaaccaatgccatgttaaaaccactntntttaagtcacgtcaagaccctgtcactcctatatattcatgtgaacccaacatatagccatgagcatgntngtatcataaaatntaaatacaac

SEQ ID NO: 153376 - DNA, 409 bp, Glycine max
  unsure (1)..(409): unsure at all n locations
aagcgacgcagctgcagctcttagtaagttattaaacatttttttttagtttgttcctatatatttcagccaaatctatgacataagttattatattaccgaacttatagaatacacactttactaagttgtttaaccctaatacaccggaagtccttaaacatctttgaagagtatttacgtgaaagaaaaaaaaatagtaagtttatgtgctaactttcccatttatatagaagatgaaatgaacataccagcaatgttccctcgaggctgtgagtanggggtgttacagccagcgctattaagtatggaatctgcaccttatgcatatgcatggttacaaatacagtacttaacaattatctattggctaacatttaaaatactataattcaaagtaatcgctaca

SEQ ID NO: 153377 - DNA, 272 bp, Glycine max
gacgtcaaaccatatagttatccggggggtgtatattaagactacatcttataagaaaatgccttcaatatgtcttaaatatagacgaaggacaagttgtcttttgataccgtgttcttttgaaagagatttgctatattctcttaaagaatcttcttaataattatccaattcaagacaacgctcaatcaaattttaacgacttaaaactatagagttaaactaaatcaagggtagatataccttatctatttagagagaacacaatattt

SEQ ID NO: 153378 - DNA, 415 bp, Glycine max
  unsure (1)..(415): unsure at all n locations
agctntanaattngaattaaaacgttcagattctgtttgtaatcgattaccatatatgtgtaatcgattacacaaggcaaattttgaattcaaattttaatagctgttgtaaatcagttttggccactggtaatcgactacatcctctggtaatcgattaccagagagtaaatttcttgtaaaagactttntaacttaattttcttggccaaaccttttgttacttcaattggaattcccttcctatntaatatatcctttctaagactctatagactgtcttgatcatccatcttgaatatctttaattgctttgtcttgaataaagctntgagacgcatgtgatcttttggcatcatcaaaacatcggcttgatccttngtctacaatgcttagtttatgatccatgtttcat

SEQ ID NO: 153379 - DNA, 323 bp, Glycine max
gcgcgttatcgattaacgacgactttcgaatgaagaacgtcgaagaacgggtgatacctttgcgaaattcttcacggataacgttacggaaacattgcggaagcgcctcggcttagatttttttcacggaaacagtctttccaagcaaattctaaagacagagaagtgcctaaggggctgaaccctcttcttcttcacttcctcccctatttatagcataatacgggaggtgcttgtcgcccagctcgcccaggcgagccatgttgcttcctccagaagcaacagccttctggaggaatcttctggagggcccaagtgggcct

SEQ ID NO: 153380 - DNA, 432 bp, Glycine max
  unsure (1)..(432): unsure at all n locations
agcttggactcttgcaatttcttaaatctgttatcttaaaagtngngacttttgaaagaatcttcagaaacaagtcacttgaagaattgtgacttttggaaatgtatttttcgaaatcaatcactggtaatcgattaccattaaggtgtaatcgattaccattaaggtgtaatcgattacacatcaacagatgtgactcttcattnntgaatttgaaaattaaaacatttagaanaactggtaatcgattacgagtattgtgtaatagattacacaagttaaaaatgtttaaacacaagttgtaactcttgaaatttgaaatcttaacgttntaaaacactggtaatcgattactaccttctggtaagcgattaccagagagtaaaactctttggtaatgatnttgtgaanaactttgttgtgctactcaat

SEQ ID NO: 153381 - DNA, 285 bp, Glycine max
  unsure (1)..(285): unsure at all n locations
acataantatcgcacgctctaaattgacaacggaagctctcagacaatttaaatgctcataacttttaactcggaggtccgattcaggcggataatatatcgagacgctccaaattgaacaatggaagctcttgagcaattcaaatggtcataaatagtcactcggaggtccgattcatgcacataatttatcgagacgctctaaattgaacaacggaagctctcacaaaatctaaatgctcataacttttaactcggaggtccgattcaggcggataatatatc

SEQ ID NO: 153382 - DNA, 489 bp, Glycine max
cgaagccatcgtcaatatgccatggtggaagattctttctgtgtttattatgcatggtattcatctcttagaagaatatgaattcagagaagcttgaatttcttctagtgtacgggccttggtctctggtactaatcttgctacgaatagcacagcgaagccacatatgccagagaacatgaagagagttgctgcccaaacatacatatataaagtttattccatatatcaaataaggactcattacgtttgtattgttcttcactattttcttagaactgtgtctcaactattttttcttttatttttaccctcaggatcaaaattaaatgataacatacctgctgaactccaactcatgaggaagttaaaagcatatgatataattcatgaacacaaccagcttaccaaaatcacaaggctttcagcagaacccttcacgtcgatgggaaatatctggaatataaaatattaccattcatcatgctg

SEQ ID NO: 153383 - DNA, 385 bp, Glycine max
tgcagcttgagccaaatctgactaccataaaccttgtctattgtgagaatgtcaatccttaccctcggaagcaaaaaagagaagaaggaaaatttcccatctaagagaaagcgaaaagaaaagaaggaaaatttccaatctaagagaaagcgaaaagaaaagacaggaaattcccaatcaaagaatgggagaaagttaaaaaagaagaagaaaaaggaaggaaagaaagttcctgatcaaagagacagaagaaatgtgcagaaagatcttttgaccagacaatatctgaacaatacagaattgtcaccaaattaacaaaaggaaggaaaggaaaccatgacctaaagtggtcttcttcctttgataccaaccaaaatcctgtgcg

SEQ ID NO: 153384 - DNA, 445 bp, Glycine max
  unsure (1)..(445): unsure at all n locations
gtttataaaattcttgatcactttatgacatttcatcctacatgtttatatgaagaatgtcatagtgatcacctgttcactagaaagaatagaaatacaataggaaaaatgatatgggttccaaggggagacattgccaaatctaacattcaaggacccaaggaaatttgggtacctaaatcaaaattgtgatattgaattgaaggatcctttgaagcacagttggtacattgataatggatgttctaagcacatgactggagatgaatcanaatttacacacattactcccaagaatagtggacatgtgacatanttgcacaacaataaaggaaaaatttttggagttggtaatgtcggtaaagatccctctaccttaatagaaaatatattacttgttgattgtctcacacatagtctattaaagtgtagtcgattatgtaat

SEQ ID NO: 153385 - DNA, 257 bp, Glycine max
ctctgccagagatgtaagctttaataatgtaagtcttagtgatgtaaggcttcatgaatcgtgaataagggctttttagtttcatgtgaatttcagagatgatggagcttgagattaatgtaatttttatactcgttggctttttaatgtaatgtgatttaaaaaaaaacgtttggtcctgtcttgtttatcaattccccggagaaaattattacgctcttttttcatgcctccaacaactaacacctgtgcttatg

SEQ ID NO: 153386 - DNA, 418 bp, Glycine max
  unsure (1)..(418): unsure at all n locations
tcagtctgcggtgttatcactccgatcctcgaccagtctccgctggaccttttatatcgtntgtgcattgccatgaatccagaaccaaaaaaactttccttatactcaacatgaaagaaaagaaaacaaagcatgctattgctaagttactaacccggcatcgacgaaccccaatccaaacagtccaatggcaccacgagcgatagtngacttggaaaccctcagtgtgaaagagggtcccttactcttctcttgagactcattccttttagccaaagttgtcacaaacctccttccattttttctcacaggtacacaataagggaggcccaaaacgccacagctccttccactcacttccatttcctcttatccataagtactaacacctaacaataaacaagttaaattgggttga

SEQ ID NO: 153387 - DNA, 363 bp, Glycine max
  unsure (1)..(363): unsure at all n locations
gagagcaatgaaagaagaataccgcttttatgtaatgtggcattcacatagaattctgcaataagcgttagaaaatcaaggtttagctccttccaaaagtggttaataaatttgaagttaaacccatctgaacccgggcttttgtcgcttccacagttccacacagcacaccttatctttttttcattaaaaggctggaccatcatcttcctctgggtaggagacagaacattaaaatgaactccatccaagttgggtctattcagatgaggttcattgaatctattctgaaaatgctgcagaacttcagccttgatcaagtcaggattntctacccaagtaccatccattttcagccccctc

SEQ ID NO: 153388 - DNA, 441 bp, Glycine max
  unsure (1)..(441): unsure at all n locations
catgaagcaattagctcgcctgggcgagcatgttgcttctgaactaagccaccagctctcttgggcaagctgggtagcaagctcctcccttattttggctatgaaagggcgtgggaggctgaggggaaggggtcancacccttggtattcagatttcacttaaaattagtgaggagaagaagaaagaaggagaaaatcaaggttgaggcgcttctgtaacgcttccatgaccaagtccgtgaacattcttcgttcgttcttcatcattcgtcgatcttcaatcggntagttttcaatttcgaagctttgaattcattctatgcacccttatgggtcccattcttgcttgtatgttttcatcttcatcttggctactttcagtattctnntttttcggtntacgcgagtntcgaccgatccgttaagttgtaatctcactta

SEQ ID NO: 153389 - DNA, 473 bp, Glycine max
  unsure (1)..(473): unsure at all n locations
agctngatggaataaggattcaagaacacttggttatttcttgttaagaagaatggaaatggtgtctccttccctcatgatcagctcctgaaagagaggaagaatgaccaagttttgtgagcttttggagtttaaatgaaacttgtagaagaagcttagagcatggtccattggattcttgtgtaggatttagttaatgaccaaatttgacacattgaatgaccttgatcagctatgtgtggtgccatccaatacaaaatgtggtgtccttcacttttaaattttttttctcaaaaaggttaaagtagagtttcgtaaaaactgtgtattcttgctttataccaaaactagtaaattctatcctaaacaccttgattattgtgttaatcttcctanggatacacngtactagagtaaacctcatacagagctaaattacattgggccctcatgtgcatgcaatctgtacaaat

SEQ ID NO: 153390 - DNA, 325 bp, Glycine max
  unsure (1)..(325): unsure at all n locations
gtgacatcgacaatgttttcaatgaaatcattaatgcatgaatgaaattgatccaacgntgacatcttcctcttcgtgtttgtctattcaaatgatgatgcacaacgtttaactgaagaattgttattttgcaccgaatgtaatgcattcacatactcccagtaagacggatcgtgcttcgttgatctttattggttggtgaattgattcttttaagcccctcttggtttgacctttttaggaggaacacacatagaacttagatcagggtatggcgatttcccaaagttactctttaaagtcactttgccacatacatcaagct

SEQ ID NO: 153391 - DNA, 443 bp, Glycine max
  unsure (1)..(443): unsure at all n locations
gataagctttcaatagaatgaaaactattgttttcttacaaatttgtgtacatttattttataactaaaagagcataagtttggtgaaaccacgcgtactgatgcattattgattaaaaaatttaataaatatatctttgaatgaaaaaactgtattagaaatcataatagaaatatattgataatacttttaacaaaattattntaattccttaagtagtgtcttaagtatatttattaatatactcggtgtggtgtatatatatctttacacccttaaattcttcttttcaaccactaaacatcctttataacttccactattgtaatatccatattctaaaatatgatataatcaacaagtaatatggtgttatatatacatgtagatagataattcgagagggagcatataaagaatatttcgaatatattaatttcat

SEQ ID NO: 153392 - DNA, 399 bp, Glycine max
  unsure (1)..(399): unsure at all n locations
gcttgcaccccactagataacagatttgtttatgttgacaattanttttgaaggaccgganacaagaagcaacattcctcccacctctccacttggtaaaggtcatcggatcaagcgaccgtctgtgaagttaagtgattatgtgaccaacaccatgatcaagttgagcccatctacttgttcctccgcttcatcacatgattcacgtgtgcgttatcctatacctcacatgttaattgtgatagatgttcatatcagcatcgtcagtttcttgcagcagtaagtgcaggtcgagaaccgatgctattttcataggccgtacaatatgaacgctggcgagaagccatggcatgtgatattgatgcactaacaaattacggtacatggaccatctctacc

SEQ ID NO: 153393 - DNA, 506 bp, Glycine max
  unsure (1)..(506): unsure at all n locations
ggatcttaagtcacctgggctgcagctagaacagctcagaagtcaaattttcttcatttctatgatcatttctaccttacctattttccaatatggccttggtttgtgtgtttagattgccaccagagtcctaaatagacaatatctttcattacaagtttgcaacagtcccaaaacccaatttttgccgaaaccaagtgtcatgatttctatattaaccaatttgctagctgttgatgttgcatcatagttttgctatgtcatctacctttggtctcatctgtttaccttacaatttaggcaattctatcattagcctttttcaatatatagaattggcaacatgcaaacatatctaatccaagaaattccaccactaatagccagcctataatgcataaccaatgaagtcccccatctccaatntattccatcttcntaatttattgtagtttctgcagattaanataagcgnttggtctttgttcaacataatctattgttag

SEQ ID NO: 153394 - DNA, 217 bp, Glycine max
tcattcatgcattttgtgtgcaatgaagtaacgagatgtggccttaccttacaagatggtctctctcatcttcaatgcacagggatatattgtgttcaaacaaaaaccacgaatgcaatgccaccatttgacgctgcgtcatcaccattggccactaataatgtaaatggcgggaagaagaacagtcaagaacacaggggttttaggttcttctctc

SEQ ID NO: 153395 - DNA, 463 bp, Glycine max
  unsure (1)..(463): unsure at all n locations
caagcttgataatggaacttatgtcagttcatgttttattgttgcaggtactcttccttcttcctagcaggtagtggctcaatcatcttcttgttagctcgacacattgactttgctgtccagactgcttttgcaatcaggttagtcaacacaaatctttataaatgaattgaacttggttgttaggcctgaagatattgttaagaatattcaattaatactcttttaatgtttatgtgcccaccggagagtgtggaatacttgttccccggtttaataccaaatacaaaatgagcatgcaaactaatgtcactgcttgtgtttatgttagcttagtcaatttactgcaacccaagaagatgttggacattntagtgtaattgatctctntattatgttaaaataagagtgcacgcttgtttaatgaataacagatgttggtttagcacatttggaagtacat

SEQ ID NO: 153396 - DNA, 478 bp, Glycine max
  unsure (1)..(478): unsure at all n locations
ntaccgtagttgtgtactataatcacacaataagagtctactattttatttcatatngtgactntacgtagaatgatatgagcaccatactgtggctgaatagtaatcaacgcagttggagcatgagcatatgctggagaaagttcaaatgagaaatgctgcaaaatcattgacaaagccatctttgcttccaataaggaaaagttttgtccaatgcatattctatgaccccatccaaatggaaaaaatgaaaccctaccatttgttgcttttagaactccttcggaaaatctctcaggagtgaactgtntagcatcttcaccccagaattngcgatcatggtgaatcaaaattgttggaagtaaaacatgtactccagctggtaatgttagggttccaagtttcacatccttttcaatagatcgagtcattccagctaccggagggtataatctaagaacctcgtacaaaatcatag

SEQ ID NO: 153397 - DNA, 457 bp, Glycine max
tcttaagtcacctgcggcatgtcaagctttgagatagtttattcatgacgaattactaattttgtctgaagcttcttctttagaaatacgaaagctttgaacttgggtaacctccaatgcatgatacactggaattttcaaattattaataatccgagcatatgaaggaatattgtaccattttgaatttcttggtataattttaacattctgctgccaatgcttcccttgtttggttcaggattttaccattctgccgtcctgaacacacatgacgtgtgtggtgaaacagaaaccttatgggagttggcaaagaaaagctacacagcctttgtaaatgctatgaactgcaacaagcatttcacagacatgtctgacctgaactacctcatgtgcaaggctattgagaaacccggtttgacgccatcctcatcacataggacagccttgatctctg

SEQ ID NO: 153398 - DNA, 370 bp, Glycine max
  unsure (1)..(370): unsure at all n locations
acatggatatgctgcgcnattgttctctcgangccttctgttgacttctcgagatctgcgagagagtctacggcactttctctctatttctcgntctccatttgtgaataatgattccgcaattgaacactgattctacgaacatcaggtactctgttgattgactggaaatgccgcactgacacgtgaacttgatttgaaatttattctgttcaattcgaaatgaatctaactttgtattgttaggacttacgagttactgattggtgttggaattaacacgtagccttaactgcgaatgtatgttctgattgctgcttcaccacggatgcttggaatgaagagaattacagagngtacatggatggga

SEQ ID NO: 153399 - DNA, 313 bp, Glycine max
  unsure (1)..(313): unsure at all n locations
aataaaaagacccacctaaacttcacaaataaattaagggatcaaaatggacattttaaaataagagaatcaaaatagttattaaaccaaaacattaacaccacgaaaatagggttctgccatatactttagttgaaatatacaacaaaaacttgtaaaaatggttatggacatacagttttttaaataatcaaactatatattaatgaaataaattatcttttttattgctgaaattaaattaactacaatacaatttactctatatattagtagtagaattaagtatgatcgaaactatnctttatatata

SEQ ID NO: 153400 - DNA, 341 bp, Glycine max
tgttaaccatagtgtcgttccacagcacaatattgctgccagttattattttgataataatgtttataacactgggatagatcatagatgtatacatgaggacaacagacacggatcataacaaagggaaaggaagcaaagcaaaccaacaaaacaaaccttcaacacacaattcagatctataaaaacaaatgagtgcaacaacaaactaaccaacgtctggcttagtcacattcacactcaagtagcagattatacaagaaagtcctcttttttctctttttaacattcaattatatgcttcattatttacaaacatgcccccaataagaagctacctg

SEQ ID NO: 153401 - DNA, 422 bp, Glycine max
ttaagtcacctgcggcatgcaagcttctgtttcaattacgagcgtctccatatattattggcctcaatccgacatcggagtaaaaagttattgtcgttagaatgtgctcacagcttctgttctgaattttgagagtctcgatatactacggaacacaatcggacatctcagtaaaaagttattgtcgtttgaatttgctcagagcttctgttcttaattacgagagtctcgatatattacgggattcattcggacatccaagtaaaaagctattgcccgttgaatctgctcaaagcattcgttgtcaattacgagcgtctagatatattacgggattcattcggacatccgagtcaaaagctattggtcttttattttgctcacagcttctgtttcaatttcgagcatcttgatatattaca

SEQ ID NO: 153402 - DNA, 387 bp, Glycine max
  unsure (1)..(387): unsure at all n locations
ctcagctgctgcacggagttntccgactatgctcttgtgtggtggaacaagctaccaaaggagagagcaagaaatgaagagccaatggttgatacatggacggagatgaaaaagatcatgaggaagcggtatgtgccggctagttactcaatggacttgaaatttaagcttcaaaaactaacccaaggcaacaagggggttgaggagtatttcaaggaaatggatgtgctcatgattcaagcanatatcgaagaagatgaggaggtaactatggctcgatttcttaatggtttgactaatgatatccgtgatatttgtgagctgcangaagttgttgaaatggatgatttgcttcacaaagcaatccaagtggagcaacaattaaaa

SEQ ID NO: 153403 - DNA, 317 bp, Glycine max
  unsure (1)..(317): unsure at all n locations
gcttcgaagaaatgatgacgacattccctaagntgttagctcgaaagagcccgggtagtccaagagaaattcaagtccatacccatcaaagtctgaacagagtatgatgaactaagggacgtccatatcgccacagctgaagccttggaatgaagaggtgaaaggaatcatcaccggtcaaaggcatgatcttccaagaggtgacaggaatcatcacaggtcacaggcatgatcttgaaggacgagctaaaggtttgccttacgtcgaaaagaaatctgtctccacagttaaccgacactgaaggaaatgtgtgggc

SEQ ID NO: 153404 - DNA, 425 bp, Glycine max
agcttgagatcttgcaagaatttcttttccttataacaaacaacaaccatttgtctctatcttgcttcctctttctccccgtccaatcacccattatcctacattatcttcactattattagtcacatcatggttgtcaattttcaatcatcaaatcatgatatctttcaactcatattaaaattattaacacacagactaaaaaggatcttattatatttatccacacaccaatataatcacctctacactctactatattggtgcgtctgcattatcattttttcaagacaccaaggccaaataacacatagaagatgtgtctagagagtgtgagggaggcatttggacaaataagagagtctaattaatataataaaagacactgatcttcagctaggggaccaagaacaagatggaataaa

SEQ ID NO: 153405 - DNA, 445 bp, Glycine max
  unsure (1)..(445): unsure at all n locations
agctngacggagtcataagagatagtaatatgtggcctggcatgttattattcgncaatcatcaatcatctttgaatcatctatctttcaatctttacaacatcatctctcaacatctttcaatatctttctacagaattttctgattcatttctcttcatctntctaaaagttatttatcaacactttctcttccaagaaaaggtctttattcaaaaacttgtgttattcatctttgtcattctcttctccctttgccaaaagaacgaaggactaatcgcttgaattcttttgtgtctctcttctcccttacaaaagattcaaaggactaaccgcctgagaattcttttgattattcccttccccttaagcaaaagaatttaaggactaaccgcctgagatatnctntgtttcccttagaaagattaaaggactaacccgctga

SEQ ID NO: 153406 - DNA, 431 bp, Glycine max
aaactaagcttgcggattggtcttaccggcgaaatgataaagtttgtctatagttgcaaatccgaccatcttgtttggacaaaaaaaaaaaactggggctcgtgaacaggatgagaaggagggagaaacctatgttgtgactgccattcttatacgaccaagtgtgccaccaacccaacaatgtcattactcagccaataacaacccttctcattacccaccacccggtcatccataaaggccatccctaaaatcaaccacaaagcctacctaccgcacttgcaatgacaaacaccacctttagcacaaaccacaaacaccaaccaagaaatgatatttgcagcgagaaagcctgtagaattcaccccaattccggtgtcctatgctgacttgctcccatatctactcgataattcaatggtagccataac

SEQ ID NO: 153407 - DNA, 445 bp, Glycine max
  unsure (1)..(445): unsure at all n locations
ntgagcaaattcaaacgacaataactggagactcggattttcgattttgtcccgnagcatatcgagatgctcgtaattgaaaacagaagctctgagcaaattcaaacgacaataacttttgactcgggtgtccgattgtgtcctgtaatatatcgagatgctcgaaattgaaaactgaagctctgagaaaaatcaaacgacgataactttttactcggatgtccgattgaatcccgtgatatatcgagacactcgtaattgaaaatagaagctctgagcaaattcaaacgacaataacttttgactcggatgtccgattgtgtcctgtaatatatcgagacgctcgtaattggaaacagaagctcttagcaaattcaaacgacaataactgtttactcggatgtccgattgaagcccgtaatatatcgagacgctcggaattgaa

SEQ ID NO: 153408 - DNA, 469 bp, Glycine max
  unsure (1)..(469): unsure at all n locations
taagtaaactagcctaatacgtataatatatncaaaaatgttatattcttcgggtttatcttacatgtccaatatgaattaatattcattaataaaaacaaatgtttttttggcatatacgtagagaattcatgtatgactagttgacagcttcctagttcactcatttcagcctcgctccatggccaactctgacaaagattggtgatctcattggcactcaaagagatgttcctgccctgacgatacgggaactaatgcataggttcttatttaattatattccattttcttattttttgtctgacaatttcttatgtaaaccaacatctagaactttcatttattattctatcattttcattcgtttactatttcactgacaaaggctngcattcttgatgattattcaaagtgttttacaatntatattattgatagaatttaattaaaactagtaatattacta

SEQ ID NO: 153409 - DNA, 434 bp, Glycine max
aacattttgctactggttatcgattacaacaatctggtgatcgattaccagagagtaaaaactctctggtaaaaggtttttgagaaaaattaatgtgctacacacgatttgaaaaaactttttaatacttatcttgattgaatcttcttttgattcttgaatcttgagtcttgaatcttgatcttgattcttggaacttgaatcttgaaacttgattcttgattcttgaaatcaaatttccttttgatccttgaagggtttttgattcaatcttgaattcattctttgattcttgaagtcatcatctttgttaacatgaagtgttcttgactcttgagctttttgtctcatctttgtatcaatcaaactctttgaatcaatcttgagtcatcatgaagcttggttctcacaactaactaatttagtgaattaca

SEQ ID NO: 153410 - DNA, 468 bp, Glycine max
  unsure (1)..(468): unsure at all n locations
agcttgagctaagatgcccaccagtgttttacacagtgtgtacaatatctgccctcagctctgctgcaagttgctccagatcctgacaaataaatgcagtgattttttacaaacaaatcaacaaaaatcagagaaaataaaaagttttcacccgcagaaaagaaatatgctattgtcagtttcaaacctgtgttgacagattcttcatgtgaattgggtagttgattgtgtccaacaatagagttgctggtttctctcctgcataattgatcttncacccatctttctctttctttataatagttctctcctcatcagctgagccacttgctgaaactctcacacagaactgtcacaaacacaattacacatcattcatcattgcactattggtgaaaaatcatggtctttgtttttttagtaacaaaaggaagaacagtgaccgcttatgaaatcaaagaagaggaa

SEQ ID NO: 153411 - DNA, 392 bp, Glycine max
tgcttagccacaaacatgaaagcaataaaagaatttcatagtgtttgaaacacattacttgattagcgcacagtcgtgcttagcgagttcataaacattaaatcattcatcagaaaagatgaactcgcttagcgggacagggccggcttagcgagttcatctagaaatccagatattcatcaaaaagtgatgaactcacttagcgcattcatcgccatttccaaaaaaattggtgttggatcaagtggccttggaataattaagaaggggggggggtggaattaattattaatgaacctttactaataaaaaatctatccttcttaatgttactagatttaattacgcttttactataatgttgagaaagctaagaacagaaatagaaactt

SEQ ID NO: 153412 - DNA, 439 bp, Glycine max
  unsure (1)..(439): unsure at all n locations
agctctgctccttttgatttaatctctttatcttctcaatccgcgctgatacattgatacctgatttgcttaacactttactggtgaagatgtttctgcgccgtttatcataaaaacaaaatactgataattaagagggagagaaaactccatctattgctagagctattatatattatactctggcttaatatgtttattttggtatttctatcaaattacatggaggttctgataaaaaaacaattacatgtaggttatatacctgagcatatacatttcacagacatatacacaatatataatggacaaatctttaaccatttctgtcaatggttnttacttatacaataccttataaaatgccttacttttataaaataaaaaataaatgctttacaaataaatgtatctaaaatgcactcaaaccattacatta

SEQ ID NO: 153413 - DNA, 344 bp, Glycine max
aagaaaaaatcataaaacttggtaatgaaggcaaagtacatttttgcaagaaagaataacctgaatttttatatttataacattaaacttacctgattttgtaactttgaaacttcttgattcaaagcatcatttgtccttcttaaattgttgttaagacaaccaaagtatctaggactagcaagacgtgtagggctttgttttcttgtgtttgtaaatatgggccctgaattggtatgtggtggtggagttcgtggtggactagcaagaggtatagtagactttaaaacactttgagaagaactaagtgaacttggaaatgcaatgtctttcaattgtacatg

SEQ ID NO: 153414 - DNA, 376 bp, Glycine max
  unsure (1)..(376): unsure at all n locations
tcactattagnaaatatgcaagcatgccatttcttgttttttggagccccagacgnngnnncttctatgttatatatgtgtcttgcggaaaattaaacatttgattgcacccatgtttgcttgtcttttgtcaatgaacttgtcaatttgaaagaattgctttccgtgtgggggaaacatggagtgattttatggaaattggtggagttcatgtcaacatttcattggtgtacagtgatttcagccaactgcttttcataaattataatttaaaggacaaatataatacttctttacatctaanagtgattttctagctagtgattgattgtaattatatattgtgcacttaatattttccttacagttgagggtt

SEQ ID NO: 153415 - DNA, 385 bp, Glycine max
attccctatgggatggtgtctcctctcacctcttctccttcgtcttccgctgcatctccatggtggaaaattacacttaaaagacctcattgaagctcacagatccagcatccatagaagctccacaagcgaccttccatcacaaatgttgactccatcctacctagatggttcctataatatagcgtcacactcttaacgctaggaactgaaaatttccaagaatatctgtcaactgacacgatcaaacaaatcctctatagcaaaaccttctttctcagactatgaaagtcacccatttttaagaatgaaccaatcttcagagaagcattcttgcgctatattatgtgatagtgaaccctacagatcactctttggggtattg

SEQ ID NO: 153416 - DNA, 372 bp, Glycine max
  unsure (1)..(372): unsure at all n locations
tgggtcaaaaaatccattcgggtctgattggtttgngttatgcgggntnaaggactaaatcgcatattcattccttttgaattgattcaattcattccttgctttgttcaagatccttattcggagattcatcttcaagtgtagtgtgcttattttgaaaaccaatatcttcatttatgtgaatctcaccaattttggcttcacaaacgtgacaacaattcttgttgaattcatttttgaagcctttgtcacatagttgacttatgctcaaaagattatgcttaagtccatcaacacacaacacattntgtttatttgagtcttggattgatttccaatgtttccttcacccataattcttcccttattatt

SEQ ID NO: 153417 - DNA, 349 bp, Glycine max
gcttccacataaatgtcttgaccttcttttatcatgggtctctttgtggggcattgagaggcaatgtgacctctcccaagacatttgaagcatttaatgttgctagtcctttctttggaactagtattatgggtggatttctctatgggcctacccttatcttccttgggttttgaaggcgcagccctgaaaattccctgggcttggtccttccttggataagagtgagaaccataagattttgaacaaggctttctcttaagcgtgtgctccactcttatacaaaggtggattaactcatccagctccctatatggaaagagatcaaccctatccctcacttccatat

SEQ ID NO: 153418 - DNA, 467 bp, Glycine max
agcttcatgatgacgaatcaagagttttgttcttaacaaagatgatgacaacaagcccaaagaatgatttcaagattaagtcaacaagacgaaatcaagaatattcaagaatcaagagaagtttgattttaagactcaagaaaagatgaattcaagattcatgagaagaaatcaagaagacttcacaagggaagtattgaaaagatttttcaaaaaacaaacatagcacaattttgtttttcaaaagagtttttctcaaaattttctaagttaccagagttttactctctggtaatcggttactagtctcctgtaatcgattaccagtggcaaagtttgatttcaaaagttcttaactgaatttgcaacgttcaaactgatttcaaaatggtggtatcgattacaagatatgggacatcgattaccagtgtatctgaatgttgaaattcaaactcaattgtgaagag

SEQ ID NO: 153419 - DNA, 271 bp, Glycine max
ggacgagctcagaatcatatggactgttggctcttggaacctacaaccggatcgccatcggctattatataccagagactatatctatccgagcagaccgaggcaaaccatgctcaatggtcgatacgttttgccaccctatcagggagaacactggatgcccattgctatcatttagagacgctctagagtgggctcgtcaatcgccttggatgaggccgcctacattgagatgaatgagacctttgccagcatgctagtctatggaatg

SEQ ID NO: 153420 - DNA, 455 bp, Glycine max
aatatggcctcagcatatttcttatctccagaagggaattctatcaatagacctccaatctttaatggagagggttaccactactggaaaacccgaatgcaaatttttatcgaggcaatagatctaaatatctgggaagccatagaaatagggccttatatacccaccacagcagaaagagtttcaatagatggtagttcatcaagtgaaagcataaccatagaacaacctacacatagatggtctgaagaggatagaaaacgagtacaatacaacttaaaagccaaaaacataataacatctgccctacgaatggatgaatatttcagggtttcaaattgcaagagtgctaaagaaatgtgcgacactcttccattaacacatgaaggaactacagatgttaaaagatctaggataaatgcactaactcatgagtatgaactatctataatgaa

SEQ ID NO: 153421 - DNA, 463 bp, Glycine max
  unsure (1)..(463): unsure at all n locations
tagctacacatacctctctaatagcgaagcncaccctcttgagattatattctagagctnagctacacaccccctataatagctaagctcacccccatgagaaaaaacatgaaaataacaaaaaaagtccttattacaaagacaactcaaaatgccccgaaatacaaggctaaaaccctatactactagaatggccaaaatacaaggcctagacgaaggaaaaacctattctaatatttacaaagataagcgggctcatacttagcccatgggctcgaaatctaccctaaggctcatgagaaccctagggcctttccttggatctctagcccaatctacttggagtcttctagccaatgcccttgcggggtaggattgcatcacgagtngcttcaaggatttccttggtcttgtttttggatgcctgttccaagtctatgatgtgttgctcatactcaatcga

SEQ ID NO: 153422 - DNA, 363 bp, Glycine max
gccataaccgctggttgtttcctcaacctccatttttctgaggatacgacttaaatgcaacatgtgcctatcatggaggagttccgggacattccattgagccatgtatgatctcaaagcataaagtgcaaggtctaattgatgcgatctggctgaaatttgaggagaatcgcgtgtaaatcctgacattgacaagagatgccactcatggggcacatttgaaagctggtgttagatgtctcttatgactcatcatgatgttcaagtttataccaatattgtaaaccacacttacaatgcttaataatatggataaaatcgatatctttgtcccttatgccctcacaaactcatctttgctta

SEQ ID NO: 153423 - DNA, 416 bp, Glycine max
  unsure (1)..(416): unsure at all n locations
cgagacaaaccagcaggaggagagggaaattgtttgatttagctctccnaaaacaagaaaactataagcaggaaatcgaccacctaatgncaatgcagccacacatagtcactccatcgtctgaggagctgatttgtaatcattcaataagcttttcatatatatgatttatgcctgtttgtatcaaccacttcatctctgtcttcagtatgcatataacatagactgatgatgggagaagcaatgggaatattgcttttggctatttaatggaaactacttaatttgccaaactaaagttcatgattccagttttttctttcttctcgtagaatttgaggaaaacgaaatggtataaaaatattctctttagaaaaataagtgtagtaatcactttgtaataaacctatatttac

SEQ ID NO: 153424 - DNA, 235 bp, Glycine max
atttgacgcatcccctccgtcgataatgatgcaattgttcacgaacaattataaatcctacaagcgcattattggacacaatggaagatattcctcaaaaatggcatatgctatttagcggtgaaaaagtgatatttctcattgaatgaatcaccatgtatatagatcttactataacacgcacaataaaaatcactaacaaattcacgaatgacaggctgcactactggttttt

SEQ ID NO: 153425 - DNA, 261 bp, Glycine max
aaaataaacataaagggggagagttcgataccattgatacaagtcgtatacacaaaagacagactgattcaccgactaacaagcggcgcaaggaattgtctgcccacacccagcctatatgtatggctggcccacacctctgtcgacaagaaagaacgacctggctggtctctaccatgtcaccgcatgtcgtgcgagaatgtgaaacgcaaaagggaacaactcttgggtggaaggtaagggcatccgttaaatggcgcc

SEQ ID NO: 153426 - DNA, 227 bp, Glycine max
gaccagacgcagtgcaattttgaattcaatctaatactgagaaataatttggccctggtattaataccgagagtaatctcttgaaaagaccttttaacttaattcttggcaacctttgcacttattggaatccctccatttatgcatcctttaagacctaaactgcttggcatcactgaatatcttgtttcttgctgataaacttgaaacatgatcttggatataaa

SEQ ID NO: 153427 - DNA, 425 bp, Glycine max
tagcttgaacgtcaactagatgcctctgttaatcctgtaacccaactggccatgaatcaaaaatctgcgtctggcgccagactctgtggattatgctcctctgtccaccaccacacagacctttgcccttctgtgcaacaatctgaagcaattgaacagcctgaagcttatgctgcaagcatctacaacagacctcctcaacctcagcagcataatcagccccaatagaataactatgacctctccagcaacaggtacaatcccggatggaggaatcatcccaaccttagatggccgaaatcttcacaacaacaacaacggcagcagccttattttcaaaatgttgttggccaagcataccatacattccgtcaccaatccaacaacaacaacaacgactactatagtcccagatacagcaaaca

SEQ ID NO: 153428 - DNA, 454 bp, Glycine max
  unsure (1)..(454): unsure at all n locations
aagaatactaagctttaaaattaaattaaatttctaaagctattcaatcattttaaactnctgggaatcaattacataccttgtgtaattgattacaggcttttaaattcaaattcaaaatttgcaaattgtttcagaaatcaatttagccactcgtaatcgattacatcatctggtaatcgattactagagaggaaatatcatattttggaaaagataattgttcttaaaaaacttttataaaatatttcctttagccaaacctgtacatcaattgaggaattctntctaagatcctatcaactacatcgttcttcttgcatttctgaattcttgacttaaattgcgctcatctttggcatcatcaaaacttcatatcatatatgcttctacaaataatacatgtgtgtagaataaatgataaaattatttaaagtttaggcattgaattttt

SEQ ID NO: 153429 - DNA, 343 bp, Glycine max
tcctacacattgacctatttagaccaatcaggactgcattcctctttggatgcatatatggtctgggcatagcgaatgattaccgcagataggcatgggtcaggtgtttaacctcacaaggatgagtctattgacaccttttataaatccacaaaaaagaatcagaatgaaaaatgtatttatatctcttcacatcacaagtgatcacgggggatagcttgataaaaattatgaagagaatgatatgcctccctaatttttctctccaagaacaccacaacagaatatagttgttgggaggacaaatagatctcctcacaaaatgtctaggaccatgtgatgc

SEQ ID NO: 153430 - DNA, 310 bp, Glycine max
agggcccaaagaaacagacatacttggcaaggatgtgatacaacaagtatccggtctacacgaaatcacaagataacaagagtacaatgcaaaacaatggggttagtgtaagggtagaatctcaacactttgctactatacatgatgacaatccctaggtagcttccatgccttactgctagacgatgaatacgactaacttttatgtataaaacatgtgtaaattgtatcaaactactttaaattatggctattctgtagtgttgtaacaacctatggggaaaagaaagtaataaaatacctagcactt

SEQ ID NO: 153431 - DNA, 322 bp, Glycine max
  unsure (1)..(322): unsure at all n locations
ccataacccctgccagggttcctcaacctccatntttccgaggatacaactcaaacgcaacatgtgcatatcatggaggagttcttggacatttcattgagcattgtatggccctgaaatataaggtgcaaggtctaattgatgcgggctggttgaaatgtgaggagaaccgcttgttgaatcctaacattaacaagcgacaccacacatggggcaattctcaaagctgttgttagatgtctctaatgactcatcacgattttcaagtttatgccatcaatgtaaaccacaggtacaatgggtaaaattaacatctttgacc

SEQ ID NO: 153432 - DNA, 357 bp, Glycine max
  unsure (1)..(357): unsure at all n locations
agcttgtcatgagattggacatttaaatacatgttgcnatacngacaactactattgtgtcttggatgacgggaagagctgtaaacccactatatcgaggtgcatatttatcagaaattgcacagcaaaaagtcactctgctggttacatggcttttgaaatcataacaagaactggtgtggaccaacaatttcacttatacttcaccagaagaacaagaagctatattcctagctgcttgaggaaaggattggttttaaggcagacttcaaaaattctttttattctgngaagggaactttatgataaaggtagctataatcctttatgacttatgctttcatatcactatcgaca

SEQ ID NO: 153433 - DNA, 352 bp, Glycine max
  unsure (1)..(352): unsure at all n locations
agagcacacctagtnacaagcacatctccatttacagggatagcaacatcaacatcattgcaatcctctaatggtggcatttcatcatcacttgagctcttgctctccatgtctccattatccaaaaatatcatggctctgttatttggacattgagaagcaatatgttcaactccttgacacctaaaacattcgatatcacaagatctacaagatgaattaatttctattttacctctaggtgcagaaaatgattatctgaacatatcttcatcttttgactttgtcaaagattatttgtttcgccaatttgacttccatgaagaagcggaagaaaatttggaattactct

SEQ ID NO: 153434 - DNA, 475 bp, Glycine max
agcttccacaacatccaagcaaaacaacattcaaacagcacaagctatcacagccaagcaaaacagagcaaaggcagaaaactctgccaaaacaccaaccaaatcacagcttttctcacttaaagaccccagtaacaattccttcgttccggttcattaaccgttggatcgactcgaaaattttactggaagtctctagtgcataagactacattttgaccgttgggatctactaacaaacgtccagaactcattctgtactactctttccacagcctaccacacacaagcatttttctgcacaaagccaaaattctgctgcacctattttgacagcaaaattctgcataagtgcagatttcgaaaatcacacttcctctcatccaatcttgcccaaatcaattcctacaagtcccaaatcatgtatcaaccatgtctaacccaaaatcaagctctacagcacagcaacacagaa

SEQ ID NO: 153435 - DNA, 362 bp, Glycine max
  unsure (1)..(362): unsure at all n locations
tcaaaagcactgtctcgntaaaggacttctaaaggggtcttatcattatgattctcccgggaatctctcgaaggggaacacggtaaaaagtcttttaaagcccaaaatgttgtttccacttcttagcgctttagagctcctacaccttgagccttgttgaacaaaccacactgtgttcttttttgggtgaaatattggctgagtataatgtgccatttaaccacatgggacgtggttcaggttcctacctcacaaggttgaccttggatccttcttaaactttgcaaaaagattcaatgtgaataaagttattttcttgtgcaaacagatgatggaactcaatcaaccgcgaggagggtgtg

SEQ ID NO: 153436 - DNA, 461 bp, Glycine max
agcttgccgctggagctgacccattaactgtcctaactctcttagactggtgatccctaggctcttgatcttgactggatagaacctccttttaagtgaaggcttttgacttgatcccatgttttactaaagtgaaacaaaacccagtgcgaatcaaaacaccgacatctattatgggtggaatggatgaatgcatgaagaaatgcatatgatacagatgtaatttatgaatacgggggcccgggaaattgtctccttctttgatacaacgtcttggggtcgcaaagtgcccaacatatgtatataagaacgtgacacgaaccctctgttggtctgttaaagagaggggattaatacagaatccgtgcgtgatgcatatgcgaatggcgcaacacaggaatgtacatagtatgacaatatccacaaaatataagcataagggtacatgacacttatgcatg

SEQ ID NO: 153437 - DNA, 348 bp, Glycine max
  unsure (1)..(348): unsure at all n locations
tctagcacactccagatattttctcaacgattccaactgttaaatcatggtnaagcatcttgtgaaggtgcaaaccaaatttcgagaagatccaacggtttacgaatgctgggaagcgtttctaccgaggcagctccatgtagttttctctagaagcttcatttagaggcttccttcagaagcttcattaagaggcttctagcacactccagacatcttctcaaagatcccaacggtccgataatggaaaattgtcttgtggagttgcagaccaaattttgagaaaatccaacggttaacaaacgctgggcatcggttttaccganggcagctcatgtagctttctct

SEQ ID NO: 153438 - DNA, 419 bp, Glycine max
  unsure (1)..(419): unsure at all n locations
aaactaccnagccaatcttgggaacggtaggctttctgtattttttgtctagccgatnatgcagaagctgaattgctgcaacttccgctaagcggctccacatgttgctaagcggtagtgtgtttttatgtgaagtccagctaagcgaaccatgtctcactaagccgccagtacctttttcaggtttatttttcagcttttcaatttaaatagcttgggttctgattacctgcttggtccttttatatgcagatggcttctaggaaacacaagaccattggttcaagacccacaacacaatatgatacaaggagatttcactccttagattcttggaaccgatacacagattatgtcctgtggagaaacatcttttctgagaggaatgtggagctcttccacactgagcaagatgattt

SEQ ID NO: 153439 - DNA, 462 bp, Glycine max
  unsure (1)..(462): unsure at all n locations
agcttggaacaatagcctgaatgctgggttctctttggacttaancaaaatatcagctggctgatcattagaaccaataaactcagtgacaatctccttggacagaatcttttctcgaataaaatgacaatcaatctctatgtgcttagttctttcatgacaaactggatttgaggcaatatgaagagcactttgattatcacaatacaacttcatttgcaactcttcacaaaacttcaattcctacaaaacttgtttaatccacatgagctcacaactaaccatagccataaatcgatattcagcttcagcactggaccgagcgacaactgtctgtttctctgctttccaagatataagatttcctccaatgaagacacaataccctgatgtagaccatctattcatgcgacatgcaacccaagtagcatcacaatatcccgatagatgtgtattacccct

SEQ ID NO: 153440 - DNA, 428 bp, Glycine max
tcaagcctttaaacaagctatccaattatgctagcagttatgtatctctttaaacaaacaagtttcaaccatatcatgaacgaaggaaatcaacaaggtcacactatgagtgtttacaggtcacggttcaagagctctgaaagtgtctggatgatggagaatcagttctggatgagaggatataagatcatttaccataggcaaacacagagaccacattttcaaagagctagctctccggcgtagagaattattaccggtgaaatgagtggatctcctctcatgtgtgtgtgtatgtgtgtgcgcgcatgcgtgcgcatgtgcgtgtgtgtgtggatgtatgatgacataaggaaatagtcataagtgtcagtatggatacaagacataaatgtgttttgagagctcttctaatgagaatgtggagt

SEQ ID NO: 153441 - DNA, 247 bp, Glycine max
  unsure (1)..(247): unsure at all n locations
actagaaaagcacaaccggaccacnatactacgaattaacaagctagagaagcattntcttcctgccgagttcactcaattcactggtatttatatgacacaacaatatatgcaaggccaaaataccactaattggccaactgtgctaatactgacattagtggagcaacaaatctgttttgatcataagaaactttgtgagtggaatttacacaaattggtaaaataatattattgaatatcctaa

SEQ ID NO: 153442 - DNA, 267 bp, Glycine max
caatgatctggtgaggaagaatgtggcatttacctggggtgaaaaacaagagcaagcctttgctttgctcaaagaaaagcttattaaggcactcgttctaactattcctgactcttctaaaacttttgagctataatgtgatgcctctggagtgggagttggagctgtatagttacaaggagggcaccctattgcttattttggtgaaaaacttcatagaggcacccctaactaccccacctatgattaagagctttatgccttaat

SEQ ID NO: 153443 - DNA, 191 bp, Glycine max
gtataaaagggccggcgagaggcttggtcttactcgcaccatattaagcaagactgtaatatctcctgcttagtggaaaaattcacttatcaacttcgaatgatccattcataatatccgcgaatgcccatgcatatgaattgcattttacaagcaaatggctgaaactgtgtggaagaaaaacacctcac

SEQ ID NO: 153444 - DNA, 456 bp, Glycine max
  unsure (1)..(456): unsure at all n locations
actaagcttagagacgtatcgncattatgaaactaactttttatgtttttatttataaccaaaggtactcagggcttattatttactctattttttcattttataaaaaaactctattttactttctatcaaatgaataaataaaacattttttaaggacatatatctattttatttaccttaaaactattattttaattaataaaaatatttctctttatttggttaattacaaaaaactcattattttcttaaaattgtatgtattttaaataaaataatatttaatttattttatgataaataagatgttacaagagagcatgtgatgtcaacatgtattgaagaagtgaggagaaaatctcaaatctcacatgtcctttttaattggcgtgacgactcttaattggaggagcataaagtgagatttaacgtgtgagacaagtgatcttattc

SEQ ID NO: 153445 - DNA, 463 bp, Glycine max
  unsure (1)..(463): unsure at all n locations
nttccatganagnncatgggtgctctagggataacgtttttaactcaaagagaggaagaataggagattatctcacctagggccactcaacaactactaaaggaaggagaaatgagatctctttctgcacaataccaaagtttaaagttctctaatggtggtttcttggagaagagagaattgtaaagaaaagtgtgttaagagatagagtttcagcataaatgagggttttaaggagatatagtgctgaaaatatttttccttcctacacctaagtatttgcttaactcacaccattntcgcttaccatcacaaacctatctttctccatgcccaaactatctcaaaacttactaaacacatacaaatatgagccaagcactgccacacttatccgttattaattatatgcactcaaatataaatntaattactcttacaatttaattaaatcacttgaaca

SEQ ID NO: 153446 - DNA, 418 bp, Glycine max
agcttgagcattaaaaatgtggtttgcataccaataaaagtaccttttggatcttattgcatgctaacctaagtgacctctatagatggcagtgacgtcacctacactagtttacaaaaatgtaatgtatgaattgcatatatgccaacaaatacaaaaaatgcaggttgaaaatggtgcttaatggttattcttcattgttgagaagaattttttcatcattgaactctctgcatcatattatttgagatcttagagtctctttaaccttaaaggatttatcttgcctgtttcatggggctgtggaatgtgttatcgtgattcatggtttatttctttattagcctactttcttggtcatcttttaatttcttggtttttcagcttataaatatctcttttctttctggggatttta

SEQ ID NO: 153447 - DNA, 398 bp, Glycine max
tctatcatgtgtctacactatggttaagcacacactttttcttacaagttagaagacatgcagcagtgtttagaagcactaattttgaagctatgaatttctattatacttgaagattttcaaaatgaaactcaaagaagacaacaagtccttatcagaaatgagaaactagaagattgaagattgaaggtgcatttcactacaattaccacaacatatcaagaagacatcctgcatacaaatcttaaaaagacttcccattattcaaattcaaaaatcatgaggatccactaagaccataaaattaagcacacaatggatacatttcaaattgaaatgtgcaagttgtcaataacaattgagaaaaagcatagatgaagaaaccaactcatgaagag

SEQ ID NO: 153448 - DNA, 404 bp, Glycine max
  unsure (1)..(404): unsure at all n locations
agcttctaccatgccaaaacgaatgagactgagtatggatttaagaaaacaaagctagtcacagtgctctgggtcaaacacccacatcactacatgaaagagctgagagtatttcgggttttacaaaggaacgtaatctggaaattccgaccacgccaatgtgaccggtgttcagtgtaggttaccaaaataacatgcatttcatgaaaggataatgtttacaaaggtctctctctctaagggtnttcaaaggaagcataagacaagcaatggcagtttcaaagtcagaaaagatgccaagaccagatgaaactaacaagaaacattcttagaccatgattacctcgaagaaaacgaagatcgattatggtttcgtctctccgaaacgcagccaagaggaaatc

SEQ ID NO: 153449 - DNA, 473 bp, Glycine max
  unsure (1)..(473): unsure at all n locations
agctgtttgggcaattggcttgtatatacaatcatggccttcatcatgacctcattcatacatttcattctaaaattcagagattgatgcaaagactattactcaatgctagtcgttcactcacagtttaagatcacactctcaccgattatggttcaagcttttctttctcaatcaacctgtctactgactaacaattctaattacaaactcacattcttcttctttctttttctaacatacacactagctcaaacttatgaaaagaaacacagtcttcatcatgatcatgcattcaatcaaaaagcagtctataacacccatttcacacaaagataaatgtgtgtcactgtataatcatcatgatcaagtcaaagtgttctgtatgcttcanaacatgcatactaactattcacaaaaatggtatgtgtataactatacacaataacccataattactataaacaatgtac

SEQ ID NO: 153450 - DNA, 450 bp, Glycine max
ctcagatccctcttgttggactaggcttaacttatacaacattattatcatagcataataagaaaactaaaaccccacaatccacccctggtaatgcaattatttagccctgcttctatcaagttctaatgcaacgtacatttcccaatgctaaagtcacctaatagtacacacaagtgggtgatcaaaccaagagcatgcagtaattaagcactgaaagaagcattgaacacacaaaacacaattaattagaaatgaaaagtaattacatcaactgttcattagaaatccccaactagggtttttatccagccatacaaggaaccctaatacaagtgaggcaaaaaagtatagagcaattgttgcttgcacgggaagggggatccctcctcctcttcttggcacctcacaatcactcaaacactctaatctctcaaagtgatgaaccct

SEQ ID NO: 153451 - DNA, 295 bp, Glycine max
  unsure (1)..(295): unsure at all n locations
cgctcctgagtatgacaatcaccgntncaggagcgctgtacaccaataacgctccgaggccatcaacggatggtcatntctccgggagcgatgtgtccacctcatggatgacgagtatactaatttccaggaagagataggtcgccggcggtgggcatcactggttacccccactggcaagttcgatccagaagtagcccttgagttctatgccaatgcttggttaaccgaggagggcgtgcgtgacatgaagtcctgggtgatgagtcactggatcccgcgtgatccagatgct

SEQ ID NO: 153452 - DNA, 399 bp, Glycine max
tgttgtcttgtagagactatcaatgtcttctgccttgtacattgtatagactatcagaggcttttggcgtcaagactatcaaagtctcttttacgtttcaaagactgtaatgtcttttttcaagactatcaaagtcttctttacttttctaggactatcagagtcttttatcgagacttcaatgtctcttttatttttcaaaggctatcgaagccttttgtcgagacttcaatgtctcctttacattgcaagacttcaaggtcgtttgtttgaagtacctaatgcctcttacattcattcttttgacaggtttcactacttgggtgttcactagtggccggtcggatggaaagatcactatgatgaaatcagtgtccttatgtttacttaccttttcat

SEQ ID NO: 153453 - DNA, 273 bp, Glycine max
tatttacaagaccccctgtcctatcaatggtatctttctaacccaacgtgtgaaatctgtagacccatttcaggcacatctacccggacgcgatacggccctggattctggctggaacatcaattgcgccaatcttaatgggcttaacctctttaactagaatgagcaaggccaatttcacccgggtggcggatcttaataccgcttattgcagaaaacctgccctattacttgatttaagtctatgaatagaagcccaattaaatctgggaa

SEQ ID NO: 153454 - DNA, 311 bp, Glycine max
  unsure (1)..(311): unsure at all n locations
gagcatctcttttatcttagtgagagtgattctccttaatgctcgagagattcaagaacaccttgcctgtatcaaacgacttacacaacctttgagtgtcgccctcactggaaagagtgattcttttcttactctcatgatcaccctcgttctttcaaaccacaataccataaaattcacctctgaccagaattatctcgaggccataactcccattttacgcactccaatgaagtgattctcgagcctaaatngaatttccaaacgaaacctttcacctcgttcgggaatcacctcatatggagccctgt

SEQ ID NO: 153455 - DNA, 275 bp, Glycine max
ggaccctaagcacagagctgcagcttgtatcgagacgcggattttttttttgggactattaaactcatggatccattccatagctcggatcgataaatatgagaggttaaacacagaacaaagtctcttacttgataacgtcctttcgtactcctacatgaggatgcatgatgctcatatgaaaagatggagactaagatgcgacacacattacagcatgtataccaatgtgcctcaaaagagttggacatgtaaaagacaaaacttcttcaagc

SEQ ID NO: 153456 - DNA, 403 bp, Glycine max
tgataacacgcagagactaacgtcgtcttttgcggccttcgtcatattgcggccgacaagcccgttgacacgcagagatttatgtcatcttccgcgcttacaagatctgtaatactgacttttgagtcacgctgacggccggaaatacccgagtggttatccggataaactttctgttgtctgtaagacgaaaagcgtgatagcacgcagagactaacgtcgtcttctgcgaccttcgtcaatcgagcctgttgacacgtggagatttacgttatcttccgcgctcacaagatctgccatactgactatagagtcacgctgacgggcggaaatacccgaatggctatccgtataaactctttgctgtctgtgagactagaagcctgatagaacggttagacta

SEQ ID NO: 153457 - DNA, 229 bp, Glycine max
cacatcttgtgagacaaactacaccttggagtgaacacggtctggtctatatcatattgcttctgaaatacacttactcaataaacaaactatggtgacatataagagctcttgcgacaagtgtccggtggagatgatacaaaataccggctcggggcggtgatgctgatgaaactccgaaccaaaagcgctattctcttgaatggcaattcaaaggaactcgttgtga

SEQ ID NO: 153458 - DNA, 317 bp, Glycine max
ttcagaaaagatgaattcaagattcatgagaagaaatcaagaagacttcacaagggaagtattgaaaagatttttcaaaaaacaaacatagcacaattttgttcttcaaaagagtttttctcaaaattttctaagttaccagagttctactctctggtaatcggctactagtttcctgtaatcgattaccagtggcaaagtttgatttcaaaagtctttaactgaatttgcaacgttcaaactgatttcaaaatggtgtaatcattacaagatattggtaatcgattaccagtgtatctgaatggtgaaatttaaac

SEQ ID NO: 153459 - DNA, 445 bp, Glycine max
  unsure (1)..(445): unsure at all n locations
aacccaatgcttagtggaatttgaaccgctttttagggttttttcaaaattagntntgtctcaggggatgagctcagaagcatttggactgttggctcttggaacctccaaccggatcttcttcgtctctttcagcggagtgctgatttcaatccgagcaaagtgaggcaaaccatgcccaatgctggatacgttttcacaaccttccaatggaatattggaggcccattactcttagtgagattgcagctggggtaggcactccaattgcctttgatgaggccaccaagaataagaagtatggtcactttgccagaatcctggtggatatagtgttgctaaatatttgtgttttaatttaaaatttataaatatatattaattccatcttataaaataaaatatttattctagattttcttaagattttgtttaatgagtaact

SEQ ID NO: 153460 - DNA, 461 bp, Glycine max
  unsure (1)..(461): unsure at all n locations
tgtgattgacgtcctaagcatgtggaaatctagagaacttttntttagtctctatancaatgcggtaagcatgagctatgcatgttaagcctaacccaccaaaaaaaggatagtcataactattcttgagaatatttatatatgtttcttgggaattaaaaatttgaaggtttagtattaataaaactctcccaaatttttaattgtttatcacattaaatgatttaataagagtaaaatgatattttttatcgtagtaaaaaattttttccaactcaaaaaagtacgattcctatctcttataagaaaaaaattgagggacaaaatcaattactctnttcaaaagcctatccctggaataagagaaaataataacattgaccttgctccaacatagacaaaaaagcatgatactacccttgtttctcaatacgtgaacctctcacaacttgtgtcctttt

SEQ ID NO: 153461 - DNA, 309 bp, Glycine max
aacaaaatttctaactgagtcaagaaggtattttatattccaaatttcaagtaaaataaaaatttttgaactatcaaggatatatgatggctcatgggtgccacaaatatttcatgcttaacatttctatacatgaaaatattggtagcacataatggcttgagatctgttaagaacaaccaccgtgagctcatagcaggttgttatctttaagtaaacattgaacttatgctcttacctttgctacacaggtcaggagcggactgagcttgacacactaacctttttcttttgttctttattattgac

SEQ ID NO: 153462 - DNA, 317 bp, Glycine max
gaccttaaatctcaacctttggggggagcaaaagcacgcagagtatgttctttaatactctgacgacacgatattctttggagaagcatctatggctaaagtgaaaactgtgaaggttactctcaagagctttgagctggactctgtattgagaattaaatttgctaagagcaaatttggagctgtcggtcaatctgagagtggtctcttcatgctgcaaactacctcaattgtgctttgctccaatatcctttctactatttaggtattccgaatggagtcaatcccaaagaaaagtggcgtgggatcctataatt

SEQ ID NO: 153463 - DNA, 387 bp, Glycine max
  unsure (1)..(387): unsure at all n locations
atcgagacgctcgaaattcaaaataaacctctcagcaaaatgaaacgacaataactttntactcgaatgtccgaatgaatcccgcaatatatcgagacgctcgtaactgaaaacagaagctctgagcaaattcaaaagataataactttttactcgtacgtccgattgtatcctgtagtatatcgagaccctcgtaattgaaaccagaagcccgtagcatactcaaacggcaataaattnttactcggatgcccgaatgaatcccataatatatcgaggcgatcgtaatngaaaacagatgctatgagcaaattcaaacgacaataactctttactcggatgaataccgaatatattgagacgctcgtaattgaaacacaagctctg

SEQ ID NO: 153464 - DNA, 310 bp, Glycine max
ttttcaacgacgggaacgtgaaacgtgagacccttcgaaacccacggaacggtcgttacgtcggaaggcctgcgttattcctacggggcatttttcaagcaatccaagagaagaagtgctaagggctgggatcccttgatttcatcctccctattatgcaaattggaagtggtgcctctcatctgccagccactcattcgcccgacaagaggtattttctcaaagcaccgctttggggaattttggagggtcaagggcgtggcattcgcccccttttactagaacccccctggggtataggggatttttt

SEQ ID NO: 153465 - DNA, 333 bp, Glycine max
agcttcactttactgatgtagggagtgttttatatgttttcaaaggagaacaccatgcctaaaaattattatcacacacacaagatattgtgtccgatgggtgtggagtattacaaaatatatgcctgccttaatgattgcatattgtgccaacatgagtatgaagaaatgcatcaatgccccacgtgtgggttatcactgcacacagtgaaggataatgacaagtgttgcactgattaaagcgcacagaaaggcctcccaaccaaggcgcgatggtatcttctgatcattccaaggcgtataacgactgtctgcttatgaagatgatacaaa

SEQ ID NO: 153466 - DNA, 168 bp, Glycine max
aatgtccatttgtttttgtaccctggctgattgcaaatgtatttcgaccggaagtatagcatcatgcccataaatcaatcgaaatggggtggtattatttgattccctatgagaatatttcatgcgcatagaacatgatcaacgtttatttcatttcttgctgttggg

SEQ ID NO: 153467 - DNA, 478 bp, Glycine max
  unsure (1)..(478): unsure at all n locations
atccttaagtcacctgcggcatgcaagccttatgatgatgaatcaagnttattcttgtcgtttcgatgatgacaaaaagtccaagagtatgatttcaagattgagtcaacaagttcaagatcaagattaaatcaagattaatttcatgattcaatatatgacatcaagaagaatcaagattcaagagaagatgatttcacaagggaagtatcgaaaagaatttttcaaaaaccaaacatatcacagttttgtattacaagaaaagtctttctcaaaattctctaaggtactagagtttttactctctggtgatcgattaccagtgacacagtttgatctaaaagcttttaactgaatttgcagcgttcccattggatttttaatggtgtaatcgattacaacatattggtaatcggctaccagtgtatcttaacgtcgaaatcatatccattgtgagagcatatctttcaaaatgttt

SEQ ID NO: 153468 - DNA, 473 bp, Glycine max
agcttatgcgcatatttccctacgaacgtttacttgcacaagacatcctattaactaagaaaaatgcacccatatacaatcaaggtagcttcattacctagattatttacatgtacttccaaggtgtatttgttatttacatcacacacgcctccttggctaaatttacatacatgcatactcaaagcatttcggggtaccaaaaattgcacatgcgctcatcttggtatttctaatacctatacatatacaaacttcatgatgaatcttgactacctacgcaataaggtgctacatttcatgcttttttttttcaagtttttgctacctaaagccacatgcaaattcaagcatattttcctttgctgactaaaattgtattcaaattagaaggtatatcattttttgtaataatgtttcttcacataacatgcaacacatttatatatattctttgtgagacattttgacta

SEQ ID NO: 153469 - DNA, 443 bp, Glycine max
  unsure (1)..(443): unsure at all n locations
ntgagaactctntgtttagctgtcaaagatgtaaatgttacccaatgagaagccagtatccctgaagatagctattctctgatagccattgtgggaatcaaggatcctgtgcgccctgtggttagggaagctgttaaaacttgtttagctgctggaataactgtccgcatggtaaccggtgataacataaatacagctaaggctatagctagagaatgtggcattcttacagaggatggtgtggccatcgaaggaccccagtttcaggacttgtctatagagcaaatgaagagtattataccaagaattcaggttgtgatatcattgtaagtactgtgattntcaatagtcattcacgatgcctgtctttcttatgtgcttaacatggtttcaggttatggcgcgatccttacctcttgacaagcataccttggtaacccatt

SEQ ID NO: 153470 - DNA, 459 bp, Glycine max
  unsure (1)..(459): unsure at all n locations
agcttgtactttccaaacacattaagattagattaaagggagaagaagaaaacattagcaaatggttcctgttctcatgatgcctctgaagtaaaagaagtcgatatgtctcgtggcatttgcatacctatacttcttgaagccctgctcaagattagcaaatgtaagaaaagttcaagtaactagcatatatgatggtgtgacacataaacatttggtgcaaatttgtcacttgcctctagtcaaaattaacaaatgatttttctttcattcagcctgattttcttaaatgatccattttaactttcacaagcttgtttgttgaactttgnttatttggactatgtaatatgataataaaaaaggaagttgagtgagtttattattctgatctttgagcaccattctatagagtacattgcatacccaatgaactactacttcgtactacttgtgacc

SEQ ID NO: 153471 - DNA, 476 bp, Glycine max
  unsure (1)..(476): unsure at all n locations
actcaagcttgaaaaatgcctaggctgtgacaaactatagnngttatagtagtctaactnggngnnngaagagtcgcagcgagggcactttanggcttgttgctgctgctgaagaagatcttggcttggtttttccatgattcttcccataggggccttgtgatcatctatctgagataaacaagagaagaagaagataactgacgagagaaaaggaaaagaagaagatgtgaagaaagagaaagtgttttaagttggagttctagggtaaaaataacaacacagtgggagatattctcttccaaaaggaaagcaacaaaattggggtggacatgtatntgtctaataattaagagagaaagacgtgaacctgttgtgtctgtgtccatttgttagacgctgtttgaggggtgactggctaccatttctcacatttaccacccaaacatttttttgctctctctcaaatgaactcc

SEQ ID NO: 153472 - DNA, 192 bp, Glycine max
atgaggggaataacactcaacatactaaaaaatacccgcactaaccaacctaataggcagaaaactaaggaataaggacatcatatctatagaaaagaacgtctttcttattgaaaatgacatgggagaaaaaggtacaaacgatggtcacaatcaaacacaatcagacccaatccaaatgcgcacaaaaag

SEQ ID NO: 153473 - DNA, 366 bp, Glycine max
agcacgaaattgaaagaagaaagaaggggagaagctgttctgtgagttgtgtctcacaagactctgattcattaaagatacggcaagtgttacacattcttctatgtatagactatgcagctccctcgacaagctatattgagaaaacttggttgagaagcttctttgagataacttccttgcgaagctagagcttaactacggacgccgctgtcataactaatcgcaccttgttgagaagcttccttaagaagattgctagagaagctagaactcagctacacataccgatgtaatagctgaaggcacctccttgagatgagaagctagagcttagctacacacaccctataatagctaagctga

SEQ ID NO: 153474 - DNA, 363 bp, Glycine max
  unsure (1)..(363): unsure at all n locations
agcttcacataaattacttgagtacacaactaattctcttcaagcaagcatgaagttaagagaacttggcccccctttctctcttgaaaacgatgcaccaccccacgccattctaaggttagcggtgccttatagaatagggcttaatctcacttggattaaaggccaattaggttaagtgtccttattaaatatcaaaatccctattagagcttcatgacacttaatactagacgttgagcactctaaacaactaattctaaatctaactaaggctctttattaagtaaaatctctctttaataagtctcgaccataattaccaatatgcaattagtgagatgacanagccagaccaaactc

SEQ ID NO: 153475 - DNA, 388 bp, Glycine max
  unsure (1)..(388): unsure at all n locations
gaaactaagctggggtggncgggttgatgaggaaggatatatagaaggggtactaatgnactggtgaggatgatcctcaatagcatcaaatggttgtgactcaaaagattggcgaagaatggtgcagaaagaagccccactacttatgggtatcaaaatgaaatattgcatggcccaatggttgaggacacagacgtcggtggatttttgttttcaaggcctcaagtgtgaggccttgctttgtttcaaagaacaatgagttggggctttcaaaagtatccccttcatctactgtgattatttcaccatcgtagtgcattaaccatttgatatgatgaggaagacatattgtgtcatagacacagaatagagaaacaaatgtgataga

SEQ ID NO: 153476 - DNA, 226 bp, Glycine max
  unsure (1)..(226): unsure at all n locations
agcntgccctgccccttgaatattagagggatttcttgtcactatgaaagacaaataactcgcgataaaggtgaggcggcacgttttcaaaacccgcactaaggcgtacaaatcctcatcataaagcgaatagattaggggaggaccacctaacttttcactaaaataaacaaatggagggcgttcttgcatcaacacaacctccaccccaacatttgaagcatca

SEQ ID NO: 153477 - DNA, 447 bp, Glycine max
  unsure (1)..(447): unsure at all n locations
agcttctacttatgtggcanggggggcttccttcacccacttgtctccttttcttattttgaccactgnncntcctttccgcgatgcttcttttcatgtccgcctgaaggggcttatagcctaaaccatacttcccacgatttccttgggtatttatcaagctagttatgctgccgttgttttttcctaaaaccatctccggtttataatacgttccccaaataactctgggctttttatccctgtatatgaccacacaggggtcccaaaagagggagtccacgggagaaatgctgaccacctcaaaagactggaaagcagtttctaacgattcttctgcggctctcacataaggcatggaggatgggcagcttaccaagatatcttcctcgcctgacacgatgaccaagtgcccctccactacgaatatcaactcttggtggagtg

SEQ ID NO: 153478 - DNA, 355 bp, Glycine max
  unsure (1)..(355): unsure at all n locations
agctctttaattcattctatggacccttggtggttcacattntgattcatgtatttttattctcgttttcattcgctttttatacccccttttgacgtgcttaagccatttatttaagtcatttctcgcctaatctaaaaataaaataaatttccaccaatcgtttgaattgtatcatccgttaatttttgttaaaatgaattccgaccggtcggtcgtgccgtaaccacgttggaaatcaaaaaagaggtgaaataataattgaatatatattaaaaaaatacctcttattaaaataaagcgaaaaatcaatcggaccgtttctctttgggaattctcattcttaattgaattg

SEQ ID NO: 153479 - DNA, 316 bp, Glycine max
  unsure (1)..(316): unsure at all n locations
tgactgggctaacaattttatcattgttnttctaggattcaaaacttatgatctaggagagcattcattccccaaaattattaacaaaccacaacttagaactgtttacaacacccatttttttgctttgctactcttttcaacacattcatttcctttgatgatggttcaccccaccttttattcttataagaaaattaatatttttcttttttgcaaaacgaactacacattcatgctacgctggagtaaaaccatgttttgtgactcaatgtaacctgtgttgtctattcattttctaccataaaaaatcacc

SEQ ID NO: 153480 - DNA, 398 bp, Glycine max
  unsure (1)..(398): unsure at all n locations
ataccgcatggccacattactatcattttattttatttgttttatgaaagaaaaantcttttcaatatttcacttaacattttatacaaaagcaaaaactattgggacatgcctgttagatttcatccgatgtgggacttgggtatttcccaacaatgcataagtcacataggcaggatattctagtctctagacatcagttcctatcaaatgaatgacagaggaaacaaattaattgtttcattcacttacatcaaccaagtccaaatttgctactctatatttgtgtgcctaactagcgtgcgtccagacaagatagactaacagaatgattatgccaattgtgattgataacaaatacagcagcgacatccaaattgtagaggaatatgcatata

SEQ ID NO: 153481 - DNA, 431 bp, Glycine max
  unsure (1)..(431): unsure at all n locations
agcttctagagaaagctacatgcatttgtttctataaaaacgctgtccagccatcgttaaccgttggatcttctcaaaatttggtctgcaacttcacaagacacgtgttcatgatctgaccgttgggatctttgagaggatttatggagtgtgctagacgtctcttaatgaaacttttggaggaagcctcttaatgaagcttctagagaaagctacatgaagcttcctcggtaaaaacgcttcccagccttcgttaaccgttggatattttcgaaatttggtctgcaacttcacaaaacacttgttcatgatctgaccgttgggatctgtgagaggatatctggagtgtgttagaagcttccattcccaagagcatctcttatttaagcatttcagcctttgctttcgtgtagcttaggaanaacgtcatt

SEQ ID NO: 153482 - DNA, 399 bp, Glycine max
  unsure (1)..(399): unsure at all n locations
gtggtcttcggcattacatttaatctcgattcattggcgataagtacctttgtgacaacatgatccatacatctcaccgacacatgcagagccttgttgtgtcctcttccctcaatgggaatctcttcttccgcaaacgcgatgtaattgttggtggttatatgattaacgatgcctttgaaacccttcactgagatatcatgtgctacatgggcatcgttaaggaccttcatcaacagcgcacgatgaggctcggaagttatgagtagttcaagctaggagatccttgctggagtttattcanntgctcggctaactaaactcgcttggtggatgaagggaagactttgggcctcttcaaagcactggttttctttgatgctttttctttttgccctt

SEQ ID NO: 153483 - DNA, 369 bp, Glycine max
caccaccatacctaggagtgtctcgcctccttcatgttgacttcttcttctcgctagcatattcaccatctaagctttcttgctctctgtgctgaccatttaccttgaatctgcctattctgcatctgagaatcgcttcgtataagctcgagcatcgtgatcctcgcactcaagcatcgagacaacactgtgcttcttcttcttcaccaccttacctaggtatgtttcgtctaatcctgtataaaaattgattgcattcatgtatcgcacacttagtgaagtaaacatggctagggcatctcatattcaactcgagcatcattattgctttgcactcactacaaggaatacaactttaacgaataactg

SEQ ID NO: 153484 - DNA, 392 bp, Glycine max
aagtttgagcctagaggacccattaaagctcaatgtgtagctgactttatggcaaagcctcctcctaaattgagcagcagtgacaaaagcgattggtggatgctctatgttgatggagcctttaattccaaaggaagcagagcaggaatttccttttaagggcctagagacatctcacttgagcaatcattaaggattgatttcaaaacttctaacaatcaagttgagtatgaagctatgattgtagggttaaagttagtgaacgaaattggagtaaataaaattaggagcaaacatgactccaagctcggcactagacaagtgaatggagattttcagccaaaatactcaatgcagaacactatcatctacgagttgttgctcaaagcttt

SEQ ID NO: 153485 - DNA, 351 bp, Glycine max
  unsure (1)..(351): unsure at all n locations
gaagcttctctggggaagggagataatattgtttttcttctngaaccattgaaaaaagagctcgggtggtagcttactggaatgttgtcacctgcacatagatggagggctgcattatcgatccaggagagtggatccttaatatgagaaaacgactatatttatcccgatttttgcggatctttaagatggacaaatgctaaattgggatgatgaaacatgttgatgtgatgccactaccaaaagctacctggctttataatatccttggccagttggttcaagatactgttggggacctgacctatcaggtatttctgttctgctatgtgtggaagctctcccataaca

SEQ ID NO: 153486 - DNA, 479 bp, Glycine max
agcttgaagactacaatatctataagagttaaattcctatcttttgtgacaataaagctattattagtcttttgaaaaatccaacattgtgttctagagctaaacaaaaaaattaaacatcatttcataagagatcatgttcagaatgggacaatggacttatagtttatacctactgataacgaatgtcgaatcgttcaaaaaacaaatttactagagaattttgtagcacacgattaacctaggtcgaacttagaaatatgattcaatatggttcctacattcattcacttataaacataaagggggtttttgtcaaacagtttgtaagcaactctaaaagaatgtgaaaacacacataacagaattgtagaatgaacaaaacagaacaagaacagaatacaattcacgatgaaaggcgtcaatccaattcaccaaaccaatgcaaatagaattatcccaattactacaaatgatgg

SEQ ID NO: 153487 - DNA, 451 bp, Glycine max
tgccacccaactcgcccaggcgagctaggttgcttcctctagaatgcaccgccttcaaaaggaacttcctggaaggcccaagtgggcatggttgctatttgaaccccccctgtttactaaatacatccctgcctttttttgctgattcttttttcgtaaccttacggaactttacgaattccgtaacgatacttgttttccttccgtaatgttacggaaccttacggattaagtaatcatcccttttttggctttcgaaatgttacggaacctcacggattgtgtaacaatgctttcttcacggatcatgcaacaatgctttcttttgacttctggcaggttatggaacttcacgtatcgtgcaacaatgggtgccaagtacctcaactcggccaagcaaagggtgcatgcaatcaaacaatggtccccggacgaaattagggtatgacag

SEQ ID NO: 153488 - DNA, 233 bp, Glycine max
ctacgcgcgaggtagaatctacaagaagatgtattgtgcaggttcgctaatcgcaccgcttcatctatctaagcgcaccgcttcattacatctgcttaacgagaaaggtgcgctaacgcgaaaatcactaacctgtgcttagcggttcattcatgcgcctaacgcacgagcacaaacaggaccccctatttaaggttgaaatcatattctgtgaagagagtgtggactgggat

SEQ ID NO: 153489 - DNA, 456 bp, Glycine max
  unsure (1)..(456): unsure at all n locations
gcttgaaatggcatcgaagcgaagcctagcatatagtcttccaattttggaagaggggctgaagtagaagatgcaaagatgccacctattggtgcaaaggaagagggagcatcagctgctctgatcttggtcttccttgcctctagaaaattaactgtttggtcattcgcattccaacagttccttatgatataagctaagtcaatggctggccttatgttttcataggaggtaaaggcatcagatcccactcccctcgatctgcacaaggttgtgattaaagatgggaagcctaagcgagaagagttagattgagccaccatggtcatttgtccagagaacaaaccgccaatgtncgtgtccatccttgtgaattagccatagaccaacctatctatgttttgtagaagcaagcttcatgatgatgaatcaagttgattcaagtagttttaatga

SEQ ID NO: 153490 - DNA, 448 bp, Glycine max
  unsure (1)..(448): unsure at all n locations
tctacgcgtatttacgatgtctctcatgcgaagaagtgcatgcactattaaattttgggctcaagncgcacagaggcggtcccatctttcttttcacattcactgttacatgtcccgccgatttggaccgctttttgcgacaggtcgaccataggcatttatttcattggacgactaccaatatctccaatagcaaagctcacaaaggcaaacggtgggtttcttttattagaaaatacaatgtggttactcacactcatttggctagaatacatctgaaagtttatcatacaacatattctaggaacaagtagtgttgaaaactctgattaactaaaggtgccgtcactgcaacttttccaaatgctaatattagatcctcaagaactttaataactaataggacttattcggtttcaatagatcttttggcctatcaaactacctg

SEQ ID NO: 153491 - DNA, 399 bp, Glycine max
  unsure (1)..(399): unsure at all n locations
accactcgacccggatccttaagtcacctgcngcatgcaagcttgccaagaaggtggcggatctctacgcccacctgaaagagtcagagttcatgctggaggagtccgagctgcaggctgctatagatagggaggccaacaaggagcttgaggaggaactgctcattttcaaaaaaaaggcccgagagcacaatgaaaagggcttcaacaaggtcgtcaggtaggccaggttcttcgccaaggactctgacttgggtctctttgaccttttcaaggacatgaagggtggtgttttgcttgatgaggatgatattgttgctgaagaggaggtccacaaagagcactacggtgctgaaaagtaaggcgatgatgccactgtttangctgcctttcgattat

SEQ ID NO: 153492 - DNA, 213 bp, Glycine max
accttaaaactagctctcccaatgcttaatttgtggtttgattgttaaaggtcagccccttatgcacttctctctcttttgaatttgctaggaaaagttgtttccgtgaagaaaatccaatccgggacgcctcctaaacgtttcctgtacgtctctgagaggaatttctcgaagggatcgaccggtcttcggcgatctttattgttctttgaa

SEQ ID NO: 153493 - DNA, 474 bp, Glycine max
  unsure (1)..(474): unsure at all n locations
ttaagtcacctgcagctgcagcttatccttgatctgatgcatcttttcttgaagggaccaatcactagaaccatgagcaagaggctccaagaagattgtgctatagctgttgaagaaggccctatggttctcatgaaccttagggtagatttctgagcccatgggccaaggttgggtccaattatctttgtacatattagactaggatgtcattatatttggtccttgtatatagggctccatattgtaggtagggtaccctagaaatataggatntttcagcccttgtatttttgggcacctacactagttattgtattaggggtagttttgtaatttcacatgcactaagtggatatttgatgtgtgtggttggaaataacattaattgaatcggtagaagcccaattcaattaaatcttagagggggatgtgagcatttgcttactacaccccattgtcacattatatagt

SEQ ID NO: 153494 - DNA, 395 bp, Glycine max
agaaaatgagtggatcagattagaaaggatcccacaaaccacataaagaaaaaaagccccttggttgaaagcttatcatatgctatgaagttaagaaaccccgacactttaagttaaaatgtccagatcttgatagggcaaatcacaagaatagtacttctaacaaaaggacaagaaattacttatgagcataagggaaaaacttgatgacacatcgctcgatgtgaagacaaaagaggaagaagaagcccacctttattcgatggcagacacgacatcagaagaatcagactctgataagatgaagagctatatataaacaaccatgaaactcttgaagtagcatatgatgaacttctctccaactcatccattttgtccaagcttatcaaata

SEQ ID NO: 153495 - DNA, 409 bp, Glycine max
agtgaaatcaagagcgacgatctccttaagagtcctctcacgagggggcggttaagccgtgtgctcagtataaaaattagtaatggaaagctcaaattcagaatatccagaatcaccctccacagaatgctcagaatgcacagaatgaccaagatgcacactatgcctaactaatctacgaaaggttctatctatttcagaatcaaagggttctaaatcacctggatagcccctagtcatgcactatatgcagcatataatgtgtttctcaacaagcacctgacaagggggttaaactacaactatactcaaatgagatcgaaatcaactgaaatttcatgacgcgcaccctacaatcatgaaaagatagcacagaaattttgaaacaataattcaaaggctaactatg

SEQ ID NO: 153496 - DNA, 459 bp, Glycine max
  unsure (1)..(459): unsure at all n locations
agcttcttatccaaggcaattcttggtggtgaagctccttcttccttggcttattccctagtggatggtgcctcccctctcctcttctcctttgccttccgctgcatctccatggtgaaaaatcaccattgaaggacctcattgaagctcaaagatccagcctccatagaagctccacaagcaagcttccatcaagtggtaatcagagcacaagagcttcaagtaggtgctctttaaacctccatataattttttgctgtaccttctcttccattgggtttttcttcatatttctccatgtatctcctcacatgtcttgttctaaatgttgttaacatgattctttagaatttgcaccgattaaacttgctatagaagttagatttgcatttctatggttcaaatttcttgttctcgttcttgaaccatgaatngtgttgagattacggtcctttgagt

SEQ ID NO: 153497 - DNA, 399 bp, Glycine max
  unsure (1)..(399): unsure at all n locations
tntcaccatggcagaacaagccagacaggtgttttactttcaagatctgcgngactcaagatggttagtggttctacaatgaataacaagtggtatcaatcaccaaaatgatgcttcaacacttgatattaatgagacacatgttttctcccaacaaatgccttccataaatgcagaacatgaggatgatgatgtacatgcaaattgtaatgatcataatgaaggtttatgggagagtatcccgtcataactacggcataccaaagtaatgtatatcatatcacattaattgcaataaactttattaatgtcaatattttctattgcatacttatatgtaggttcaattgctatttctttaatgaattcgttttattagcacagagtcatggcaatacc

SEQ ID NO: 153498 - DNA, 448 bp, Glycine max
  unsure (1)..(448): unsure at all n locations
agcttctaaactntgtacaagaatgaagctctgataccacttgttagacaagtggcctcagatatcttaagaagggggggttgaattaagatattccaaactgtttcccctaattaaaaatctatttcactttntactcaagttatgaattcccttaatgacaatcttcttaaatattaattcaaacgaagcaacttgaatatgaatataaagcaataataaataaaagagattaagggaagagaaaatgcaaactcagttttatactggttcggccacacccttgtgcctacgtccagtccccaagcaacccgcttgagagttccactaacttgtaaattccttctacaagttctaaacacacaaggacaatccttcctttgtgtttagagatcctttaccacaagagactcacagtctcttaatcccttatagaatgagaagtaga

SEQ ID NO: 153499 - DNA, 354 bp, Glycine max
  unsure (1)..(354): unsure at all n locations
ntgcacttgatgatcctcacaggttcacaatatccattgtccgttctttggaagcctcgacgttgctctacaagcttgtcaaaacccagaacaaacacgtcctcggtccaaggctaaacaaacccaacgttcaccctaggtgagccctttctgttgagaagttccatctccacaagaaatcaaggtacgctaggtctgcctttggtgatcttttatattcctaacttttatctctacaagaatacaagtctatcaaaaacccaagtccattcttggtacaaaaacccaaggtccgcccttggtacgcactccttcaaaacccaagggttcacccttgtacctactcctacaaaa

SEQ ID NO: 153500 - DNA, 444 bp, Glycine max
  unsure (1)..(444): unsure at all n locations
tgcaagcttctatagaaggttcgctcctaatttctctacaattgcatcacctctcaatgagctagtgaagaagaatgtggcatttacctggggtgaaaaacaagagcaagcctttgctttgctcaaagaaaagcttactaaggcacctgttctagctcttcctgacttttctaaaacttttgagctagtatgtgatgtgatgagaatactgaaactggccaaatacaggctaaaggcccaagtggagaaggacgaacgcccaagtggagaaggataaagccctcgactggagaaggatgaaggcccanaggcagagacactatcaagactattaattgttgttgaggcccagnataatttgaagacccacgtanatatgtttttagtataattttattattgaatttggccacatgttaaaggccctgctattttatcttttgt

SEQ ID NO: 153501 - DNA, 413 bp, Glycine max
  unsure (1)..(413): unsure at all n locations
ggctcaccgaagcaatgttggcaacctgaggttgcattcttnttgcgaaaggatcttgatctggcagtgctcctgtccttcatttccttatgaatgcctgcaattttatgcctaaaaaacattaacaaacataacatgattagagatagactatgaacaagagcaaattccagcagccaccaaatagaatagcaaaaactaagctagtacctgatattactaagttgttgggtaagtcgctcagctccacgctagaaagtttcagagaatataaagttccaggcacctcttccgaaacaacctttgacaatttcttcactgaagatcctaatcttccaaaagcctgtgcaagaaacaaacagcaactgcttgaacattagtgttaggagcaaagagagaattcttagctttag

SEQ ID NO: 153502 - DNA, 143 bp, Glycine max
gagtcactaaggaacgggacaagtcttggaagaagaagggggaggtgagccactctagtttgcaatatattcgggaaaatgtcataaaggtaatttacgagcaacattgactaattgggaaacagaggggtgtgtataaatta

SEQ ID NO: 153503 - DNA, 431 bp, Glycine max
  unsure (1)..(431): unsure at all n locations
taagcttctacatgtcctagagattctagagagagaacgtgcaagctncctatatttntgagatttngntngcaaagacctgcgaagaaccgagcttgaagaggaagtcttcctgagagcatgagatgagtctgtgagtgattgtgaggttctagaggtggaggagacatcctcaccgcttgtatttcttcaatccttcatttttctcttctcttttgttgaaaggaagcttnccacttatggagagctaaatgctctcgtggttcttcctttaggtaatagatgtaagtacctatatatctatttaatgatgttttgtgtgttcagtgtgctatcagaacttcattctatcatgcctttgccttgatcacgtagatgcatatgttgttaggatcattcaacaatggaaactggtctgcatcttanaactt

SEQ ID NO: 153504 - DNA, 489 bp, Glycine max
  unsure (1)..(489): unsure at all n locations
agctttgatggaacaacaatgcttgaagatgacattatgtgggatatttatatgccacttctttatcctatgcaccacgaccatatgttaaaggagttatcaaatgattttatacttcttaatataatacatgatttatgtttttatagattgttttaaaaactttgtcctcttaacctaagtatttgttgcatatgatagaaaaatatacacgcacatgtattaaaaaaagatcgattgacttgagctgcaaatttaaaacatgacacttgattgcattttttggttcgtctgctatcttaatcttgcaaacttcatccttttattatctttacaaatttgatctctcactatnttaaacctatcggttacttaacaattaatattntacacaaatattgatgtacccgtataatcaaatgtcacattcatattacacatacgccagaatctgtataactaaataatacgcgtaaagcatatattata

SEQ ID NO: 153505 - DNA, 466 bp, Glycine max
  unsure (1)..(466): unsure at all n locations
tgtggccaagtagataccttaaagagcaagagggagaagaattatctcttattgaatgaaaatggcaacttccttctcttaacctattatctgagcagactgagcttcatcctagttaactagaaaggggatagataggaatggggtggggtcagattaataaatgatcctaaggaaaactaaaaattatatgatcattgagtagagatgagagaatgcatatttacattttgatcacagatcataaaatatcctgctctttaatctttcctanattattttgtttcaccttgtctgttactatgtacaagtagagtgaataaaccagaacacaatgcttatatctataattaagaaaatttggagtgacaagaagaggctgcattccaacatagacgtacaaaaaatgtacacaatatgtgtgaaattgaaattctagaaaccaaaaacatgtattttgggttac

SEQ ID NO: 153506 - DNA, 478 bp, Glycine max
  unsure (1)..(478): unsure at all n locations
agctntacaatcacttggattttatcgcctcanacaagttgaaggttactttctggtctttcacactcatctctaagttgtcactccccatgtccaccactcattntgcaataagcttaaatggtcagcccaatatcgaggggatattagaatcttcatctatgtccatgatcacaaagtccactagaaaggtgaattggcgaaccttaaccaagacatcttcaactacaccatatggttnggtaatggaatggtctgctagttgaagagtcattntggtaggagcaattctcagattcccaattctctgatacataaaanaggcattaaattgatgctagcccctagatcaataagtgctttacccactggcacatccncaatggagcatgggatggttacatttcctangtctttgaatttttgtggtagaatcctttggattacaacattgcaatttccttacaccatgatgctc

SEQ ID NO: 153507 - DNA, 354 bp, Glycine max
cgcctgaacctcacggcgtatttcgggcgtgaggcccgaaatgaagcaactcaagaggaattgcgcaggaagaccaacgattctgttggcttagtcctcgaagtcggacaaatattgagccaccgtgccggtctgcgtcaacttgaagagggagcccgtagggtcctcgtacgtggtggcggcaaatcgagtttgcaaggcgtggaggaaagagggccacgatgtcagttgaccattgctggtcatccactggaaccacgccagtgctcgacccttcattgtagaaggcaacaatggttagacgttcatgttctggggtcgcgtggtattgaaagtatttggtgattttgaaca

SEQ ID NO: 153508 - DNA, 454 bp, Glycine max
  unsure (1)..(454): unsure at all n locations
agctngtaagtgctaatgaatgtaggccatttatttaataaacatggaagagatagatacataaatattatttatatgaagacaatttattaaaaaagcttacttaattttgctaatgaatgtacgccatgaatataagcttaagctaacctatcaaattaactggatgtcaacgtcttagtatgtactttaaaaaaatatatattataaataaataaaatgataagaaaaattaaacaccaagagaaagtacctgtgggatagattgaagttccccatcccgtaaggagtaagaagagggatgacatgattcttttgttcagccatttttgtgtagaattctttggtttcctttcctatttctttctctgccttctccctagttgccctttcctttanttatttgattgggtaatgcagattcagttgtgtatttgtagtttatgcttataca

SEQ ID NO: 153509 - DNA, 319 bp, Glycine max
tgacccaacccgggcataattatcagtgagaacctgtgatttttcttaacaagcgagctcctggcagtcaaccaataaaagaacatagtccacatagcatggatacttgtgtggcggctggccagctatgtatcttggttgatatctggaattatgcctctgggaatcgactaccattcatgggtaatcaattccaggaataaaaatggagacaggatgttaaaaaggtctctggtaatcgattaccaatgggtgtaatcgattacactgagtgacacggcacctggtatcgattactaaatgcgcgtaatcggctaca

SEQ ID NO: 153510 - DNA, 428 bp, Glycine max
  unsure (1)..(428): unsure at all n locations
ctacatcaagaattcctggttgagtcttcttaatgggtgccttactggtttagccccatcttctaaatttattcgatgcatacatgtggatgggctaataccaagaatgtccgccagggtccaacctatagccttcttatgcttcttgagaatagataacaacttctcctcttgctcatcagcaagggagacatatataantactggaaaacttttgctatcatccaagtaagcatattttaaatctgatggcagaggcttcaattctggtgtgggcggctggatagtggtagaaagagatggcttctcaccctgtacctcataaagaaagtcagaggtatgtgtacttcctanaacatggttagttctatctgactctataaaatcaatctcaagaggtaaaacatcaccagacatgtaatcaatat

SEQ ID NO: 153511 - DNA, 413 bp, Glycine max
  unsure (1)..(413): unsure at all n locations
tctaaccactcctctgcggcctccacataaggcatagaggatgggcagcttaccaagatgtcttcctcgcctgatacgatgaccagatgtccttccactacgaatttcaactnttggtggagtgtagagggaacaactcccaccgagtggatccacgggcgccccaacaagcagctgtaagggggggctaatatccattatttggaaggtaactgacaggtgtgagggcctatctgtacagggaggccgatctctcgacgggtgccgtctaaggcacgaaccaccatggaactcggctttatgtgggaaacattgaatggtaatttcttccaagcgctcttgtgcatcacgtntaaactggaaccattatcgatgagcacctttgctacaacgtggtccatacacttgaccga

SEQ ID NO: 153512 - DNA, 404 bp, Glycine max
  unsure (1)..(404): unsure at all n locations
atccttcagtcacctgcggcatgcaagcttaaacattcaatntcgagcgtctcgatatattacgggactcaatcagacatccgagtaaaaagttattgtcgtttgaatttgctcagagcttcaacatttaatttcgagcgtctcgatatattacgagactatatcagacatctgagtaaaaagttattgtcgtttgaattcgctcagaggttcaacattcaatttcgagcgtctcgatatattacgggcctcaatcagacatccgagtaaaaagttattgtcgtttgaattggctcagagcttcaacattcaatttcgagcgtgtcgatatattacgggcgtcaatcagacatccgagtaaaaagttattgtcgtttgaattggctcagagcttcaacattcaa

SEQ ID NO: 153513 - DNA, 487 bp, Glycine max
  unsure (1)..(487): unsure at all n locations
actcagcttgagccattaatcgacataactttactcggatgtctgattgagtcccgtcatatatcgagacgctcgaaattgaatattgaagctctgagcaaattcaggcgacatattctttttactcggatgtctgattgagtcctgtaatataacgagacgctcgaaattgaatgttgaacttctgagcaatttcaaacgacaataactnttttctcggatgtttgattgagactcgtaatatatcgagacgctcgaaattgaatggtgatgctctgagccaattcaaaccacaataactttttgctcggatgtctgattgagtcccgcgatataacgcgacgctcaaaattgaatggtgaagctctgagctaattcaaacgacaataactntttactcggatgtctgatagaggcccgtatatatcgacacgctcgagattgaatgtgaactctgagcaattcnacgacataacttttactcgat

SEQ ID NO: 153514 - DNA, 441 bp, Glycine max
  unsure (1)..(441): unsure at all n locations
agcttatccttatggcttgcctccggacttcaccctccgtgtcaccccggaagaattaagccaagcccctacttttgaggggcaactcccaccttatgaagactatcccgggcaagacgatggggaaggagatacccatcttggccccctgctccaccacaaagatccatccccgcatgaactaccccagtcaaacatagtccgccatatcccggcctcacccacacccgtaaaagaatctgttccctttgcggaagataaggggaagattgaggcgcttgaagagaggttgagagcagtcgagggcctcgacaattacccattctcggatttagcggatctatgtcttgtgcccaacatcgtcatccctcccaagttcaaagtaccagactttgataagtacaaagggacgacatgtccaaaggagcatcntcggatgta

SEQ ID NO: 153515 - DNA, 486 bp, Glycine max
  unsure (1)..(486): unsure at all n locations
agaaactcagctgtggaaaaacagacaagaatcgtcaaccctcttttgtttcatccacataagtagagcccatanaaatagaataggtataatctgagaacagataactaaagttgaatgttgggttatctgatatatgagaaataaagtctaaataatatcattaagttgttcggtctagatgaatgaaaaaatagagttacataattgcgtaaatgtattattctacctttattatacttgtgcaggccaattgtaaatagtcgattaaattgatgaatttacatcactcgacgatcaattatagttaaagcaaatgaatttagcaccagtttcacacaacaacaatggcatagaaatatgacgacacaagcttcagacaacaacacatgaccactatataagaaataacaatatttatttagccataagcggccctttattctaatacatcctaactagcctaaaattaaactaaataaatta

SEQ ID NO: 153516 - DNA, 468 bp, Glycine max
  unsure (1)..(468): unsure at all n locations
agcttctgagttgagaacctagtacacgctaaactacaaatttacctgaagcccataattgctgaaatgacatttatccaaacagaaaacccatgacattaccaanaatgtcaaatgatgttctctagttgcaacccaaacactttaatttcttaactcagcaaacaggctataatttaaacaaaacaggaattttctttccacataaccttacatactaagaatgagttttcaacgtttagttctaccactaaagagtagttcatgctgagctgaaacttactgtcatagtacccccaccctgatatgatgacaagtccacaaattgtaacatatcccgttgataaggataatgacgtgttataaaatttaaatccaaaatacatatctttgaattcaggattgctttagtaacatttcgatctaccggcaatgtaacagtaattcacaccacagaggataatccaa

SEQ ID NO: 153517 - DNA, 452 bp, Glycine max
  unsure (1)..(452): unsure at all n locations
gcaccaatttagaacaactaactttctatttacaccccactttttactaagtacaccatataggctcattntacatcttaattactcattataccctttttacttaaaggaatacaccctatgaaatctctttacctttctgaaaatatctttctagaataatatatacttatcctgcaaatgtatttccaaaactatgatacatagttttggaaatgtatttctagaattatgtatcataattccataaatacatttctggaataggtatatgttattttagaaagacatttatggcagtaataaaatatctctcgatattattgacattgtaaatgcttatcctacaccctcatatttgttagttttatttccatcctatcattagtgttctttaaatcttatctaacatcttatattcacagtatttttattgttctttaaatacttat

SEQ ID NO: 153518 - DNA, 443 bp, Glycine max
  unsure (1)..(443): unsure at all n locations
agctggccacccagctcgttcaggcgagcagggttgcttcctccagaagcaacagccttctggaggaatcttctagagggcccaagtgggcctggttgctatttgcacccccatttttactaagtacacccctgccttttttttggtgattcttttttcgtaaagttacggaaacttacgaatttcgtaacgatacttgttttctttccgtaatgttacggaaccttgcggattacataatcatcccctttttgacttacggaatgttacggaacctcactaattgtgcaacgatgcttccattntgatttccggtgtgtcacggaaccttacggattgtgcatcaatactttcttttgatttccggcatatcccggaacttcacaaactgcctaatgatgggtaccaagcacctcacaaggaccaaacnaaaagtgcatgta

SEQ ID NO: 153519 - DNA, 465 bp, Glycine max
  unsure (1)..(465): unsure at all n locations
tataaaactcagcttgattgcactcagatcttgacatataactttctgaataatatgagtntatcnccatattttactccaaagtcaatgcgaatcaaatcactcccgcattttatctctagcatgcattcatatcatgcattgcataaacatttcttcatggcatcataatgaacatattgttcctgcatttgtccgttatcatatgtcggcatcacattttgcatgaatcattgtatcatcatgcatatgcgttcaacatactttttgttctacaaactgcataccttttgttttcatgtttgctcatgcatgatccttgcgttntcctctgggaaaaaaaaagtgtgaaaattcaccctacattcttggttgcatgtgttaggtaccatgagccaaccatgttgggatcataaactcgtttcacttataaacaanatgatngaacatggtacctaacgcatg

SEQ ID NO: 153520 - DNA, 375 bp, Glycine max
  unsure (1)..(375): unsure at all n locations
aagctttatagaaactacatgaagctgcctcggtagaaacgatgcccagccttcgttaaccggtggatcttctcgaaatttggtttgaaacttcacaagacactttaccatgatttaaccgttgggatctttgattaaatatctggagtatgctagaagcttccagtcccgagagcgtctcttatttaagcatttcagcctttgctttcttgtagcttaagaaaaatgccatttcttcttctttctttcttccaaatccatttctaaagttccaagtactttctccatcacccacatccaccattagccaccacaaaccatcattgttctccattgaanacccacaccgagaggaacccttcaatcgaagcagag

SEQ ID NO: 153521 - DNA, 406 bp, Glycine max
  unsure (1)..(406): unsure at all n locations
ctcagcttcatctttcaatctaaaagatatttctacctctagagtngtttaacttttacatttaaatatttttggtccttctagaaccatatgcattagagggaatcactatgctttgattattgtagatgattgctctagatatatctagactttattttatcttctttgagtaatgcttttaaagtctttcaaaaacttgccaagcttattcaaaatgaaaaggaattcaaaattaaaagtttgagaagtgaccacggaagagaatttcaaaatgactctgaattgttttgtgaacaaaatggcattaatcgtaacttttccgctccaagaacaccacaacaaaatgggattgtggngaggaaaaaaaagtcccttgaggaacttgttagtgtttagctctact

SEQ ID NO: 153522 - DNA, 246 bp, Glycine max
  unsure (1)..(246): unsure at all n locations
agcttgtctggggttgtgtatatggngcatgtttgtcttgatttcngtagatatggtgtgaacaaatggtaacaaagattctgttatttgtgttgcactacatggatgagattgaagtgtagtttgattatgaatgcaccagtccatgttatttgatgagattgacctgtaattcggtttaagaaaataaattcccgcaaccccctataagaactctcggattaagtagtgttatgaaacagattt

SEQ ID NO: 153523 - DNA, 418 bp, Glycine max
  unsure (1)..(418): unsure at all n locations
atcactatcaacactaattattgtattcatacttttatctatntaactactgatagaagatacgtggaatgaaatcacaatgaatcaagaaataatttaatctccatttcaaaatcgggaagagactaataatactactgtacattaacattattagggctgacaagctcccaagaaacctttctaagaaaaccttaagcttaatagtttaagcctttaaaaaaattgaatatttaaggctaaagatgtgcttaatggatctatgaattactaactcacttccagaatcacgatacatagcagtgaaaagtttgtcagaactctaaaccaatttctacagaatctactcagcagcttcaagaaagtgacaagtaaacatatttaataaaaccccacacacctctgcatgtagactata

SEQ ID NO: 153524 - DNA, 367 bp, Glycine max
  unsure (1)..(367): unsure at all n locations
acttacccgttgaagactgaagaacgatgaagaacgaatgaagaacatcgaagaacggtcgaaaaccttcgcgaaattcctcacagaaacgttacggaaacgtttcggaagcgcctcagcttggattntcttcacggaaacaatttttccaagcaaattcgaaagagagagaagtgcctaaggggctgaaccctttttcacttcactttctcccctatttatagaanattgggggagaagcttgcacccagctcgcccaggcgagcagggttgcttcctccagaagcaacagccttctggaggaatcttctggagggcccaagtgggcctggttgctatntgcacccccatntttactaagtacacc

SEQ ID NO: 153525 - DNA, 319 bp, Glycine max
  unsure (1)..(319): unsure at all n locations
ctcagctgctaattaccctcattattgacttcaagcttactgcatgcttctgttgttgnctataaaacttgttgtggactggattccagctagcaaccttgaaagtgcaactgcaaaagaggtaacatcaattatgaataattaattatattacaagcatgttttatttattatcgttcataatagcaatttcagcttcatttatatgttattgctcaatgttgcagaatcctgatgcttttaaagcagcatggaagttattaaagggatcatttacagacatgacatgaaccatttgttatattatcaatttccctca

SEQ ID NO: 153526 - DNA, 503 bp, Glycine max
  unsure (1)..(503): unsure at all n locations
tgcagcttgtagttacaaaatagagagattctaaagaattaaaaagcttccttttgtatttaatcattccattagattatgtaactactaccaactaactgtaattaaaataagtcttattctctttatatatattcctcatcctatatcactacttattttcttggtatttaatggttctaaagaataattgatcttgacaaatattatggaaaataagtgcttcaattctttcacaaattacgaaatgaaaatctggattttttttatgttncaacagcaacaccaaaggtaggaaccacgatataagggcagttccattcgatcttgatctcagaatttgcttacaaaaaccaactctgaaatgtatacatataatattaaagaacttgcagacatatcccacctagctgggaatactattgtattgtatatagaaaacatacacgtacagtgtagtcccacaaaagtctggacgtgttgcatgcgatcattaattggcg

SEQ ID NO: 153527 - DNA, 419 bp, Glycine max
  unsure (1)..(419): unsure at all n locations
gctncatcagatggtgcatttcaagatcgcttcctttatggaagaacttaattctcttgtgcattgnatatctggttaatagtcgtacaactattggcattgtgttccttcagagttagcagaatgtttcttggcttcaccatggactctgtcatatcagcaataagtgtcttttcagctttagtcaatcgccccgcatatggatgtccaactaatgacttggccaatttatgattatgcactccacaaatcaacttcaccatccagccttcttctccagccactggctggcaacgaagcttgaaggaacacccacatttnctagtcccaatgtctcttctgataaattctttnttcctacacttatactcgccactcctttcacaggcaattaacacaaacgtactccttgctctact

SEQ ID NO: 153528 - DNA, 487 bp, Glycine max
  unsure (1)..(487): unsure at all n locations
ggatccttaagtcacctgcngcatgcaagcttaagccacgcccttgcttttctcacttatgtttgtaattctagtattttcttcgccaattaattttcatttcttagtcttcggtaaggaagcttgccttgtgaagcaattgtgaaactagaggtgtgtataaccataagccaaaataataatttgtgagctggaaaaatatcgatggtaatgccttaattatttgttaatattcacgggactactaggtcttgtgtagtagtattnttttatgatgtcccttcgatatgtttaattggtaactgaaagcaataacatatgagaactaactcggtgcaattaattgaaataatggtgctggaatttgcaggtaaagcccatttaatggatcattgataaatgctgaanaatctgaaaaataaacatatgaactaacatnatgtagaagctattgtatgaagtgagtaaaacagaataatgtgtaatc

SEQ ID NO: 153529 - DNA, 419 bp, Glycine max
  unsure (1)..(419): unsure at all n locations
cacaactagctcatctcacacgcgctcatatgagaatatatgtaatattttactccttgatttcagccttgtattttggctatattactatgggatttgaaaaatttattatttccttatttgcatggtctggttgagcaagtatgttatttgactatgtggattttataagataattctgcttatgattggtgcttcatgatttttacttcatgatgtggctaatattttttatgaatgctggatgaatgtttaagatatatntgcatactttaagtttggtacgcactttgcctctttgttgatgccaaacggggagagaaatatggataaatcaagaactcacatgagtaatcaaattaaatttaagataagcatatattctaaacaaagagggagaatttatgtgagtgatcgac

SEQ ID NO: 153530 - DNA, 480 bp, Glycine max
  unsure (1)..(480): unsure at all n locations
agctntaccagaaagaatgaaagaatgattcacgtatatggttcatgtcttgtttcttcaaagcttcttctatatatagcctttgtctccaagtatctggtgtctctcaatggttggattctttactctattcttcgtctaaggtcttgagtccgctggggcatttaatgctagcattaaaagcacatcccttctttatgcaaagtccatgctgataggattgtgagtcttgtattttagcaaggaagtcccttctttcattatagtaggtctataacaacacaacatgctctttatgatgatcaatgttctccagaatgcgggcttcatttattcttcataggactttgatagatcctacgagaatattttatgcatgaataaaactcaaacataaagtattaaagcaaggtcttaaatgcactacttatatgctatattagattgtcttatgagtgcacttgatgaaaatgacaatac

SEQ ID NO: 153531 - DNA, 431 bp, Glycine max
  unsure (1)..(431): unsure at all n locations
ataaaactaagctcattttcagnttctctccttcaaccctagagagacgagtcgttttctcaacccaagggagtgctagcgtctgcaactcatattatgggcatctctgttattcttccacattaagagcacattacattttgatctttcacaaaagacacagacaaaagatcatttgcatagaaatatatatcattaaggagaagaaaaaaagccataggttattaattacataaaattaagcatatatagtatttgcctttgtgtccacgtatattatatgaatgttcttatataatttacttccacatgctaattactttacattagcagggcctatatgtctcctgagcaaaaggggcacgatgatattccagaaagtcaatatcatacaggagtgagacacttggccaaagaaagggcattttaat

SEQ ID NO: 153532 - DNA, 481 bp, Glycine max
  unsure (1)..(481): unsure at all n locations
tcacctgatgcatgcagctcataaagttatatggcttgaaacaagcaccgaggcagtggtacatgaagtttaatgagtttatgagcaactcaggattcaacagatgtgacatggaccattgttgctacgttgttgcaacctacccttcggcgggagggcgacacgtgactcgcgggatgcgtattccacganagggatacgcgcggagtcgccaccaacgtttatttgaggaaaacgtcagataaaccagaaaagacgcgatctacgaacttttaagtgaaaggctcgggagttgtatctatgcacggngaaggtattatcaccccacacgaccgtcacaagggacggcagcctttaatcgaatgtgcaaacatgaccttgatttttacgttccccttctatgtgcttatatcctntatacccttcttacatcttttctctttttgtgggcgacaagggtatttccctttgctcctacgta

SEQ ID NO: 153533 - DNA, 341 bp, Glycine max
  unsure (1)..(341): unsure at all n locations
tgataacacgcanagactaatggcctcttctgccccttcgacaatcgcggctttcataacccgntgacacgcggagatttacgtcatcttccgcgctcacaaaatctgccgtggtgacttttgagtcaagctgacaggcggaaatacccgagtggttatccgtataaactttttgctgtctgtaagatgaaaagcctgatagcacgcatagactaatgtctgtttctacgcccttcgtcaatcgcggccgacaagcccgttgactcgcggagatatacgtcatcttccgcgctcacaaaatctgtcatactgacttttgaacacgctgacgggcggaaaac

SEQ ID NO: 153534 - DNA, 410 bp, Glycine max
  unsure (1)..(410): unsure at all n locations
catcaagcttatatgcatgaatgtcataactagattcttatgggatgaaatgaatctcttttatttcctctacttaattacctcttcaactaatcaatgcatggatcccatttcttgagttttctctacactgttcagtttccactagggcttgcatttaactattcgttgcatgttttagacgaacaagtaattcgtggttcttaacaactctttggtctgttgtgtagcacaaagtagtgttaaaggtggatttacatgacgataggatgaagaaaaaagctatgaagatagcatctggcgttacaggtatatatcaaaatcttcactctactacnaactatgcgtaattgttccaagaaacaacatccatagcatacacatagtcaaggattcaatggttttctaac

SEQ ID NO: 153535 - DNA, 483 bp, Glycine max
  unsure (1)..(483): unsure at all n locations
tcaagctntcctggcatatcctctgagaaataccagcacaaggctttgntcttgtttatgataannnncttctatctggagaaattgaactcagttacgtactacggaattcacaacaactcaagcacattattcaatcaaccgagttagattctcttgatcttgcttatgaattatgattttaagaaaattaaaatcattaaaattcacaaaatctagtaagatgaaggaagattcaattatggactgtgagaacaaaggaaccncctttgtatttagctagaaccaacgtaagtccattagattaaaacaaggaagaaacttatatggaaatttttcaagctggtctcggaacagaatngaattntcatcttgagatccgaagctggcctttaatgtaaacacttataatgtaattatcanaatanacttanattctaatcagaacaacatctacaaagcaatacataggcactaaccatg

SEQ ID NO: 153536 - DNA, 438 bp, Glycine max
  unsure (1)..(438): unsure at all n locations
agcttgagattaaaaatgataatctcagcttaatgattataccggcgttgctaaagttgtagaaattacagcaacaaaacatgaaatttgggtaattgaagttagctaagaagtttccgtgtgttataccaatttttatttatttatttatgggtgcccctacctgtcataatttcttgattaactgcaagatactacttcaagtcttaaccatccggttaaattaaacattacttgttaaattacatttattcaagccaatntaacggaacttgcagtttatgatatctttgggtatcttaagtaagctntcggtgacttgtcatgtttgcatacttcggtgcttaaattctatagttttggttgaaatangaaatcagtacgagaatctctctgtatgaaaggatctgcaatgagagtgactgctccatggaaaat

SEQ ID NO: 153537 - DNA, 484 bp, Glycine max
  unsure (1)..(484): unsure at all n locations
nttgtcgatatcaagcgtnaatatcgtaccgaaagttactttttttgttaaaacaagaagtatcaattaaaaatttataacagtttaatataaagaaaacaatcttcacttgatcttgacaaaaatggttttgtagctcgatcgtgagcattttccttattcatgttacttgtaaatttttttactgtgaagcatcaagagtttgtggtgcaggtatacaaaccccacagtaaaattttctggctttttaatggtatttatgcattttccttaataatgttgaatttgtgtcatgttgataattaagagtggagatgagccgagcaacttgctgaggaccttcagctcggcctatgtaaagctcggcttgacttgtttactataaggtcaacctcaagctttttaaaaagtctttttagataataaggccaagctcanatcatacaaaaaactttgtaagctaactaataataataataataat

SEQ ID NO: 153538 - DNA, 382 bp, Glycine max
  unsure (1)..(382): unsure at all n locations
agctttgacacgatgggagtaaagaatgaagggattatcaatagacaatacgtcaaggctatgccaccataaatcattctcttttcctctcttgctccttcccttgtactcccattaacagcaaaggtagaacaagaatactcgaacttcaacatgaagccatgaaccatcgcagcacaagtgtagcaacaacaacgaagctttgcagcttttttggacgataattgcacagtgtgaacaacattctagatccgtgtgaaagtgaacaacattccaacaccaccgccttgtggcgcgagtttgatagaggcgcgatggcggcacaggttngacagaggacaaataacttcaaagagggatagggttaattttggaaagaaga

SEQ ID NO: 153539 - DNA, 446 bp, Glycine max
  unsure (1)..(446): unsure at all n locations
ttagttgggtctcttgagaatgacgagatgatgatgtgcaaatgttctgctgctggctactaaccaaccctctcaaatcacaactggaactcactatggagttgattgacctgcgaggtcctgatgcaatcctaagcattttaataaatggttcaatggaagcacaagaaaatgctctcagagccctcttcatattcacagaccccacaaatatcgagtcacagcatgtatttggtttaacgaggactatatcctctgcttgcaaattatctcaacacgggttcagtaacagcataggcaagagcagcagcattcactggcgatctttctatgagcactccagagctcacagatgtttccaatcaaccggttcactcgtgtgtgtgtttagaccatcttaagtcctttatgttancacatgggagtgatgcagtgtgagtccacat

SEQ ID NO: 153540 - DNA, 370 bp, Glycine max
agcttaagtctagtatatctattgcataacgcttgtgtttgactctcattgagttaacgattaaagatttggtgttattctctggagtgtgaacttgaataaatgtgaataatgtgtgtgattttgtgaagtgatgttgcttatgtaaattcaactctaagtattatatgtttcacatgctcgtgtgtgtgtgtgttcgtatctgagctgaatggtatttcgtttcaagtgaaccaacacatgatcaggtccatgctagagatggagaaacttacgtctttgcaagaaaatactctgataaatgtgacatccagtcatgaggttttacttcttatgttacaattccatgaataatataattgttatatat

SEQ ID NO: 153541 - DNA, 462 bp, Glycine max
  unsure (1)..(462): unsure at all n locations
tcctccacgttntcctccatacctagacttcagaccgtcgattctcactcgatnctncaccaaaccacgtcccgtaaagcccaaacttcctcttttacactcctctttcacttgcaccgatcaaaatccagaaaaacttcatcaaatggaagagccttcaaagaagataaagggatcatcctccaccgataccgctgttgcccatcgacgatatggtccatccggagcacccacaacacctattcctccttctttgtcatcttcaagatcatcaacattgttttcatccgatgatcaacgactacggtacctctctcagatttcttctagaatcatcttacaccctatgaacctataccgaaagttctttcatgatgaaacgcttgattgctatcagtgattctaaattctggacttgttgatctcattgcattcaaatttgcatattataccngaacttgt

SEQ ID NO: 153542 - DNA, 430 bp, Glycine max
  unsure (1)..(430): unsure at all n locations
agcttaaacacgctgacactaatataatttaatttatctacaactatatactttaaaattattgtttaatataaccatatatttcaaaattgtattttttaaaatatacttcaaaaaatcctttcatactcgctgatactagcttgtactagtggtatgcattgagcccctaaaagtggagggtggtcattatagccgttgggggggaagggggttctaaagaaaaggagagtttgatgtaattcttttacccaaagttcaaaaatgacaaaatggttcatcgactataccataacaaattagtcttgttgagtcaaaatctcatttgacaatctttcgtatcgacaaatgagtcatcgcatgtcacgttagtctgaatgttagagataacacatcacactaacgatangattaatatgtcaatattttt

SEQ ID NO: 153543 - DNA, 373 bp, Glycine max
  unsure (1)..(373): unsure at all n locations
gaattgagaggcggcatctagagatataatattttttctattcgggtatcttcatctaacccttgtttatgacaaatccattcatgtcgatggggttaaaaccagagatgtgtcttcacctaacctattgtcggttcatgaatccatggttatggctctgaatcttgatcttttatggcgtgcgcttgtgcatattttgtcattatcactacacaatttgttttactaactaccaaatatattaagttgcttgtctgagtagataggccctaacagggacaaattcatagggtgaggtttgctggccacccttgccacacatgttctcactttctttctttctctctnttttgtgactagaagtgatagaacg

SEQ ID NO: 153544 - DNA, 393 bp, Glycine max
  unsure (1)..(393): unsure at all n locations
agcttaagaggtatgacagngcttatggatgtttttcttgatagaagaaggtagaaggattgtttaagaaggagtgctcttttgatatcacctttggttgcaaaatgattctccttcttaataatcttcttggaggaatccttttcctctttttcattccccttggcctttgaagtgaaggacttactattcttcttttttctttggcgtttctaagttttccttctcatccctcttattatctttgggtttagaaggtgcagcccttaagatgtcttgaccttggtctttctttggataagagtgagagccataagattttgaagtaggctctctttttaagttgtgctctacccttatgcanagttggactangtcatctatgtccctata

SEQ ID NO: 153545 - DNA, 363 bp, Glycine max
  unsure (1)..(363): unsure at all n locations
caccatctctttgctctttggctcaccattgtcgcgtttagatacttnttttgctcattcttgctcaaatccgtgaggcattntatctatgaatatgtgcttcgatttgctgggatagagagttgtaggcaatggctttacgcctctagagtgttctgagatgaatgagcgtgccatattgcccccattcccttgctattcatgcttaaacatgcgcccaccaagtgctcggagaaatgactcaatggcatatgcagatgactttgtgacattctgcttgtagaaaagaattgatgtacattgcgctcgctctcgagtgtgtgagcagtttgacaggttacagtatgtgccataataagacct

SEQ ID NO: 153546 - DNA, 268 bp, Glycine max
  unsure (1)..(268): unsure at all n locations
agctntgcacaagacctatgggaagatttgggatctagctatgatagatgtttctattgaagccattgcagccctcactcagtattacgatcagccactaagatgctttatgtttggggactttcagttagtaccaaccgtggaggagtttgaagagatcttgggatgcctgctatgaggaagaaaaccatatcttttctctgggttctatccttccatggcgagaatagccaaggtagtcaaaatctcggtgcaagaattggaccga

SEQ ID NO: 153547 - DNA, 472 bp, Glycine max
  unsure (1)..(472): unsure at all n locations
ttagtgagggaattggatctacatctgttcaatgctatgaattatgagttggaggtggaactaggaatttcttcacattatggtctactcatcaagaagtgtatgtaggaggtggagaattggtgcaagggttgagctggtggggtgaacatgatgatgaattggagtcttcccaacaggaagaggagtacgagtttaagagtggtatagtgatggttgtggtgatatggagggtgagcttctttgtgggtacgagggtgaattggcgactctactataggaataagagcatgagtgggagaatgctattggtggcggtgatggtccgagcttattttcaacaaccaactatgaccgattgtatgcttgggtctcattctggtcattccaagctgattnttataactatgggcgatagcgctgtatctgcaacttatatattaaacaatactagatatatgctacgtttgtg

SEQ ID NO: 153548 - DNA, 370 bp, Glycine max
  unsure (1)..(370): unsure at all n locations
tgcgatgaatatatgcttcagctcaatgttgagtattacaatttatgtaattatattaacaacgcaaataggacagattatctgttatgcaataatgctaacggaaactacatattcttgtatttatggcccttaatataaatatatgctctggggtgtaattttacacagaattcatcacttgccattttctctcgttctcaacactcatttntaggttcatttcagtattcnctattntcctgataattgtttaatgtgcagtcaacttctatgatggagagttttatgaagcttgccaagtcatacactgacaaaaatttagagacttgtggaatccttgctgtgttgcttgtaagtgatcttcaca

SEQ ID NO: 153549 - DNA, 225 bp, Glycine max
tcgactggcggtgtggtggtggtgctctactgatcaacttgatctgcatgtatattttaaagctacggatcgagttgatccacagataaattacagatcaacttgatccgcaattttctacagatcaacctgattcgtaattcttttacggatcaacttgatccgtaacaattgacttgatccacagcttttatatctacatgcggatcaagttgaaccataaag

SEQ ID NO: 153550 - DNA, 473 bp, Glycine max
  unsure (1)..(473): unsure at all n locations
agcttcaacatcagaccacttccagggtgctggaactacttcacatggacttgatggggcctatgcaagttgaaagccttggaggaaaaaggtatgcctatgttgttgtggatgatttctccagatttacctgngtcaactntatcagagaaaaatcagacacctttgaagtattcaaggagttgagcctaagacttcaaagagaaaaagactgtgtcatcaagagaatcaggagtgaccatggcagagagtttgaaaacagcaggtttactgaattctgcacatctgaaggcatcactcatgagttctctgcagccattacaccacaacaaaatggcatagttgaaaggaaaaacaggacctctgcagaggctgctagggtcatgcttcatgccaaagaacttccctataatctctgggctgaagccatgaacacagcatgctacatccacaacagagtcacactgagaaga

SEQ ID NO: 153551 - DNA, 396 bp, Glycine max
  unsure (1)..(396): unsure at all n locations
gtcttctcgccaatttatctgtggttccaactcaaggtttttgttttgttcttttttttttaagaaaacaattatactttggcttggagagggtagcaagggataaattaatgtttgggatgaagaagcacggccatgtgtcattttaaatcttgactagagactcttatattttggattntgggacaaaacctctgataacacgctcctgattggtttttctctttctttattattattaccctaactnttgcctaggccgcccttttgggatttcaacctactgggtgaagacttcttatctgaccctaggtatgcttgaagctcatgcatggtgtctgtcattgccctaatgtanggctcacaggtatctgttgctgttggttgtcacatctt

SEQ ID NO: 153552 - DNA, 384 bp, Glycine max
  unsure (1)..(384): unsure at all n locations
agcttctttgttagacctcgatcggtcatctttccatgccgaggtcgaccgtcatttttttcgatccatttcggtgaatgaatattttttgccgagatgggctaatgttttcctggccgaataaatgggaaaatgccagtttcggccgaaacgaatagtcggttgggctcgcacaaaanaacctagccgacctacattntaaattttttatgcaacaccaaaacaagaatacttcctgtgccgttaaaaaaaaaaaaacattacatgacaccgagcgttttgaaaacaaaattgcccaacgtcggctgaagaatatcagtcggggctctttcacgaccgattgtcgctattgagttttcaattcaatccgtggacggaatttgc

SEQ ID NO: 153553 - DNA, 454 bp, Glycine max
  unsure (1)..(454): unsure at all n locations
tactcagcttgcctgcccctngtatattngagggactcaggtcactatgaatgacaaantccttgggataaaggtagtgttgccatgttttcaaagcccgtactaaggcatacaactccttatcataagttgaataattaagggtaggaccacttaacttttcactaaaataaacacatggatggccttcttgcatcaacacagccccaatctcaacatttgaagcatcacactcaatttcaaaaaaattttgaaagtttggcaacgcaagtatgggggcattaattagcttttgttaagaacattgaaagcttcttcttgnttctctccccatttgaaaccagcatttttcttgagcacttcattgagaggtgctaccaatgtgctaaaatccttcacaaatcgtctattaaaacttgctaagccatgataactcctcaccttcgtcacggac

SEQ ID NO: 153554 - DNA, 485 bp, Glycine max
  unsure (1)..(485): unsure at all n locations
agcttatctgtaatagagttagagaatgactgagatatgagatctgacagagtanaagccacgaaagcacacaataggaccttgaagaaatacagtgattacgataaatggatctagatatgtattttgataaactgagagaaaaatagagaagaaaaaggaggagaataaagctgattctattgatctgaaaagttcgttataggtagttacaatccaggtatttatagacctctatcctggattactaactaacatgaaatgggtgctgttagcaaaagctaacaacccttacagacataataaaaaactggttttatagttatacattgacatatactaatacacatcatccaccaaatcatcacttaattatgttctgtaatttgtaggaattgaggaatcactgtcttagtgctaacagtttcttgtttctcatctgaaaatgaggcaaataacttgtatgttttgtggttcttcagttt

SEQ ID NO: 153555 - DNA, 443 bp, Glycine max
  unsure (1)..(443): unsure at all n locations
taactgcctaggcccaccatatattngaagcagtgcagagccatatctattatatacaagttacagtcctagaatagaatcattactaatttagatatgcattgtgtagtgcaaagctcaattatttcacatatgcattgtgtaatgcaaaggtagcatgctgacctttatgaatgggacaagaggaagatgaacagaagttggataacaaccaggattagcaactagacgtgcattctttaatttctctgttaaaacctctgtcaatccgtatatagctttttttagataacaatatatacatttcaatgtattcaaaattactacttatgttcgtcacctacacactttgcgatctattggttgtaggtaatactttctgaaaagcattagaagttaacgcacatttatcttcttgatgctttagtgaagatacattcata

SEQ ID NO: 153556 - DNA, 407 bp, Glycine max
  unsure (1)..(407): unsure at all n locations
agcttgaagagttcccttctaattggctangttatgggatcgcggncggacactaagctcttgnggaaaccatgaagtttacagatggtatcaaggaacagagaaaccaccttatacgtcgtaaattgtgggggtatggcaccgagatatacgccctcagaaaattgatcgacgataaccagaatgacggtgtaaccttatgagctggggaggtgcgtgatgaaatccaatgataaaatcctcccggataccactcggaattggaagtggttgcaatagctctgctggtttgcgggtgatgtgtttgatttgctggcaagtctgcacctcttgatgaatgatttcacatcatgttgtatatggtcccaagtaaaacttgcctggagatgatgaatggtcttggcaca

SEQ ID NO: 153557 - DNA, 498 bp, Glycine max
  unsure (1)..(498): unsure at all n locations
ctaagcttgtaagcaaaagnacctatgngntcagactgcgaacggtccatattagcgttnggcgagttcggatgagttaggtcccatgatagatgactaacggtgggcacaaagtttgactatgacccagtctccttctgtataatagatttctcggcgatacttattagcgaagtgtttcatttgagcttgagcctttaacaaatttntgcgcaaactctcataaacagtgtccccttgttgtgagtagcgtatcaactggcttcactgtagaagaacccgagaggtattgcattattgtcaggggtttcttgccatatgtgatctccaaaagtgtctgtccanngcttccatttctgtgaagattatatgaccactccacccaacgtaagaactcgccccacgaagatggatgatgatgaacaaaagcacgcaaatattgttcaatgatgcgattcatgaatttagtcctgtccgttggattgtggatgatatgcc

SEQ ID NO: 153558 - DNA, 470 bp, Glycine max
  unsure (1)..(470): unsure at all n locations
agcttctctactntcattctatcaaccgccactttctgcctgaccatctgttgccattgatgctctgcactgtccaccattgttaccacgagatcccctatgacaacggcatcatcctgctcggngacgccgccgtcgcgcaacagattcatccgcgttggatttgggttctcttcgctactgagactcagctttgctctgttcgtcatagacgtcaacgcccgcaaccacatccaccaccaccttcgaagccaccgtcttcaccatcatctgcgncacccgtctataacaccttccttgattgctccatggtgcggggcataaacacaatcctttccttggcgaattcaatccatggcacgggtcacacacaccacttattcatttagacattattggtaggccgaaaccaacccacaaagaaagtaactcattacatacctttgtttctaacctaccctgttagcttg

SEQ ID NO: 153559 - DNA, 465 bp, Glycine max
  unsure (1)..(465): unsure at all n locations
ctttctggatcctggttgtttgacaccgagtgagagtgactgaaggtgattcanaggaagactgcttgaacttattcaagcgcgattcatgagccaataanaacgcatcatctggatcaataggctggggttcaaatattctatcaatgattgcaatgattagatgataatctggcaaaagaccttcaagaatagaatcaatatgctcttgaagcttaatcgggcttctaatggaagcaagagaatcataaattgctcgaatctgtgacagaaattcacgcattgatttgcctgcaagtgtcgcatcacaaagctgagtggaaaggtgatgagctacgactattgtttgcttgcggaaataatcatgaatgcgttcccaaacctcataggagtgggtgcatcctagaactcgcgattaaatggatgtagagagagtccattgaagccatgtgaggagcacttgat

SEQ ID NO: 153560 - DNA, 418 bp, Glycine max
  unsure (1)..(418): unsure at all n locations
agcttaaagagttaagccttgtattggtttaatntattacactattgtntgagacaatgnactgatttttcaggagtctctgctttaatcgattgccagatgtattaatcgattacttctctcttgcttaattggtcagaggtgaacaataacactttaatcgattacttaggtcatctaatcgattacattgttcttgagttgttttctagatgttggatgaacactttaatcaattacttagctaatataatcaattacttcattgaaataatcaattaccttataaatttaattgattgcaggtgattataattgctttctctataaataatcagcttgtgttcatatctacatatcatgagatcattagagaatactccatacatctcaaaaattacttcttagcctcagtatg

SEQ ID NO: 153561 - DNA, 456 bp, Glycine max
taatactgtagaaaccactggaattgtataaccctcatagccattattgataacttcagcctctttgcccacaataatgttctgaattttcatctgacttaaattaccaccgccctttgcccatcataaatatggttcagaatccaatggaaccagagggcaaagtctataaatcagcttaaaacacgaccatctgtgtgttactgttttaccatgtcaggtctccagataaaataggataccctaaaagagaaagtatgaacaagtgatcagttaaaatgccaccaaaaacaagtcaaaaaagattacacaatagaaaaccctgagcccagtgaaggcaatcccacaactcattttccagcaagggacttaacacaaccaaaaggaaaagggtatttttttttcacatttgcaatggcaaccactaaatcaatcgtagcaatcaaagagcatgtg

SEQ ID NO: 153562 - DNA, 387 bp, Glycine max
  unsure (1)..(387): unsure at all n locations
agctnggagaggatgcttaatggagganaagaatgagggagagaaagagagaacggggagcacgaaattgaaggaagaacaagggagagaagttgaactttgagttgtgtctcacaagactctcattcatcaaagttacaacaagtgttacacatgcttctgtttatagactaggtagcttccttgagaagatttcttgagaaaacttccttgagaagcttctttgagaaaactttcttgagaagctagagcttagccacacacacccctctcataactaagctcacctccttgagaagcttccttaagaagattcctaaagaagctagagcttagctacacatacctctctaatagctaagctcacctccttgagatgagaagtta

SEQ ID NO: 153563 - DNA, 484 bp, Glycine max
tagctacacaccacccctctaataactagctcaccttcttgagaagcttctctgagaagattcctaaagaagctacagcttatctacacaccccccctataatagataagctcacccccatgccaaaatacacgaaaatataaaaatagtccctactacaaagactactcataatgccctgaaatacaacgctaaaaccctatactactagaatggccaaaatacaaggcccaaaagaaggaaaaacctattctaatatttacaaagaagagaggacccatccttggtccaggggttcatgagaaccacaaggccttctttagcagctctagcccaatcctcttggagtcttctatacaatacccttggggggcaggattgcctcgattagtatgatcttggtcatggatgacaccatagctaatcgggttatataacaactaaagaagtatgacgatgaataatttgaatcaaatacttactc

SEQ ID NO: 153564 - DNA, 291 bp, Glycine max
  unsure (1)..(291): unsure at all n locations
agctgtgaaggcatctacctcttgaagaggcagatgttacggcatatggataagtggtagaggtagaggacggcgagatcaaacactattagaaaatacactttccacatcggntatttggggccttctacatcggttgtaaaaccgatgttgacagcattcatgttgaatgtattgttgttaacatccggtttaaaaactgatgttaacataaaaatattaacatcagttctataaataaccgatgttataaagaaagaagtccacaaaataagtgtctgcgtgagggac

SEQ ID NO: 153565 - DNA, 461 bp, Glycine max
  unsure (1)..(461): unsure at all n locations
acactatagaaattcacgctgttcatttgagatataggaggctcctcatcagaagttggttgttcttcatannncataggcctaacaggaactccaatattnttacagcttctaatgttatgattggttcggccacaccttccacatgtaaagtcagccaatttcctctttagtctatgtcctgtgacattgtccttattcacacatctccttctatttttctttggcgtttcttattggacccttttatgtggtggaaccaggagagtatctatgtctgggcccaatattgtggtccttagactgggtcataaagtcttattataagcttctattgtcagccactcatgacacatgtcctcatgccctcatgtttactgaccacccactggctatctgcttgtttgtcgttcacttctctgcagcaaatatggatatgcctacatagtcttttctgaaaa

SEQ ID NO: 153566 - DNA, 289 bp, Glycine max
  unsure (1)..(289): unsure at all n locations
tgcttcctctatctttttgtttggtcaattcactttaattccttgntcttcgtcttcttctccatgtgtctcctccattgtcttgtggcttggcgctgtctagaatagattaaaaaaaatanaccgattaaatcttagatctacacttgttattgcatttatgtggttcaaattttatagctctactcttgaatcatgttcttgtgttgttttaggttctatcatttttcagtcataatattcttgttctgaacttttaaatctcaatcttcttgctatatattacaaa

SEQ ID NO: 153567 - DNA, 487 bp, Glycine max
  unsure (1)..(487): unsure at all n locations
tctgacctttaagccttctctgtgtgcacacatactaagtaacttgagaggaaggaaattaactctctttcctctcttgggccaccattattaatatggccccttaagtggaatattccacttcacacaaaatcacatcgtgttacacatcacatcatttaacatcaaacatcatcaaccaaataataactttgcaaagggttggattggatacccttggacccaatctcaaatcatggcaattcataacaatatattatcaataagcttacaatcataaacatgcatcattctntgtcaagtggtcacattcacttggtcttataactcataacatataaatttccatgaatcccaaatcataattcatcaatcanaagtagacaaacatttattgcaatcaccatttatttatttcatacatagtctacaaataaaagcattactctatctcatttagatgtgtacaccatagctaaacttgata

SEQ ID NO: 153568 - DNA, 259 bp, Glycine max
tatacatatcgatattttcacctggtaacatccatacctcataaaacaacttttatacctcagagagaaaatatgtcactataaactatgttacttgaatttatgggcatcactatatttgttggtattaacaccaagcttaatctctgaaacaaaccaagttatattatagtgacaccaacatacactcactacatgttggtgggtgaattatatgcaaactatattctggggttaatttaaattcacagtgcccctt

SEQ ID NO: 153569 - DNA, 378 bp, Glycine max
  unsure (1)..(378): unsure at all n locations
aaaaactcacttgcatcttatnntacaatttatcactgacatttttttaataaatactttcatagagtcgatttgtttaaagccaaantttattcatttaaaatgtctcattgattcattaacaattaaatgattcactgattcacaaattactaacgaagctttgtcatctttttttcatactcatcctcaacatcttacacttgaagaagaatcatcccttgattgagacatttcaacacacattctaaaagcaacaaaaaaataataggacttctttatcaaaaatttggggcactaatgaaaatcaacaccaaactctatgacatatggcttcttaaacacaagacttgtttcatacactcaaccctacattca

SEQ ID NO: 153570 - DNA, 464 bp, Glycine max
  unsure (1)..(464): unsure at all n locations
atccttaagtcacctgcggcatgcaagcttcttagcattgctaacaaagtaagaatggttggttctaattntttcgactcaagaatagttgagaaaatactggtgactgtccctganagatttgagactactattacatccatggagaatactaaagatctgttcaaacttaccttcacagaacttgtaaatgctttacaagcccaagagaagagaagaanaataagggttggggttttatggaaggagcattgcaaactaaccaatgagagaaaaacaagtggaagaaatacaagaagaataatttcaacacctaagaagcaacaactaacactagcaacaataatggagacaacaaaggatnttcttcttgcaagcactgtggcatactaggtcatcctcctttcaaatgatggagaagacctaatggtaagtgtgaaaagtgcaacaagttgggacatcat

SEQ ID NO: 153571 - DNA, 495 bp, Glycine max
  unsure (1)..(495): unsure at all n locations
tcttagntggcatccattataaaggatngagtagcttcacgtcataggataaatttgcacaaatttgaactttcctgtagccgaaatgtgcttagtaatcacattaatgaacttgaaatgattctgaaggtaaaggcaatggaaaagcaaggaaaatacattggtttaccagctctggttggcagatccaagactcagatttttcattttgtgcgtgaaagggtgtggaaaaagctcaaaggatgaaatgagaatgtgttgtactattagagtattataaggagatgcagttattcaactgcagtttcctctagcttctagtggaagctagttagacacttctagtagaagctagtcaattataagtagttagttagttgttagccaattnntgtagagactaacataattgtctatatatattgttcgtaaacctcaagttcattgagttaataaatgatattntacttcttcattntctttctctctctccta

SEQ ID NO: 153572 - DNA, 491 bp, Glycine max
  unsure (1)..(491): unsure at all n locations
agctntttaagacttgatttaaccttatggaaatttaataataaagtctctaaagtagattaaaaaattactttccaacatgttaaacaaaacttgaggcccatttagtgtcttgatctgatagaattgactacacttttgctatatccactcctcacttttgctaatacactcttttttctataaatatttatcaaaatattcttaattntggaaactaatacacnccccttacgcttcctccctctaggtacaggattctgccaaatagacatggaaacataatgaattatgcgtcccaatttgaaacctgtatattacattaccattgggtagcannaatggagtaagggaatataaaatcgtgatttattgaagcaagacaaanaatccctatntttggcttcttcccctcttcctcgttttacatagaacatacaaacgctaactacataggaacagataataccttctacttataaacataacaa

SEQ ID NO: 153573 - DNA, 434 bp, Glycine max
  unsure (1)..(434): unsure at all n locations
ctaagcttgatatcacncatacctggagactngagatacgatatcacgacatttttctgcaacctttntctctttccagaaacctgtaggaccattgtctttntcatcaaccggggtcctttcctcctcctcctcaataagatcgccaacaacaagaggtatgatacacaagagcatgcataagcgagtttcaagatgaggcattgggccatcaataggatctctttcctataaacaaatcaacaagtaaattggagaagtaaaccacttatgcaaattctctaattacaaagtgtaagggtatggaataccagaagcaatcgatgacaagataatattaaaaccacaacttcacacgaaaacagatngagttgcagagaaagagtatacctcttgacaagacaagagttgcaaccaaggcctaaaatgtgcat

SEQ ID NO: 153574 - DNA, 298 bp, Glycine max
  unsure (1)..(298): unsure at all n locations
agcttgtganacttttctcaatcaagttcctgtgaaaataaagaaagtagaatggtgcgataaaaatactgagattatgtccaaagtgtgcatacaagaggtgaatgctggaaataaacctcatatacaacagtaggaatagagaaatatttttagtataaaattgaaaatgtgaactccctggaccaaccctttctattcaccattagatgatgatctgcccaagttgcttaaaaagtttccagacagtcttggatgtcatttggaggaagagctgaaacgttatgtacagatcctc

SEQ ID NO: 153575 - DNA, 229 bp, Glycine max
  unsure (1)..(229): unsure at all n locations
cttaagatgtggtcatttgtgtaaacatctactattggaacaagttcatgctcacgtnaccacatgcagcaataatgtgtgaacatggatagtgaagtgcaaaatactttccgcattaacaataatggtcattcaagttaactgccaacttttgtccccacgctgcgctattagattgaaggtctcttctacttccaaccttggagagcggatatcataaaatgcgaac

SEQ ID NO: 153576 - DNA, 389 bp, Glycine max
  unsure (1)..(389): unsure at all n locations
agctngctctaaatntacattgatgtttgtatntatgggaggaggttatatgccatttttgctttaagagtagtgtcccattggtaaaattaactttccaaatgtttgccttcgcaggaatggccccgaggaagcttgcctcaaagaggtccaggaaggacaaggcggccgaaggaactagttccgctccggagtacgactgtcaccgctttaggagcgctgtacaccagcagcgcttcgaagccatcaagggatggtcgtttctccgggagcgacgcgtccagctcagggacgacgagtatactgattntcaggaggaaatagggcgccggcggtgggcaccactggttactcctatnggccaagttgatccagaaatagtccttgag

SEQ ID NO: 153577 - DNA, 477 bp, Glycine max
  unsure (1)..(477): unsure at all n locations
tatctgaggtgccctataaccgtnggtaaatcaccacagccatatttaataactaatgacgttgaagctctggggtgtgatcaattaactacagttgtcatgacgtgactatgatctagtgagtttactacaaccgtcatcagaatgctaacgctatttgtagagggtcattgtcccctcaccatggtcgttatgctcaccacaaccgtgttgtatgcactacgaccgcggtcaagtgatagagtcttcatatctttgggtaaaagtgaaaatttccactcttttcgctcaattgagcgactataattctgcatgacaaagctagtatccaaacgtgagttctaccaagaaaatgcatgcaagtgacataaaaactcacaaaatatcactgccaaagtggattatcacatanctactttttttttgcgtttttaaccatgttattggtatgaagtatccaccaactctgacttgaca

SEQ ID NO: 153578 - DNA, 398 bp, Glycine max
  unsure (1)..(398): unsure at all n locations
ggacctaagcactgcgctgcactgtccactacctttgatgctttctatttgaccactnganccccaccaaaaagagttcatcctttnttgtaattcatccttcagggaggatggaaggaagataacactcatgtagtaaataggagcgaattgagctactgacttaatgaagattctcttatccaccttggagagattcttggtggaccaatgattaattatgttctagagtctctttgaggaatccaaagatggccctttccttctttgaatgatagatgagagccctaggtactnttttgtgccaattgttgttgtgactccaagagaagatgaagtgttttgtctcatactattgaatgtgttatagctcaaaaaatacctctgacttttggtaa

SEQ ID NO: 153579 - DNA, 405 bp, Glycine max
  unsure (1)..(405): unsure at all n locations
cttatccatcaagcaagganctctctagcacagaatacttcactatgctgcgagtcatatgggtatgagatcgaatacttcagacctgatcccatatgcacatgcactcgcaagtgtacttgcttggtgctcaccaccatagctcaacgaaagcaagaagatcgcgcgatgcagttcctgcgaggatagaatgagcactatgagaatatacgttctcatgtgttgctgatggatccaatacccacaataccaaaaatctttctatacatggcacaacacgaaagacaactaggtaacaaccctttatcaagcttcaatctcgaacctaaagaagtatcttccattaacgctgccaaaatagtcgagaatactgtggatgcacatggcataatgaaagcatccgat

SEQ ID NO: 153580 - DNA, 207 bp, Glycine max
ttatctcaccaattcaattataagagtctccgtcaagatacgaaatgacacataatcatgtttctctcatccaatcactaatttatgccttgctactcactatgagccaaaagtataatttgtattcttaaatcatactaataataataataataataataataatcaaaaataacaaaactacataaaaattatatatattacaaa

SEQ ID NO: 153581 - DNA, 479 bp, Glycine max
  unsure (1)..(479): unsure at all n locations
tctaagcttatcaagcgcttgtttctttcgtagcgaataacacataagttgtattatttgtggaccatngtcaatgataagcgaaaggaacctcaatgacgttctacacgttaacatttcaagcatattatttatttgagattaacataaataaataaatgtttaggggtgaaaatcgtgactttctcaagatggaatgacgcctcaaatcggtgcacaattgttggtacatctaaatttgatgggccttaaatgagaaatgtttatgtaatgagtaagtgaacaaacttgtacccattgaaaggagaagataaatatgcgcaatatcggacgtgtactatgaacgataagagcaaccatataaggatgaaggaatgcatgatgaatcaaactctaacatatacttataagaaaggtaacataaaggatggaaaagttaaacttacaacatcatacgccgtcaatgatgatgtattcat

SEQ ID NO: 153582 - DNA, 371 bp, Glycine max
  unsure (1)..(371): unsure at all n locations
agcttcatgatgatgattcttgttgaatcaagttngtttgatgatgaanaaaagcccaaaagaatgatttcaagattcagtcaacaagttcaagatcaagattaatttcatgtttcatgagaagaaatcaagaagattcaagtttcaagagaagtttgatttcaagattcaagagaaggtgaattcaagattcaagagaagaaatcaagaagacttcacaagggaagtattgaaaagatttttcaaaaaacaaacatagcacaattttggttttcaaaagagttcttctcanaattttctaagttaccagagtttttactctctggtaatcgattaccagtttcctggtattgattaccagtgaccaaagt

SEQ ID NO: 153583 - DNA, 481 bp, Glycine max
gttgatgctacacacactcacaatttgctagggacaggtcaccatcatatactagaccatggaaatagtgttactcaagtactatcacattgctaaaattgtcattgacaattttgaatgcttcaaaatgtactacataccaagagagagcaataacagagtatacctgctctccaagctggccaacactaagaaggttgggcacctcaagactatcatccaggagacgctccaaactctcatcatagatgctaaggaagttatggtcggagaagaggaggaattagactagatgaccccttacaagaacttcctagttcacgggtattgcaaacaggcgagaatgaagcttgatgcctaaaataaaagtctcgctactacgtcatccttgatggcgagctattcaaaagagggttgacaacacccttgttaaaatgtctgaatagccagcaggcagactacgtcatgagagaacttcatg

SEQ ID NO: 153584 - DNA, 406 bp, Glycine max
  unsure (1)..(406): unsure at all n locations
agcttccatgggtagctaccttggtgagtggtgcttgctngggcgctagagtacgtggcataggtgtgggcatggaatctgactccacatatgaagaggagtcgacatgggggtgtctatcgatggtgactacacagtagaagaaaacagggggcgatggttgggtaccataatattcaatttcaagagattggcatcaacgttggagatcatagaagcttcgatcacagcaaaacaaacttaagctgcatcgagtccggcaatgacaacctcaacgcagtccaagctggatgaggaaaggttgacttctgccattggagggtggcaagcaagagacaggttggaccatattgttagagacataggccaagctcactatgctaactacaactacatatatttgatg

SEQ ID NO: 153585 - DNA, 390 bp, Glycine max
tctctctcgtcgaaattactgaggagagataattccgcgaagaatatccaagccgaggcgctatcgtaacgttttcgtgagtaattacgcgaagattctcgaccgatcatcaagattcatcggtcgttcttcgatttcttcatacatcaacgggtgagtacctcaaaccgagtttttcaattcattctatgtacccgtggtgggccacattttgtttcatagccacaggtaagcttagtactaggtcaatgaccgacaagccatcacgcgtccacctcataacgtcatagaagctctactatgaggccgcctactgacttttacatctttggttggttgaacaccttcgcttctcagttaatagtaggacacacctcattgctcatgatc

SEQ ID NO: 153586 - DNA, 390 bp, Glycine max
  unsure (1)..(390): unsure at all n locations
agcttggtacattactntcatagggattatgtacttcacaatgttctcccatagtccttcatcgcgatcattacgagttgcttgtacctcatcaacgtcgggagactcatttatagaaggcattggtgtggaaaaacttggtatctaaaaaatgtcaagcgtggaaccatgttgtgcatcatttaaatgacttggtcttccctgtagaaccacatanaatgttgaattgcatgaatcttggatgcaaaacacttgtcttgcttgttcagccataatgaaaggttcgtccatgtaagccaccttatttaggtctactaaagtaaatcccaattcatcttgacggacaccggtattggcattgatccacttacacttaaacacaggcactct

SEQ ID NO: 153587 - DNA, 482 bp, Glycine max
  unsure (1)..(482): unsure at all n locations
cactcaagctcgtacggtaaagnctcacgatgtcacgtgctcatgcaacaatttgttttcgnggctatacgagacatctttcgcaacaaagtcaggttaacgataactcgcctgtgctttttcttccatgctatatgtagcaaagtcattgatccagtcatgtttgatgagttggaaaatgaggccataattatactgtgccagttggagatgtattttccccctgctttttttgacatcatgattcactcgattgtgcatctggtcagagaaatcaaatgatgtggtcctgtttatctacggtggatgtacccggttgagcgatacatgaagatcttaaaagggtatacaaagaatctatatcgtccagaagcatctatttgtgagaggtacattgcagaagaagccattgaattntgttcagaatacttagagaaggctaaacctgttggtgcttctaagtctcggcatgatgacagagt

SEQ ID NO: 153588 - DNA, 289 bp, Glycine max
  unsure (1)..(289): unsure at all n locations
ggatcttaagcacctgggctgcaagctggtatctccttcttcactacatcaagaatctccgggttgaatcttctctgtggctgtcttactggtttagcttcatcctctaaatttattcgatgcatacatgtggatgggctaataccaggaatgtccgccagggtccaacctatagccctcttatgcttcttgagaacagacaacaacttcttctcttgctcatcagcaagggaggcagatataatcactggaaaacttttngtatcatccaagtaagagtattttaaat

SEQ ID NO: 153589 - DNA, 481 bp, Glycine max
  unsure (1)..(481): unsure at all n locations
tgaanactatcaagaaataaacggttcttcaaaatacctcctgtttattagtctctatcaactccaattgcctctccaaatttgactgtgtctcaactacttttgccacttcaatctaaatttataacagtataaataagctatagagcaaggattgccaaaattttaagtcatttgcatgtggaaaataatttaaaatgtttatcagtagatgtagagaaacctcaagtctcaataaaacatcacgattgttcaaaatcctgcgatcccattcagctattgcatttgcttgttttctaaattttccagttcgctcttgcaactcagcattccactccttgataatctacagaagattatatgattaggaacaggatagagagaaatagaggaatgtccaattccaacacccaatgtcttatccttcatgagaaaccctattataaaagtgaattacacagtggaaaataatgtgttaggg

SEQ ID NO: 153590 - DNA, 475 bp, Glycine max
  unsure (1)..(475): unsure at all n locations
atccttatagtcacctgcggcatgcaagcttatgctgcaaacacttataatagacctcctcaacagcaaaaccaacaacaatagaataattatgacctttcaagcaatagatacaatccaggttggaggaatcatccaaatctgagatagacaagtcctccacaacaacatcagcctgtccctcctttccaaaatgctactggtccaagcaagccatatgttcctcctccaatgcaacaacaacagtagcagtcacaacaaagacaacaagcaactgaggctcctcctcaaccttccttagaggatttagtgaggcaaatgaccatccagaatatgcaatttcagcaagagacaagagcctccattcagagtctgacaaattagatggggcagatggctactcagttgaaccaagctcaatcccaaaattctgacaaatggccttcacaaactatgcagaatccgaanaatatga

SEQ ID NO: 153591 - DNA, 481 bp, Glycine max
  unsure (1)..(481): unsure at all n locations
agctntgngttcgatggccccaatgacatctattcctcacatggaaaaaggccaaggggcggacataacattcagaggatgtggcggaacattgacattgtccgcgtatgcctgacatttatgacatttccttacacgggcacaacaatcgctctccatagtgagccagtaataaccggccctaaggatctttctggccatagcatgtccattggcatgtgtcccaaatgaacccccgtggatttcctcaatcatgaagttcgcctctttggcatctacgcatcgtaggagggtcatgtcgtggtttcgtttgtacaggatggtaccactcacaaagaaaccagtagccaatctccttaacgttcttttgtcattgtgggaaacccntggtggatattctttgttctcgacatattgcttgatgtcgaagtaccatggtttcccatcctgctctttctctatcgcacaacaatgcgccgac

SEQ ID NO: 153592 - DNA, 476 bp, Glycine max
gaatgaagctctgatacacttgttagacttttgttctcagatatcttaagaagggggggaggttgaattaagatattacaaactatttccccaattaaaattctatttcactttctattcaagttacaaattcccttaacaataaacttcttaaatattgattcaaatagaacaatctgaatataaatataaaacaataataaataaaagagtttaagggaagagaaagtgcaaacttgaatttatactggttcggccacacctttgtgcctgcgtccagtccccaagcaacccgcttgagagttccactatcttgtaaaattcttttacaagttctgaacacacaaggacaatccttcctttgtgttcagaattcttttacaacaagagaccctcggtctcttaatcctttagagaattagaaagaggagaagaatgaatctctcttgaagagatagatttacaatctgagcact

SEQ ID NO: 153593 - DNA, 455 bp, Glycine max
  unsure (1)..(455): unsure at all n locations
caagctaanattcattatggatgcatatgctaagagcattctaatggcttctaatctaacaactggagcatatgtttcttcataatctataccttctacttgattatatccttttgcaactaatctagccttatttctaattattattccatgttcatctaacttatttctaaatacccattttgttcctatgatgggatagtttttaggtttctcaacaagttcccacacattgtttctttcaaattgattcagttcttcttgcatagaaattatccaattatcatctattatggcttctcttatattnttaggttcaatcatagatataaaagccatattattgcataattctttaagagaatgtctagttgttaccccttttgagatatcaccaataatgctgtcgtanggatgatcttttgangctttccattcttttggaagttcatcat

SEQ ID NO: 153594 - DNA, 494 bp, Glycine max
  unsure (1)..(494): unsure at all n locations
accttgaatctcagctgagaaaggacgttgaagatttatttactacattcgcggaatctagttatgtgagggataaagacaacagtgtgaggactgagagcaaatcacgctaggatagatcctcagaaaccagaatgtctgttccattttgtctttattnttttacttggagtagtagaagtgattgacagctacagaactcatttgaaccacttacgcatgacttattgagttaaacttcttcctttgtctattcgactttgtgtcgtaattaataagattaattgcatcttttttgtctttttttcatttctccaaagtttttatttggcaatttgctcttcaactttctaattatttaattttcatttatgtattaacttaatatgttaattataacaaagaaaaatattgacattacactgtcttatactattatgttaaataaatagtatgtaggatgactagtgagagactagaatcacttgaaatga

SEQ ID NO: 153595 - DNA, 492 bp, Glycine max
  unsure (1)..(492): unsure at all n locations
ttaagtcacctgcngcatgcaagcttgtaccatgatgcatntcagaatatatacacatatccataacattttatcaatttatcgatctgacatgcacatcttggaagtttgagtttggaagatcaatcatttagcaatataaaccattcatacaacaagtacctgagttaattggacctctgccaacaaaggaagggtgtaactgttgaggacgagaaaccaaaccccatgagttgtccttctccaacatgggaagctgaacaggtgaatatccaaacatcacaggcaaattcccattactcacagattgggctcctaagtgttcaccagttgcagtaggcatcacatgcatcactccaggtatctgagggcttggtgccccaacagagctggactcttttactgaagggtaaggtacattcattgatntacaggttgaacagaanaggaagcaccataggtcantgtagcatgcttaanatctttttctga

SEQ ID NO: 153596 - DNA, 450 bp, Glycine max
  unsure (1)..(450): unsure at all n locations
cttcttatttcttcttaaaagagcttcttgtgtatcttacacccaaacaggccctaaatggcaatttttgacaaaattaatatccacaactatttaaagataaaacttagagacagaacttattctatctctatcagcgacgaaaacagagatgaaatttaagaagtagagatggaaaaggaagtcatggataagaggcggtgtagttctatttggggtgatgatgatatgaatgagtggcttctccatctattggttnttcggcgaattactttgcttgtgggatacaaattgttntcaattatcaaatcaatctgttagtgacgggttcattggattggaggcggcgtggaatgagaatgggagagaagttggtattggtaatatatatgcaccatgtgataaggtgggaaggagaaacatgtgagatgagttgagggcagtaaaaag

SEQ ID NO: 153597 - DNA, 478 bp, Glycine max
  unsure (1)..(478): unsure at all n locations
agctctgcttctacattnggagaagtgaacggacattctgttcatccagtttactattgccaatcaattcaccaacttatgctaaattgcctacctcaaaatctccaataggctcaacagaacatgttgggtgttgtcctccaaccaccactagtcatccatcaacaaaaaatttcaagtgctttaccccttctgttgttcctgctgaagttgcaccaccctcaccaacttcaacaccaccaattcaaccaccaccactgtccaatcatgagtgacaatgatgaccaaatcctaatttctttctttgaacccttagtttcttctattgatgacaataggaggagaaggatagaaatcttgattatctccttaattaaaccaagatacaattctatanataagaggctaggcattaattgtaacgatgtacacgtcctgaccagctctctgaattatattttagacttccanctactaa

SEQ ID NO: 153598 - DNA, 298 bp, Glycine max
ttcggttaacgccgcctctagacaatatccattggatttaatcatgaaatatgtgcatgttaaggtgaaaaggacgctaatttctgaattgcaaaatgtaacagttgggttaagctcaacagctgggctaaacgcatatccatcgctaagcgcagttttagcgcgcttagtgcagaggataatttgggagagcattagcattaaatccacacactaagtgcgagatcagtgcgctaaacgtaacaggtgccttcagccaggctaagctcgagactagcgctatctcaatttcacttac

SEQ ID NO: 153599 - DNA, 450 bp, Glycine max
  unsure (1)..(450): unsure at all n locations
agcttatattgnttantatcatagatttaatatctattattttcttaataattagatacaagtcaaccaaataattataaaattaatatgattcaaaaataaattaactttaacaaatgatgtaatgatgtcaattgactgagataaccatcgtaagcatgtaataatgccaaacttggtaaaaggtttcttaaaaattgaataaaaaaggtaattttaataaattagtgagaataaatctgaaaaagagagacaaaaaagataataacttataaattagcttattgtcataagttacttcaactaacatataaaaataagtgataatgtttctaacataaatctgtgtcaaataagaattaattttatcacagtaacttacaagtagtcaaaaaatttatatacattcttcaaagtttatcaagacactgcttataacctatttataaa

SEQ ID NO: 153600 - DNA, 340 bp, Glycine max
  unsure (1)..(340): unsure at all n locations
gctgacatggccgaggaattataagctctcattgatatttctgcctagaaaggagaggctgggaaggaacttttggcttcggctattccacttgaggaatggatcagagaccaaagctatactaaaactgctggcgcaggatgttctgatggcgaacctgaaaaagtgacactggtattggttgtccaattgagggatccaatgagacactatgaagcaattggaggacctgtgatggtgctgattcatgtcacaagtgccgctgagacatagaagaaagagaaattgttcaaggtagcaagcatgcatgtggngaggttcaagttgactagtgtcataa

SEQ ID NO: 153601 - DNA, 454 bp, Glycine max
  unsure (1)..(454): unsure at all n locations
agctacagaagataggcctatgatgaagcattatctactctcatatctgaaggattatgagcaaaagactaattaagcagaagcaaatatcatagttggctgagggaatacatttgttagagtgttgttggtcattacgacctttctgttacagtattgctggtcgttaccacctttctgttatgattgctacaccctcggctggtgataggatagactatatatatatctgtatgacagctcttacgaggaagcacaaaataatatcactcttttttccttacattctctcctgtttggaggcaacctttactcctcaaattctaaggcgcagttaaggttcacagccataacaacttggtgctctcttgccatggtggaatcgaccccgtcaagtccccatataccgtatcaagacaccattgccgactacctactntcaataacatgccac

SEQ ID NO: 153602 - DNA, 193 bp, Glycine max
attcactatgtggaagtgagatatcaaacaccattgtttgtaatttctgtggaaaaatcacaaagggaggaataaccctagccaaacaacacctgattggaaagctgacaacgttgcagctgcaagaaactccccaaatgtagcctaaaaagtaaacgatatatgcgtccaataaaggggacactacagtctt

SEQ ID NO: 153603 - DNA, 286 bp, Glycine max
  unsure (1)..(286): unsure at all n locations
agctataatcccatcgatctcttgcatgcaatgatgtattanacacaaccatgccagagctttcacttttcacggagactctaaataatanagatcaaagagacataccgacttccagccatctggatccaagcatgccagaatctttgtgttgataccaggtaatggtccacgttcccgagtaatctctcctccagctatgttaattgcttctgcagttttgacacatcatctgtgcctattgcaatctgtagatggggtattacagtcatgaatttgatagaaa

SEQ ID NO: 153604 - DNA, 350 bp, Glycine max
  unsure (1)..(350): unsure at all n locations
aactcaagcttactaaanaataaanaagggggcagagagcagaaccgtatggatatatctctctctctgagacacacacgtacaccaatgtgacagtcataaatatctttggcggataattagaggaaacaagacggacaaggcgacaatgttcctactgcaaacgcctcattactcaataatatagcagcaaagcaacccaccgggaaaacactctcctagccctaaatccctctaacaaggggaagctatgattctttccatcctaacattatcctagcttttatcaccacacaactgtacgttttatcgcaacaaggtgatgaaaacaactatttcttatatcacta

SEQ ID NO: 153605 - DNA, 426 bp, Glycine max
  unsure (1)..(426): unsure at all n locations
agcttggaagaagaagaaacatagatgaactccactctctcaagttttaatttgtgcacaatgaagggataaaggctctaaaattcttttctcacaacgaccaataaggaatcattatttccatagcttttgttatcattgttaccataatttatgcctcttctatatccatagccagatctgccacctcttcctctagaattagaagatctgcccccatcattgtgttgagtaaactgcacttgaggtgttgaatctaaatcagtatcctttgcctttgttgtttgaactcaagtcaaatttagtgcaggagcaataacactttctgttaacttttcaagcctatgttcttgagccaaaagaagagattggatctcctcacattcaaagtgatcaatcttactgctaatngcaataaccactcat

SEQ ID NO: 153606 - DNA, 422 bp, Glycine max
  unsure (1)..(422): unsure at all n locations
accttaaaactaagcttacgttgtgtgcaataaccttaaacacgttccaccgatgatgtctttttagtgaanacccattactaaagcgactaatanttacagatttaaattaaaatagatctactcgttattatttgtagcaatatatggtttacttatatcttatttggataaattcctctataaatacttatatgagcaaacaaaataagcaaaacgaattaaatatctcctattaattaaaatcacttatgcacttcagttttcgaagagaaaaaaaaaaataggtgcaaaaacttctataagagttaagcattaaaaatactgcatattattttcttctcttatactacatctggttggcgtatacacttccactctaccgggtgttctgttaaaaaagtgcagaaaacacaattttt

SEQ ID NO: 153607 - DNA, 411 bp, Glycine max
  unsure (1)..(411): unsure at all n locations
cgctctgaaaagtgttgtttttcaccttctcgcttatccatccgtttgttagcgagngtctgctaagcgcaacactcattggctaagcgcaaggaagaatctggaagaagatgagttgtgcaggttcgctaagtgcaccgcttcatctcactaagtgcaccacttcactccatccgctaagtgagaaaggcacacgctaagccgaaattcactaatgtgcattaagcggtccagaattgtgctaagcgaatgagcacgaacaaggccacctatttaagcctaaaattagattctgtgaagagagtttgggctgggattcacagctctgcatgtctagagattctagagagagaaaggtccaacgttcacagagttctgagagaatttgatatgtgaagatctgcagagact

SEQ ID NO: 153608 - DNA, 333 bp, Glycine max
  unsure (1)..(333): unsure at all n locations
tactcagcttcacatcagaccacttcagggtgcggaactacttcacatggtcttgatggggcctatgcaagangaacaccttggacgaaagaggtatgcctatgctgttgtggatgatttctccatatttacctgggtcaactttatcacataaaaatcacacacctttgaagtattcaaggagttgagtctaacacttcatagagaaaaagactgcgccatcacgagaatcacgagtgaccatggccgagagtttgaaaacaacacggttactgaattctgcacatctgaaggcatcactcatgagttctctgcagtcattacaccacaaca

SEQ ID NO: 153609 - DNA, 314 bp, Glycine max
agctttcttttgctcttcatggctatcctaccattttctatcatctcttgcatcaattttcttcttttcttcttgtagatatgtagtaaagttaatctttctggggttgatgtaagtgaactcatctttgtgtatacattttggttattaatctactgttattgctcattattaagtgttcttcttctatgcataaatgttttctttttggcttgatcaccctttacttgatgttgtggtgtaaatcgccattgggaaatacttttgaacctagaaatggagaggaacatctaattggttttgggtgtagggat

SEQ ID NO: 153610 - DNA, 483 bp, Glycine max
  unsure (1)..(483): unsure at all n locations
ctaagcttgttcctaaccccttataatcgatctctagttaagttatatcatattcaatccaaacacttaagaaaaatatatctcaatacaattaaattggattggataatggataaagctgtaaatactcttattttagataacattatttttactatttaaaatatttttttattgcttaaaatattatttataatgtttgaggacgaaaaataaaataaaatattttacatgaactaaaatattttttttaagaaacaaaaataaaaaaatcgctaaatcataaaaactaaaattatatttaaacataaataaaatactactaacattgtgtgttatattataagaaagaaacacatgttactntatcttttgttataaaactacgacttaaaatgatgatgttattccaaaaattggcatctaatcatggtattctcttgtttggagagataatcatggtgtctttcaaagttgacaagc

SEQ ID NO: 153611 - DNA, 416 bp, Glycine max
  unsure (1)..(416): unsure at all n locations
atccttaagtcacctgcggcatgcaagcttgaaggctgcggcaactagcaagtgtcatttttaatcagatcctatgatgtaatacttgaatntaccatctttctcaactttggttctcgaattccaaaatttacactactcatttcccccgttagttttctttcattagtgtcttgtgtattacatttgatcttttaacatgtccttttccactttcatttccttttactttgactgtggtaaataaggatgacaactaagatcaatatcaatatcaaagtacattgcattgattaaaaactgatagtgatggcagagtacatctccttntctttgcccaaattttattcaagacgaaatgccatttctcggagaggggcttgnggatatagactactgtttngtatctactttct

SEQ ID NO: 153612 - DNA, 494 bp, Glycine max
  unsure (1)..(494): unsure at all n locations
cctatgatactcagcttgttacaacaaggattggtatcccaccaagctgatgtttcgattactaaggaatcaagagtacacaaaacaatttctacaaatggacaatgatgcaattaatatccatttacactaatactaattaagtagatattgtcaaaagtaaaataggagccatccgttgaaatatataagttggtctcagaaaatatgtgagcctgccggctcttggtgcatgtgtttctgtgtttaaaatgctaatatcagtttttagatntattttaactaattaaaaataaaaatcattaaaaatattattaatctcgaagtacataattctntaaaataatttttcacttttaattatttaaaatcggctgtaataattaatgttattaaaattagtgtcttcatgattattattattattatagttacagacaaaaaattatgcactgacggaagaaaatnttaaccaattatctaatcaatgataa

SEQ ID NO: 153613 - DNA, 463 bp, Glycine max
  unsure (1)..(463): unsure at all n locations
agcttccttcgcggcaaatgttaatatacattgtgagaaatagtagcatatatagccagggaattgtgcacatgttaactctataaagttaaaattaagccactgtcgcggaaactttttttatcgaaaattataaatgtgagtattttcttctaaacataatttattttatatcaaaaattaaaattaaaatttgaaattatttgataaagaaatacaagttaatagttattagcaggtgtgccgatcagtgttgttattgtcatggaaaattaattacacatgacatgaggggtacaacatttgaaagacatgcaaaagtttatcgctttacatcagacagtaattttttagccgaataacatcctatgaatacgcgtgttgaatgttgaacgatntattaagctngacttgactcttaatntccagaagaataataaactattacctagtcattatattt

SEQ ID NO: 153614 - DNA, 236 bp, Glycine max
gcgcaatcgatcataatgctgaagagcatggtcattctcatcaacgcgaagcaacacatttcgttcatcttgctgcacagaccccccccaaaggtcttcactgactttctatgcagctaactgctgattactgtgccctgaaacctgaggacctgcagcttcccaatgaatactagactcatgatccaaaaccttatcattatgctgccctctctgacaatcttctaacatgagct

SEQ ID NO: 153615 - DNA, 475 bp, Glycine max
  unsure (1)..(475): unsure at all n locations
agctntctctgcaacanatagaggaaaatnggatgaagcagaacttgctaaatctattcctgacaatatatgnntggaggtaacatttcaagtatgatcaatatttataagcaccaattatgaagtactcttctatcctattagcttcatgtgtggcttaatcaaatccatagatagctatgtgtcataccctaatttcgtccggggactattgtttgatggcatgcaacctttggttgaccgcttcgaggtacttggcaccctttgttgcataatacgtgaagtctcgagacatgccggaaatcaaaaggaagcattgttacgcaatccgtgaaatttcgtaacatgccggaaatcaaaagaaagttttgttacgcaatctgtgagtttccgtaacattccgatagctaaaaaaggagtaattacatgacccgtaagttccataccttacgaaagaaacaagatcgtacgaaat

SEQ ID NO: 153616 - DNA, 390 bp, Glycine max
  unsure (1)..(390): unsure at all n locations
atgacatttgtcattnttcttctggatcttaatagaggactagacaatccttaatggtcctttgtcctttccatgctccttattgactttctttccaactccctgattattcacatgatgaacggagtggtttccttgattcttaagtctggtttcctcctgaactaacatactatgcaattcatgcacattccatttgtctttcatggtactatagttcatttggaattgaccatactcagacgataatgagttcaaaatgaactgcacaaggaaattttcatccactgctattccaagagacttaatgtttgctgcaatatttgtcatctcaatgacatcgtcatacatagtacaagaaccatcacacttcatggtggctaaagtact

SEQ ID NO: 153617 - DNA, 512 bp, Glycine max
  unsure (1)..(512): unsure at all n locations
atccttaagtcacctgcggcatgcaagctnggctgggccatatcanaattaaggtacctgcatttatttatataaatttatttatgttagattatgcatagtggttttagaaccttgccatttatntaatgtatgtacaacacaggacagagaccctgaataattgtggtggttccttactccttagntttattagttagttttattgctaattgtctctctgctttggttttggctgtattttcttttcttggttgataccttattcagatcccattaacacttcactttctctcgtggaaaaatattttggcaaaaaaaaaaacatttataaaaaagtatgaactatgtagattagcatctttccaatttcacatctcatgttaaaaaattcagcttttttctcagtcttgactttcgaaagtgtacctttccaatatgtaagcttattgaattgttttcttaatccgatttctgttntattagganaattaacctctgccacaatatca

SEQ ID NO: 153618 - DNA, 487 bp, Glycine max
  unsure (1)..(487): unsure at all n locations
tatgaatctcagctttatttatttcttaactgagaatcaattaaagcctaatatcggttgtactagctacaagtacaatttaattgtgtcttgatattnttgtttagaagagttatagtcataatactntaatttttttatttgtgccttgagctagttcatgtaaactttgcagaactaaaaattcaaaagaacaatgactttgttttgatttgtcaacaatttttaggcctgtcactttagatccaacactactgcggtctgagcgattggaccgtaaagttgagtttggccttcctaacttagagagtaggacgcagatattcaagatacagacaagaaccatgaactgcgaaagggatattcgatttgaacttctggcttccattggcaccaacattntttttntaaactggaaaatttataattatcctgtactttgatcatcaattattaaggatttcacattctgctagatatttattgg

SEQ ID NO: 153619 - DNA, 467 bp, Glycine max
  unsure (1)..(467): unsure at all n locations
agacaatngcaaatttttctcttatctttccatcaagaccttcatgactactgtgctttagattagttgattatacctttatgcttcatcatggtgagcatcactttgaagttggaactacattataataatatacaatttataatataattagattccattatatataattaaaaccaaaaatcacctctacctgacacactcttataatgttttttccaagaaaataatcaaaacaaaaaagaattgtcagacatagaagactacagaaatatataaaaatatggtctagctgagtcttcccagtccttggaggcccctgaaagagaagtggctacgctcgattacaatttttagacatgatataaatggacaatacaacctctcttctggtagtaaaaaaattacaaagtttaactcaatggcctagctttcaagaaatcangaactgcaccagttcacaattc

SEQ ID NO: 153620 - DNA, 433 bp, Glycine max
  unsure (1)..(433): unsure at all n locations
ggacctctaagagtgagatcaaatacgaaggattctctaccacatcatcttctgtagagtccaaccagtattggcctcaaaaatagtattcttctgttaccacacttctttttcttatgaatggcccttcaagatcttaataatatgcgtcactcgagaatgagttgcatttgcagagcctctctgaccgcgtggcgaaactagacatcttgtggctattcacttttgttcagattcggttttattggttgcaaaatanaggcagcgacgagtcaatgatggcgaaggtggtgatgatgggtggggtcctgtctggaaaaagcactgttggtggtgctcagctcggntgactgagtctaattatatgcaggcttgcaggaccctaattggggtttcttatgtatatattgaagataaggtcgtagcgtctatt

SEQ ID NO: 153621 - DNA, 456 bp, Glycine max
  unsure (1)..(456): unsure at all n locations
agcttgtatgcgcgaaagagagagggggcacaagcttgttgccatgtgctgagtgtgtgaacaagtcgtgtagaggggttcgatggaacctgtatttatattagttgagtgtggttgttggtccttatttgtaggggctattgtaaccttgtaaataattcccaacttgtagataatagccgggaattattactgaatttgtagtttgattttgatgatatattgtagtttgctacattaatcatttaatggtaatttaaatgttgttattacctttgttaaaatatactacattttatagtacaatagggttttaaaatatttactgaacttgttagtcttttttttttattaatagaatgacaaannaaattgtaccaaatatatgatgaaagtaaactattatttgaacaatgacattaatngttattactggttaaatntgtagatattatt

SEQ ID NO: 153622 - DNA, 451 bp, Glycine max
  unsure (1)..(451): unsure at all n locations
ggtgcgaatcanatcactcctgcatttatctctagcatgcattctttctttctttacccactcctcacgtttggttttttagggaaaaacaccataactaaacgcgccacaaggcatccctatcgcaccagatccaaatctagaacgatgggtgatcaagaagagacacaggaacagatgaaagccgacatgtcggctctaaaagaacagatggcttccatgatggaggccatgttaggaatgaggcagctcatggagaaaaacgtggccaccgctgccgctgtcagttcggctaccgaagcagacccaactctcttggctaccgcgcgccatcctccctcaaacatagtaagacggggaaggaacacgctggggcatgatggcaaccctcatctgggatacaaccgagcggcttacccttatggattgctgcccaactactcaccacccg

SEQ ID NO: 153623 - DNA, 335 bp, Glycine max
  unsure (1)..(335): unsure at all n locations
agcttatttgaaagattgattcaggctggttatctcttttanatgtcgaagactcaatacagaatgcatcctgaggttggtgcatactgctaagatgttctatattggctaggaatatggctaaaatactgtttagaaggcttgggctatccttcccccctgaattaagttatacagttgagttaggccttactcaacccatttctaatgcatatgctaagcagaatcttgcaaaggtaatttgcttaatatgtgtgatctttctgtgccccaataagtatcaagaggttgagactcaagggaattgcctctgaagcaagagggttaaacacaac

SEQ ID NO: 153624 - DNA, 465 bp, Glycine max
  unsure (1)..(465): unsure at all n locations
tggattacttggntcgcaaantcactattgctctcggtcttgtttatatgtggcatgcaaagctttatgaatgtattttaattaaattataattctctactatataacaanggctgatagacagagtgttcttggttttgtatccgctaccacaatggtaaaatcacgtgatgatggagattgagccgttgatagacattttggggcctaagtcaaaaatattatagggatctttttcttaccagaattttatagagatttaatatattatataaaatatcaatctttatattaatcttttaatttatctagctgcatattgtgatattggttaaataagattccttaagggccctataaaatcattatttataagtagatacaaatataatttatttgttattttcttgagaaaatacatatgattatctcactctatttcttacacacacacactctcactct

SEQ ID NO: 153625 - DNA, 391 bp, Glycine max
  unsure (1)..(391): unsure at all n locations
agcttgtagggttaaagtctcacgatcgtcacgttctcatgcaacaattggtagccgtggctatacgagacatcttgccaaacaaagtcaggttcacgataactcgcctatgctttttttttcatgctattggtagcaaagtcgttgatccagtcaagtctgatgagttggaaaatgaggctgcaattatactgtgccagttgaagatgtattttccccccgctttctttgacatcatgattcacttgattgtgcatctggtcaaagaaatcaaatgttgtggtcctgtctatctacggtggatgtacccggttgagcgatacatgaagatcttanaagggtatacaaagaatctatatcgtccagatgcatctattgttgagaggtacat

SEQ ID NO: 153626 - DNA, 443 bp, Glycine max
  unsure (1)..(443): unsure at all n locations
ncaagaaaaggtccaaactccctntagaatcagatgcaggcttttttatgtggctccngacgcgctcgcgcgcttattgcaattctgaaccgcttagcgctcattatgggatttcggcttatcgcatgcttttctcgcttatctgatggactgaagcggtgtgcttggctggatgatccttcgcttatcgcaaatgcacaaatcatccttcttccaaagtcttccttccactcagccgagtagtgttgcgctcagcggatggctcgctatgccaaaagattggcttagcgagatggtgcatatcagcacttcacatacttgccaaattaacatgaaatctagagaatatgattattaaacacaccaaatggacatactaagtatattattacctatctttaacagaaattaattacaatactacaagataaccataaattgga

SEQ ID NO: 153627 - DNA, 442 bp, Glycine max
agcttaattgcaacctctttatattttgaatattattacctgcataacaaataaataaataaagtaatgaaacgtttattaccatcaccatcatccctcatacaaatacccgttgagaaataataaagaactactaactatcaccacctaaggacaataaatcaacctatatagatctctccaaacgatccgctaccaatcttaccgataaattttacatatttttatattcatgaagataaagaatatatttaattctttgttcaattaaatatcatgtctctcaattcagtcgatcaaatatattataccatcatcatcattacacgaataataacctctatcatcatcaaaccagaagggataaccgtataataattacataagacgtgtctactggctataagccatattaaatactaccgtgttgcttactgacatt

SEQ ID NO: 153628 - DNA, 364 bp, Glycine max
  unsure (1)..(364): unsure at all n locations
ctcaagctctacgatgaaccacgaanncaagagacctacatgcacttctcatattgttgttttcaacgcgtgtaacaacggagaaattgaacttggtttctcaaatatggcccaagtaagctagctaccaactatatataatatctatcacattaaaacacttaatgtccatctcattaaccaaaagatgaataagcattgccaactgaaacatgatttcccatctctttttaatatacaggtcgacattcaaacagcacttaagagnacgntccctgaacatattaccactagaggacaggcccaccaaattgatcaaaaccctcctacatcatcttcatctcctctgaaatcaatattcaca

SEQ ID NO: 153629 - DNA, 179 bp, Glycine max
agcttatacgaccttgttgagtctagaatactttattatttatgtggacaacatttgatatgatgtagaagaaaatgaatgtgagcctttttccctttgaacacttgttaacaaaaatgtttaaaaatacctttaattaatatttgaatcttttattccttattaacatatatgtgagg

SEQ ID NO: 153630 - DNA, 468 bp, Glycine max
  unsure (1)..(468): unsure at all n locations
actcagctatcgaatcatttcagcctttgagacaatgatgtttattttgagcncttggnctaatcgagtaccatgtgatataattgattatttctctttctataagtggttcagaagtgaacgataacactttaatcgattaaaaagataatataatcaattacttcattgaattaatcaattatcctgtagatttaatcgattacaagcggttataattgttttctctataaatagtcaccttatgttctctcttataacacttagaagaacaagttcttatgagctagaatcacatgctgatattagttaaagaagagtgcttagaaatagctactcacaacctctaatctatgattataaagatctttntgtgacaagtgagtcgtgatactctcttgagttcaagaagacacctcattcagtcaagcaaggttctgcgaanaggatcgatctatattggactct

SEQ ID NO: 153631 - DNA, 296 bp, Glycine max
  unsure (1)..(296): unsure at all n locations
agctntntctacgcatttatctcaatttttcttgctttccattcatcccactcaccaaagngccatctctatctatttttacttcttccttgtgggatttggcgctttatttgttggtttcttggcaatatttgtgaggaaagtcatgtgtatccatgggctgaatgctctggctaaggcgggctgcaatggagggctctatgccaatccttgcttcttctaccaaattgcatgtcctatgtgccctttatccctcattattttcatgcttcaacatgtgcacaccaagtggttga

SEQ ID NO: 153632 - DNA, 461 bp, Glycine max
  unsure (1)..(461): unsure at all n locations
actntgctactgtaatcgattacatgaatctgttattcgattaccagagacgaaaaactctagtaacttagaaaattttgagaaaaactctgtcgaaaaaaaaaattgtgctatgtttgttttttgaaaaatcttttcaatacttcccttgtgaagacttcttgatttcttctcttgaatcttgaaatcaaacttctcttaattcttgaatcttcttgatttctgctcattaaacttgaaattaaacttgatcttgaacttgttgactcaatcttgaaatcattttcttgggctttttgtcatcatctttgatatcatcaaaactacttgaatcaactagattcatcatcatgaagcttgcttctacagactatacttgaattagagctgttgtgtttaagtgtaagtgggtcaatgccaatactggtgtccgtcaagacgatattggatttaccttacta

SEQ ID NO: 153633 - DNA, 463 bp, Glycine max
  unsure (1)..(463): unsure at all n locations
agctntctaaactntgtttcanaactntgtttttctacaagtggaaattctgcagaaaacaaaagtgtgttatcttttcattccttccccctcttgacaaaagattcaaaggactaaccgcttgagaattcttttgattcttccctttccctttaaacaaaaagatttcaaaggactaaccgcctgagatatcttttgtttccccttacaaagattcaagggactaaccgcctaaaaattctttgtcttaacacatgagcgtacatcctttgtggacaagtagagcgtacatctacttgggttgttatactgagaacaagagagggtacatctcttgtggatcaattcaagtggagcgtacatccacttggttgctcaaagagaacaaggaagggtacatcccttggggatctttgcttgtagagggatttacaaggttatggganatctcaagaaccggtgg

SEQ ID NO: 153634 - DNA, 421 bp, Glycine max
  unsure (1)..(421): unsure at all n locations
aatatgtttccttttcttctccaacaacttccccgctaaaacatagttgctctcattattggttacaacttgaacaacattcgcttctccaacttcctccacaatggcatcaagcaactcaaaaagattttcacctgtctttacaaaatcagagccatcaacagacttcaaaaacatggtaccagcttgagagttaatcaaaaaattaatgatgcatctttgtttccgatcagtccatgcatcggacataatagtacaaacatacttgacccattgctccctatagcctttcatcanattttcagtatattcaacttccttcttcacgagtggaactctaatgtcatgatagctatgaatgggcaaatgtggcccatattgaccaatggctgaaccatattctcaaagcttttcatttaat

SEQ ID NO: 153635 - DNA, 483 bp, Glycine max
  unsure (1)..(483): unsure at all n locations
agcttatgcgtatatttacttacgaacgttcacttgcacaagacattctatttaactaaganaaatgcacccatatacaatcaaggcagcttcgttacctagattatttacatgtacttccaaggtgtatttgttacctacatcacacacatttcctttgctaaattcacatacatgcatactctaagcactttggctatcgaaaattgcatacgtgcacatcccggtatttctaatacctatacatacacaaactttatgataaatcttgactatctacacaataaggtgctacatttcatgcttttttcaagtttttgctacctaaagccgtatgcaaattcaagtatattttcttttggtgactaaaattggattcaaattaaaagggattnttgtaatgtatctcatgcaacatatttatagatttttgtgagacantttgattaccanaaatcatatgtacatacatccaagtatttt

SEQ ID NO: 153636 - DNA, 400 bp, Glycine max
ctcagctttgatgctctttcaatggagtgccagaatcttagactgtcatcttttgtccgtggccaaggatgcttgggagatcctgaaaaccactcatgaaggaaccttccaagtgaagatgttcagattgcaactattggccaccaaatttgaaaatctgaagatgaaggaggaagaatgtattcatgacttccacatgaacattcttgaaattgccaatgcttgcactgccttgggagagaggatgacagatgaaaagctggtgagaaagatcctcatatccttgccttagagatttgacatgaaagtcactgcaatagaggaggcccaagacatttgaacatgaaagttgatgaactcacttgttctcttcacacctctgagctaggactctcggata

SEQ ID NO: 153637 - DNA, 527 bp, Glycine max
  unsure (1)..(527): unsure at all n locations
tacccgagatcctcttagtcacctgcggcatgccaagcttgtntcagaagaaaagtatcgagtggccttagttaagactgacaaattgaaagttggcaaatccaagtcttgcattctctttatattgttgtaatgcttggtgtaaaattttcttacagcccctgattagttggaaaataacagtatatatacatggacacataatattcactttggtacctatttgactgcattagatgctaaatcatacctatatacttacctggatttttaaccataaatatgcataaacatgtgatgattaatccaaaagtggtcacaccaacggtgattcctactatctttttcttgattnttctgttgccagtgtcatctaaaagaaacatatagttggatcagtcaaggccaactntaaaataaacagctctatagactgaagctgagagagtctagcttccttcgactgaataggggagaaatgcatagtatttaatntgaanaatanattccatttgataaataacatg

SEQ ID NO: 153638 - DNA, 415 bp, Glycine max
  unsure (1)..(415): unsure at all n locations
ntgctagagaagagagaggggtctttaggtatcccatcattccctcactctctttcacgttcttccctcttttgtcccttcttcttcttcttttttaagattgtagctctgttgtttgtcttgccggtgagcttcatggtcgttggcgagatctatacatattgatatcatcattttttcttggtgctttattttttttcatgatttttttttttgcattccatcatccttntcttcttttcctattttttccttcttttttcgttatccggtgaagcctcgcgcgctatagccatagtgcctccgtcgcgctgtcgtcattggggaggtgtgccaccctttgtggaggtgctcctccttccgtgccgtttggaggctagaacacctagaagtttccaaccctgctgtctaatta

SEQ ID NO: 153639 - DNA, 477 bp, Glycine max
  unsure (1)..(477): unsure at all n locations
agctntaacatttattntacagatattcataatgttgatattttcattcaggaatctgatctacttttaaccccatttgatgaggtataagatgaatctaattttagttcatttatcaatgtttttcaataaactctgcctcaaaaaataaaatataaggatcaactaattacatgttttttaaattctaattattgttttttagttttattttccttttttttaatctaaattaaaaatgttaacctctattttttataattaaaaaaactntgtgattccctttcactgatgttatctatgattctatgtgttgatgctgtcacttggcaaaggaagaacttaagagtaactgaatacagaaaaggaaaaactctgattccttttcactgtttttcttgcacatgagggtttttctacttataatatgccatcttaatgatcagtttgagtcttcgntgacagagtatngataca

SEQ ID NO: 153640 - DNA, 396 bp, Glycine max
  unsure (1)..(396): unsure at all n locations
taacgaatttacctaagtttatcttanaaacagatttagacaacacgtttacttgttttctatctaaacttgtaaaggtaatggttgttatcactgctaaatgtcttgctgactttcttggttaatgtaaaaaataaaagtctttcaagtcaatacatagtaactagtgaacctaattaaggtgttgtacatcattcaagatgagtatcccagagatacaaatttaggggaaaatgactactcatttctaagaatttacgttaataagtttaatgtttgaagagttgtacattgttcaagatgagtattatatatgggaataccgactcaggacaaaatgacaactcacttatatagcattatgccattangttcaatgcttgaggggctgtacat

SEQ ID NO: 153641 - DNA, 461 bp, Glycine max
  unsure (1)..(461): unsure at all n locations
catgcangctngcaacgatgcttcaatggaggaaaagaatgtgggagagaaagagagtttgtggagcaccaaattgaaggaagaaaaagggagagaagctgaactctgagttgtgcctcacaagactttcattcatcaaagttaccacaagtgttacacatgctcttatttatagactaggtagcttccttgagaagctttcttgagaaaacttccttgagaagcttctttgagacaacttccttgagaagctagagattagctacacacacccctctcataactaagctcacctccttgagaagctcttttaagaagattcctaaagaaggtagagcttagctacacatacctctctaatagctaagctcacctccgtgagatgagaagctagagcttagctacaccccactataatagctaagctcacctccatgacatataaaacatgaagatacaaa

SEQ ID NO: 153642 - DNA, 307 bp, Glycine max
  unsure (1)..(307): unsure at all n locations
tggaggaatctnctggagggcccaagtgggcctggttgctatttgcacccctctttatactaaatgcgtccccattttatgttattgggaattacttttccgtacggtacaaacttacgaatttcgtaacgaggcttatttttcttccgcaaggtgacgaatccttacggactatgcatttatgcttttttagctttcaaagaaattacggaaacttacggattgcgcaaaaatacctcttttcgacttccgtcacattacggaatttcacagattgcgcaagcctgcttccttttgatttctgaca

SEQ ID NO: 153643 - DNA, 460 bp, Glycine max
  unsure (1)..(460): unsure at all n locations
agcttgtcctaatggttacaaagtctcatattacttgattagtcaagaacataaccatcatcaaacacttaagtngtcaatacctcaaatacaagaaccttaacaatgtccacatatttaaggttagaccaagaaattttagtaatctggtaaggagtatgtaatacattataaatatctctacttattttaattgttggtctttgcttttctaatataatatctctctcacaaaaagaaaaaggcttaacattgacctctgtagggaaaaggtaagtaataaaataaaaatagtgttaacaaatattcacatgatttgttaaacaaaccaaaaacttgataatacttaatgaaaaataaaatattctatatatatccagaatataaattaattattaatacttatcttttaagttattaaactattaaaaaatcattactggtttcaacttcttacgat

SEQ ID NO: 153644 - DNA, 424 bp, Glycine max
tgctgtggagcctggaagtgcccacaatggtacagcgcctgtgattatggtattattcaacatggtagtcaagcattatagcatgttgcacgttgaagctcccctttatgctatacccacacagtgataagctttggctcatttgcatgatgatttgcgaaagaattctgctacgaaacttttctggtgttcctcatcaataggaaacaactaacagactctaagcaaatgaaggttgaattccattgtgatagactggagaaatccatattaccatgctatcggtggatctgacgaatattgctcgtgtttatgacatgtagaaatgccagtgggatcaacaagaaatttagatcgacctgtaacacatttctcctcgcacataatggtcaaaaatgccaatcactgagtggttatccagctt

SEQ ID NO: 153645 - DNA, 374 bp, Glycine max
  unsure (1)..(374): unsure at all n locations
ttgaaaacattacaaggtagagaagatngccnngngaaggagccaaggaggtgcattcgcccatgagaanagagntngaatgaaagataaacacaataataaaaaacagatttagaaaaacaataaaaagagatgtataataagaaaacgtagattaaaatcatatctatataagaagaagattgaagaatacattagtttgattatccttttcttaaggggtcttgaaatcagaaaacaagagtttcanaatggaagtaatactaaaaatattaacgtattttaataaatttctaaatcaactacactaacaattaatgtaaaggaataacccttntaanatcaatactaagtataaactataatagtcttat

SEQ ID NO: 153646 - DNA, 452 bp, Glycine max
  unsure (1)..(452): unsure at all n locations
tccctgtcacctatgagaaggagttactatttgttgtgtttgctgnacaaaagtggaggcattagttattacctaagtaggttgtaatcaaaactgatcacagaagtctcaagtatattcttgactagagactttccacagctttccaacaaaaatggttggtaaaacttatggaatttgatttcattattgaatataagtaaggaagtgagaaccaagctgctgatgcagtttcaagagttgaatgtgttactatttccattcaccaacccgattcagatctactagagagaatcaaagcatcttggcaaggtgatgatgccttacaaaaactgattgttgaagttacgaaagatccttcttcagataaggatttctctttgtcaggtggagaaataaggaggaaagggaagttggtcatttgtaaaaatcttgaattgagaaacgaaata

SEQ ID NO: 153647 - DNA, 352 bp, Glycine max
  unsure (1)..(352): unsure at all n locations
agcttcactctntatttaacgagtcttaccagtagttttgtaatttctaatgcaaagtgtgttaagaacaactatatattataaaatatggtattattacttttcaagatacaaatcacttataataattttntcatataaataaattttgacattaaatccaaattcatatacttaaaaaatacgagcccgagttatttaaaataactcacggggatatattaatttatatatacttcatattttgtataacagtcattcttgtatgtttcgaagatattgcattaatattaatatacaaaaaatagggattttatcaaataaaatattcaggaaaaaanaaattataact

SEQ ID NO: 153648 - DNA, 435 bp, Glycine max
acctaaaatctcagcttcttatctacttttttagatgacaacactgctctttgatttaatattatttatatcagccgctttaatagtattgttatcaaccgatagatttggtactttttctgacaggctatgtttagtttgctccgagttagcaatggttttaagcacagagagtggtttgacatcttttttccgggggaaaacagatgtatctgctaaatacaacctggaaagaataggattcttggcctgacattcagaagcctgctttgatactggattgtttgaaccttttctcagtagatcaagaactgattttaaagtgtcaatcttttcaggctctgtagctctcatgcaacgatatttccaaaactcaatttcacagtccctattccatgcacgctttcttctccattggatgtcccaaaaattttc

SEQ ID NO: 153649 - DNA, 419 bp, Glycine max
  unsure (1)..(419): unsure at all n locations
tgcagcatgcaagcttctatnctaccctcagacgagacatatcccatcatanacacttttggttggaaagaagatgagagataagaaaggattggacaccatgtatgagaataaggtgaacgaagctctaatataatttctctcttctcaattatctccattgatctctattgcatcgaatgtggaacattagcctgttaatttggaataattaatccaacaaagaataatgattcgatttatgtatgaatttttatccattttggaagcttaaaatatgaattcattctattcgaaaataatcctaattaaaagttaatgcatttggaaactcaacacaatattgatctgatttgattctaggttaaggttaataaactgataattctattctcatacgcttacctattctaattcta

SEQ ID NO: 153650 - DNA, 435 bp, Glycine max
ggacacatatgaattatatgctccacaagagggagaatgttgtgtattattattgatatcctacattcattgtaataaatatagtatataggcacataatcatcgagggaggtagaggaaatcaaatatcctccatatatttgtaataagtgcaataagcctatataaactgagtaccatgcttgattcagacacacagtatcagtctcaatatgcctctggtctatctcttcacactacgcaaaatcacttttatattaattttggattatgctgttatagctatgacgcaatagatatagtgatacataagtccggctacagtcctgcaaaagggaattaaagcgctcgcttgctattccgtgctctgaaagaggaaactccttgcaagggagaaccctgagctccattcaaatctggccattatttctatca

SEQ ID NO: 153651 - DNA, 256 bp, Glycine max
  unsure (1)..(256): unsure at all n locations
agcttcatgcttccatatccatgatggtaagtgatttctaaattatagcactgcatccagcttccaattgaataatgccatcctctatatatttcttcttcttgttgaggaattccttcatgaacttgtcataagttggcattttctcaagagcttctgaaaaaggaatgttaatttgtagcctcttgaacatgttcaagaaatgggaaaactcgctttatttatatcttcttgntggcacattaagatacggtag

SEQ ID NO: 153652 - DNA, 483 bp, Glycine max
  unsure (1)..(483): unsure at all n locations
tttatgagtggcacgtntcagatagtagagaggaagtatgagtgtttttctggcattttacggccgaacttagacaaagatgaaggcatgggctatggtggtgtgttgtaaggtggcttggttggtgtttggggttgttggtgacggagagacaccgaangagagtgaggttgttgttggtgttgagtgtgatggcggtgtctgtgtgcaatgtggtggacagtaaaggtgaaggtgcggtttgcgacagtggtgtgtatcggagagatggggtcaacgacgaaagtgacattgtgtatgatgacactcttatggttagatgcaacagagagagtatcaaccaagtagtgacacatgaataatccttgacacgtgttcacaacttaccataggttcggttgaaaccaaacctaccttcaaaccacaaagttacattnttatttngtgaggatgaaaaatggacacaatttacttcgcttatta

SEQ ID NO: 153653 - DNA, 274 bp, Glycine max
  unsure (1)..(274): unsure at all n locations
agcttaagtntgggattgatgtggtgtgagttatgttaattagacaagggaaatactgaaggttacaggatggttttcgtaaaagcacaccaaccgtttatttgttcaaatttgttgctctttttttttaacatttcaattgatagttgtttttgaataaagcctaaccgttgaaagtgtagttttggtgctattcgtgcaagagattgttgtgcgaaattacaaagctcaatggatatactacatagatattagttactatnttcctatcaat

SEQ ID NO: 153654 - DNA, 461 bp, Glycine max
gggtgaaagatgtggatcacctgactacaactctcagttgctttttctcttgtacaagaagagtttatgtaaatgaagcaagaattatgtgttccatgtaagaagttattacacgggtcccgttcgatatgtcaaaagcatagacgataatatgttgtatttggaaaagttgaccttttattttttcttcttttaaacattgtttctgtttctgtgcttagattgatattcagcacgagtgacacggctggtgaatggcctccacatatctcacttttgagtggtactgtatttgaaattaaagtcgtttaagtaaactaaaaaaaagaaaaaaaaacatccaatcttaattcacgataaaaacaattatttatgtatttattaacttatataaactatcttaattgattaataattgaaatgacagaacataacatgtatacattgaaatgataacaagt

SEQ ID NO: 153655 - DNA, 321 bp, Glycine max
  unsure (1)..(321): unsure at all n locations
gtttctgtctangcccggattcaatgctggctgcagcaccggctccgcttcggtaactgtactggaggcggntgtcgcggctttatcctctatggttttctggagttntaacatgacctccgagatggaagccatttgatcttttaaggccgatagatcggccttcatctgttcctgcacacccgcttcattatccatttttctggatcgagtgttataggggtgccttggtgttttcttaattatgatgaaatctctaaagaaataaacaacggtgagtatgccaccaaaacatgagtatgcaaatggatgatcggagca

SEQ ID NO: 153656 - DNA, 400 bp, Glycine max
  unsure (1)..(400): unsure at all n locations
ctgagagaccatacaagtttcctaacgatttctaattatgtgggccattaagtctatcatatgctgacaatagccgagaagcccatgaatctcttcgggggcggagtaggtgtctgccattgccttggccttggctaacaatcggggaagttcttgactcccgttcaaggtaagagcaaaccgatccatccacatggttgcctcttggtgtaaagagtcgatcacccttcctctagcctctntttccgcatatacttgggcatactcatccgcgattctatgctcgtgggccgtggctagacccaactcttcttggtacttggcgatgatagctaacatagtggtctctgtctcgcatagacgctgagacaagctttctttggaccttgagcaagcaatc

SEQ ID NO: 153657 - DNA, 298 bp, Glycine max
  unsure (1)..(298): unsure at all n locations
agcttgaacatttacaaaagaaacgcaagtactcaagatgtttcanaagtgaaagaagtgcctaagagaccttgagacatagaagcttgcattgccatgtttgcaaacaacaacatccaaagctatgaaaaaattcacaaggtatggaactaagttactgaacctgtataagagatgccatcatcattgtccattgcaatcaatggtggagcatatggtgacacattggatcgagcagtgaagttagatgactatactgcaggatcaaaaactctgttctgaaaaaacaagacttgct

SEQ ID NO: 153658 - DNA, 331 bp, Glycine max
  unsure (1)..(331): unsure at all n locations
ntgaaatcganaactaaccggntgaaggtcgagaacgatgaagaacgtgtatataactgtgaagaacattcacggatctgatcacggaagcattacagaagtgcctcgaccttgattttctccttcttttttcttcttctcactaattttaagtaaaatctaaataccaaaggtgttgaaccccttcccctcagcctctaatgcccttttataggaagaatggaagaagagcttgctaactaactcatccaggcgagctggtggctaaactcgaagcaacatgctctgccaagcgagctcaactcttccagagaagctggctgctccacta

SEQ ID NO: 153659 - DNA, 393 bp, Glycine max
  unsure (1)..(393): unsure at all n locations
agctctgagcaaattcaggcgacagatatcttttactcgtatgtctgattgagtcccgtcatataacgagacgctcganattgaatgttgaagctctgagccaattcacgcgacaatatctttttactcggatgtctgattgacgcccgtaatatatcgagacgctcgaaattgaatgttgaagctctgagccaattcaaacgacaataactctttactcggatgtctgattgaatcctcgcatatatcgagacgctcgaaattgaatgttgaacctctgagcgaattcaaatgacaataactttctactcagatgtctgattcagtcccgtaatatatcgagacgcttcaaattgaatgttgaagctctgagcaaactcacacgacaataac

SEQ ID NO: 153660 - DNA, 425 bp, Glycine max
  unsure (1)..(425): unsure at all n locations
gacactatcgaaactaagcttaancattcaatttgagcgtctcgtaatttacgggactcaatcttacttttctatttaaaatcattggcgcttggattggctcagagattcaacattcaatttcgagcgtctcgatatattacgggcctcaatcagacatccgagtaaaaagatattgtcgcttgaattggctcagagcttcaacattcaatttcgagcgtctcgatatatgaccggactcaatcagacatccgagtaaaaagctattgccgtttgaattggctcagagcttcaacattcaattttgagcgtctngttatattacgggactcaatcagacatccgactaaaaatttattgtcatttggattggctcagagattcaacattcaatcttcagccgtctcatatattacgggactcat

SEQ ID NO: 153661 - DNA, 513 bp, Glycine max
  unsure (1)..(513): unsure at all n locations
atccttaagtcacctgcggcatgcaagctntacattactcctcatgcttctcaccatgtctaataaggttcgatttcttcgttctgccacaccattctgatccggagaaccaggcatagtgtattgggcaacaatcccatgttcttgaagaaatttcgcaaatgaacctggtgcttgtccatcctctgtgtatctaccatagtactccccacctctatctgatctcacgatcttaatttgttttccacattgtttctcaacttcagccttaaaaactttaaaggcatctaaagcttcattcttagaatgaagtaagtagagatacatatatcgtgaataatcatctataaaggttatgaagtatttcggactatttgcatccatgtctggacaacatatgtctgtatgtatgaattctaataaattagaactcctctttgcaccctttntagacttgttagttggttacccttatgcaattacacaagtctcaaatcagcgaaatcaaagtac

SEQ ID NO: 153662 - DNA, 389 bp, Glycine max
  unsure (1)..(389): unsure at all n locations
tgagatgaggaagtgttgaagggtgaaacttctgcttttatggttgaccttatagtggtacctggagatatatcgcggnggtcaggagaccttgtggacgtcaggtggggtgctattgcccaaaaccaagcttgaccaatcccgacccaacccgggcatagtcggtcagtgagaacctgtgatgtacctaagcaggcgagctcctggcagtcaacagataaaaggaaaacaagaccacaaagcaaggaggcttgtggtggctggccagctgtgaattttgtgtaatgtgtggattgtggctctggcaatcgattaccaagggtgagtaatcgattacaaggcttaaaattgaagacaggaggctaagatggtctctggtaatcgattac

SEQ ID NO: 153663 - DNA, 310 bp, Glycine max
  unsure (1)..(310): unsure at all n locations
agcttcctcaacagttgcatgtagtgcaacctgtctcttcttcagtcatgccaattgggggatgtcacatttgtggtgagacccatgagtcaggcatgtgcattgcttaagatgatgcatctaaagaggtcaactatatgaccaatacacactgtcaagggttccatcaaggaagacctccacgataccatcaaggggaaaatttctctcaacatcaaggcccanggtggagatcccatcttggaaataacttcaacaaagatcaaaggtgtccatctattccgactcccaatcaggacttgtttatatg

SEQ ID NO: 153664 - DNA, 484 bp, Glycine max
  unsure (1)..(484): unsure at all n locations
ccttgaatctcagctgggttgggggtctggaatattacttcattctctcgttttatgttagagatgggaaagcgcgcnctatttatattttctcttttttactttttgaaaatattctttattttcagattgttaaaacttataaaatatctgtgagtttttttcttacttcttattctttattctacagaaatgaaaatactaaaaatgtgtttttttaaccaatttttgataaataaaaaaaaacttaaaantaatattttatgtatatacattaaaataaaaaacagatatagttagttttattaatgaataattttaaataaaggttattatatatccttaataatcttaaattcaatgtattgtttattataagacaatataaatacaaaatattgttatattaattattaccatcataacagagataaataagtgtaaactaactgtaacgctcttaaagatgtcttaaacattagtt

SEQ ID NO: 153665 - DNA, 465 bp, Glycine max
  unsure (1)..(465): unsure at all n locations
agcttgaaggtgtgtagtcgaccatcttttcctagtagaatactagtaatgtgtctactatcattatcattttttctccgtcattgaggtgccacttgaactgccaagtctctccacctttgggcatattctttgaaagatctgtgcccctntttgcacatgttctgtngttgcatcctatccggaaccatatcaaaattgtactgatactgcctaatgaaggcaaccattangtccttccaagagtggactcgagaaggttccagattagtgtaccaggtaacagctaccccagtaagattttcttggaaggaatgtatcagcagttcctcatcttttgtgcatgcccncatcttccgataatacatctttagatggttcttggggcaagtagtccccttgtacttgtcaaagtccagcaccttgaacttgngacgggtgatgatattgggttctaggaacaac

SEQ ID NO: 153666 - DNA, 484 bp, Glycine max
  unsure (1)..(484): unsure at all n locations
tcttagnttcagatgatgcagatgggttgtagctacctcatgctcttctctaatgactatggcatcatttctggcgctaaactgctgggagttggaggccatcttctcaattaaatttctggcttcagcaggagtcatgtctccatgggctccaccactggcagcatctatcatacttctctccatattactgagtccttcataaaaatattggagaagaagttgttctgaaatctgatggtgggggcaactggcacatagtttcttaaatctctcccagtactcatacaggctctctccactgagttgtctaatacctgagatatccttcctgatggctgtggtcctggaagcagggaaaatnttttctaagaatactctcttaaggtcatcccagctcgtgatggaccttggagcaaggtaatacagccagtcctttgccactccctctaatgaatgangaanagccttcagaaatatgtga

SEQ ID NO: 153667 - DNA, 496 bp, Glycine max
  unsure (1)..(496): unsure at all n locations
tcccgttatccttacagtcacctgctgcatgcagcttgtatgatctggattctgggatacaaagcttgtgaactatgtatgaattggtgtcgctcattattaaatgtagaataaatatgcaaatcgacatctccttgcagaatttatatttaccctattatttgcattccgtagtttatatttgttgttgttgcaaagtattgtgttgacatcgcaactcancaacacggatgttgtgttctgcaaagatgcattagccattcaaatggggagtatcaagacaagttgattgtagaaatatgtgctaatgcacttctcctagctcaagatcaattcgggtaacgaaacataattgtttataaagtacaaaattcctttcaatggttcttcttntttttctagttntgaatatctatttntccacccacaatgttcttttctcctttctgttccagaagcaagagtcttagcgtgtggtataccaggtttaacatct

SEQ ID NO: 153668 - DNA, 466 bp, Glycine max
  unsure (1)..(466): unsure at all n locations
ntctaaagaaaacttccttgagaagctctttgagaaaacttccttgttaagctagagcttagctacacacacccatctaanaactaagctcacctccttgagaagcttccttgagaagctagagcttaactacacacacccatctaaaaactaagctcacctccttgacaaaattcatgaaaatacaaaaaaagtccctactacaaagactacccaaaatgccctcaaatacaaggctaaaaccctatactacaagaatggtcaaaatacaaggcccaaaagaaggaaaaacctattctaatatttacatagataagcgggctcatacttagcccatgggcccaaaatctaccctaaggctcatgagaacctatggccttcccttggatctctggcccaatttacttggagtcttctatccaatgcccttacgaggtaggatggcatcattccctccaccttggaa

SEQ ID NO: 153669 - DNA, 445 bp, Glycine max
  unsure (1)..(445): unsure at all n locations
agcttagcanaacctgaatctgttacttctaaggcgcaatanactcataaatcagtaataaacatagaattagggaaggggaaaaaggattccatggatatttatttattactagaatataaaataaaaagtaaatcgtatcgcacggtttgaataatttcctttgttaaacgacgaaactgctgaaaaatctgacaatttaaattctagtcatgaatggaaactgactctttcacattcacaggtttatttatgtgttcaaatcgaaagacacgcatgtgtctgacctgacctgcatgcggtgcgtctgtgctttgcgcgtcccacactcctctttctataatgctnggacgaagaaaaaagttatttattattaagagagagagagagactctgcagtatcatagaccttntcaactttttcagttactaattctattcattc

SEQ ID NO: 153670 - DNA, 419 bp, Glycine max
  unsure (1)..(419): unsure at all n locations
cggattgtggctcctaaaacttcaaggatgaaatttgtgatatttcttatctcttaaaactttggccataaaagaatcctcaaaatggataatccaccaccactgttttgccaaaagtgctttgttaaaagcatgtgccatcatgaaacctaagccgccatcaacttttgatctggtcaatttctcctaactcatccagtgcattntcatggtgttaatgaaccctccctaaaagaacctagttgccatgctcttaatgtggttgtagatagacactaagagaatgaaacatcccataatgtaggaaggggttgtctggaccatcactttaattagatacttcctcccagctctagacaaggatttctcctttccacctttcaatttgttcacactttctccttcacaaagttaaacac

SEQ ID NO: 153671 - DNA, 437 bp, Glycine max
  unsure (1)..(437): unsure at all n locations
agctntgatgatatggtcttcaccgacgaaaggatctaagtangtctaataagaggcaaatctgatcatcatgctttgatacatgccaaaaaaaaactaaggcaaatgaagagggtgagaatgagggagaagcccatgctgtgactgccattccgatacagccaagtttcccaccaacccaacaatgtcattactcagccaataacaaaccttctccttacccaccgcccagttatccacaaaggcaatccctaaatcaaccacaaagtctgtctaccgcacttccaatgacgaacaccacctttagcacaaaccataaacaccaaccaagaaatgaattttgcagagagaaagcctgtagaattcaccccaattccagtgtcctatgctaactngctnccatatctacttgataaatcaatgggagccataaccct

SEQ ID NO: 153672 - DNA, 456 bp, Glycine max
  unsure (1)..(456): unsure at all n locations
tcactaanaggttcatccaatagntgtagagaggcgagatgtttgtcttttcttgtgtnggcttggactctagaaaatacttattgaggaatttgttgactacctcatcccaagtatgcaagctatttcctttgaatgaaaagagccaatgcttatcatcattcgacactcccacaagcttgattgtgttgcaaatctcaatggatgttgcaagatgagtataaggatctccatggaattgatttgcactgatcaattggatgagtgaggagggataaaatacattggctgcttgcacaatcaacctcacaacgctagtgaagaattattgaatggtatgggcggagtaatctccaagtgtccacctacgtggcttctctctcgccatttgtgatgtaagctccactggagctagtatgcctacgatattcttcatcaatggattccattgcttct

SEQ ID NO: 153673 - DNA, 205 bp, Glycine max
  unsure (1)..(205): unsure at all n locations
ctgcagctattgaccaagactgaactcgcccttttaatccaccgtgtagcacgtgagtgttgtgatcaataaagacaacccattccgccnatctaggaataggtgtcagaaacatatacattgaatcctttcattttccattaattctactatttcaatatactagtttatatctatagaatctatatttgtttggtcgagtttg

SEQ ID NO: 153674 - DNA, 458 bp, Glycine max
  unsure (1)..(458): unsure at all n locations
tggaatatacaaacaaagggacaaacacatggtcttgcattattatatttcaactataaatcgtaccctcagtgaaccatgaggagcaccagctatttcctcatacccagaagcatctagttcttgaagatggctacgcttgaacatctttggaagccactgttctcttataattatgagaaggaagaatggtacggggaacaatattccacctataggtatccaagtcaccccgaaacataacgcaaaatacgctaactggtaggctgtaaatgcagctatggtcttgaatggtactgtctccacaaaagaggcatgtgaaccttccaaaattctgcccaaacagacaagaaccatgacaaaaaatacgtaattagcttcttacagtatactaaaatgcctagtgataatgtanatntgaacgccgtgatcaatgtctcaacttcaaaaccatgatg

SEQ ID NO: 153675 - DNA, 396 bp, Glycine max
agcttaatgagacgtcgctccaacggttgtatatatttcaaattgtgtaaggcatatcttataattctctcggtaccaattcatgtacggactcatatgtccaatctttcccaaaataggttggccgattaacacatatttgcgtctttccttccatattgcaatccaccattgatgttcctctgcccaatttatgtcactatgtcctttcatgtcagtacaatggactttgtcaagattatgtggcggatttggtatatcttaacaaagtccatatcagagcatcaccctgtcagattgatgtcatactaccattggaatacatattaaaggtacacaagcacttcatattttggaatccttgtatgcatctcctcgcatatatgaattaaaacc

SEQ ID NO: 153676 - DNA, 256 bp, Glycine max
  unsure (1)..(256): unsure at all n locations
acacttgaatctaagcttgtacagaacttaggaaaaatcaagaacaagcttgttctcacatcgttcgcgtgtatgatatccaactcgacaaggttntgaagcaaaggagaccttcaatcctatgacacagcttggtcgacaacaatggccggtgatcatttatcgccattattgaccaatcacgaacgtatactatgcttcactatccatggtcacacattattgcaacttgtgggtacctgagcctgaactacta

SEQ ID NO: 153677 - DNA, 384 bp, Glycine max
tgctttcacaaatgcgcggaggagtgatcatcttacaacagaacacgaacaaaaccacccatcatatctcccaaaacctcattcccacgaaatttgagagagaaagaagtcctcccataacctggattttcgatgttccactcgttaccacgcacttcacgactccaaaaatgctctcctttcacgatttggggcataaatgagcaccaaaggttgaagctttgtgtggagcttatatggagaatgagggagaagaaaggcaacgtgagggagagggagagagaaggcttctgcaatgtattctgctgagtgaaaagagagagagttgtttctggttattaaaggcgttatctctttactatattttatcaagtctgcccatgt

SEQ ID NO: 153678 - DNA, 345 bp, Glycine max
atggttctataataatatggatttagctcgatgaatgatttctctatatctctatacagatgctgtttcaatcccaaaaacaaatgagaacttccgcctgctctatgacactaaaggccgattccgacttcattccatcatggatgatgaggcaaagggacatcttatatggctcatattgaatattgtgattcatttgcaggctatgcgctattatactattattgactgtagctttgttgcggtagtgatcttatatatatgctaacaaaagtgttgatctatgaacctttaaatgtcaacttcgggactgaatagtattttatttaattacttggagtacaa

SEQ ID NO: 153679 - DNA, 420 bp, Glycine max
  unsure (1)..(420): unsure at all n locations
agctaaccagnnattaaagatgatatcattttctcccgacactgagctgaattgtaattgtcaaattgaaccctaagctatgaaattattaactccatataccttgcttaggttctaagagagcacattggtttaagacaattctgccccaaatttgggggagtctgtgggatggataaatttaaaggtaagaaactacaacacacatagcaaattaataaaatgttatgtgtaacaaaaaagagaagaaacagagaaattcaaatgagtgagtatggataaaacaaagtcaaagtgaaaggctgatgaatgggctaagttgaatgaaaagacgaactgggctatgtcaggatttatgctctcttagaactcaagcttttacatgctacaaaaccaatagttttgtaccgcatctcataa

SEQ ID NO: 153680 - DNA, 418 bp, Glycine max
  unsure (1)..(418): unsure at all n locations
ctcaagctntagccttaagttgtncactatgttgctcatgtggctctccctattatgtagctccatgtggagctagtaggccatggatcttcttcatcaatgtagtcctttgcttcttgaagatcattggtagtgtaatggataaggaagaaatatgattgcggatgccactttaaggagaagatgagtcaagaagaatctcaccaccataagaagccatggataaaagcttgaattaacgagaagattagtggagggagagtggagagaaatgagcactctatttttgcctctaatgatgtctaactttgaagtgcaattctctaatgatccaagttgaatatatacacacacattgcctcttctatagcctatgtgtccttaaatcggaggataagttgtattttttcaatttcat

SEQ ID NO: 153681 - DNA, 428 bp, Glycine max
gctgcatcttagtgcgcagcctaccaattctccttgtaacactcattctaagccattcaacactcggaagatcatacaattcctgcagctgagattgatttccctcaccactgatgggttgttgagaatttgctccatcaccactcatggtacaatattcaaatcaatagaatctgaggattttgattgtacgttattggcatcattattcaataatggagcttcattatcgttttctcgttcacggactacattcaagtagaaatccaagttcacactttcattgtttatggtgtttgtgaagagtatgatacctctctgatgccgagagcttaaaaccaatttcaaacttcacctttggtgtgtaaagatacaaaacccacactataaaatgaaagaattgtttaaatattagttaattccataac

SEQ ID NO: 153682 - DNA, 416 bp, Glycine max
caagtggtaatcagagcactatagcttcaagtaggtgctccttaaacctccatttaatttttttctttaccttctcttccattgttggttcttcatttttctccatgtatctcctcacatgtcttggtctaaatgttgttaacatgattctttagagtttccaccgattaaacttgctatagaagttagatctgattttctatggttcaaatttcttgttcttgttcttgaaccatgaattgtgttgagtttaggttcctttgagatttgtcttgttattttttgcggctgaaacctaaaccataaaattcttaaaaaacattaaagtagaagacaacctcataaatctagagtgacttgttcacctattgtagttttgccataaagtctgtctagcatgaaactgtccataagat

SEQ ID NO: 153683 - DNA, 376 bp, Glycine max
  unsure (1)..(376): unsure at all n locations
ctgtgactctnggcattgctgtaaactagtcactttatatagggggacttatgaaaaaatcttcagaaacaagtcacttgaagaattgtgacttttggaaatgtatntttcgaaatcagtcactggtaatcaattaccattaagtgtaatcgattacacatcaaaagatgtgactcttcattttgaattttgaaaattaaaacggttagaagctctggtgatcgattactatcttctggtaatcgattaccagagagtaaaccgttttgtaatgattttgtgaaaaccttctgggctactcaatttttcggaaaacttttctagtactatcttgatgagtcttctttgaccttgatctggactgaggttgaaactg

SEQ ID NO: 153684 - DNA, 332 bp, Glycine max
  unsure (1)..(332): unsure at all n locations
ggaacttaaaactaacctggatcttaacccagcgtttaggattggtttttttctgggangctatgttccgcaaaaaacacatttgcacaacaaaatatcataagtcaaataagacttattctatttatttttcgtccaaaagtttgggagtggctcaaaaatactggtcttgcaattattgcaacaatgtattcatcaacgtcctattaatgagtcgatttactaccttataatcttattaaaatcgtctctatttttgtggagaatttattcacttgctgacaaataatcttgaacttattcttttcttctatttcactttattggctatc

SEQ ID NO: 153685 - DNA, 433 bp, Glycine max
  unsure (1)..(433): unsure at all n locations
taatttgantttttcgaagaagctaaatgatatagttaattttaacttgcagaggaaatttatcttattttatcttcttattttctagcattttgataactttaaagactttttatcacttgaaaaaaatgataacttaaatactcattcgatttagagtggtcatttctaagtgttttttatctataaatgtgaagtgatagtttttaataacaaaaatatttggaagtattattatctgtattgtctctcgtatgtctttacttctaccaggtagaaattcttgtctgtgttgtgatccatactaagcaattattcttgtgaagctcttaaaatctctcttcctctcttttctctttaagactaaatcaagtctacatatcttttgaatcattcgtgaataattattccttaaaaacttataagacaaatt

SEQ ID NO: 153686 - DNA, 429 bp, Glycine max
tcttatccaaggctcatcttggtggtgaagctccttcttccatggcttattccctagaggatggcgcctcctctcacctcttctccttagtcatccgctgcatctccatggtggaaaatcaccattaaaggacctcattgaagctcaaagatccagcctccatagaaggcccacaagcaagcttccatcaaaagaccaacacgttctctacttgtttttacacaacatttctcttgcgtgattttctctgtatttgcatagatagcttatatacctgttcataaccacaatcatcttttataccagacaccttttaccaaaatagcttgccagataacacaagttccccgagagttcgatacgcggttcttaccgttttatactacttgtgcgatccggtatacttgccagccgcgaacacttagtgca

SEQ ID NO: 153687 - DNA, 373 bp, Glycine max
attttctcatactaaatcactcactatgagtctaccattatagagatcatctcactctccataattggaatgtggtacacgatactgccaagtctgttcataattgggcgctacttcaaagatactgcccttaattcccctgctctgtattgcatcctatacggagccataccataattgtactgatactgcctaatgaaagccaccaataagcccttcccagattggactgcgcaagggtccaacttatgctcttggtgacaactacccccgttaaacctcttcgagaaaaatgatcagacgttactacataattggggatgccccatatctcagacatacatattataaaggttcctggggcaagtaaacc

SEQ ID NO: 153688 - DNA, 374 bp, Glycine max
  unsure (1)..(374): unsure at all n locations
gacacaaaatactaacttgctagcaccgatatgactacaattgtgttctttttcatggnagncaaatncgtcatgggaatgttgtccaaatgctattgaaggtaaagagtttcaacttatttgaaaaaggtgtaattgatttggcagttacaatttctagtatggtatagtgtttgacttacgatttcctacattaaagggtagacttgagcaatgaaaacaaaatactgcaccaacttaataagacaaagtggattgttctaaatcagctgaacgtagggggcatataactgtgttattttaagaatatgagtctactttctgcacaccattagaggtgaagcttggggcatatatcattggtcgcaaatatt

SEQ ID NO: 153689 - DNA, 373 bp, Glycine max
  unsure (1)..(373): unsure at all n locations
gacacaaaaactcgagcttgggcatgcgcgcaggcttgatgtagacttgtcctttatcgcgaggcgaaccttggacccctgtcggatacaatacctggaggaantacatgcaaccttactactattttgatatacaactctactatcttctccattctatacttgatattcaccggaataaaatgagcacatttggtgagtcgatctactatgacccacacagcgtcatgcccatgactagtcttggtaaactatattcagaatcatagatctgctctcccatgtccttccagaatttccaatggtgcaagtttcctgatggcgctggtgctcagccctagcctatgacatgtcgaacatatgctactattat

SEQ ID NO: 153690 - DNA, 394 bp, Glycine max
accaaagtgaaacacaacccagtgcgaatcaaaactcccacattcatcatgggtggaatggatgaatgcatgaataaatgcatatgacacagatgcatttatgaatattggagccccggaaattgtccctatctataatacagcattcgggtggcatggcgcctgacacatgcatttaagaaagcgacacggaccctacgttggtttgacaaagcgaggggatcaagacactaatcctgcatgatgcatatgctaaaggcacaacacggggatgcacatactacgactatttccacaagtatataagcaaaggcgtacatgacatttacgactacatgcttggcattgttcaaaatggctcacactgtgtttgctccgtgcccttatttaagga

SEQ ID NO: 153691 - DNA, 383 bp, Glycine max
gtggaagagctctacatgggaaacaataatgtgcaagagatagtcattagactcaaaagccaaagcatgggttcatggttaagtgagttaacgcatctgaatcaactaacaactttgaacatgcagatagaagatacttcagaatttctgagagactatcttggctatgggagactagaaagctacaacgatttgataggggatggatggaaatggtctggggtggagtctgggaattatgtaacttcaagacttcttagctgaatttgagtgcggatctaggcattgtaatggattatgggattaagtgttgatggcaaaagcttcaaatatctatatgggtgagtgaagggtgcctgaagactttatgatttgatgataaa

SEQ ID NO: 153692 - DNA, 429 bp, Glycine max
ctgcagcatgcaagctagaggtgtgaatcaaccatcttttttagtacaacactgataaggtgtctactatcattgtaatcatttccctttccgacattgggggtgccacttgagctgtcaaaaccatcctccttaaggcgtattcacatgaaagattcataccccttattgcacatgtactgtatctgcattctattcggaaccaaattgaattgtactgatactgcctaatgaaataaccaataagtacttccaataatgtgctcaatcacgttccatatttacgtaccaaatgatggcctcctcaaagagactttttcggaataaatgcatcaataaattgtcatctgttacatatagctcccattttcctgcaatacacctttatgtgaatctttgggcaagttgcctctagtatatataaatact

SEQ ID NO: 153693 - DNA, 348 bp, Glycine max
  unsure (1)..(348): unsure at all n locations
tcatagtaaaacactggtaatgtttctactatnatngngatcaactctttctccatcattggaggttgagctgccaagtctctccacctttaggcgtattctttgaaagattccaccccttttgcacatgttctgtagttgcatcctatccggagccatatcagaaactgatactgcccaataaaggcaacctttatgtcctctcaagaatggactcgggaatgtccaagttactgtctaggaacagctacctagtaagacttcttggaagaatgtatcgcagttctcatctttggttgccccatcttcgacattcatcttacatgctttgggcactagccctcgtct

SEQ ID NO: 153694 - DNA, 458 bp, Glycine max
  unsure (1)..(458): unsure at all n locations
ntgacaagacaagacacactgctgtcttctacaacaagattaaacatagaaatctattctaaagatacatataattataacaatttccatggctctttattctgtttcagcactgctccttgctaccacgttctgtgttttagctatggttaccaagttaccccatacaagtgagcaataacctattatagaccttctgtcagtgatagaccctacccagtcaacatttgtgtaagccttgatggtttatactgccggttctttttttaggaaaagacatctgcatatgcccttccttctcaagatccgatatactacctttaggtgttcttgatagggtgaatgtgtgaattgacttactaaacttacnccattgcccccgtgccccgtgcctgatgatcctcactatgcgaagatatataggagagggtcattgcatgctacctatacctttcata

SEQ ID NO: 153695 - DNA, 434 bp, Glycine max
  unsure (1)..(434): unsure at all n locations
agcttcacaatatcagcacattgtttccataaaccaaagnccaagatttgctccataaatattatagccttagaatctgtggcataatcttagcttgtccaatccttagatgtcaccataaccttcaatgcattcttctggaccaatatgctttgcaagacaatgaaattagttgcaaactgagttggagctggacggagtatatctcttccacctatatgttgtctcatcaagttatatacgtactcagtaattttttaggcacatgaaacaatctcacttacttcctcaaattttccaaagtctcgcaacatcaaattaatgtaataagcaacacaaggaggccaatataattcaagaaactcttttccaataacctaccagcagcaacataattttgctgcttatcgatcacaatgtgaacattttctgct

SEQ ID NO: 153696 - DNA, 262 bp, Glycine max
  unsure (1)..(262): unsure at all n locations
ggcttctacaggaagggcaagaagtagtctccttttgactactagaaatgtcttgacccctcatggtcatggttttatntgtggggcattgagaggcaatgtgacctctcccaagacatttgaagcatttaatgttgctagtcctttcttgtgaactagtcttaagggtgtatttctctatggtcttacccttatcttccttgggtattgaaggtgccagccccaaaatatcatgggcttggtccttccttggattaaagtg

SEQ ID NO: 153697 - DNA, 354 bp, Glycine max
  unsure (1)..(354): unsure at all n locations
tgcggactctttggatgtntttttattgactacaactcatatgcagagaccgagtgaatcttgtcatagttggagaatacttacactgtttataattgcgttccacacagaaatgcattaaccctgaaaaaatgcaattctctatggaagctacaaatcaagtttgctgtgcctgctatttgatccttctatatcgatgtattatgtatgttgatcgaacactatacaccactgtgttgagaaacacacattactatgggaacctctataggggtgctctgattaacccataaaaaggatatgccctcccttacactctttgtgaacggctacataacgttgtaaactatcaat

SEQ ID NO: 153698 - DNA, 392 bp, Glycine max
agccttctagctgtagattggtgtattttgatctcctttcggcgctctaaattgagggaatgtgcttaaatatatggggcaattttggttagttttcttgctcgattaggttgaattatgggtttgtatgggatggccctcagcctataatgcattcttaaacaatgggacatgccacattgtcccctttctcttgctattgttacctaaacgcgcgcccaccaagtgttctgcaaatgcctcaatggcattaacgcgtgacttttgtaaggaaacaacccatggggcattttggtttgtacatattttcttattttcgggacatgtattcattccctaaaaatgctatagttattgccccaatttatcccacgcctaggaaccgaattttt

SEQ ID NO: 153699 - DNA, 433 bp, Glycine max
  unsure (1)..(433): unsure at all n locations
cgacatagngcttgattaaaatagaatcatgccatacactgtccaagacacagataaccaattacactaaaatntactataactaattagtcaaacgaaagaaattgaactgaaatgctagtaactaattattgaatggatgttcccatgtagggttttaaattgtggtctccaattgtaattgtagccgcaacgttaagatattttgacatttcacaatcgcatcatattttctcataattagtcgcagtataaaggtttaatggctcgccgcaacgtgaccacaactgcaattttaaaccatggatgtttcccatcttctctttaattatcaatgcagcacgtacgcacanacgacacacttataagtataatgatgtggtcgatgcttgtataaagtctggaacctcttagcacattgttgtggattgtt

SEQ ID NO: 153700 - DNA, 454 bp, Glycine max
ggaccttaaatctaagcttgaatcttatacatggttggtgtatgttgtgtaaattggttagaggtttaagtgatggagtatagacacattaaaatgctttatttgcttgtcatttttctgaaatgataatccgattggatcttggaacaaatgtaatatgtgttgtttttcataaattccaaaaagtaatttccagatttttttgacttctagaaactactttccaaactacaaaattaaaattgtattatggaaaagttttttctataacctataattatgtgtttaagtacattccgaaattatgtttaatatttgttttcaaatagtagtttggaatacaaatattaacattaattttgagatactttctgataatgatataaggtttttgggaagtgagattttattcaagggtggtcttaggaatggtgtaatatcgagggctttaata

SEQ ID NO: 153701 - DNA, 350 bp, Glycine max
  unsure (1)..(350): unsure at all n locations
tttccaacttctctattcgaaaatataaaagccttcaattaagtcaggtttttaataggaaaaaatatatcaactacaaactcaacaaatatatccgagagtttttgtattagtgaaacctatgtctactatgcacatacccatgttttcttcttgcaccanccaataataagtaccacgcccaatgggccttaataagtattccgtgcatatcatacaataggatcaaaaggcttttaaaatagattgggtgtgatgctgataacgcacaattcctagattcgagttctgtatgagccattattttagaattaagtcgtaaacatatgtttttaagagaattaaataaa

SEQ ID NO: 153702 - DNA, 359 bp, Glycine max
tatgtatagaatttatctaacactatacgcatcaacatggtttctttcacattaggagaaacaatcagactttctgtgctactacgatatagtaactgcatttaatttacagcatttcttcatgagaagattaggtttaggctaccagaacatgacggaagtctattcaaacggtgataatgtgcaaaaatgaaatcattaaatactgagatcactcagaaaaaaattaaattaaaatattcgcacaattatactttgttgaactgtctggtaaaatgaataaaattcatgaattaaaacattgacatttaaattaatgtcaagcaattaactgttagataagggcgttgagccactat

SEQ ID NO: 153703 - DNA, 412 bp, Glycine max
  unsure (1)..(412): unsure at all n locations
agctnaaaattaataccattccctgcattgcaactccgcagggcatgtccttacatatatggatttgggtctagatcaatccaataaggttactcaaaatgtaaaaagtgtcatttactcattaactttattttggtcatatcatcaatcgatataatatttccagcatgcagagcatacacacgacagactattctgtccatatttaaacatgtcttgaccctaaagctgtatggtaatattttaattagactaagaaccctatgactctggcttgaccttcaatctctaataactggccccaatgccatattttattgacctggaagatcacgattgaatacattattgaacttgcgcaattacacatagtccttaacgggcaggacgtgtgtgcctttcttggcctgcc

SEQ ID NO: 153704 - DNA, 438 bp, Glycine max
gctttgtaccttctgaacaatatgtcaaacatatctataacttgatgtcactttctaaattcattggaggtaaagatgtaaactctatattagatgcattataaatgaaatacaaagaatgaaagggttcaagttattaatatacctgatgaaaaagcacttgattattatggatgtaaagagtagtagtataaatgagaaaaaaagtgaagaaagtcatggtatgataagtaactgatgaagtcgtcaacattaataccttcaaaacttatacaactgtcatacttaaaaatataattcgaacacaattacttggtcattgcaacagtgttaaaatatacacttctaaacaataatagtgagaaacgaaatatttcatctgtataaagagagaaatattaaaccaactagtcataaatctatatgctttgcatctaa

SEQ ID NO: 153705 - DNA, 337 bp, Glycine max
  unsure (1)..(337): unsure at all n locations
ntataagtgcgggtctgggagactaaagtcatgcgttttctatatgtgaagatgatgttccaagtacttcggatttggtccgaccatgccctcctgattttcagctgggaaattggcgagtggaggaacgccccggcatttacgcaacgagcataatgtaaacctttactgttgtataagctctatagctgggcctaagctctagagttttccgtttgttaaggctctgtgtcttttgtttttgaatttataatacaatgatctttcttcatctgttcctgggctctacccattctcattcatttgcatgtttacttctttctctgatacggcagat

SEQ ID NO: 153706 - DNA, 438 bp, Glycine max
agcttctggtgggacatcttgacttgctttccaatctgacattcaccacagattctgccttcttctattatcagattgggaatgcctctaacagcacctttgtcaatgattttcttcatgcctcttaagtgcagatgtccaaatctttgatgccatattttgacttcatcttctttggaggatagacatgtggaggagtaactggtttcttgaggtgtccataggtaacagttgtcctttgatctgctgcccttcattagaacttcactcttctcatttgtcaccaagcattctgactttgtgaagtttacattgaatccttcatcacacaactgactgatgctgatcaagtttgcagtcagtcccttcaccagcagtactttgttcagactaggaagtccatcatggactagctttcccatgcagtgatctttcttt

SEQ ID NO: 153707 - DNA, 378 bp, Glycine max
  unsure (1)..(378): unsure at all n locations
ctgtagccattagaagagaatgagcatgtgattagaagtatgactgtaaatgttagtcagntcgttagaatgattgtgaaggaatgcattaattgtatcccagtgagagtgtgactcattaaatttgagagaaatgactatcatttagtactaatatttgcgtgaatctctgaagtatagactgaatgtatgaaattaaggatgatgaacgccatgtttgattgtgatagccatttagccaaaaaacttaccatgtgcttgaatgaattatcccttgtacccaatttgagttgaatgattattgattgattgaaccctgagcctatacagtggtatcccctgctgccttgacttaggttgtaggagagcatcattcat

SEQ ID NO: 153708 - DNA, 397 bp, Glycine max
  unsure (1)..(397): unsure at all n locations
gcttttacatgaaaacagtgatcgtgacatgagtatgntttcttagttcaaacacaagagagaaatacataatcaagaagtacgagtcacacaaaagggataaatattgttaatagatcacatccagaattaaaattaaaatatataattataattattataatagtttgaacgatatgatatggactaaaggaacatgatactctcatcacctatgtccatttatcgtggcataaccacaactgtggcataagttataactttgaccatcaatcatcttcagaaacgacgcacaattgacaatcaatgttgcagccttataagattcaatttcacatgtcttcaatcacccacactcaataacttaagcgaacattatgaattaaaaaaaataaca

SEQ ID NO: 153709 - DNA, 477 bp, Glycine max
  unsure (1)..(477): unsure at all n locations
ctttgtatcanagataattgtttacttagaaccattttgtttaaaacaagnttagtttaggtgttggttagaaaaggttatctagtttagtgattgaacaaaaaacaaaaattagatctgtgctaaccaaagttaagagaggaggaagaagactactcaaagatttttatactggttcaccccaaccttatgttatgtctagtcctcacccttcaagatgacatttcactaacacaaccattcccaactgtaccaacaaccactggatttcttcaacaacctatcaattgcccaactgggttgcaatcctagcctcaactagaccaacaacaccactggatttcaacttgggcaactactgctggacttatgatacgaaaaaaggatctgtgtttatctgtccaaatacaagactctaccttgatagaggaattcccgtcaagaaatatatctttcacttctaccctaaaaatatta

SEQ ID NO: 153710 - DNA, 411 bp, Glycine max
  unsure (1)..(411): unsure at all n locations
gctntaaccgcctgagaacttcgncttaacacagnggagggtgcatctcttgtgtctctagtagacggtacatctacttggagttgactgataacaagagagggaacatctcttgtggatcagttctagtggagggtacattcactatgatcatagagaacccttgtggatctttacttgtaaaaggatttttacatgattgaaataaatctcaatgaccgtatgtcgttcgtggacaggatgtaggcacgaattgttgctgtactcgcttaataactcttgtgtgtttgtctccttctttcctaatcttttacttaccgctatgcatcttaatatccgcttttcttttggagaagatttcatgtactccttatctcttacaactaagtaaagccctagatgataaatttt

SEQ ID NO: 153711 - DNA, 324 bp, Glycine max
  unsure (1)..(324): unsure at all n locations
tngntaagctaagcacttacaaagcgggtctantctctccatcatcctcgagagggaacctccttgacaatcggactaagtccacaacgatcatctatagcatgcccaatgatacatcgattcccactccccgttccccgccaatgagccggcacccaactcactatcttaatccaacttcatgggagaacctctaaacccctcagcacaacctatattttttttcgtatacgggccacccccggctgttgatgaaaataggacgcacttcctcatcgaatagatactaaatgtttttgaaagctttggctactattactttac

SEQ ID NO: 153712 - DNA, 304 bp, Glycine max
  unsure (1)..(304): unsure at all n locations
ctttgaatcgccacgtcatgcagcacctgattatatgctcgttgcatganagaggagaaaatcgcgacaatgggtttgtacccaccaatcgccagacccgcagcaaaggtcaccgcgtgttgctcggcaattgccacgtcgaagtagcgatccgggaatgtacgtgaaaactctaccatgccggaaccttcacgcatcggcggagtaatcgccatcagcttgttgtctttcgctgccgtttccacaaccagtcgccaaagatttttgaatagctctgcataccgccgctacttttccggaaaca

SEQ ID NO: 153713 - DNA, 375 bp, Glycine max
tgctcgcatggtcaaagagtggaggatgattcattctccttctgcaggaccaggtttaagaccctggacagaggatatgatatctcatttcacttgtgcttatatctacattatggatgattctctgactctgcggaatcgtatttaaactgttcagttttgaggtgtggtggttccctaactaatggtcagatctatggttctcctatacttattctgcatatcgtattaccctacacaatgtgtgttgctcctcctgattgcaagctgtaatgaaatcatcctacttgtactgctctcattatatataataatatatattctactatagccgacacaacaaaaaaaagatctccactgggataccttaactga

SEQ ID NO: 153714 - DNA, 437 bp, Glycine max
  unsure (1)..(437): unsure at all n locations
tgccgaattactgataacatgataaagatggcataagatactgaaatattaggatgcaagatattgcatacaaattgatctgcacattttctactagtgtgttattccccttttgtgttcgattntttaggaggattggtacattgccttcctctgctatttgactcatcatatactctacattctattatagaagaagtgctgataacatagttggtagttaatatacaatttggtccttgaaagtggcaacttgtgtctctttgaagtttgttcttagagagtttttatctatacaaagtcttgaggctgaaattgtttacaagttgacaactttggagggtaaacttggtagaaaattgacacttttagcgatcagtttatatagatatgcactattagggaccaaagattaacatgtcgctttcatggaccac

SEQ ID NO: 153715 - DNA, 384 bp, Glycine max
  unsure (1)..(384): unsure at all n locations
tgactgtccctcagaccgtgtatgtgcgaagttttntttatgctaagtnagacaaattcagatgttcccacaccagatctacccccatttttgaacactggaatgcttgactcacatagttccattacgtcttatatcactaacagcttcatatacattgccctgaagaagattggagtgtacctcaactgctcagagtactctcgaaattcagatgggccgttcagaaatgaagaatccattatccaagtttgattttcatgaaattatattgcattcttcaattacaattgcggtcgtaacatcccatatttcaagtttccgtgactgattaactagcccttgctcacatttgtccacatcgtatgtgaagatcatgatttt

SEQ ID NO: 153716 - DNA, 342 bp, Glycine max
  unsure (1)..(342): unsure at all n locations
ttcctacttttgtttggtgagnnnntattgttatntggagatatgttgcgggggtcacgagaccattgggatttctagtgtggtgctattgcacaaaaccatgtttgaccatatatccaccaaacccgggcatatttatgttatgaggtcccttgacgtacctaaacatgcgagcttctggctataaaccaataaaagaatcataaccacttagcttggatgcttgtgtggtggctggcctcctataggacttgaatggatcacgaaattcgactttagtaatctttatcaaggtgttcttccatttcaatgttttaaacaatacatgatgtatcattgctc

SEQ ID NO: 153717 - DNA, 423 bp, Glycine max
  unsure (1)..(423): unsure at all n locations
ntcaatgcacaaatactagataattatatgtacactttggtcaagctcaattatgatattaattttttaaaattatctataaaaacctaaacagcatgaaaaagagaatatacacaatcaatatctctctctaaatatctccttactttatgtcatcaattcatatgaattagaaaaagtactcgatttataaggttcaggctcaacacaatagcatatcaatttcacaaagaatggtctgtcaaacatatataattcactgtggtaattataatggataaatagatattgccaaaacacgccataactcattccaattgatatctctaaggatccctacacatgttctcactaatctccaattgtaataactcataccttcctctgagcggactacatgtttcagcagcatagaacatctta

SEQ ID NO: 153718 - DNA, 381 bp, Glycine max
agctaatccacctctcagagggggtcgttccattatcagagacctcatgaggaacctctttcgattaataatttttgatgggaaccacttcccgctctaccttgggttgttgaacaaaacctctagagtcactttctctcatgcctcacgcataataaaaaaaacacatacttgggaaaagggggggtccctggaatgcactatcattcgtatatggatgaggataaattgcagaaaactcataaatcacaatatgccactcctggtaatatccagtaattgaaaagacacaatagtcggtagtctatacaatgcgaagattaagagatgactccagataaattgcgaaatgttgtgctcacaaatgaaaacgcggaaaac

SEQ ID NO: 153719 - DNA, 460 bp, Glycine max
  unsure (1)..(460): unsure at all n locations
gacactataaatctaagctatgcgctatntccttacaatcgttctcttgcacaagacattctattatccgaaaaaatgcacccatatacaatcaaggcagcttcgttacctagattatttacacgtacttccaaagtgtatgtgttacttacatcccacacatctccttggctaaattcacatacatgcatactccaagcattttggggtaccaaaaattgcacatgtgcacatcttggtatttctaatacctatacatacacaaacttcatgatgaatcttgactatctacacaataaggtgccacatttcatgccattcttttcaagtttttgctacctaaagccgcatgcaaattcaagcatagttttctttgctgactaaaatgtttcaaatcaaaaggatacatttttggtaatgtatatcttacataaatgcacatattatgatatattttttg

SEQ ID NO: 153720 - DNA, 190 bp, Glycine max
taaagttgtttgagctctaatgcatcttgagacgtgagctcaagaagacttttttttgtaggggtggaagcttgaacactaatgatgacatggtcactggttgtcatattttcaatcaacttcatatctttattaagggtcttcaatttgatttttccaccagtaaatgctattcaaaatttcttggaat

SEQ ID NO: 153721 - DNA, 393 bp, Glycine max
tcaatggtagcgtatattattacttacaaaatgacttatcatagaattacttataaacaatgaaattgatgtttgattcttcgagtccagaaattagaacttgggactcttttccaataaattgacgcactagctcctcctactttaagtcaataaacagaatgcattatcattttatattaaacaggtaaatcttaagaatgacaatcgaactcgaattgaactaatgttcttaaagattatttacaccgaatgaacgttttatatgtcaaatgagtctcaattcagacctaaagaaaagtctgaaagattttgactttttaatttgattacacgcacatcctatataacggattacattacacacataatattataagcttaatttctatt

SEQ ID NO: 153722 - DNA, 261 bp, Glycine max
  unsure (1)..(261): unsure at all n locations
agcttggctcccaacgctctgttcaagctctcttanaaatctataggtaaatctaggatctctatcacatactatgctagatggcacaccatgtaacctgacaacctcacttatatagaaggtggtcaacttctccaaggataatctgatattaatggaaatgaagcgagcaaacttagtcattctgtcaacaataacccacatagaatctaaacctctcagggttctaggtagtccctccaacaaatccatggaaatact

SEQ ID NO: 153723 - DNA, 285 bp, Glycine max
  unsure (1)..(285): unsure at all n locations
tagaagggcctanagggatgagtcaaggaaggaaagcatggtgttttatatattagctgaaggcttgtcaaacggcgaacagatatctgatggaacaactgacaacaacggaatagaatatgttcacaattattcatcaatataacaagaatgcgaacctagctgctatccatacgcaaaggctgtatgatgaacatcccaaagcatctgttcttctacagacacgcgtgtaatagacacggtgatacacatcatagcccgagacactctcacataggctggcta

SEQ ID NO: 153724 - DNA, 123 bp, Glycine max
gcagcagcagccaaaaaaaaggcaagcaatcccatattaaaaggcaaccatcaaagaccgccaacaataagggagggaaccacaaccggaaaacccgaaagcagaagtggatccaagcaaaaa

SEQ ID NO: 153725 - DNA, 470 bp, Glycine max
  unsure (1)..(470): unsure at all n locations
acctgtccttggtagctctctgggtgtcaagaattatataaatgagatgtgattataacctcaatttaatagtctccgngaaaagggcatttctctctctacaaacatttctttgcaaattccaacggagaagttgttggagaatgggttctaaaggtggtgtcctaactttaggatgatccaacaattaacgagtctgagattgtagttctaccgggatatgttcgggtgtatgcgaggaaaacaaagtgtttgagagaggaagaacggagaaccaatttgggaggaataaagaacgtatagacgcatcggcattgtaataactgacctattcaggctctatttttactatggaactctgacgctactatttactctatttatttcattatatattttataaaataacttcttttacttcgcattaaaaaaaacccgtagacatcattatttttaaacagattactctt

SEQ ID NO: 153726 - DNA, 324 bp, Glycine max
gcaccacattgtccaacatgtaggtctttcacccaactgatcaatacaatgtgggctccttcactttctattataagaggttctgtgggttccagccagcggcttctgacagtatcaaaatgaatgtggggcaatgggggtgtcaaccgtacagtttcccacagatcccatgtgggaggagaaacagaatacagagtgcctcagggttttctagcgcgactgtcgtgaaattaatcccgtcttaacttttaacataacaacatcaacattagtttcttattgatacccgatgttagatgaatttcttaacatgtccttctcaaa

SEQ ID NO: 153727 - DNA, 354 bp, Glycine max
  unsure (1)..(354): unsure at all n locations
agactcttcccgtggtctttgtatgtctagtttggncattccggcctccaccatttttctctttcttgggtcatgaacaatctctctgagtgtgtcccttntgtccacaattaaaacatgttacgcctatatcgggacaattcgaggagatgtgccctggcttaccacacttgtaacaaatgatatgagtagagaacgtattgggtttgctactgttaccacctgcaaatcccctagcaacaatcctttgattgtcatggtggttaccatattgcttaggaggagtcgaatatggtttttcccgatgttgagggccacttctttttgttctcattggacctgtactcctataat

SEQ ID NO: 153728 - DNA, 302 bp, Glycine max
  unsure (1)..(302): unsure at all n locations
tgcctcanagaggtccaggaaggacaaggcggtcgaatgatactattttcgncccggagtatgacagtcaccgctttaggagcgttgtacaccagcagcgcttcgaagccatcaagggatggtcgtttctccgggagcgacgcgtccagctcagggacgacgagtatactgattttcacgaggaaatatggcgccggcggtgggcaccactggttactactatggccaagtttgatccagaaatagtccttgaatcttatgccaatgcttggacaacagaagatggcgtgcgtgacatgaga

SEQ ID NO: 153729 - DNA, 298 bp, Glycine max
  unsure (1)..(298): unsure at all n locations
tttttggcgcccaaaaatcngaccaatttaatatagatctcatcatcttctttctagtgtgactatagctgcatggatgcaaattgcttggtgtccacctttcttgcttcagtcatttgagcctgcagggccttccttttcttttgcagcacctgataatactcttgcagtgacatgatctacgacacagattatattccgtgtagcaatgaatgaacaataacctatagaacataaatttcaaacgtggcccactataagcatgaaggagcgagaatcatatattcgattgaaggcc

SEQ ID NO: 153730 - DNA, 391 bp, Glycine max
agcttctaagttagtgtaccaaactaccgcggctccggccaagctatcttgaaagaagtgtattaatagcttctcatccttagagtgtgcgcccatcttgcgacagtacattttgagatggtgtttgggacaagtcgtccctttatacttgtcgaagtttggcactttgaacttcgggggaataactacatctggtactaaacaaagatccgtcatgtctgcgaacggatagtccccaatccttccacggctctcaattttccttgaggagatcaagcttcctctcttctttggttgccgggggcggtcctttcgtggacaaaactatgggttgtgccgcgatgatatgatgaggcacatacttggggcctgtcatttgggatcgggggat

SEQ ID NO: 153731 - DNA, 459 bp, Glycine max
  unsure (1)..(459): unsure at all n locations
tgaaggcanactggatgcgtgggtcaacttggtaacttatgctggccttgaatcagaaatctgtacctgtcgcaagggtttgtggttcgtgctcctctgctgaccaccatacagacctttgccctcccatgcagcaacctggagcaattgagcatcctgaagcttatgctgcaaatatttacaatagacctcctcaacctcagctgcgaaatcaaccacagcagaacaattatgacctttccagcaacagataccacaaccctgaatggaggaatcaccctaacctcagatggtgcagccctcagcaacaacagctgcctgttcctgcttccaaatgctggtgcccaagcagaccatccttcttcccaatccacaacagcacaacccaaaacagccacagttatgcccttccaaccttcctcaaaacttgtaggcacttactatgccacatgcatttaa

SEQ ID NO: 153732 - DNA, 292 bp, Glycine max
agcaagagaaacaggtgaaccttctaattttcgagcacttcatctacagcaggaatgggcataccaacctgtatattcacggtctattaagggcggtaatctatgctaaatcgccatgtcccatcatgctctttgaccaaaagcatccgacatgaaaaacggttgttgcctggttggatcacgcacttctgccccatctatactactcgcaactcaatttcacacttatgaaagtgtgggatgctattcggacatacattcacttagatggattgcggaatatagcgtatat

SEQ ID NO: 153733 - DNA, 428 bp, Glycine max
  unsure (1)..(428): unsure at all n locations
ngatggttttctcatgaagatttaccccttggttgggtttttgggctggnngactcctttgctcctagttgaattgattccccagatggttcctccaacttgagccttgtgtgaaattcctctcctgattgaatcccagcgatcctccttggttgtagccttggaatccgtggcgattctgtactcccatgtagttcacgtccctggaaaaatcttcttggactatgcattgccctagctcgtgtgctcctccatagatgtggcatccccctatctgcatgactgaagagtgagaaggacttaccgatgatcacgaaggatggcgtgatcactggccaccatgtnttctatcagttccattgcctcctttggtgtcttcagcttgattgttcctcctgcggatggtgtcaagagttgctttgattgtg

SEQ ID NO: 153734 - DNA, 275 bp, Glycine max
atgattaaaattaatacaacttattattccatctgggtttaaaactggagtactccaaaataagttataaactgaacacatggaaatttatgtggcataagcctaaacccaaagtgtgtttataaccgtggccactatctgtgaaaatctgcactgaaggtacctccaaacaaaacccatttcaaatctattaatgctcaaagctcatgcctttgtattgaaggctgacggcataaaatccttataattcctcatccactaagagaaaaaaatgt

SEQ ID NO: 153735 - DNA, 479 bp, Glycine max
  unsure (1)..(479): unsure at all n locations
ggcttgtggggcttctatggaagctggatctttgagcttcaatgttgtcctttaatggngacnttccaccatggagatgcagcagaagacaaatgagaagatgtgagaggaggcgtcatccactatggagtaagccatggaagaaggagcttcaccaccaagatgagccttggataagaagcttggaaggatgcttcaatggaggaaaagaaagaggaagagatagagagaggggggagtacgaaattgaatgaataaaagagggagagaagtggaactttgaagtatgtctcacaagactctcattcatcanagttacaacaagtgttacacatgctcctatttatagactaggtagcctccttgagaactttcttgagaaaactttcttgagaagcttctttgagaaaacttncttgagaagctagagctaagctacacacacccctctcattactaagctcacctcttgagaagct

SEQ ID NO: 153736 - DNA, 280 bp, Glycine max
caaacggtgcagctgaaactatacctcatttttaaccacggataaagctagctgcctaacaacaatgcctcgtgtctatgaaactacattcgtaaacgcgacctaacgaattatcgaaaaacccatatgcgagatggcttctcactcttcagattttggattgacaacctgttaagaacaataaactatgtacatgagacgggagctaccgaaagtacctctaacctgcaatcttggagaaggatcataaggtcacctaaggacataaattcatattgtc

SEQ ID NO: 153737 - DNA, 421 bp, Glycine max
  unsure (1)..(421): unsure at all n locations
ntgacctgggaccctcgtcttgcgactggtgcgacgatctatttcttntttgttgttnacgcaccaaacccaataagtgatgggcgtgaaggggtgtattggaaaatgcccaattcccacatcggctgtctcaatccttagcgcgcaacttatatatctgtgtggataatgttacttaatgataattggttttaagatgaaatctaacaggcaacaaaaataattatcctattaaatatatgaattacttacattatctattcaaatttatacttgtattctatctttatctggacttactcttatgttcgttaatgttcggagagaaaatacttaactcaagatctataagaaattatgattaacacatcttcaaaagtagcacaaaatatttataaagagacagacaattgtcaaaatg

SEQ ID NO: 153738 - DNA, 447 bp, Glycine max
  unsure (1)..(447): unsure at all n locations
tgtgtcttcttcacagatggggcatgcatgaagacccttgacacttcttcttctcanantnccatacganggaaagtcattaatggtacaaaaaagcattgcacacatttcaaaagtctcattgcgaaatccatcaaacactaaaaccccctcgttccacaactttgttaggcctttaatcaacagacttagatagacatcaatgtcatttcctggttgtcttgttcccgatatcattatagacaacatcatgtatgttcgcttcatgcacaaccaaggaggaaaattgtatattactatgtaaactggccatgaactgtgttgagtgcttaaatagccatacggattcattccatcactggctaggtcaagcctaagatatcttgcctctttgccgaaatctggatacaaaccatcaatcttcttccattggagaaatccggcgga

SEQ ID NO: 153739 - DNA, 265 bp, Glycine max
  unsure (1)..(265): unsure at all n locations
aaaactcagctcgagaatgcaatggcataacagtgcacacgaggtttcttattctgtcgcataacacancgagacgctcggaattgagcaccgaagcccttcaaggaaaacaaattgacctcacttctcaaacgggttgtccgattcggacacatcatatatctagacggttgaaagnggataacggaacctctcgaaaaatatcaaataggcttaacacttcactcggaaatatcgaccaacggcgataatatatagagacgcg

SEQ ID NO: 153740 - DNA, 408 bp, Glycine max
  unsure (1)..(408): unsure at all n locations
tcttatccaggcaattcttggaggtgaagttccttctctcttttcttattccctagtggatggtgcctcccttctcctcttctcctttgccttccgctgcatctncatggtgaaaaaatcaccattaaaagaccccattgaagctcaaagatccagcctccatagaagccccacaagcaagctttcatcaagtgtgagaaaacatacttacaccatatattcctctcaaggttatataaccaatgatatgcagctttgttgatgtccttaatctgcttcattttatgtttgcacaactgttcatatgtagctttagcagcccccatcattagatctgtgtacattaccccaccaccaaatagtgtcttaaaattgttgtaagatgtcgcaggcagaacctgtgctcta

SEQ ID NO: 153741 - DNA, 416 bp, Glycine max
agcttctccatgtttccgaattgtatcttacaacgaatcacatctttggcatcgtcggtatggtcacttatactatagccgattgaggacactttttgatagaagatggtaaatgggttgccttcgggcaatatttcaaaaaagatatgcatagaatgtttaactggacagcaacacaaagactttatgcctcagaagagtttatggagagcatcaaacaagctataacttgtgcatgcaaacatatgcgggcctatttaaccattatcaaactgcaacaagaggtacatgctaagtttattgatgatttcactctgtaaacttggatttattctttacatgaaaaatcaaaagttttttccatgtctagaaatattaaagcttgtgtaaaaggagattggtgcatatatcgccct

SEQ ID NO: 153742 - DNA, 330 bp, Glycine max
tctcccataagttaatattagcttattaatatttgcttcatatcacaatgtgctcgccccatccagcaactaataacagtaacgagttgaattcgaaactaacagtgagataatcttcgggtctgggatatgtgggaacgattacggaggcctttgactcggactcctctgcgggctggactccggcgtcaacgacatgatcggagccgtcgctggaatcggaacagaaaaaatacctgcctccaacattagcgtttctccagcttaacccgccgagagaactcagcactctgagcaacggcgaagcagaatggtgtgctggacagagca

SEQ ID NO: 153743 - DNA, 445 bp, Glycine max
  unsure (1)..(445): unsure at all n locations
taggctaaacntgtagaagctactctagctgtttctattcttacatgagggatctgcggacaaaactcattttaagttagtctaaacctaagagggctgtctaaattaggtgtagtcttacatgagggatctgcggatgaagcttggatattcagcctaacgagggatcaagggtttagtaatttaggctacaacatataacacaagagcacgattgattagagaaatatatttctatgcatcagcttgtttgttagaaatgcccaacatatctacctactactgtcattttattaaccttgcacttgatagtttttagcatacaagtttaagttacaatctgttcgaatttatcactcatacatgttctctcaacaatggttcgattctgaacttaatctatgctaacattaggttcctatgttcgatactcgaattcatccgt

SEQ ID NO: 153744 - DNA, 337 bp, Glycine max
cttcttccatggcttattccctaatggatggcgcctcctcacatctctacatcttggtctcccactgcatctccatgagggaaaatcaccattaaaggaccttattgaagcttaaagatccagcctccatagaagccccacaatcaagatcccatcaatgacctcgactggtctccctatgataattacctagtgcgagagacttgacttgctagcgggtggattgtcttgacatgtacatccaagcgcacgacgagggttttcactgacatggcgccacactgcatataagaatgactcttaacgcatatgtcgataacgctcgtgtagtgacaat

SEQ ID NO: 153745 - DNA, 386 bp, Glycine max
  unsure (1)..(386): unsure at all n locations
cttataaaattgatattgcttgaaacaagcaccgaggctttggttcttgaagtctaatgagtnnatgagctactcaagattcaacagatgtgacatggaccattgctgtctcgttaagaaatatactaatagctatgttatccttgccgtgcatgtagatgacatgttgattgcaggatctagtattgcaaaaattaacatgttgaagcagtagttggcataaaactgtgaaatgaaggatcttggtctaactaaacaaattcttggtatgagaattcttagaaacagatcagaatgaatcttgagctgtctaggagaaaatatacataagtggttgacacgtttaccttgaaaaccttaaccatcatacccctttgggtctattt

SEQ ID NO: 153746 - DNA, 434 bp, Glycine max
  unsure (1)..(434): unsure at all n locations
agctntataagcgcaggtaagtggctttatatgcgaagatgatgntccaagtacattgtatatggtaccaccatgccctcctgatttccagctgggaaattggcgagtggaggaacgcctcgtcatttacgcaacgagcataatgtaaacctttacggttttaaaagctctattgttgggcctaggctttagagtttttccttttggtaaggctttgtgtcttttgtttttgaatttataatacatggatctttcttcatctgttcctacgtctctacccattctcattcatttgcatgtttacttctttttctgaaacggcagatccgatgacgagttccccgaaggtactaatacctgggacccgcctatcgacttctagctagatatgagtctaactgaatatgaaataaacgaggatgtgggacttcccc

SEQ ID NO: 153747 - DNA, 368 bp, Glycine max
  unsure (1)..(368): unsure at all n locations
ctgcttgtggagcttctatgaaggctgaatctgtgagcttcaatgttgtcctttaatggngatattccaccatggagatgcagcggaagacaaaggagaagaggagagaggaagcgccatccactanggaataagccatggaagaatgagcttcaccaccaagatgagccttggagagaatgcttcaatggaggaaaagaaagatggagagaaagagagaggggggagcacgaaattgaatgaagaaaaagggagagaagttgaactttaagttgtgtcttacaagactctcattcatcaaagttacaacaagtgttacacatgtgtctatntatagactacgtagcttccttgagaagctctcttga

SEQ ID NO: 153748 - DNA, 248 bp, Glycine max
cggaccacaatcaccgcagctgcagcctgagaagccaggccgggattgtgttaccgcaaccaataattgtgtatatatataccattgaacattctgtggaaacccaattcccgaaaaacgtgactgtcaatggatggagggcatacgcatgaaatatcacatggtgttgacttccgtccaactatgaacgcataagtgtgaaaactcgcgttaccccaccctatcatacattaatcggccagattaag

SEQ ID NO: 153749 - DNA, 426 bp, Glycine max
tcaatgcttctctcagtggacacccctatcttttcctatctcacatgttcctccacaagctcccctctctccctatccaataccagagagaaagatgaaccacaccacccacttccaatcacaccattgcttccttcaaaaccatcacttttcctcttggtgacatcttcatcaatgccaccaccccataaaaaatcttccatttccatgcctcaataacaataataaagttaatgttcaaaagggtaggtgatttcacaaatagcacgtgaaatgggaaatggggttgttttgttctctcttatagtgggtttggagtgtgtgtgtgtttggaactaagtaagaatggtgagtgtctgaaacagtgtaacagtgtcagtgacagcatatgaagatggcaaaagaagtaataatgagaaaagatct

SEQ ID NO: 153750 - DNA, 476 bp, Glycine max
aaactaactgaaactggagagtggagaattgtgtatatgattttctttcttgaagggagaaactaaacagctcattctccattgtctgacctcattaattctacgggaattgccatagctcaaacatttctaccacatggaaaacacttgctagaatggcctatgctaacatctctagatatatatcactgtcacaggttcaaattgtttacaactcatcatcatatttgtcaagttgcagatatagaggatcaactctgttgatctttaattgatcagcaagccattttcttagttgataagctatctcagcaaactttctctttagttttgatgctgtgcttgcacgtcttaatacggataaattgcagaaaaatactatccacacacatcgtgacattccatgcctcgtcaaatggtttgcatccactttctattaagttattggacgagtataatatagtgtttcattatca

SEQ ID NO: 153751 - DNA, 402 bp, Glycine max
  unsure (1)..(402): unsure at all n locations
agcttagattccaggtgaagtcatgcttcctgcactttattctancttctacaaaactgcccacacactcacaatgacagccacatgtgcactatttttttcacaagctaagttccacaaaatcatgcgcaaatgccattgaggcatntcaccgaacacttggtgggcgcatgtttaagcatgaaaatcaagggaatcgggacaatgtggcatgccccattatctcataatgcaccctaggcctagggccatcctctacaacccctctattcatcaaaaacaaggaacaatccaaggataaatccctcacgtttttgagcaaatacatgcaatttataagcaccaaatacatcaatggaaagctagagagcccacaaatgagggacctactctgtggagatg

SEQ ID NO: 153752 - DNA, 472 bp, Glycine max
ggaaggcaaactggatgcattggttaacttggtgacccagctggtcttgaaccagaaatctgtacctgttgcaagggtctgtggtttgtgctcctctgctgaccaccatacagacctttgcccttccatgcagcaacctggagcaattgagcagcccgaagcttatgctgctaatatttacaatagacctcctcaacctcagcagcaaaatcaacctcagcagaacaattatgacctctccaacaacagatacaaccctggatggaggaaccaccctaatctcagatggtctagccctcagcaacaacaacaacaacctgctccttccttccaaaatgctgctggcccaagcagaccatacattcctccaccaatccaacaacagcaacaacctcagaaaaaaccaacagttgaggctgctgcacaatcttccctcgaagaacttgtgaggcatatgactatgcagaacatg

SEQ ID NO: 153753 - DNA, 435 bp, Glycine max
  unsure (1)..(435): unsure at all n locations
agctncaagaaaaagatggcctcatctatttccttatttccagaagggaattctatcaatatacctccaatctttaatggagagggttaccactactggaaaacccgaatgctaatatttatcgaggcaatagatctaaatatctgggaagccattgtaatagggccttatatacccaccacagtagaaagagtttcaatagatggtagttcatcaagtgaaagcataaccatagaaaaacctatagatagatggtctgaagaggatagaaaactagtacaatacaacctaaaagccataaacataataacatctgccctaggaatggatgaatatcttagagtttcaaattgcaagagtgctattgaaatgtgggacactcttcgattaacacatgatagaactacagatgttaaaagatctatgataaatgca

SEQ ID NO: 153754 - DNA, 446 bp, Glycine max
  unsure (1)..(446): unsure at all n locations
tctcagcttgcctctggtgctctactnggttcatataattttatataatgagatgggattagaacctcaatttaattgtctccgtgaaaagggcatttctctctctacaaacatatctttgcaaattccaacggtgaagttgttggagaatgggttctaaaggtggtgtcctaattttaggatgatccaacaattaacgagtctgagattgtagttttaccgggataggtttgggtgtatgcgaagaaaagaaaatgttttgagagaggaagaagggagaacgaatttgggaggaaaaaagaacgtagagacgtatcggaattgtaatactgacctgttagtctcttttataactagggactctgagcctattattactctatatgttttattatattatttgataaaataactctattgtacttttcattaataaaaaccaatta

SEQ ID NO: 153755 - DNA, 228 bp, Glycine max
tcgaccattaatctgttgttgattactcgctatagaatagcccacttggttggtaaaataaatttgtcccgaaattattgccaacctgacatgatgaattaattgacagaaatatccggttgtatcactattggatcaaatgcgcgtgatctcttgtggataaaatgtgataattatcttgagtgaaagtggtatcttttttgatagaatgtataacctgcattgacc

SEQ ID NO: 153756 - DNA, 456 bp, Glycine max
tgcatcaaggagaagaggtgcttccatgatgaggatgtttcgtggagatgcagcggaaggcaaatgagaagatgagaggggaggcaccatccactagggaataagccatggaagaagaagcttcaccaccaagaatgtgtctaggataataagcttgaagaggatgcttcaatggacgaaaagaaagagagcggggggagaatgaaattgacggaataacagagggagagaagcggaactttgaagtgtgtctcataagactttcattcatcaaagttacgacgggtgttacacatgcttatattatagactatgtagctctcttgagaagagatctcgagaaccttctttgagaaaactttcttgagaaactagatggtagctacacacacccctgtaatactaagcgtacctccttgagaagctctcttgagaagattgctgaagaagctagag

SEQ ID NO: 153757 - DNA, 283 bp, Glycine max
cggacctaagcactcagcagcaactgcgcgagggttttcttaaaaccctagccaaccaggactatccacgtattttctccacttcacctccattcagcctctccaggcctactacccacaatctcactcactccttctgcgcacaaccaaacacgctaagactcgaagcttcctcccgcctctttcctgaacaaaatattttcatactattaaacgctgcatcacctattttaagcacacattactccattaaaaacaaatcaaattgcttacaattacattc

SEQ ID NO: 153758 - DNA, 185 bp, Glycine max
  unsure (1)..(185): unsure at all n locations
ncanctatgaacaacagtcgagagttgaatgtttacctctatggaaaatcatgtgcattaccaaggtcaatgagtaatataagccggaaaattttggagcctcatagtagttcacgtgtgatctctattggaaacatattatccctgctttccttctatatatatattgtggggtggggagaggg

SEQ ID NO: 153759 - DNA, 359 bp, Glycine max
  unsure (1)..(359): unsure at all n locations
cgagacacccagaaactcaaccccannangnagaaggatacangcagaagaggggatttgttttgttatggcacccctaaaaccagcgtggactcctttgacaacgtctagtcatctcactgaactcaatgccacttagttaaaatcattaagggaatacatgtctcatgttcctcatgcgagagtggcaagtacgtcttatgtatgcaatggtgtagacaaaaccagacctagcaccagcacgcagcgtgaataagtatatgggtgaacctgggaaggaacataggcaagctatgaaatggatactcacgtaccttaacggacaactaatattgggcggatctatcaatgagacacat

SEQ ID NO: 153760 - DNA, 420 bp, Glycine max
agctatccaagagtggtgggtcaaattgtttatccaacaccttgagaggagtgtctgtaaatggtgtttggattgatgaacctggacgagtgaatcacgatacacacttgttccttaatgaacatatattcagaggaagagtgggtgaggcccatactagatggggtcagctttaaagccattggacaacaacacaatgatagatggacgaggccattcacagaaaaagaaattaaggatgcgatgagggaagttatcaaggttgatgtgcttcaactatatgggtgaattagtttgatcatggaactttcccgaaggggatgtatgcctacttcatagctctcatacacaacgtaacacgacttgcacaaaccctacatgaatacatacctcatttcttttataggtagcatttacaaa

SEQ ID NO: 153761 - DNA, 354 bp, Glycine max
  unsure (1)..(354): unsure at all n locations
gttgaaaactctgttcaaagtttaaactttgtctctacttcaaaaccccttgaactacttcacatngatttatttgatccctctagaactatgagtttaggttgaaattactatggcttggtaattatggatgattactcaaggtttaccttgaccttgttttgaaaaccaaaaatgaagcttttgatgcttttcgcaaactttccaaggtgattcaaaatgaaaaaggtctcaacattgtttcaattataagtgatcgtgaaggtgaatttcaaaatgagtcttttaaaaactcttgtgcagaaaacagaattcacgcacaattttgtgcccctaatacacctcaatagaatg

SEQ ID NO: 153762 - DNA, 421 bp, Glycine max
agctttggagtatccaagtgccaattctttctcttctttagaccagtcttcttctggcttcaattcatcagtgggctttccttctgagtccagcatcttgggatgctcccagcctttgattacagctttccaggctctgctatccagtgatatgaggaaggccaccattcttgctttccaatattcatagatgcttccatcaagaattggtggtctgttcactggtcctccttctttctccatgttcatcaaaaatttatcttcccagatctcactctgagaattcgagtgttggctctgataccaattgaaattttgataccacggaacatatgtcgtgcaggatgttacgacatcacgcctcataacatgcactttatgtgtgtccgtctgaacagattaaacaagtatatacacaaga

SEQ ID NO: 153763 - DNA, 454 bp, Glycine max
  unsure (1)..(454): unsure at all n locations
ntanatgtgtgtngttgggaataagtgaagaatctaatgcgtatatactntatgatctagnatccaacaaggtggtggtgagtagatatgttgtttttgaagaaaatgagggctggaattgggggaggagcattgaataagcaaaaactgatttgcttaagtgggaagaaaccaacattgatgaaagtggagaagaagctgaagaaggagtccagcatgagggggaagaagctgaagaagaagttgagtatgagagggtagaagatagcataaaagttagagtaattaacacacaattaggtgctcatgggaggaatcgaagagaaccactttggatgatagaaaatggtgaggctgattagtgcaatgctcgactggtggcaaaagggtatgcacaacaatatggcatagactatactgatgtgtgtgcacatgtggctagatgagatacaat

SEQ ID NO: 153764 - DNA, 173 bp, Glycine max
gcccacgaagacaacactcagggggccacaagggaggccggaccagcgaccgaaaaggacgcaaaacacacaaggacacacacacaaacaacaaaacaaagagagcacaaaagtcccgacaaccagaaaaagaaaaaagcgctaacatgcgagcggcactcggcaaaaagcac

SEQ ID NO: 153765 - DNA, 432 bp, Glycine max
tcttagtctcagatgatgcagctgagtttgtatctactcttgcactcctctaatgactatggcatcatttctggcactaaactgctgggagttggaagccatcttctcaattaaatttctggcttcagcagaagtcatgtctccaatgggtccaccactggcagcatctatcatacttctctccatattactgagtccttcataaaaatattggagaagaagttgctctaaaatctgatggtgagggcaactggcacataggtttttaaatcgctcccagtactcatacatgctctctccactgagttgtctaatacctaagatatctttcctgatggctgtggacctggaagcagggaaaatggtttctaagaatactctcttaatgtcatcccagctcgtgatggaccttggacaaaggaatacaccagt

SEQ ID NO: 153766 - DNA, 429 bp, Glycine max
  unsure (1)..(429): unsure at all n locations
agctntcaattcattctatgcaccttttgtggtccattcttgttttgtatgctttcattcttacttcgtatactttcggtattcttttctttcatttttaatgagtttcgaccgatcatttaagtcgttatctcgtttaataattgataaaatgaatttcaactgatcatttgtgttgtaatcttgtttaatctttgttaaaataaaatcccaccgatcgttcatgtcgtagcctcggttaaataaagaaaagcaaaaataataataaaataatcaaaatatctaaaaataataataaaataataaaaaggccctaattggacattttactttggaagtccctttatctgagttgatgataatcaagtgaaactaaggctaaaatcaactcacaaattaagctctgtctgcaaatggtcacttgaaacc

SEQ ID NO: 153767 - DNA, 442 bp, Glycine max
  unsure (1)..(442): unsure at all n locations
ntgagaacatggttgtagccatgggtcaatatgggccacatttgcccattcctaactatcatgacattagagttccactcttgaagaaggaagttgaatatactgaaaaattgatgaaaggccatagggagcaatgggtcaagtatggttgtactattatgtccgatgcatggactgattggaaacaaagatgcatcattaatttttttattaactctcaagttggtaccatgtttatgaagtctgttgatggctctgattttgtaaagacatatgaaaagctctttgagttgcttgatgccattgtggatgaagttggagaagagaatgttgctcaagttgtaaccgataatgtgagcaactactgtttatcgggtagttgttggaggagaaaaggaaacatattattggactcttgtgcactcattgattgattgatgct

SEQ ID NO: 153768 - DNA, 401 bp, Glycine max
agcttatgactcggactcgtcgggatttcttgattatatgatgctaacgatgcggtttcgtcaaatgtggataaagtggattcatgggtgtctttctactgcttcaatatccatcttaatcaatggaagtcccacttcggagactgttccctgaagaggtataaggcatggtgacccccttgctcccctcctttttaatttggtggcaaaatgacttacatgaataatgaggacagctatatccaataacttgtacagcagttatcaagtgggaagtttgaaggaagatctaaatatcctgccttatgcagatgacactcctattttacgacaatgctctctccgccaatgacagagtctcaaagtcaatcctatcattgttatgagctggcttctggtct

SEQ ID NO: 153769 - DNA, 443 bp, Glycine max
  unsure (1)..(443): unsure at all n locations
taggtatntatctnttaggcttaagtcactcttcctctatttatctttccaaaacttgagtcttgacccatcacccaccttccatctcaaattgttaatgaggctgttgctgtgatgttggtgaaaaacagacctcaagtccttccaccattgagagaaatgagcactgtccctaccagaaaatagggtattccaccctccatatttagatagcaagacactagcccagagctgattatggttgtttgccaattcccagccccatttaccaagcaaggcttcattgaactcggaaagatctttaatccctagccctcctttgctcttgggaagacacacagtgtcccaatttacccatgcaatcctggctgcctcaacacccccttcccatagaaaattcctctggatagatactgccttgtggaccacctttttgggaattt

SEQ ID NO: 153770 - DNA, 122 bp, Glycine max
aaacggaattaaaaagagctcacgtctagagtgagtgtatgacaagacactcctcctataaactcactttagacacctctcacctcctaggcatagggaggtcatctcggacgaccattccc

SEQ ID NO: 153771 - DNA, 412 bp, Glycine max
  unsure (1)..(412): unsure at all n locations
cgcttcatcactttcctctntntcttcggggcatttttgcttttgaagcattnnnnagcatgactcgcaacttgagatagagtttttgatggaacaaatttcttttaaatatatttccatcctttctcttcatctttctcaagcccaaggagaaacaaaatgtgttcttcttttttccaatgtatgtatttcttgcgaggaaccgatcgggatgagccaccagctaacatgatgagattggacttcatattctgcggaagcaagtggtgttggtaactgatcggcacatggacctgctcagattcaatgttgttgaatgtctcctccagtgacttggcaggaacctgagaggtaagaaccttttatgggcaagaaccctagctgtacgggcagatggaacaaaaaccaaatc

SEQ ID NO: 153772 - DNA, 450 bp, Glycine max
ctcgacccggatccttaagtcacctgcggcatgcaagcttttgaaatcaaattgtatcactgtgttatcgattacaggaaactggtaatcgattaccacagagtaaatactctggtaacttagaaaaattcgaggaaactcttttgtaaaacaaaattatgctatgtttggtttttgaaaaatccttttcaatacttcccttgtgaagtcttgacttgctgcttcttgattacttctcttgaatcttgaattcattttctcttgaatcttcttgatgtcttttcttgaatcttgaaattaatcttgatcttgaacttgtcgactcaatcttgaaacattctttggggctttttgtcatcatctaaactacttgaatcatcatcatgaagcttgcttctataggtctatgcctatatatatctatttcctattctcttggaaacacaagca

SEQ ID NO: 153773 - DNA, 320 bp, Glycine max
ttaaacaaaatttgatatttacaagcatatgtgtttgagcatctgcccaatgttggttacatggagggagaggattacatgggtggggaccttctagaaactaaatggaagctattaagaggtaccgggcgtgccctttcgatcaaggagaaattgaatgagttatagatgaatgttgtcatctaatatccatataaggagcataagaatgtaaggcctttactagagcaaacactttatattggctctactagacgtgagactaatgtgagaccttatctttcagaaagggtattgatgcagtttgggcatgtacaaat

SEQ ID NO: 153774 - DNA, 311 bp, Glycine max
  unsure (1)..(311): unsure at all n locations
canactctttataccatgtatttacatcgaataacgctttgagttcaccaagccatcgtaaaattgatgaccatgatgataacttacaccagtttcttgagggggtgttcctcctatcctggctagcttgattgtggtatcaccaggattcttccatcgagttaatatcaactcctatccaatacttgtcttacaaatactttcacattgacctcgctagaataaatatgtacgagtgatctacacttatcctaactttcatctacactacaaatttcgtcatgcccatgctcaacttttacttcacgaca

SEQ ID NO: 153775 - DNA, 430 bp, Glycine max
  unsure (1)..(430): unsure at all n locations
ntntcttaagctgtagctacaacctgtttctttccctttggcaacatcaaaaagccaaagaactctgtaatcaacacagttataacaatggagtagcaagatataagtatcagagtattaaatccaataagccaaacacataacaagaaaataatcaaaccagaattcaaataacataaaatgtcaacaaccacaaaatatccaagactgaaacacaagaaaaataagcaacgtacttagcataataatgtaaattctaagaaactaaaagccaaaatacacggcttataaaagataaataagcagaatctaaagtctaagaagacggaggaggtggtggaagatcaatactctgacgaatgtatccgacatcctcttcaagctgtgtaagacgaatgtccatacctgcaaagcgtgaatctaacgagtc

SEQ ID NO: 153776 - DNA, 349 bp, Glycine max
  unsure (1)..(349): unsure at all n locations
agcttgctngtggagcttctatggaggatggattctttaacttaaatgaggtccttcaatggtgattttccaccatggagatgcagcggaagacaaaggagaagaggtgagaggaggcgccatccactaaggaataagccatggaagaaggagcttcgccaccaagatgagccttggataaaaagcttggagaggatgcttcaatggacgaaaagaaagacggagagaaagaaagaggggggagcacaaaattgaaagaagaaaaagggagagaagtcgaacttcgatttgtgtctcacaagactcttattcatcaaagctactacatggttacacatgcttctattta

SEQ ID NO: 153777 - DNA, 180 bp, Glycine max
  unsure (1)..(180): unsure at all n locations
tctagccaaatggacttaccttgaattaattgctttgatagcccttttgagccttgnatccctttccttgttttgaagctcactacaagccttaagtgaaaaaccatgatattaccatatccttaaggaattttggagctttggaattgttttgggaataagtgtgggggggttcttatc

SEQ ID NO: 153778 - DNA, 337 bp, Glycine max
agctcccacaacatccacgcgatgtcaactattcttatatcatgaactatcataaccaagcaaagacaggacagaggcataaaactctgcccacaacacaaaccaataccacaactttgttttacttaaatacccgagaaacattctctgagctccaattcgctaaccgctggatcgactcgaaaatcatactggaggcgcctagaacataaatccacattgcgaccgctgggatctgctagaaaacgtgcagaagccgatcagcactactccttccgcaaccagcaaatgcacataattttctgcgcaacaccaaaggtgagcgacacatttcaac

SEQ ID NO: 153779 - DNA, 240 bp, Glycine max
  unsure (1)..(240): unsure at all n locations
ntgttgaagacgacagagagtctnggccagtcccatatgaccacttttcgtagatttgngatactcttctaggaggagaggaatgaagggatcctcacgattaatccatatgtgcccctggtatagcaagaggtaatccccgattttgaactctgggcattgcacagggttatcactaacacgactcattagagtgttggaattttctacacggctaatatcttcctcatgtcgtacata

SEQ ID NO: 153780 - DNA, 441 bp, Glycine max
  unsure (1)..(441): unsure at all n locations
ggatccttaagcaccgcggctgcagcttaaatagcttgttgaatcgattattttcctctataatcgattaaaacaaagttttttctttgaagatatanttctaacttagaaaattttcttcacacacacatgcattatgatggtgcacaatgcaaaatagatatctaatgtactaagatacaacaattaagttaaccaccgatacaaatgccactcaaaggagttgggcatgtaaaagccaaaacatcttctaaagcttcttcaaacttttccttgaacttcaagctttagccttaggttgttccatgttgctcatgttactgctccccctatctctaacagttacaacgaccattgtaaaatacaccatggtcatggtccaaaagtacgctgaagctttggggcattatggattgcccttatggttgaccacacacctca

SEQ ID NO: 153781 - DNA, 387 bp, Glycine max
  unsure (1)..(387): unsure at all n locations
aactaagctgtagtattgtggataattagctgtccatttgtcttttttgtctttagaggntattcctcgttgacatcttttgtcttgaatggaattgccatgacacgtttattgttactgtctntgatgtttggcagttgatattgtgttgcgggaggtaattccgattggattaactcaccatccttcacttgctcaattgttatgacatttgttgttggatcacctatgatgtcttgtttccaagggtaatctatatcttttctgatggcataagcatgaaaccaatcaaagaaaaggacattaattttgactctttcgacanattcgtataacttgtcttggatttgtttctgtttgcacccttgtaatgttggaagaaccatc

SEQ ID NO: 153782 - DNA, 441 bp, Glycine max
accttaagtcaccgagctgcagctatcaggaagaaaatgccctatatttgtagaacaaggtctaagagagaattctatgtccttacaagtggaggagacatccccactgcgttagtaatctgatgttatctcttaaacccttctcttatatgtgaaaggtgctcccttgtaatggagggctaaatcctttgttgggaaattctgctcgacacttgatgtaaatattatcactatctatttgaagctggtttcatgtgatcaaagtttctatctatgcttatggtatgcatgcttgaggattgatcacccaattttgtgtaaggtttagaacctttacattgaaaaagtcctgcattcttttaataggaataagccgggcttaattatcctaactgcccgacactgagtgcaggaatctatatcttaatatgccggtaatta

SEQ ID NO: 153783 - DNA, 421 bp, Glycine max
  unsure (1)..(421): unsure at all n locations
aactaagcttccaccactgcaagccgaagttattactgatatcttctcccangncaangcannaagtagctatgttttaattagagaagttgaagttgtttttgaatntcataccatcttcatacgttacattctgagtcctaacatcattagtaaaaaaaaaaaaaaaatagtactatttggaatgactttgtgactaaagcaattgttttcaaacactgactggtgtgttcagtaacacatctttaatactctgtctcattattctgggattgaatgaagattatgtgaatctattgaatatgtgagtcttatctcttaatcagtactagtagatgtggttctaaattccaattattagataaaatatattagaaaagaggttagataaatatgttacaagattattcattcctaacaa

SEQ ID NO: 153784 - DNA, 422 bp, Glycine max
agcttgatgataagagagaacatattatatctattggttatcaccctacatgtggttacaagctatatgatccaaggaataagcaagtaatagtgagtaaaaatgtggtgattgatgacacaaaaggatgtgattggaaacttgaagctgggagtggatcaaccaggatgatagtagatactagtaatcctattgaatctgaaatgaacacaagtgctcctacagaactcagaagatcaacaagggtaaggtagcttcctactaacctgaatgtttatgatatatgaccagattctttagtggattcagagggtgaattggtgcactatccactgatggcataggctaaaataattgagtttgaaaagccattgcatgaaccaatagtgattaatgctatgaaagatgaaatcagctcattg

SEQ ID NO: 153785 - DNA, 447 bp, Glycine max
  unsure (1)..(447): unsure at all n locations
ggacacttaaaactaagctnntttttaaattgattgttagttattaaagttttgttttatggatcaaaggctcttaatttttttcattaaagtttttagtctataaactttttatttgattgatcaatatccttcaacttttttcattaatatttttagtccctaaaattttaaaaaattcaattgttaatcattgaaatctcattaaataaataaaattatgggttcaaactttagttcagagactaaaaattaaaatttctattcaaataaaaatttaagaattaaaaatcttaatgaaagaacatttatgaactcttagtcaaacaaaagtttatggattaaaaattgaattttaaaaatgtgtaaaactaaaatcttaattaaatcctgattttatttatactcaagagattcttataactacataattcctaatattcaatc

SEQ ID NO: 153786 - DNA, 426 bp, Glycine max
  unsure (1)..(426): unsure at all n locations
agctntttgcttcccactacaattgatgtactgtatgcctctgcagtggacacattttgattttatagtagacactcgggtccttcaaaataataattattcaatgtaatattttggtttttgaaaatttaaaattactaaataatcttttaagtttatatacgtgtgaaatacttaaatttgtttttaaaaaaattcaatgcataattagacatcaaatttttttttagaatttaattaactacatatttagttaaagttaatttacagaaatgattatctgtttttgtaaatttgttgagaatataaaaaaaataatcaattcattttttctacaattcaagtgtgacaaatgtgtttcagtggacacttttctggatgaaattatttactgtttcacacatatatggaacatggaacactttc

SEQ ID NO: 153787 - DNA, 460 bp, Glycine max
  unsure (1)..(460): unsure at all n locations
ggttcttgantttttctaagttctctaacaagctntgtttaatatactagcccttcatttaactgtctctgcgcttggcggccacgctcaacaaagtactttcgacacctactgtacgttgatttgaccaatgctgttatgggaatattgcgacaatctttcaaaaccttgttgatacattctgagaggttggttgtcatgtggccatatcaacgtccttctctatcataagccatcgtccatttttcctttgaaatgcgatcaatccatgttgctatggctggactcagttcacgaaaattttctaaattttgataaaaaatgtgcttgcaaggagtgtaggctgcataaaattagttatgaataacgcggataagtatatatgaaaggtaaataaacgggaccatcaaatatgaaatcttacccaatttcttcacatttcttttgttttgattattga

SEQ ID NO: 153788 - DNA, 249 bp, Glycine max
gaggagggccaacactagccacccataagcgcaccgacgtcgcctccacaagagacaccatcacaagaatacacatccgttccactgaagaagagggagctaaagatgcacacacacctgcactatgcgactagccagcaggcggcttaacacaggggccaggtgcaactgaacgagagcatctacccgcacacccagcattaggaaagccacgaccacagacgttaaccgcggcctacccccaaccag

SEQ ID NO: 153789 - DNA, 432 bp, Glycine max
  unsure (1)..(432): unsure at all n locations
acactatgaaactaagcttaagcagatgtatttgtattgagaactgtctctngtgtcttgccttcnngncagggccccctgattatggagctggacaattggacacgagacgatatggtgaacaatatgcaagcaaaggagaggatgcagatcgtgctgtactcccagagcagacacccttttataaagatctggtatttaacttatgttattgttactcccgtgtcccatttcctaatagtggaagaattgacatttgtattacaagctgctgttgctgttcaagcacgtgtatgtgttgacatatctgccgctacaaatgagtacactgatttggcattcctaatatttctgagtattgaaagtggaggttccttattttttacacaagtacttgggatccaacattgccttacgacttgtagtctcatg

SEQ ID NO: 153790 - DNA, 446 bp, Glycine max
  unsure (1)..(446): unsure at all n locations
ntattagtntaacaagaagaacacatagcatctgtctttttctatnacagcgatatgagtcagagtgtagcacatatagacacgtgacaaatcatttcacgagcaaaaccacttgtatgttctattcaatctattggtagaagtctgcaagtgccattgcagccttccagacaaataatatctattatttaaaatttcatttaaaaaaagaaaggggcttaaaagggctataaacaacataccctagtataggcctaaactccagcttcagaaggaatgctgctaattcttttccgacttcaattgcctcatctatacccttcttgctcaaaggacatatcacaccctgtgaataagtcttctcattcatacaactaccatgcgaaaaagttaaagacgctgatgttgcacccctcaacttgtgattcaactcagaagcatatctt

SEQ ID NO: 153791 - DNA, 363 bp, Glycine max
aactcagcttaactagctggagaagacaaggaatcttgttcttctaagaaaccatgaaacaagggatgagagctttgttcttctaccaaatcctataggtagattttgaagattctgtttcgattaaagtgttcctctttgtgcggtggtctagtggcaagcaacgactactcgtggtggccaccagtggtcatgggtggtgcaagaaaaggtgttactatttttagtcgcgagtagaaagaaatagatgaaaatcaaatttttatgctgaagaacatatatataatctgcaaatctcgcttaacgagcttgtctctctaagcagaattacacttttgggcgtgagcacgacctctcgctatg

SEQ ID NO: 153792 - DNA, 419 bp, Glycine max
  unsure (1)..(419): unsure at all n locations
agcttacttgtatgtgtagaataacagttatgtgactttgccatacatacttcggcatgaatgtatagngaaagaaagtacttcacaaatgtcaaagaactgggtcttgaaaaagcataacaagacttttctagattggtttatagatataatctttgctgatgataatgctattgaaatgttaacaaagctagccgatgggcctaaaagaaatgttataacttggcaaggatactatataaacaagtgttccttttattcaaaagcacaagacgagatatgttcaatgcaaaatatgtggggtcaccctaagggctgaatctcaacacttcgccaatgtacatgatgacaatccctgtgtagcttccatcctttactttgggatcatcgaagaaatttgggagcttcaccatgtcaaa

SEQ ID NO: 153793 - DNA, 383 bp, Glycine max
  unsure (1)..(383): unsure at all n locations
ngaacgactatcttgcaggagtcctcaggcttgccatctttacttggcattgcagagcagtgacactcaccccagaggtgagagatgacttatacgttagaacatcgtcccccacccactcatatccaacaacagcaagtggggacgatggcgacctatcgctatggcttcgtcacacacagggaaatgccctaacatccccaccactacctttcctcactcccttagaagtagaagagggagaatcacattaaccgggataggctcctcggaagcaatggaaatccacgccctcccacgaaggtgagaagtgcctccaccaatacagcgtgaagccttcaccctctttgatgaggatgactctgcaacngaattgacctctc

SEQ ID NO: 153794 - DNA, 353 bp, Glycine max
tgtgcttagagaaagcttagcctcttctattgtttttgtctgaaaaccaaattgattcttatcaaggaagctattcctttgtggcaaatcctttttcggcttatcaattctccgtgggtcgtggtgtcgttctattcatctttttcatcttttctattttttgttcttgagttcttggaaggtcaacaatggtaggtcttgaatttgcattcagaatgatccgaaccaagcgtccatggcttggattgcatcataaagggatataaatggctaccttagcacgagaaagtgtatatataattgtttataatcattgttcagcttggcaaccaaagactacttctattttctag

SEQ ID NO: 153795 - DNA, 243 bp, Glycine max
  unsure (1)..(243): unsure at all n locations
gctttanccaaatggacttaccgtagaatttattccttttgattgccctttcgagccttgagtccggttttcttgttttgaagctcactacaagccctaagtgaaaaaccgggatatgaccatatccttaaggattnttggagctttggaattgtattgggaataagtggggggggggtgttgcttctatcgtatatctatctagatgtatttaatttattaagtcttcttggatacacttca

SEQ ID NO: 153796 - DNA, 322 bp, Glycine max
  unsure (1)..(322): unsure at all n locations
tgtgtgtgtgcggaaaccttgaatcaagaatattgctaagttaatgcagcaaccctaggttgcattaaaactcgttacaggagcatctctacatccaacagatgggaagttacaaagactatgggtgggagtggagctttatttggagaacgccattgttttgacaatgaaattgataccgctggcgtctttctcaatgcgttcaagatatggccatcaataaacatgacctgatgtgtgggaatggactgctgaccntacatgtcagtatatagcacacaatgcatataatgtaataatgggaggagcaccaacaattacc

SEQ ID NO: 153797 - DNA, 368 bp, Glycine max
  unsure (1)..(368): unsure at all n locations
tgcagcttctaaggaggtgagcttagttatgagatgttttgtgttttaagctctagctnctcaaggaagttttctcaaagaagcttctcaaggaagttttctagtctataaataaaagcatgtgtaacacttgttgtaactttgatgaatgagagtcttgtgagacatacttcaaagttccacttctctccctcttttattccttcaatttcgtgctcccccctctctctttctctccctctttcttttcctccattgaagcatccttccaagcttcttatccaaggctcatcttggtggtgaagctccttcttccatggcttattccctagtggataacgcctcctctcacctcttctcctttgtct

SEQ ID NO: 153798 - DNA, 306 bp, Glycine max
  unsure (1)..(306): unsure at all n locations
gatactaagccctgtagaagcaagcttcatgatgatgaatcaagttgattcaagtagttttgatgataacaaagatgatgacaaaaagcccaagagaatgatttcaaaattgagtgaacaagtttcaagaatcaagagaaagttgatttcaggaatcaagagaagatgaattcaagattcacgagaagaaatcaagaagacttcacacgggaagtattgaaaagatttttcanaaaaaaaaacatagcacaattttgtttttcaaaagaattattctcaaaattttctaaagtaccagagttttac

SEQ ID NO: 153799 - DNA, 441 bp, Glycine max
ctatgctgaaacattacaatatacctcctcaacttcatcacaaaacaaccacaatagagcaattatgacctctccagcaacagatacaaccctggatggaggaatcaccctaatctcagatggtctagccctcagcaacaacaacaacagcctgctccttccttccaaaatgttgttggcccaagcagaccatacattcctccaccaatccaacaacagcaatagccccagaaacagccaacagttgaggctcctccacaaccttccctcgaagaacttgtgaggcaaatgaccatgcagaacatgcagtttcaacaagagactagagcctccattcagagcttaaccactcagatgggacaatcggctacacaattaaatcaaccacagtcccagaattctgacaagctgccttctcaatctgtccaaaatcccacaaat

SEQ ID NO: 153800 - DNA, 464 bp, Glycine max
  unsure (1)..(464): unsure at all n locations
gctttcaccatggcagaacaagccagacaggtgttgtacgtccaagatctgtgtgacttaatattttagtggnnctacaatgaataacaagtggtatcaatcaccaaaatgatgcttcaacacttgatattaatgagacacatgttttctcccaacaaatgccttccataaatgcagaacatgaggatgatgatgtacatgcaaattgtaatgatcataatgaaggtttatgggagagtatccgtacataactacggtataccaaagtaatgtatatcatatcacattaattgcaataaatnnttttaatgtcaatagtttttatttcatacttatatgttgtttcaattgctttttctctaatgaatttgttgtatttgcacagagacatggctatacccccaatgtccccttcgcattcagatgctcctttggaggctatgtcttgagtagtatacaatcca

SEQ ID NO: 153801 - DNA, 414 bp, Glycine max
  unsure (1)..(414): unsure at all n locations
tatgaattctttggctgagtgaggatatattctttgtttttagtntaacaggcttgctattttgtcttatttttttaaaaggtctgccacatgtctcatattgaggggagcaataagggcccactttatctctggatgtgactcatactcagtcacgaaaagagaaaaatctgacctttagaaatgctaaaatcctgcctcggtttgcgtgtcgtttctctggttccagtccctcgcgtttctcggcacccgtcggggccaatttttgaaagtaagcaatatatatcataacgctcagaatgaaaccccgagcgtggttcagaggttggttatgttaaaatttaagctgcatgcgatacgatatatcttagactaagtaattgagagataatctacaactatccagttatggat

SEQ ID NO: 153802 - DNA, 470 bp, Glycine max
  unsure (1)..(470): unsure at all n locations
attaccttcagtgtcaacctaattgagattatgagtgttgttatgatgctctttataccttactttanttaaagaaaactaaacaatagttgatttacaactaagttatattgtgtttttttaactgggactaatttaaaaggaagaaggtgccagtgcaatggtggggttttaagcatgtatttgttttttggatattacgcttgctaattgctattaagataaagtctagccttcaattagattttgtttagaggaacagttagaaataaactaagcaaaacaatattgaacaatgaatacaaattatgttaaatttacccataaatttgaaataaaaaatattttagtaaagctgtttacacatacttaaatgtgcactttgttgtgtcacggagtgtggaagtagatggatgtgtaaccgtagtacatgcaatagacaagatttgggtggatcctccgtgtgacac

SEQ ID NO: 153803 - DNA, 341 bp, Glycine max
  unsure (1)..(341): unsure at all n locations
gcaagctntaggagaaaccattaaaactaatgttgtttctaaacaaaaatcaattgaggaagcttcgccgagtgtccccattgaaaaacctttattcaaacctttcaaagttagtgataaggctaaacgaaaaattagggaacttagaaaaactaaatccttaattgaaggcgtaggtgacaatcatagcgaattactaaacaagattagtagtttgcttaaggtcattccagatactccccaagcttcggaaaatacttccaaaatggtaacaagaagtacctccaaattaattaatgttattaatgaagatagtgaccaaaacttatataacacaactg

SEQ ID NO: 153804 - DNA, 465 bp, Glycine max
  unsure (1)..(465): unsure at all n locations
ntaccttcacaagcacataaacacattactccattaatgcatcactctgtactctattngaaaatggatcttttactctgtgcctgcaaggactgctgacccttccacctgatagttcatcgcatcaaatagacaaaatatatcataagatataagtctcaaagttcataaatagagagagccacacggtcaaaataaacaaactaaccatgaatgcagaagcaaatattgaaataaataataccactattatgtgtagtggagctttccaacttttgtacctaactgaaggagacttgtcaaccacttgagagcctgtagcagatgcaatacggtaattaatgaagcttcattgtgagaactgtggtaaaacctatagtgacagacaattagtcatcattatancgcctctcannagtgacggaagaaacgtccatangacaaagtctatcaaacatttaccta

SEQ ID NO: 153805 - DNA, 454 bp, Glycine max
ctgcagctgacttagtttaaatactaacattctatttttgtttattgcttagtaaaattatgcagttaccagataactgtaaaataatgcatttatcagataactgtttttgaaaagtatttgtatttcataattgattgggtaatatatggtgcagaataagtggaagattcgtcttcaacttacaaagccagtcacttggcctccattagtttggggtgtagtttgtggagctgctgcttctggtactaaattctatcaattagcataacattaaaatgtgacatgcatggtcacaaaaaaaattggtcctgcatgttcctgtgataattgtttacacatgttcaaagttctatatttaatgctccttccttcatggtatagaatagaatcaatagattcatatatttgattcgagacaacttctcaatgttctcaatctactatgatctct

SEQ ID NO: 153806 - DNA, 474 bp, Glycine max
  unsure (1)..(474): unsure at all n locations
ctaagctgcttgaagacctgatgagtcgaaagaagtattctcgaggggtttactttcttataactgaanaaagatgttgttgagaaaaataaggtggaattgaaggttttacctccttaccttaagtatgtattcctacaagggaataatgcaaaaccggtggtcattagcaactcttcgtccccaaaggaagaaattaaattggcggatttgctcaagaagcacaaaaaggcaattgggtggcacatatccaaccttaaggaaatggtattatggtaggtgatgaagttaagataaatctagagcaaagaaatgatatttgattctaaaattcacacaaaaaatagtgctaagaaggattctcatgttctacacttaattntttccaggagaaaaactatcccaagaagtgagaaagtttcaatcattccacatgagtaacgatgtgtgaaatatcatatttaaatgatctta

SEQ ID NO: 153807 - DNA, 390 bp, Glycine max
gagctatcatcaaagagctagtattgatcggaggaaaatcaagcaaatttaaaccacgtttttgtctttactctttaataaaggaaccacccaaaacatcctgcgcgaaaatcaagcaaaaatggtaataacttcatatgactgtcttccatctaaaagcttatcatttatacacaactagcaaacgagaaaaagaaatattaaataaataagcttatcttcattgtatttcttttaatctagactcataagatctaaaaatgattaaaaatagtatatataaaaactaaaaggaaataaagttaaaaatatagaaactaagatgtaaacattgtataattatagagaccaaatgagttccctaaaaaaatagaggtcttataaataatc

SEQ ID NO: 153808 - DNA, 372 bp, Glycine max
  unsure (1)..(372): unsure at all n locations
ttaatatcagngtatatttccatgtaacgaactaatcttgtaagtctaattcttatgtgttgatttaagttgatccaacgtttgcgtcattataacctttatacagatttggcctcgagcctacaatttgatagcaagaatgttttgtcagagaaaataaanattgatttgtctatcagaaaaagtgaaacgtctacgaatctaatcagctagtcattagtcattatattattttgttaactcttcattgttgagctgattttctttatgcaacatcactgaatgtaaagaaaataacaatcttatttcattctaactgccccatgaagaaaatcttatttcatgaagcatattagcatatattgatttcga

SEQ ID NO: 153809 - DNA, 459 bp, Glycine max
  unsure (1)..(459): unsure at all n locations
agcttagtcaaaggtaaggctagcttagaaatgttctctatgaatctacngtagtttcctgctaagccacggaaactccttatctcaaacactgacttangactctcccaactcatcatcgcctctaccttagaaggatctactgctatccctccccaggatataacatccctaagaatctcacttcctctagccaaaaatcacacttggacaacttagcatatagtttattgtctttgagggtttgcaatgcaactctcagatgctcctcatgttcctctctagtcttagaatacaccaagatatcatctatgaagaccactacaaaactatctaggtaggggtgaaagatcctattcatataatccatgaacacactaggggccttggtcacacaaaaaggcataaccaagtactcataatggccgtaacgggtcctaaaggcagtcttcggaacat

SEQ ID NO: 153810 - DNA, 379 bp, Glycine max
  unsure (1)..(379): unsure at all n locations
nngacactatgtagcagagtttgaaatctttctcaatacaggtgtttcacatcttataatattttctagcgcatgattaatatagatggttacctactatatatttttgtaatggttattgtaaaactttgttgcagaccatagttggttttaaaataacagtgtataaacatagaaacataatatgcacatgttcctttttgtgtctaattgcctatgatagatgctaaattatgcatatacttacctggatttttaactatcagtatgcagaaacatgtgatgataagtccaaaaactgtcacaccagcagtgattactactatctttttcttgattccagggccaccattatctaatagaaacagagcaacatcag

SEQ ID NO: 153811 - DNA, 459 bp, Glycine max
  unsure (1)..(459): unsure at all n locations
gcttgntacttccatagctagctttaattgttctttattgtatcatggngngtcttatcttggtgatcttatatgcttgcctttgtctggtttggatgtcatacttggtatgaattggttgtcttgaaattatgttgctataaattgttcagataaaactacttccattgataaacaaccaatgtcaattgattcttctctgtctaattccattatttttactattgcctgccgtaagtctttagttgagggggctcaaggatacatgcttttgttccatgctaaagtagaggttgaaaataatgtgttagctatacctgtagtatatgaattcctagatgtctttcctagggaagtctttagtttacctccacatatggatgntgatgttagcatagaccttgtgcttgggaatggaaatgtatcaatagcaccttatatgatgtaacctctagagtt

SEQ ID NO: 153812 - DNA, 453 bp, Glycine max
  unsure (1)..(453): unsure at all n locations
gtganatcaggttcagccatctccctaagagtcctctttctatatggatgttgagccatgttctcagtatgaaaattaacagtcgaatgctcaaaatcagaatattcagaatcaccagtaacaaaatgctcaaaatgaccaggatgcacactatgcctaactaatctatgaaaggttctatctattttagtatcaaagggttgtaaatcacttggattgcccctagtcatgcactatatgcagcaaataatgtgtttctcaacaagcacctaacaagggggtaaaactacagctatactcaaacgatatccaaatgagttgaaattttgtgaggaacaccctaaaatcatgaaaagatagcacanaaaatttcaaacaaaaattcaaagtataactatgaaaactacctaagcaaagtttagaanaataggacaataatacttggaaaaaaac

SEQ ID NO: 153813 - DNA, 451 bp, Glycine max
  unsure (1)..(451): unsure at all n locations
cgcatgcagcttattgggtaacactctntgttctatactatcttatcaacaaaatgaagattgattgaacgttaaataaccagaagtacctccattgcacaaagatagtcatttcagaacgtgaggctcgtcgtggaccggcttgtcgaagccctaggcatgtgcaccaagatgagcaaaacgaggatgcagacattagtggaagagccttcgtgcctcatcgattactggatgcaagacacgctcagggaaatcaaggaggccaagctcgccggagacatgccgcagccgttctccaccaacaccgagatcagtggctacctcttcgacttcctcttcgcggcgcaagatgcatccacttcatcacttctgggggcagtggcgttgctcgaattgcacgcagagtgagggacatgacacttatgcggtggcacgtgatgtggtgaggtca

SEQ ID NO: 153814 - DNA, 201 bp, Glycine max
  unsure (1)..(201): unsure at all n locations
aaaaangcgaaaaaggatgaccctanggctgcaaactcgtgaatcccgtgggtatggcttttgaaaggggggaaaagaagtttttgaatgcaaaaacgtcccctctttcgtcattcttataatttggtgcaggggtggctcgcccancnagcccatctcacccaggcgagctaacctgcacattttattttttttgagggg

SEQ ID NO: 153815 - DNA, 463 bp, Glycine max
  unsure (1)..(463): unsure at all n locations
actattaaactaagcttcgtgatgcaccttgtgcgtctcgacgacttattttagttacttatatgccaacacggaaaccaaacacatgcatatgggagcactctagcatgagatcgcaagtcacggacggaacctatatacttttatttttttaatgtagtggaaattgtatgttacattcatttttggttcctgatgtattcaaactataagacacaacaaattgtcactttntcattataaattacatgtagtttatctgtaggacttcttatcacgtctgtacttcaattagtataattatattctagttggataagaccattgatataccattttataaaattcacaaactaaagtttttaaaacaaataaaatcttgataatcttgtattttatttcatttatatttatatatttaaattcactggttttaattttataaatttccctcattgactca

SEQ ID NO: 153816 - DNA, 446 bp, Glycine max
  unsure (1)..(446): unsure at all n locations
cgggatacctcagcattgaacccttttatcnctttatncagtgcataagcttggactgcatttctccagtgagtagaacggcgaggcgcctccatcgtttccaccattcaggacttgtgttgctccggcgtccgtgacgccaagtacgaaaaccaagtcatctcctatgtacttgggtgttatgtccaatactatctccaacagtaggtcatcctccattctttcgaacatggcagggtatttaaacgccctacccatgcctcattcagccatttcttgtcttctggtcctatgtcgaggcgaaccgaggatactgaattttcgcggctttggggttggttgttgggagcccacctctgatctggaaacctggtatttcttatcagcgccgccgcgtatgaggctggattagttggtgtggtggactggctgatcaacttaatgta

SEQ ID NO: 153817 - DNA, 268 bp, Glycine max
  unsure (1)..(268): unsure at all n locations
tggtcaaaagctcgtgttggagacaagaaagtgaaggaagcccgccctgccacataagtagaagctttataagcgcgggtctgggagacaaaggtcaagtggtcgtgatatgcgaagatgatgttccgagtacattggattnggtacgaccatgcccctctgatttcaagttggaaattgcgagtggaggaacgcctgcatttancaacgagcatatgtnaccctacggtnntaagcttatagtgggctagcttagagttttctttgt

SEQ ID NO: 153818 - DNA, 449 bp, Glycine max
  unsure (1)..(449): unsure at all n locations
acatacccattctgttttanggttttttgatgatgtttgngatgttgtatgctgaaaaactgctcatggaaaactgttagagatgaaatgtagagttaacctatggttggaaagtgagaatgtgatgttatgagtggaaaaagagtgaggctttgagagttggaaggttaagtctgaattctgtggtaaatggaggttaaagtgagttaatcctagtttgaaatgtcatttaggacttatgagaaagcttggactgtgctagagagaaaaataaatgaccaaagtgaacaaagagccatttctagggcaaatttgggtgttgaagagtcaaattttgattcggtgagaatttatgtgtaaatccagtttgaacaagtctaaatggatgttatggactggtgtgaggtgagagtttgcttcaaatttacctcattctaaatttcaccttt

SEQ ID NO: 153819 - DNA, 99 bp, Glycine max
tgtagtccattggagtttgatgttttcttgtggatttgaaagaagatcaattaatctggcctctaattcactccatttctttgcaattttgtctttctg

SEQ ID NO: 153820 - DNA, 454 bp, Glycine max
  unsure (1)..(454): unsure at all n locations
gcttgatattggtagtaaatgcctcanaacttctattatatttcctgtntctgaagtacgttttttctcactaacatctctntttataacattaatctctttaatcctctcatttgtactaattactttatcttacatttttcttccttttcttctcatctccttttctattaaaaaagttgcccgattttgatatataaatgcaatttctcttttcatttttaccaaactttatataaagatattntatttgattcaccaggacatatttgctgctggaactgatacttcagcatcaacactagagtgggctatggcagaaatgatgagaaatccaagagtgagggagaaagcacaagctgaattgagacaagcttttcgagaaaaggaaataattcatgaaagtgatcttgagcaacatacttatttgaagttggtgatcaaagatacattc

SEQ ID NO: 153821 - DNA, 376 bp, Glycine max
  unsure (1)..(376): unsure at all n locations
cgcagctgcaacaatgctacatatagatgtattctttggtngnncatacaaccggcgctcttatcaccataagaaagctttttacatcattgttgcaactcaggtcaaaatgagcaactaatgccaagatatacaagagaactttcttaatattgagaaaaagctcttggaactattactcctttcgagaaatccttacaacaagcttgccttgttctctaatgtacctaatgaatcccttttggttaaagaccattacattcaaggcttgcccctaggcaactctcaggtccaacttgtacttgcaggattcatctatcttatggctatcctaatagaccttcactatactgtcaaagttagacatttactcata

SEQ ID NO: 153822 - DNA, 407 bp, Glycine max
  unsure (1)..(407): unsure at all n locations
gctcgtcatcagccatcaaagatggcacaatagtgtgagtgacatcaatattatcatctgtgataattatatctggnnaangatatccagattccacgaatcattttgatgactaacaatgtcagcaactgtcatatcttccaaaccctccaccataggagtttccacatatctatggccttgctttcgaagccaaggctcctgccaaatgttgaccatgttacccaagcctaaaccccatctccaaccttccctaagcaccaattttgatgaaaacaagttccgtgttagagtacaagtatgagatggaattccatatatgatagaaatgaaaaaagttgagtaccatatgagtgaggagaaactcataaacctgagtcttaaggttttgcgttaaggtgtggtgt

SEQ ID NO: 153823 - DNA, 462 bp, Glycine max
agcttcatgatgaatcaagtatgattcaaagagttttgttgattacaaagatgatgacaaagaagctcaaaagtcaagaacatttcatgataacaaagatgatgatctcaagaaatcgaagaacgagttcaagattgaatcaagtacacttcaaggttcaagaggaaatttgatttcaagaatcaagattcaaggtacaagcttccaagaatcaagattcaaggtacaagcttccaagaatcaagatcaagattcaagattcaagaatcaagagaagacttaatcaagataagtatgaaaaagttttttcaaaaactgagtagcacatggatttttctcaaaatctatttaccaaagattttttactctctagtaatagattaccagattattgtaatcgattaccagtagaaaaaatgtgtttcaaaaagctttcaactgaatttacaacgctccaattga

SEQ ID NO: 153824 - DNA, 451 bp, Glycine max
  unsure (1)..(451): unsure at all n locations
gctgccatttcctagccnactggttcacaaaanagaattatggagaatttggtcaaagctttagagaagaagtgtcaaactccttaatgccaacttcatcagagaagtcagatattccacttggctccccaatcttcacatggtcaaaaaggccaacaacaaaatggcgaatgtgcactgactatattgatctgaataaggcatgccccaaagatgcgtaacctctgcccatcatcaacatgatagtcaatgaagcatctgggttccatgtgctaagcttcctggatgcttactccggatacaaccagatcaggatgcacgatctagatgaggagaaaatgacatttatcattgaagatgccaccttttgctacagggtcatggccttcatcctaaaaaatgcaggtgctacatactatagactgatggatcagatgttcaagcaattgat

SEQ ID NO: 153825 - DNA, 435 bp, Glycine max
agcttgagatgagtaagtatagaagggtgatacttcttgtcttttattcgtgaccacagagtggtacctggagatatgtcgcgggggtcaggagaccttggggacgtcaggtggggtgctattgcccaaaaccaagcttgaccaatcccgacccaacccgggcatagtcggtcagtgagaacctgtgatgtacctaagcaggcgagctcctggcagtcaacagataaaaggaacaaagaccacaaagcaaggaggcttgtgtggtggctggccagctgtgaatcttgtgtgatatatggattgtggcctctggtaatcgattaccaagggtgggtaagggtaatcgattacaaggcttaaaaatgaagacaggaggctaagatggtctctggtaatcgattaccacggggtgtaatcgattaccaggcttgaaaa

SEQ ID NO: 153826 - DNA, 471 bp, Glycine max
  unsure (1)..(471): unsure at all n locations
tcttgaatgggatcaatatattcatgggcatatattaaaggatgtatatgtggtatgnganatcttatagtgtcaccctgatgcagtgaagttatgcaatgcatgtaatttggtgtttttgatagatagtacctacaaaacaaacaggtaccaactcccactacttgactttgttggtgtgacaccaacggggatgacattctctgttggtttttcatatctggagggtgaacgtgttaataatgtggaatgggctttagaacaattntaaggtttatttctaagacgtgatgccctccctggagttcttgtgactgatagagacctatcattgatgaattcggtgaaaactgtattccctgagtgtgcaaactttgtgtgcaggtttcacattgacaagaatgtcaaggaaaaatgtanatccctaattggtncaaaaaatatntgggactatgtgatggatgcctgggg

SEQ ID NO: 153827 - DNA, 324 bp, Glycine max
  unsure (1)..(324): unsure at all n locations
cgagccagatgctatcctgtgcgagttggggtctagaaaaaacaagaaaaagaccttnttgcccccccttccttggtatccttttgtattcttgatcaaaacactaagtgatcctttgctttgtgcgataactggtgtcgaacaccataatttggatatcgagaatcaaaacatcagtgaatgatagtcctcagatgaaatttgggtctgacagttgcccctctttacttatcttttattgaaaataaaaggtatgtaaagataaaggaccttaatgtcatacgagcgatcttgttattcataactggatgcccgagaaaacaa

SEQ ID NO: 153828 - DNA, 461 bp, Glycine max
  unsure (1)..(461): unsure at all n locations
ctcttgaggatcaggcctcaggagtgcaaacctgtttataagtttataagttctcccnctcctccaacactacaggggtcttcagaaatgtgttaagagtatcctcatcaaacttcactaagtgacctctcaccctcacctgcttaggtgatttatcctcggggtcatagaggttcacataaaactccttcacaatagcaatgtctatgttactgtcagaaaaatcagtcagcttctcatcccaatggcctttctcgagttcctccttgaactcatcaaactctgtgtaatggactaccacattcctctctggtagtagctttcgtggcactacaatgtcagtgtatctctcccaagcctcttgggatgtgaatctggatctatcaaatctagcttgggtaggtgtagagggtgctttcctcttcttagatgccatattcaaaatataaggaaaacacaag

SEQ ID NO: 153829 - DNA, 458 bp, Glycine max
  unsure (1)..(458): unsure at all n locations
agcttatgcagagtgatgctttccgagaatgtgattaatattgctatacgagggagtgtggcattgcattggattcaaagcgcaggagggtacaactagcgaacagtttatggagcgaaaatgatatgaaccacgtaatgcaaagtgctacaatagttgccaagttagtgaggttttgggaacgaggcaaggccctcaaggagatgtttggccttagcttcacaccccaactcacagggcgaagatcctcttatccatggaaaaatagctcagcatctcttttatagtcgtttttattatttggcccgcacgtgtacagtgttaaagaaattttatcagaagttctgattgatgtatgcttctttattgagataagagatgtatgagttattgattaagccactctgggcgggggtattgcttttttcatggttnggtgatcattaacgaagtacatt

SEQ ID NO: 153830 - DNA, 417 bp, Glycine max
  unsure (1)..(417): unsure at all n locations
ntgagggtgcgtagcccaccatcttttatagttagtaccgatttgtgtctaccatcacgattatcgtctccctttttgcacatgttctgtagttgcatcctatccggaaccatatcaaaattgtactgatactgtctaatgaaggcaaccattatgtccttccaagagtggactcgagaaggttccaggttagtgtaccatgtaacagctaccctagtaagattttcttggaaggaatgtattagcagttcctcatcttttgcgcatgcccccatcttccgataatacatctttagatggttcttggggcaagtagtccccttgtatttgtcaaagtccagcaccttgaacttgggaggggtgatgatattgggtattgggaacaactcttctatgttagcacaggaataatcttca

SEQ ID NO: 153831 - DNA, 423 bp, Glycine max
  unsure (1)..(423): unsure at all n locations
agcttgngatgacatatgttgncatgaagtgttatggccagagagccaccaacagcagagaacatcaataatatggaagaagaagctcaaaagagcctacacaccaatggaacccttttaagtctcttatgattcagaagatggatgttattcttcacctccatcaagagcaccaagccaaagttcacagctccttagaaaacactacgactaggcttggtaacatagaaattcggctctcccttagtaaccttaagttattgaaatttcagggcattacaataattcctacgaaaaagggtcatgtcaacctttcctcattcaaagccattttccaaaataaatgaacttagtttttcataccaagcttcaggaagcttgttgagtctatataaggctttgttaagtttaaaaacatgttga

SEQ ID NO: 153832 - DNA, 458 bp, Glycine max
tgtctcggcgtctatgcgagacagaaaccaacatgttagctatgttcttcattaccaagacgagatgggtctagccacggcccacgagcatagaatcgcggatgagtatgcccaagtatatgcggaaaaagaggctagaggaagggtgatcgactatttacaccaagaggcaaccatgtggatggatccgattgctcttaccttgaacgggagtcaagaactttcccgattgttagccaaggccaaggcgatggcagacacctactccgcccccgaagagattcatgggcttctcggctattgtcagcatatgatatacttaatggcccacataattagaaatcgttaggaaacttgtatggtctctcagaccttgactagatatgatttcttttcttgaaataaaaagagttggtcccatgtgtctactccaaaaagcttgtgcaaatcaaatcact

SEQ ID NO: 153833 - DNA, 458 bp, Glycine max
  unsure (1)..(458): unsure at all n locations
agctnttgtgctctgataccacttgaggtagttgtcttgggggcttctatggatgatggatctttgagcttcaatgaggccctttaatagtgattctccaccatgaagatgcagcggaagacaaaggagaagaggtgagaggaggcgccatccactatggaataagccatggataagacgcttggagaggatgattcaatggaggataagaaagagagagagaaagaaagaggggggagcacgaaattgaagaaagataaagagagagaagttgaactttgagttgtgtctcacaagactctcattcatcaaagttacaacaagtgttacacatgcttctatntatagactaggtagcttccttgagaagctntcttgagaaaacttccttaanaagcttctntgagaaaaattccttgagaagctagagcttagctacacatacccctcttataact

SEQ ID NO: 153834 - DNA, 280 bp, Glycine max
  unsure (1)..(280): unsure at all n locations
tatgggtgttacgacactctaacgacatctatttctttaaaccaatgngggataacaagccgcggccatttccttattataaagttggaacacgaagacggtgatgtaccaacccatctttggattgcgaaaacaattcttccacgatgttgttttggtgaacaccattgtggctggcgcggcattatagtcacgtgactcgacaacactcccatgacctcnaaagactgagttgtgcgccctatgtacgtgaagactcgaacaagagtcaattgacccc

SEQ ID NO: 153835 - DNA, 424 bp, Glycine max
gccttacaagtctcagaggtcaaactatttacttctattagtaatgggaaagaaaaaggtgataactcagttcaagagaggaatcaagaagcagaaaatgaagatgtgaagctaaccactcagcaatataaagatttgatggcactgttgcaacaacaaaacacagttcataacaactcacatgtgaatcaaattggtacaagtaacaaaaagggtagtatatccattacttgtagtataagcaagaccattaaagatgagtggatctttgattcaggtgccacaaaatatgtcacatcctttccttatttgctttcttatgcaaaaagataaatcttggtattgttagacttcctaatggtcataaagtcactgtatctagaggatgttcctataatacctagttttaagttcaatctgattc

SEQ ID NO: 153836 - DNA, 457 bp, Glycine max
  unsure (1)..(457): unsure at all n locations
tagtcttcaatgtatngacataaacaattataatgtctgatggtttataatgcattaggaagacatggttggttattatcacaagttcacaacatatcatgttaaatatatgtatatgcttctgataaggccacggcttgtttacaagggaactggattggacctttttccttccaattttaagttcctcaagctcaaatgacagcacttactatcaatcaagtcttggaaaattagtaaaagaaatcactaaaaaggcttataacttacaagtgaagctaaccaattacttttctatttaacgtgtttcgttgccagaacttgagcaagctattcaaggaaatatatgaatcataattacaataacattcatgttcctaccattttntataaagatatattccatgaanatcacaatacaattatttaccatcattcaaaccattttttattttct

SEQ ID NO: 153837 - DNA, 427 bp, Glycine max
  unsure (1)..(427): unsure at all n locations
atggacttatctttttttttttctttgatagccctttggagccatgtttccctttccttgttttgaagctcactacaagccttaaatgaaaaaccatgatatcaccatatccttaaggaattttggagctttggaattgttttgggaataagtgtggggggtttttgtttcattggataacttgttttgttggctatgcttcatgatgtattttgggccatacttgatgtacattgtatattggttaaatgttggacatgctgaatgaaatgttgtttctcaaaggctatagagtaaaaaaaaaaagaaaaataaattcaaaaaaagaaaaagaanagcaataaagttgagtgaataagatcttaaatggcacaagaatgaatgaaatctcggttctactctntaatgttaaatttatctttacttc

SEQ ID NO: 153838 - DNA, 380 bp, Glycine max
tgggggagctaagtagatcttagaagagtgtacggatgggaatccaagttccgtttggatccaggatataaagttagccctctggtttgttgttgataggcttatataattgtttctagcgggaaaattcattacatgctcatggtcatgtgtatccaatggttgccaattgacaaagtttatccccttgttagtcaccaagcgtcggcgatgctaagagatctcgactgagacatctaagatgcccacgtccaatatacatccataacaatattaaataatgtattaaaatatattgctaacgtgacattgatttgaatcttttgttattatatttatttttttaaaacaattctcaatttcaaatttataaaaaatgg

SEQ ID NO: 153839 - DNA, 459 bp, Glycine max
  unsure (1)..(459): unsure at all n locations
gcttgcgaaaaaaacgcactaaaatatgatattaatgngttacaaatacattactggaacagcgtcttgtatattctaagccaaattaaatgctgaccagaaagtgtgttagaacattaccactctcagaatgtaaccaaggcttctagaaattcggttgcctaaaaggaaaaacatggcatgattcatgaaagtacttcatgtaaaatatgtaaagtacgagtatttgacatttttgttgctgaatgaaaaaaaaaaactgtcaaataaattaaaattaaaattaaaatatatatattcgagaatatatggctaattctcctgtttttntaatttcattttcaaatgaacattaatctaaaagtcgttgtattgtccaatttattatgaacatgtacttgtactcttgaaaatttaaattatttcgacttgaaaatttaatttaaaccaagttctaat

SEQ ID NO: 153840 - DNA, 402 bp, Glycine max
  unsure (1)..(402): unsure at all n locations
tgctaactcccttagtggcattgtattggttgtttcttgatgtgcatcttatacatatgatatatgtcttgatcattcatcatcatggtaggtgaaaaaagttctaagtaaaaatttcttcaaaaggcaaaaattgtttaatcgattatatgtctatcgaatcatacaacagtatttgagcttgaaagtaagtctcgtatcggttaatcgattaccgatatctagtatcgatacattgtgtttgagacaatgattgattattcggagttctgcttaatcgatttttctctctcgttagttgtcanaagtgacaagacacttaatcgatactttgagatctaatcgatacattgtcttgtgtatttcagatgtgatagacacttaatcattaaagatatctat

SEQ ID NO: 153841 - DNA, 403 bp, Glycine max
aaccaggttgtgttgagattgtggaaattctcattcctggtgggaggatacgaattgtatgcatgtttgtgctctctatcgtcaacatggttggtgtgcttgggatcttatgtgcagtactgttggcatctgtgagtgtattactcctttactgtccataagtgtaactattgtaaatataacttctaaaatcttgttaagtgtaactatcttagatagacagctgtgagtctgtgactgagtctctgtatatataaggtactgtgaacagagactcactgcctttgtatgtgttacattttagatacaattcccaattttttctttaacatctgcctcctgatgtggtgttgtagacatctctttttgcctattttatttgcaatgcactaataaacaattc

SEQ ID NO: 153842 - DNA, 474 bp, Glycine max
  unsure (1)..(474): unsure at all n locations
gctaacaaccctannattctgatttaatttatatttagcaacagccattatcacttgacgttaaatntatacattntagatgtatcttcatttcaatttttacaaaaatgagcaaatgctcaaatgcattatagccaaaattaatatatattttttccagcttgatcttttaacttttttgttataattaattntagtcttttatcttttagtaattaaaaaaagtatgtactatgtaatacaattgttgacgtattttataaacataaatttatagtttgttaattaggtttataaatgtaatgtatgacataatattttttgtattcatccaaaaaaaatccacgtatgagtacacaagcgtgaatattcttctcaattataaagaatgttttcacaatacaagctagatggtttattgtgacgtattttttaagaattttttattcttaatttgactggtactatatatac

SEQ ID NO: 153843 - DNA, 444 bp, Glycine max
  unsure (1)..(444): unsure at all n locations
agctntgatcttccaccaccaccgccaccatcttcttanatctctattcctatattattaggactgtgatttctagccttgaatttgggctatattattatggtatttgaacaatttactatatccctattcgcatggtatgattgaacaaatattaagtatgttatttgactatatgggctttatagataatctatttatgatcgtagcttcatggtttggtcgttaatatctcaatgaatgttgtatggatgattaatcatggttgattatttcaaatttgttatgcactttggctttttgttgatgccaaagggggagagaaatgggattaaaatcaagagctcacatgagtaatcaatttaattctaagatatgcacaaatacaaaaacacaaggggagaacttatgtgagtgatctactaagaaaaagtgtgtgtgtgt

SEQ ID NO: 153844 - DNA, 454 bp, Glycine max
  unsure (1)..(454): unsure at all n locations
tgattcaggaactngagcagaatcaaaggcagatgatggctgagttgcagaacctcatgaatgaacattctacttgtatgtacacaatttctgctggtaagtctgagatggagaaaatgcaccacaatatgaatgagcagataatgaaatttgctgaagacaagcacattntggaatctctgaacagtgactttgaaagaagggctatttcagctgaagcagcccttaaaagggccagattgaactattctattgctgttggtcaattgcaaaaagatcttgaactgctttcttgccaggttctttctatgcatgagacaaatgaaaatctcataaagcaaaccctttctgattcttcactttcaaacgctgatggtagcccagaaccagtgacatatcctaaaatntcagaaggtcgtactntcaatcgatcgctatgtcaaaatcacagttc

SEQ ID NO: 153845 - DNA, 474 bp, Glycine max
  unsure (1)..(474): unsure at all n locations
agtcacctgaggcatgcaagctnggatctanacacaagtctggaatcttttactgatgtaatttcagaaaaaattccaagagtcacatctattcaaatggtcatgaatggccatcaaaggtgacttggaaacaagaatttaaagagagttttcattgcccacaaagtttatcctctcaaaagattaagagtttttctgaactgaactgtcttatcctctcaaaaagattccttggtcaaccacttgcatattcaataagggaatttgattggtcttcattgtacaatctatcccttttaagagagatttcttcttctcttcttcttacttctgaaaagggattaagagactgagagtctcttattgtagaggattcttgaacacaagggaagggttgtccctgtgtggttcaaactntgtaanangagttntacaaagagagtggaaaatctcaagtgggtttcttgaggactg

SEQ ID NO: 153846 - DNA, 485 bp, Glycine max
  unsure (1)..(485): unsure at all n locations
gctactctagcatattccttgattgcgtcatgcatctcttcatggcatcataaataggtatatcatttctgcatcatattngngcattgcattttcataaatcactgcattatcatacgccttcatttagcatgcttttgtttggtcaactgcatatattatactttcatcatttgcatgtcatgcatgatccttgtattttcctttgtaaaaacaaaaaaaaaaaacaaacaaaagcaaaaaaaaaaaaagagcaaaagaaagtcacaccacattcttggttacatgtgttgggtaccatgataaaggctatagaccgaccatgttgggattatactcccatttctaaaaaaaatgattgaaaatcatctgaatatggtacctaatgcatggttaactaggaaaatgatggttctttgggcatctcaatctcataattacattagccatgcatatcatgagtgtgccctagttattcatctgta

SEQ ID NO: 153847 - DNA, 365 bp, Glycine max
agcttgtagaatggctagacatgatacatgtcatgtgttggtttggttcaaggataaaagggatgccccacattatttccatgacacaaatgcaaagatgatgatttggaaattttatgcaaaactggtcatgcatgcacctatgtggacgctcaagtgtcaaattttattggcatgtgatgctaggcctcagaatcatttcctttattttaaatcaacccaatggttcccaaatatgctcttttatcaatttatgcatttatcctagttcatttcgtgcgtccggggaaattttcacagcattcacccttcaagtgtagacacgttttttctttcaaaaatcggtatgatctatgaaatttttt

SEQ ID NO: 153848 - DNA, 434 bp, Glycine max
  unsure (1)..(434): unsure at all n locations
cgtgtaacccaccatcttctcatagtttatcaccggtttcgtgtatactatcatngntatcatctccctctccatcattgnggacactacttagtttaagttagtctaaacctaggagggctatctaaattaagcctagtccaacaagagggatctgaggacaaagcttggattgattcagtctaactagggatcgaggtttagtaatttaggctacaacgtaatacacagaatcatgattgattagagaaacatctttatatacatcagctggtttgttagaaagacccaacacctttacctactgctgtcaatcttacttacttgcatttntaactattttagccaagacttagtttaattctgttctanatcatcaattatcaatgtttctttcaacaatgccttatttctgaattaaccctgtctatact

SEQ ID NO: 153849 - DNA, 460 bp, Glycine max
  unsure (1)..(460): unsure at all n locations
gcaagctgggagaggatgctncaatggaggaattgtattatgtatagaaagagagaggggggagcacgaaattgaatgaagaaaaagagagagaagttgaactttgagttgtgtctcacaagactctcattcatcaaagttacaacaagtgttacacatgcttctatttatagactaggtagcttccttgaaaagatttcttgagaaaacttccttgagaagcttctttgagaaaacttccttgagaagcttctttgagaaaacttccttgagaagctagagcttagctacacacacccctctcataactaagctcacttcctaaagaagctagagcttagctacacatacctctctaatagctaagctcacctncttgagatgagaagctagagcttagctacacacccnctataatagctaagctcacccncatgaaaaaatacatgagaatacacaa

SEQ ID NO: 153850 - DNA, 395 bp, Glycine max
  unsure (1)..(395): unsure at all n locations
tttaaagggtangaaggggaagttgtaatattnnaaatttgtaataatttgtggtagatatnttagtgtgaaatntatgtttntagcttaaccctttttaagaatgacccactttagtattntgcattataatcttgtaataatcttcaatagaagtgagagattcagttcctaagtggaatccctcttgtgaggagaaaatctatcatttgtctaattgaatcatagacccttttttttgtagaaagtccaatagtggctgacggtgaggaaatctagtggtgaagctganatccaatggtttgctggtccaatggtgaactaattgtggtaatgaattctatctttaagggtgaggactaaatgtagcccaaggttgatatgaactaatataa

SEQ ID NO: 153851 - DNA, 459 bp, Glycine max
  unsure (1)..(459): unsure at all n locations
agctntataggtgaaatcaggtgcagccattttccttatagtcctctcacgaggtggaggttgtgccatgttctcagaatgtgcaaaatcagaatactcagaatcagaatgctcaaaattataatgctcaagatcaggatgttcaaaatcaccaataacagaatgcacagattcaccagttatggaatgctcagaatgatcaaaaggtataaaatgatgcctaactaatctatgaaatgtcctatctatctcaggatcaaagggttgtaagtcagatggattgcctctagtcatacactacattcagcatgcacacaactagttgccttgtcatgtaaataaaggtgtaggtttgaactacagctaccctcaaatgatatccaaatgactngaaattttgtgagcaaccttataaaatgatgagaagatagcacanaaaatttcagacaaaaattcaaa

SEQ ID NO: 153852 - DNA, 324 bp, Glycine max
  unsure (1)..(324): unsure at all n locations
ctggtaatagggggcctgatgaccattgaggtgtatcgggctctccgtanaaccgatagaggcccgtaatcagagctagaaccccaggaccctgttgaacctcttcaggtccactgggtgtcttgcgggcgcgatccctacaaacagtagctggcatcagagacaaattgagccacatgcatacttacttatgtcttgatggcataaaccagctgacacttcgacagggggagatcggagtggtggttgctatgaagaaggttgctaagtagcaacatcatccatatattggtgcgcacgatccacactcgtctccttgcagcg

SEQ ID NO: 153853 - DNA, 429 bp, Glycine max
agcttaatgcaaactatttctataagaagattgtttttgttctttcatcatttgattcaaacttaaattcttcgcttaggatttttaggatttttgttaataaatctctgcttttatgaacaaaaatatataaagttggtttaggagataaagagaaagtttttaatgtttttgtataaattatagatgtcacatgggaattttttaggaaaagggaaataggagctgcaaacctcaactaaccacgatgagtaaagtcgccaccataacaagctagaaccaaaaatcaagtgaaaaattgtgaaaaatcaccaaagagaaaatgcaccttgctacaatgaatcctcaatttgagaccaagaacatgatcataaactcactatagtgaatgaatctttcgccactacgagaaggagtctagagagcatg

SEQ ID NO: 153854 - DNA, 457 bp, Glycine max
  unsure (1)..(457): unsure at all n locations
tctagcacaatggacttaccttgaattaattccttggatagcccttttgagctttgtttccctttccttggtntgaagctcactacaagccttaagtgaaaaaccatgatattaccatatccttaaggaattttggagctttggaattgttttgggaataagtgtggggggtttttgtttcattggacaacttgttttgttggctatgcttcatgatgtattttgggccatacttgatgtacattgtatattggttaaatgttggacatgctgaatgaaatgttgtttctcacaggctaacgagtnaaaaaaaaaaaaaaaaatgagaaaaaatctgaaaaaaattctaaaaagaaaaagaaacagcaataagttgagtgaataagatcttaaatggcacaagaatgatgaaactcttggttctactcttcatgtgtaatatttatacttacttctt

SEQ ID NO: 153855 - DNA, 261 bp, Glycine max
  unsure (1)..(261): unsure at all n locations
ctgcaagcttctcaatattatgggctgaatcggactcctgttggaaantatgaccattggaatttctctagagctttggttgctcaatctcgagcgtctcgatatgttatgcacctgaatcggacttccgtgtgacaagttatgaccattttgaattccacgagagcattcggtggtcaatttcgagcatctcgatatattatgcgcatgaattggacttgcctgcgactagttattaccattggagtttctcaagagctt

SEQ ID NO: 153856 - DNA, 449 bp, Glycine max
  unsure (1)..(449): unsure at all n locations
agcttgagccgaattaaaactgataattctttgtttcttagaaaattcaacgagcaaacttctttctatcgttaaaatttggaaaatatctattggaaacacttaactacgggaatctttcatcttgatgattattagttttttttttctatgatcttgatgataattagttgttaatttattatacatgcagcttccttgagcaatttttttttgtgaactttttagaaggaggttaaaagtgaggacttaccgagtaattacctattttagtactactttcttgtccaaacatatctaactgtaaaattttaataggacttgatgcattagtactacgatgatcacacctaaagcaatttaaaaggacttataaatatagtacttataaatatagcaaaagctaatcacgagtttcattaatttattnggagaaaaaaacacttatg

SEQ ID NO: 153857 - DNA, 440 bp, Glycine max
  unsure (1)..(440): unsure at all n locations
cgctgcagcnctgggggaatcagacttgttttcttcttacattcaccacagattctgccttcttctattttcagattgggaatgcctctaacagcacctttgtcaatgattttcttcatgcctcttaagtgcagatgtccaaatctttgatggccatatttgacttcatcttctttggagaatagatatgtggaggagtaactggtttcttgaggtgtccataggtaacagttgtcctttgatctgctgcccttcattaggacttcactcttctcatttgtcaccaagcattctgactatgtgaagtttacattgaatccttcatcacacaattgactgatgctgatcaagttcgcagtcagtcccttcaccagcagtactttgttcagactaggaagtccatcatggactagctntcccattccagtgatcttttcttt

SEQ ID NO: 153858 - DNA, 434 bp, Glycine max
  unsure (1)..(434): unsure at all n locations
tactcaagcttttggaataganacatgggaccaactcattntatttcanaatgtctatctagtcaagatctgagagaccatacaagtttcctagcggtttctaataatatgggccattaagtctatcatatgctgacaatagccgagaagcccatgaatttcttcaggggcggagtaagtgtccgccattgccttggccttggctaacaatcggggaagttcctgactcccgttcaaggtaagagcaaactgatccatccacatggttgcctcttggtgtaaagagtcgatcacccttcctctagcctctntttctgcgtatacttgggcatactcgtccgcgaccctatgctcgtgggccgtggctagacttaactcttcttggtacttggcgatgatagctagcatgttggtctctgtctcgcataaatgct

SEQ ID NO: 153859 - DNA, 317 bp, Glycine max
gctgtttgaaacctcacccactcactagaaacacatttggcggtctttaatgaaacctcttgccttgagcaccctaattacccttgagttcttacgcaattcaagagattatggccacaacaaagaagcaatcaccaatatgtgtaagggaaggctagacaaggaaaaggttaaccaagaataaggctaacaatgtctttaggcacaaatgaaggaaataaaattcagaatttatgaattcaagtaacaatccttcatgcaaccaatatattaccttaaagagtgtttttgttaatgtcttcaagcatgaaccattc

SEQ ID NO: 153860 - DNA, 222 bp, Glycine max
gatcgagaacgatgaagaatttatgaataacgtcgaagaacgggtgaaaccttcgcgaaatttcttacggaaacgttacggaaacgtttctgaagcgcctccgcttggattttcttcacggaaacaattttttcaagcaaatttgaaagagagagaagtgcctaaggggctgaaccctttttcacttcacttcctccccaatttataggtaaattggggaga

SEQ ID NO: 153861 - DNA, 460 bp, Glycine max
  unsure (1)..(460): unsure at all n locations
agcttcaccggatgacgccgatcgaacatttcctaactgatgttatgcaaatntcgttcagggatggaattgataactcgttaggcgacatctgtcgtgaagtagcgaccgatatttttcagccgacattgcacaattctttttagaaaagctcgctggtcgataatggtctttttacggcagagtaagttttcttgttttggtgttgcataaaaaagttacaatgtacttcggctaggtttttcgtgcgagttcaaccgacattttgtttcggccaggaaaacattagcccacctctgcaaaaaaaatatttgctaaccgtcttcatgcatatttcattcaacgattgaatagaaaactcaatagccgacaacggtcgtgaaatagtcccgactgatattattcagccggcattgcgcatttctgtgtaaaaaacgctcgctggcagattatgtttttt

SEQ ID NO: 153862 - DNA, 466 bp, Glycine max
  unsure (1)..(466): unsure at all n locations
tctnttttgacctcgatcggtcatgtntcctgggcgatgtcgacttgtcattttttcgatcaatatcggngaataatattttttttgccgagataggctaatattttcctggccgaataaatgggaacatgccagtttcggcccaaacaaaaggtcggttgaactcgcacaaaaaaacctagccgacctacattgtaaattttttatgcaacaccaaaacaagaaaacttgctctaccgtaaaagaaacattatctaacggcgagagtttttcaaaaaaaagtactcaatgtcggctgagaaatatcatttggggctgatttacgaccgatgtcggctattgagttttcaattcaatccacgaaagaaagttgcatgatatcaattangaaaangttgatcggcatcatcttgtgaagcatcttttctagccctcgatcagtcatgtttcctggccgatgtcgact

SEQ ID NO: 153863 - DNA, 441 bp, Glycine max
  unsure (1)..(441): unsure at all n locations
ctgcaacagatcatggatcatgtattggaatcttgtgttatgttcaagttagattctgtatgttcttatattgctttattctaagaggaaagagtatattatatntatcacctcaatattgcactctaaacccgttttttaaaggttagctttgattatgatcacttatgcttagttctgtagagaaaataacatgtaaatatacagctaatcagttggtagtgctttatgtgaaaatcaagaagaaaaagattctcttccctggtggatccctccttttcctgtgtggagttatattccaagtcccgtgattgttaaaagtttgctttgccatccaagactttaaaacattcttgtacataaaatgtgctatttacctgcatgtgacttattgctgaaaatctttactatgtcacaccacaaatttgcttgactgcagtt

SEQ ID NO: 153864 - DNA, 344 bp, Glycine max
  unsure (1)..(344): unsure at all n locations
aagtctcacccttccacacttnctcatttcaagcttgtaggattatggggtatccatcacatgtggtactaggtggcggtcgggcgatggtgcaaaacaattctccacatccacaaatcacgtataaacccaccatcccttgttgcccacctcaactaagctcacgtactcccacgtagcccttatcctcgttcctctcaatgccgggtccccatcaatcctcccaagctttcaaaaaatccaagtaatttaacatccaagcatcaggaactaacacagccaagaaaacagggcagaggcagaaaactctggccaaaacacaaaccaacattacagctttttac

SEQ ID NO: 153865 - DNA, 435 bp, Glycine max
  unsure (1)..(435): unsure at all n locations
nttttgtganagggatgtgactcttcacaattaaagtgaattccaacgttcaaacatactggtaattgattaccaaatcattgtaatcgattacaacattttgaaatcaattggaacgttgtaaattcagttgaaggctttttgaaaaccattttgctactggtaattgattacaataatctggcaatcgattaccagagagtaaaaactctttgataaaaggtttttgagaaaaattcatatgctacttagtttttgaaaaaactttttaatacttatcttgattgagccttctcttgattcttgaatcttgagtcttgaatcttgatcttgattcttggaacattgaatttgaaacttattcttgattcttgaaatcaaatttccttttgaaccttgaagtgttcttgattcaatcttgaactcattctttga

SEQ ID NO: 153866 - DNA, 431 bp, Glycine max
gacgctgatataataacttcctctgatctgatattatattgaaaaataaaagagatagcatttccttattttgatagaagaaaagaaaataccatcaggttctactttctagtgtttttaccaagctagtaaaatgtagggctgcaatccacattgttcatagaaacaaactaaagttgtcgctcagtcaatgtaaagaggatcagagaagtgtaaattaattgatgacagtatcatactgttagtccttcacatgtattagttggtgttcacgcaaacttgttcatcaagtggctccccaactcctcgactatcatgatggcgaatacgccttgagtataaacattgtgttaatctttgtttgcaaataaagtaaatcgaaatgctatagaagacagcctgatacctatgagcatgataccactaccatc

SEQ ID NO: 153867 - DNA, 417 bp, Glycine max
ttccgattcagctacgcgtaaatatttgattagttattaaaaaatgaaaaaataaaattacaagtctgtcggaaatcacattggggcctctgtaggttaaaatgtgacttcagttcctttcaaagatcaatgataaagtaatattctcatggaacatgagaagctattgaaaattattttgaattttaaaaattatttccatacaatattaaaatttaattcaacatattaaaagataaatagaatgtgatgggattaaaacacagacaaaggttttacagtataaaaaaagatacatagtatgtggttagtccattcaaaatgagtgaaatataacctttgtttctctaaactctcttcttgagtttattcttaaaaaacatcatatcgtttattcttatgaatataatggttata

SEQ ID NO: 153868 - DNA, 454 bp, Glycine max
agcttatcgcacctatccagcagactattataattattatattttattttttcaattgtattgtacattacattatttgtcatatgttataattcattatgttctttcttaaactcttactaaagacacctttataagtggtgcttaatttgcatttgcttattaaggggcaccatgcttaattagacttttccactagaattagtgtttattaagcattcttcaaggcagcaagtgtttatataatgaaataaagttatctgtgagatatatttaataaaataaaactggtttaattataactttcacatcctttaatatatacatatatatatatatatatatatatatatatatatatatatatattacgcaatttcaatttaatttttaatcttacatatactttatggtctagaccaacggtacgcgtattttatagttgactaatgat

SEQ ID NO: 153869 - DNA, 470 bp, Glycine max
ctctgcctatactcttcaacaatcctccaaccagctgatgatgctttctgctagcatgagccgagtcagagtttgtaaaaacctgtgggataaaacatgacacaaacattatgctgaagagaatatttatgaattatgtcctattctcgctcattaaacaagaacaaaggaacttacaacttttcgaacaggcaagcttatcaaaattcccctgagaacagggtcaggtttcagcatatcatatggcaatctcccatgaacaaagctgctcaacacacactaaatactttgtggattccattatatttaacatgatttctaacgattaaaatatatggaaaaaaaatagaacaaatctcaaatatgtaaagacaattacccatgaaagtcatcatagtcaaagtcatagccaatagcctggtgagagggaaagagacaatgattgagattgattctgtcaccgtcacatc

SEQ ID NO: 153870 - DNA, 350 bp, Glycine max
  unsure (1)..(350): unsure at all n locations
agcttgcttgtggtgcttctatggagactggattttttatcttaatgaggncctttaatggtgattttccaccatggagatgcagcggaagacaaaggagaagaggtgagaggaggcgccattcactatggaataagccatggaagaaggagcttcaccaccaagaggagccttggataagaagcttggagaggatgcttcaatggaggaaaagaaagagggtgagaaagagagaggggggagcacgaaattgaagaaagaaaaagggagagaagttgaactttgagttgtgtctcacaagactctcattcatcaaagttacaacaagtgttacacatacttctatttat

SEQ ID NO: 153871 - DNA, 468 bp, Glycine max
  unsure (1)..(468): unsure at all n locations
tctatntatgaataccatggataggccagaatatgtgtggaaacaaagtcggttatggatggcagangatattgtatttaatcataagagacaaggtaatttcatcaatcctaaataaatatgtatcaatcatagcaaataactcacttactgacaaatgtnatttttgtactattcataggcatccaactcacagacaaagaaaaaatgcatctttgtttgacggaaattgaaaacctcctgcaagccaacaggaaaagcctatgagattttccttcaatgccatacccactaggatatgccgccaacccgcaccaaaataatctcatctacaatgaactgggttacgacagagacatattatctgctgaatttgacaaatgctatcagtcgctaacaggtatttacaaaatatttaactttttactaacacaatatggatgcccaacaatccacactaataataca

SEQ ID NO: 153872 - DNA, 429 bp, Glycine max
  unsure (1)..(429): unsure at all n locations
agcttcaagctccacattaagctattcaataaaattttttactctgacaacttatcatcctaatcctttgccttttcaagttcttccttgagagcttctatctatatttttagtttaaatataacctgattttcactggcctcttgtggagaaaactctaccagttgatgatgcatcgatngggatgcaagaanttgagccttgtagttattaaaaactctaataaaccatcagtttaatctctaaagtattgtctatactctaaaagaataaaattatataagtacttagattttactaacctttagggactaacttgattttagtacttagaagagtactacttattantaattttaatatttggaatactttagggatgaaatngaaagnttatattcagttaaagacaatcctaacaaaacaatc

SEQ ID NO: 153873 - DNA, 464 bp, Glycine max
  unsure (1)..(464): unsure at all n locations
cttgccaccaagagagtgccttggataagaagcttgtatagggtgcttcaatggtggaaaagacagagagagagagatagagagaggcgggagtactaaattgaaggaagacaagaggaagagaagttaaactttcaagtttgtctcacaagactctcattcatcaaagttacaacaagtgttacacatgcttctatttatagactaggaagcttctttgagaagcttctttgagaaaacttccttgagaagctagagcttatctacccacacccctctaataacgaagctcacctccttgagaagcttccttgagaagattcctaaagaagctatagcttagctacacacacctctctaatagctaagctcacctcctcgatatgagaagctagagcttagctacacaccccctataatagcttagctcacctncatgacaaaatacatgaaaatacaaaaaa

SEQ ID NO: 153874 - DNA, 339 bp, Glycine max
  unsure (1)..(339): unsure at all n locations
agataagatagaagttttttaattttaattattaagcaagacagttgcacaattaatttacaaaattttgattatataatacagcatacctaaaatgtgtggtgtaaaatattactacttcctacaaagccattgcatctttcaaaaccatgcatgacataatataaatcccctaacacaggtgctcatttgtttgtagacaacccanacgaaaactgagaacccattcccaaacatagtgcatgacgatccacacgtcctttagagaagatgtgtgtgggagaacttgtgcttttttggggaatatgatatccctgtgacattntggaatatagtgag

SEQ ID NO: 153875 - DNA, 454 bp, Glycine max
  unsure (1)..(454): unsure at all n locations
ctttaagtgaaggtaaaagagaagganaggaaagatatcaagaatgaaggctacttccttttgtttaaatgttaattcaacataaataattttcctatatatgcaactatatgtagtcttaaggggtgtatntcattttccatctttacttccttttgttcaaatgtttcatggtatggttggaagaagcttttaagcacagggtaaggagaagtacatgaataggaatattaagagttactcaaatttaattgaacataaataatttctcctgtatatgcaactataatcacaattcatgaacaaggggtgtatttcattttccatcttcaacaacaacagcaaaagccttttctcaccacgtgagatcagctacatatattacatgtttacatgacatcatttgactcaattanagtgacgattttctgaaatattatttaccatgagatca

SEQ ID NO: 153876 - DNA, 462 bp, Glycine max
  unsure (1)..(462): unsure at all n locations
agctngaagtgagaaagtgtggaagagtctgcttcttacttttattcgttgaccacagagtggtacctggagatatgtcgcaggggtcaggagaccttggggacgtcaggtggggtgctattgcccaaaaccaagcttgaccaatcccgacccaacccgggcatagtcagtcagtgagaacctgtgatgtacctaaacaggcgagctcctggtagtcaaccgataaaagaacaaagaccacaaagcaaggaggcttgcgtggtggctggccagctatggatcttgagtgataattgaaatatggcctctggtaatcgattacaaagggtgtgtaatcgattacaaggcttaaaaatggggttaggaagttgatatggcctctagtaatcgattaccaatactgtgtaatcgattacacagagtaacaggtcactcgtaatcgattaccagttatgtgtaatc

SEQ ID NO: 153877 - DNA, 301 bp, Glycine max
  unsure (1)..(301): unsure at all n locations
gctctgacggacttaccaagctcttgaaccaggacggagaaagtttatatatatgcttgctcagggtggagagaggaagactanagatattgatcaagtaaagtgtgttaaggatgaagaaggcaaagtcttaatgcatgaaaaagatatcaaggaaaggtggaaggtgtatttccacaacttatttaatgatggatatggatatgactctatccgtctagacacaagagaagaggaccggaactattagtactatcgtcggattcagaaacaggaagtaaaagaagcgttgaaaagaatg

SEQ ID NO: 153878 - DNA, 453 bp, Glycine max
agcttttggaaatcaaggttcatactctttaattcattcgcacacacacacacatatatacatttcaatttggaatactttaccactttttaagcttatttccaacaagttttctgattaaatttatgacacgagcttttacgtggaagagcttatcaattacttctttgcatgccatgtcacaaaatatgacccaaaagcattttaaaatgttcaaactgttaactttgggggcaaaacttagaatctaatcaaaattggagttttaccttgttaatgtctgttgaactctactgcaaatctttattatacaaattactgaagtgaaactccaattctgattggagaacaacatcaaaaacacctaaggaattacatgtaagttttgtccttaactttgccctgtattttcttccttttaactagacatccaacttctattagcacagaagt

SEQ ID NO: 153879 - DNA, 446 bp, Glycine max
  unsure (1)..(446): unsure at all n locations
ctttagaaaatggtatntctctacgtatggactatgctgactgcttatcttagctatccaactgtgacaatggctgcaatgagttggattctgttggagaaaaaacagcaatcaacttgtcctttgtgagctgttcaggtccttgggacttaattacaaatgtgtgaaaaatggtatcatttgcagcagcaagtttagactctacaacactgatctgtgcttcgttaaatgtttggattacttttgaaacanggtgactgtcaagagggcagctcacctttacaatgacctcatcttgaaaagcttgaatatccacatcaggagcttttttctcctgattttccaatctcaacttagcttccaagactgatccatcatttgaagtgcttccaaatctctctttttcagcttccatgatcctgactttagcctgaagctcgttgata

SEQ ID NO: 153880 - DNA, 367 bp, Glycine max
  unsure (1)..(367): unsure at all n locations
aagtcaagtccaaccaaaccttaaatagacccgagccaaaggcacttaacaaacgactcgactcattttcatccctaataacaacttccatataaaaatatctttactataaaattaattntaatggaataaaaattacaaccataataaatgtaatgtcactgaagttgtagtatatcatgtataattacttgaaaaacgttaacaatactctttcaaataaactctattgaatacattctttattgttgattaaaattaatttaaaattacaaattcaaaaggaaaactttttaataagtacagtaaaatccanaaacaattgtatnntttaacaaactccagcctgcacaaagagtatattcct

SEQ ID NO: 153881 - DNA, 454 bp, Glycine max
  unsure (1)..(454): unsure at all n locations
tanggtgcatatnnttggtaattttntatcttaatatttgcttattttggatgtagaagtaagaggattaaagtggcagctaacggtgggaccaaagcaaggaaatattgaagagttgcacatcatctatggcttgaacatggcttttttgaggcttaagcatgactttctatatatgttaggcttaagcatggatattatggggcttaagtcccatgcttcatagactcaacatttcagcaacataatggtgcttaagtatgataaaaccggtgcttaagtctcanactacacgtgacaatctttaaaccaacacaagccatagccttttaaaagccctaacgatggaaattcacaacaaaattggttcggggggagtcatctatcgtatgggtgaaggctangaagctcttacttgccctccatctttatgtagacattataattattaatc

SEQ ID NO: 153882 - DNA, 439 bp, Glycine max
gctgagatcactttctcctgggcactcttttttttcatacaagcccatgacttagcatattgttacaaatccacagattccggtctgcttcctctctaaagatgattgcgagctggcattgagaatccaccttatgaaagttggagcaacaggatctagtgctcctcacatcgcttcaatcgactctctctacgtcgattttatcgcaagttctaggatgcacccactcctatgaggtttggaacgcattcacgattatttccacaagcaaacaatagccacagcttgtcaacttcgcactcagcttcgtgctacgacacttgcaggcaaatcaatacatgaatttgtcatagattcaagcaatttctgattttcttgcttccatcggaagctcaattatgctacaagagcatattgattctattcttgaaggtctatc

SEQ ID NO: 153883 - DNA, 473 bp, Glycine max
taagctcttcttcgtgggttgatgggttctgtctcgtagaatggcatgatcactggctgacatgttctctattagctcagttgcttcttttggggtcttcagttttatctttccccctgcagaagcatctaacagttgcttggtttgtggtctcaacccatctataaacatatttaattggattggcttggaaaacccatgagtgggagttcttctcaacaatcctctgaacctctccaatgcttcactcatagattcatcaagaaactgatgaaataaagagattgcagctttcccttccgcagtcttggactctgggaagtatttctttatgaacttttcaacaacttcttcccaggttttcagactgttacccttgaatgagcggagccacctcttggcttctcctgccaatgagaatgagaaaaggctgagcctaatgacttctgttggtacaccgacaatctcaatag

SEQ ID NO: 153884 - DNA, 421 bp, Glycine max
  unsure (1)..(421): unsure at all n locations
agcttgagatgaggaagtgtagaagggtgaatctttctgcttttattcgntgaccacagagtggtacctgtagatatgtcgcgggggtcaggagaccttggggacgtcaggtggggtgcttttgcccaaaaccaagcttgaccaatcccgacccaacccgggcatagtcagtcagtgagaacctgtgatgtacctaagcaggcgagctcctagcagtcaacagataaaaggaacaaagaccacaaagcaaggaggcttgtgtggtggctggccagctgtgaattatgattgatatatgggatatggcctctggtaatcgattaccaagggtgggtaatcgattacaaggcttaaaaatgaagacaggagactaagatggtctctggtaatcgattaccaaggggtgtaatcgattaccagg

SEQ ID NO: 153885 - DNA, 474 bp, Glycine max
  unsure (1)..(474): unsure at all n locations
gcttctcaagcaagcttctatcaagtggaaatcagagctttcaagtatgtgctccttattccaccattaatcttcaactttaccttctcctccattgttgtttcttcatttttttgcatgtgtctcctctcatgtcttgtgttgaatgttgttagaatgattctttagaatttccactgattaaacttgctatagaaggtagatttgattttctatggttcaaattttttgttcttgttcttgaaccatgaattgtgttgagtctgtcttgctattttttgtgtctgaaacttgaaccataaaattcttacacaaacattaaagtagaagaaaacctcataaatctatagtgacacgttcacctattgtagttntgtcatanaagtcatgtctagtcatgaaacttgtcacataagataccttatgttgtgctgaattttatttttcttatgtctttgtctaattcatttgagt

SEQ ID NO: 153886 - DNA, 248 bp, Glycine max
ggaaggggggggggaaaaggaagcccccccaacgaagggaaaggagaaaaggaaggaaaggaggaagggagggaaggaagggagggagggaaggaagagagggagggaaggaaggggaggaaaggaaggaagaaggggagcaagggaaggaggaagggagggagggagaaggaagaaagaaaggaagggagggaggaaaggaaggaagggaagagggaggagaaagggagggaggaaggaaggaaaga

SEQ ID NO: 153887 - DNA, 379 bp, Glycine max
gaccccagagaccgggagataaccactttcacattcccatctggtgtctgtgcttaaagacagatgtctttcgggctatgtaatgcccttgccacctttccaagatgtatgttggacattttttctgaccttgtagagaaatgcatagaggtattcatggatgatttctctatgtgtggctcttcctttgacattgcttatgcaacctagaatccgtgttacagaagtgtgtggaaacaaatttggtgctgaattgggaaaaatgtgacttcatggtccatgaggggattgtcttacgccacaagatctctcttagagggatacaaatgggcaaagaaaaaattgatgccagtgagatgttctctttgcctcttaatat

SEQ ID NO: 153888 - DNA, 455 bp, Glycine max
  unsure (1)..(455): unsure at all n locations
actaagcttanatgtaagagctgtgagggcaaaacactgtctctnggaagattcctccagagattggaaaatggtggcaatgttgcatgttatttattattattaataactacaatataattataatgtactataatatagaacaataaactttaatagtattgatcaatgtggtataccaaaccccaaataaaaagaggtccttgcttttggagcctcaggtgctttctacatcttcaaatgtatctttaatgaaaatttgagtgggctctaggtagcttattaatgtgtcatgaccaagttgtgctctttcattgtctccaaagccaaatatttgtcccctgctagtgatcaccacagtgttgtacaagccagtgctaatttgagaaacatggtgagctcccaaggtatctaagaatctangtttcaatactttattagatacccttctatac

SEQ ID NO: 153889 - DNA, 465 bp, Glycine max
  unsure (1)..(465): unsure at all n locations
gcgagcttgacaaatataattatctactgggtccttcttagttttcttgtatacacagcaggnctgcggtggcctttctaaccattcttctaaccgccggccatatcactcccctccctaacccccttatgttgtatgtgataatctttattattcaggcttcctggtacccaacttattggcatcctccttgtccctcagctccatcttcgtaaattgtgaccaccattgcatctcctccctcacatgtaactcccaaattctgcgccatctcccattgtgctgaggcttcctttgtattctcacttgtgtggtggctatcattctgcaaatggggctgagttataatctgcacttcatctggggttattatacattcctgttcttctaacccactaccactggttgctggtgaacattctctttgatctcagttagataatgactgtctgctgggcgtagcta

SEQ ID NO: 153890 - DNA, 470 bp, Glycine max
  unsure (1)..(470): unsure at all n locations
cttccttgagaagctctcttgaganacttccttgagaagcttgtgtgagaagcttccttgatatgtctgagcttaactacacacacccctctaataactaagctcacctccttgagaagcttccttgagaaactttcttgagaagctttcttgagaagattcctagagaagctagagcttagctacacacatctctctaataactaagctcacctccttgagatgagaagctagagcttagctacacaccccctataatagctaagctcacccccatgccaaaatccatgaaaatacaaaaaaaaaagtccctactacaaagactactcataatgccctgaaatacaaggcttaaaccctatattactagaatggcgcaaatacacgcccaaaagaataataaacctatcttaatatttacaaagaagagtggaccgccacctttgccatgggctcacaaaatctaccct

SEQ ID NO: 153891 - DNA, 340 bp, Glycine max
agcttgccgagctcagggagagggtcctacttatctgttgcggcgacaacgacgggaggagaaaggggatgaggagaggtggccgtggtggggttgcgtcagtgaaggaggaggtggcgccgcacaaagcggtggtggaggagctgaacaaggaggtgaaggtgaaggatatggacgagacaaatctgacggagaagctggatagtgctgtcgctctcactactaatggaagtgctcacaagaagcctgtgaggtctctgtctaagaggaaactgggaattcaaggtacatttttcaatatgctatcgctacccactcttctgtgttttatctaacagaa

SEQ ID NO: 153892 - DNA, 421 bp, Glycine max
ctgtcctctgtggcctgtgaaccatggatcaggatctacttggatcttggactttggcggaactcgctgaaggacttgttgtggtaacatttctatctctccctcacatcaaatcttgatatgccgtttgcgtacatcggattcttattgaataaactatattataaaatcctattttacaagggtatagttaaattttggtcaaaagatgattatgtgtcttctataaattggtaacatcttattatgacccttgtatacttggtgaatttagtcattctctgttgaactttaaatactatgttgatggatcatattcatcaattataataaaaaaaagatcatatcttttaagtaactatcttcaaaaacttgtgatacgattgctttaactatttgatggaagtaacttcttaaagca

SEQ ID NO: 153893 - DNA, 448 bp, Glycine max
  unsure (1)..(448): unsure at all n locations
agcttccagacaatggtttcataagttctccttctctcttcttgatcaaggatntcagcaatgccctgcagatcactctttgttcactagagggagtggagcaactctagtcacattgttggtgtacgttgacgacattatcattgttgggccaaatcaaaaattgattgcaaaaacccaacaaatgcttgccaaacacttcaaaatcaaagtgattggtgatctcaagtattttctagtcttggaaattgccaagtctcctcgtggcatccatctttgccaacgtaaatatactttgcaactcttgactgacaccggctttgcagcatcaaagccttaatctgtccctatggatcctaattcacagctaaatgagattgatggtgttccattggaagatgtctctcaacaccgtaggctaattgggagggtaatgtacctcacaatc

SEQ ID NO: 153894 - DNA, 457 bp, Glycine max
  unsure (1)..(457): unsure at all n locations
tataatcccaganacagaggaagcaccagcaacaaaggtgcaaatagaataatgtaccaagagaagagtggtgaagccaacgtaccttgatgattacgtctaaggagcaaaactggaagaacgaattagtagaatcaacaccaaatcctacttgtggtgtttgctccctcataggcagacatgcataacaaaatctgttattagaatattccttttggataaaattggcacaaatctgttatttgaattcctctatatatagccatgtaaataaacaagcacgatatgagaaatagaatttccttcttaccttgagtttatcttcttcttcttcctctttggtctggaggtgctaaccctcgaagtcaatanacaaactcagagcacctaacataaggttnnttgcatcatctgcattagcaaacaatngcttaaaccttggtattattgaaagata

SEQ ID NO: 153895 - DNA, 437 bp, Glycine max
  unsure (1)..(437): unsure at all n locations
ctgcaactttaaaatgttgatctcattataaatannttataaaaattatattttagccaaaaatatattaaaaacttatataatatttttgtttggaatataaaatattaatcatatcttttaatatctaatgttaaaattttaagcgttatacaaaatgaagcgcgtgtttgaatcaaccttagaaaaattgattntgtcttaaattattcaatactgtatccattaaatacttcagaaaacgacttccctgaaaatgatatcagccaaaagcttaatgtacgtacaaattcaatttgtatagattacctcaacaattaacagagaatccgtatcgaaaatacacagaanatatgataccgtggaaaagcctattattgtacaacagagcggngtaagtatgaaagtatcaatacaaaaataaataaaaaattgag

SEQ ID NO: 153896 - DNA, 447 bp, Glycine max
  unsure (1)..(447): unsure at all n locations
tggcangtntatggcgctatgatggtgagatgtattgttatatctgtgtataatattgacaaataatctaaaaaattgacactgtcatccttcaatgtgttgccacatttaattcgacaactcatctcattatatgattttgcagcacgtaattagatgcgattgtaaatttttatttattgcattcaagcttaattctttaatgttatagattacctaggtctgattatgcataaattgatattattcgctgaacatctcttttgctgattactgaagtcataaacctttcatggtgcatcatgacaatgcgtgcatgaaaaggtcaaaatgtttaacaatttgttctctcctccaactccggttactttcaaaggcagtggaaaagctgtgattgcgatgccacgtgtggctctattattctacatctgcaattatattgatatg

SEQ ID NO: 153897 - DNA, 363 bp, Glycine max
  unsure (1)..(363): unsure at all n locations
tgattggaatggaagcccacccaactttgatagttttgccgatattttttctaancaaacgcaacaagacaattatagttggtgtctgaatacctcacccactcaagtgtgtcacacaattatggcatattctctaatgacacactcttgccttttaccactctaattccccttgagtttttacgcaattcaagatattatggccacaacaaagaacaattcaccaatatgtgtaaggttatgctatagagacaatgacaaggttaaccaatacaaaggctctcaatgtttttaggcacaaatgaacgaaataacattcataatttatgaattcaagtaacaatccttcatgcaacacatata

SEQ ID NO: 153898 - DNA, 459 bp, Glycine max
  unsure (1)..(459): unsure at all n locations
agcttagtcgagaaattcgaatggtcataacnncttcnataagatgtccgattcggggacatattatatcgagaagttcgaaattgaacaacggaagctctcgacaaattcgaatggtcataacatttcactccgatgtctgattcgaggacataaaatatcgagacgctcgaaattgaacaacggaagcactcgagaaattcaaatggtcataacttttcacaggatgtcctattcgcagacataactcatctagacgctcgaaattgaacaaaggaagctctcgacaaatttgaatgggcataacttttcacacaaatgtcctattcgaaaacataaaatatcgagacgctcgaaattgaacaatggaagctctcgacaaattcgaatggtcgtatctcttcacacagaagtccgattcggggacataatatatcgagacgctcgaaattgaacaac

SEQ ID NO: 153899 - DNA, 447 bp, Glycine max
ctcagcttcatatatgctgaaccattatatcaataaacacaagttgagttttattcatattatttgagtgtagctcttttatcttagtgagagtgattctcctatattcttgagtgattcacgaacaccctggctgtatcaaaggactttcacaacctttgtgtgttgtcctctctggaaagagtgattcttttcttccaatcatctctacccttgttctttcaaaccacaattccagaaaattcacctctgcccaaaattatctcgtgaccataactcccattttacacactcaaattaagtgattcttgagcctaaattgaatctcaaaacgagacctttcacctcgttttggaatcacctcatttggagccctgtagcttccgctattgccatatctatatttctgtccagccaccacttaacctacgttgtaccatcccattc

SEQ ID NO: 153900 - DNA, 369 bp, Glycine max
accacagagtggtacctgaagatatgtcgcggaggccaggagaccttggggacgtcaggtggggtgctattgcccaaaaccaagcttgaccaatcccgacccaacccgggcatagtcagtcaatgagaacctgtgatgtacctaaacaggcgagctcctggtggtcaacagataaatggaacaaagaccacaaagcaaggaggcttgtgtggtggctggccagctgtgaatcttgcgtgatatatgggttatggcctctggtaatcgatcaccaatggtgggtaattcattacgaggcttaaaaatgaagacaggacgctaagatagtctctggtgatcgattaccaaagagtgtaattgataccaggc

SEQ ID NO: 153901 - DNA, 390 bp, Glycine max
  unsure (1)..(390): unsure at all n locations
ntgactagttcagaataaacatgtttttgcagagacatgaatggttttttattgtagttttcaaatgcttgaaagcattcaaaactgtcatttgagaagaaatccatatctatgaattttgggtctataatggaacgagaagaaaagaggattgtgtaccgtatacgttgttcctctgatgacaacaatgatccatagggaatggaggaaggaattggcgtttcctgtgacccgaaatgccgttgactccgactcaaagtgcccttctgcttcttcgaaggttcagccattttaagagatattttgagatttcaattggttcatatgaaagagagtggataaagaagagtttgtgctttgtgggggagtggattggacaagacatgattg

SEQ ID NO: 153902 - DNA, 458 bp, Glycine max
  unsure (1)..(458): unsure at all n locations
agtcgacctgccgcatgcaagctnggaaagggctttgaaagaatgcttgtgtttattctacagaggcttanagaatactagggtgaagcctaaagaggcttttcaaaagaatatttaaggaagcttgaagaggctttgtgaaagaatacttagagtaaggcctaaaaaggcttttcgaaagtaatacccgagtggagtctatagacgtttagagaaaactagttgtaggagcttgtggaggcatcaagaaggaaagaataccacagttcagtgtttggttttagtggagaaagcatacaggtgtaggtattggacatatcctagatcgaggggggggggtttgatttttttccctacaacttcttgtttatttttgttgttgtgagccttaaaattgttttagaatatgtntatattngatattggtcaagaagtttttataaaactggtttatatat

SEQ ID NO: 153903 - DNA, 446 bp, Glycine max
  unsure (1)..(446): unsure at all n locations
gggtgctggttaannaaaatactattatgtaatccaaacatttatgggatgtccatagcatctcaaccaagtaagtctcatgtcggaaacaatcgatagagataatttctgaatcgaatggaaacaggatagaaacgtatcacaacccttcatgatcttctcatgtgcagtcttctcgtccaatcacgaaatgaggaccaagtcatccccgaaatacctcagttgtacattgcccccctcataaaaaaagaatcatctcctggatcctatcaaacattggtatgccccttaaccatccgacgagacagtcctgaacccacatcgattntccatcatcaatattcatgtctatccccatccaatcacccacttgccatctttgcatttgtctagcaacttgtacatacgattntttgttgaaccgttcagcctgtctactttgttca

SEQ ID NO: 153904 - DNA, 460 bp, Glycine max
  unsure (1)..(460): unsure at all n locations
agcttgagaaaatncanacgacaataactttttactctgatttctgattgagtcccgaaatatatcgagacgctcgaatatgaataccgaagcgctaagcaaattcaaacgacaaaaactctttactcggatgtctgattgagtcccgtaatatatcgaaaagctcgaatgtgaatgtagaagctctgagcaaattcaaacaacattaagcttttactcggatgtctgattgagtcccgtaatatatcgagatgctcgaaatggaataccgaagctcggagcaaattcaaacaataataactttttactcggatggccgattgagtcccgtaatatatcggaacgctcgaatatgaatgtcgaagctctgagcaaaatcaaacgacaataactctntactcggatgtctgatcgagtcccngaatatatncgaaagctcgaaatggaatgttgaagctct

SEQ ID NO: 153905 - DNA, 476 bp, Glycine max
  unsure (1)..(476): unsure at all n locations
ctaagcttctcattcaatntcgagcctttcgatatattacgggactcaatcttacatccgagtaaaaagtgattgtcgtttgaatntggtcagagcttcaacattcaatatcgagcgttccgatatattacgggactcaatcagacatccgaataaaaagttattgtcgtttgaatttactcagagcttcggtattcaatttcgagcgtctcgatatattacgggactcaatctgacatccgagtaaaaagttattgtcgtttgaatttgctcagagcttctactttcaatttcgagcgttccgatatattacgggactcaatcagacatccgagtaanaagttattgtcgtttgaatttgctcagagcttcaacattcaatttcgagcttttcgatatattacgggactcaatcagacatccgagtaaaaagttattgtcgtttgaaattgctcagagcttcagtaatccatttc

SEQ ID NO: 153906 - DNA, 464 bp, Glycine max
  unsure (1)..(464): unsure at all n locations
agcttgccccccaagccacacccaacagaatacacttttcctgtaattntcaaggaaggacaacataatgaacattcaaatattatcacactaagaatgaagctagatataagaatcaacaatgtttgaccattatcatgaatgttgaggttgaggatccagacttctggtccacatacatgtaacaaatgaaaattaaaaaaaagggaagatttctttattagttaaagaatacatcataatgaaaagaaattgtcttttcccttcagtacctttgtatgcttaaagaatgagcatgcaaaacttccttaatttgtataatataactaccaattagagttgctctttataaaaaaaatagcaataggaagaaaaggagaatatagctggagctcacattccactgngttgacaagccagacaaagcagatagcaataatgtaatggaaaccaagagcttattt

SEQ ID NO: 153907 - DNA, 476 bp, Glycine max
  unsure (1)..(476): unsure at all n locations
gctttctntacaatcaatctgtctatngactaacaattctaattgcaagttctcattcttgttctttctttgtctaacatacacacttgctcaaactcatgaaaagaaacacaaactccatcacaatcatgctttcaattcaaaaccaaatcatacaccaattctcacaaatagatagaagtgttttactgccgtatcaacaaaatcaagtcaaactgttccatatgcttcagaatgagcaaaccaactacccataaataaaactagtagtgtatataaacataaaagaaatactgtactgaaaccataatcataataataataatccataaagcaaaaagcatcatcaggaatttataattcctgtgattggtcctaggtatcttgtgtctgaacatcctccttatctgtcagataaagtacttgagtagctaaaggagaagtgttcatagccaagactggtgtggtcgggtcct

SEQ ID NO: 153908 - DNA, 340 bp, Glycine max
aaagaaaatctaaatgcaaaggttcagcacaagaacattatgactgaataatgatataacctaaaatcaacacatacacatgattcaagagtagatctataaaatttgaatcatagaaatgcaagaacaagtgcatatctaagatttcatcgcgtgatttcttaaaatatactataaaaaacacccaaccacactataatggaggatattcctgaagaatatcattaagaataatgaattaaagtgaattctcccgacaaacagatagaggaagcaaaagaatttcacttaaacgaagacgctcttgtatccacatgatgtagctccatggggagcttgc

SEQ ID NO: 153909 - DNA, 425 bp, Glycine max
agcttcaacattcaattttgagcgttccgatatattattgtattcaaaagaacatccgagtaaaaagttattgttgtttgaatttgctcaaagattcagtcttcaattttgagcgtttcgatatattacgggactcaatcgaacatacgagtaaaaacttattgtcgtttgaatttgctcagagcttcagtattcaatttcgagcgtctggatattttacggctctcaatcagacatccgagtaaaaagtgattgttgtttgaagttgctcaaagcttcaacattcaatatcgagcgtttcgatatattacaggactgaatcagacattcgagtaaaaagttactgtagtatgaagttgctcagagctaaggcattcaagtccgagcgtctcgatatactacgagactcaattagacatccgagt

SEQ ID NO: 153910 - DNA, 476 bp, Glycine max
  unsure (1)..(476): unsure at all n locations
gacctatgacactaagcttgagccattcaacgacataaccttttactcggaagtcggattgagtcccgttatatatccagacgctcgaaattgaatgttgaagctctgagcaaattcaaacgacaataacctttttactcagatgtcggatagagtcccgtaatatattgagacgctcgaaatggaataccgaagctctgagcaaattcaaacgacaataactttttactcggatgttcgattgagtcccgtaatatatcgaaacgctcgaaattgaatgttgaagctctgagcaaattcaaacgacaataaatttttactcggatgtccgattgagtctcgtaatatatcgagaagctcgaaatggaaaaccaaagctctgagcaaattcaaacgacaataactttntactcggatgtcttattgagccccataatttatcggaacgctcgaaatgcaataccgaagctctgagc

SEQ ID NO: 153911 - DNA, 455 bp, Glycine max
  unsure (1)..(455): unsure at all n locations
agctagagtcgcactttctactaccaaagttgaatanactggctcaggaagccgcagngctcaaaggctctatataaagcaacaactacaatactttggagtaaaccttgatcacattcctctgaaatgcgacaacacaagtgctatcaacctaacaaaaaaccttggcatgcattctaggactaagctcacagaaggaagacatcttgttgttaaagatcatgtgttaaaaggtgactgctgcatcgagttcattgataatgagcatcaactagtagatattcttactataccgcttactagagatatgttcttcttcattacaaatgaactacgcatattggatgcatctagcaaaagatacttctttgttgcatagtgtgagactcatattgctactcatatcatttgtaattgctcagttgagccttaatttgtgattcatgtcatactca

SEQ ID NO: 153912 - DNA, 237 bp, Glycine max
gcttaagtgcttagtcttatctctatatgctagtgctgagacaggtgttttcctatgatgttgggatgaatgacccttttagaaagtcaacctctcgctgatcgaggccgtacccgaatcaaataaacatgaaaatgcagtaactaggaagtgatcctaggtcgtttcccaacgagcagtgacaagccaaatgttcataatatacttgcagtaacagtaacgatggggggagggggg

SEQ ID NO: 153913 - DNA, 371 bp, Glycine max
  unsure (1)..(371): unsure at all n locations
aacaagttttncacatccacaatgcgcgcataaacccaccatcccctgttgcccacctgcaactgagctcacgtactcccacgtagcctatatcctcgtttctctcaacaccgggtccccatcaatcctcccaagcttccacaacatccaagcgaaacaacattcacacagcacaagctatcacagccaatcaaaacaaagcacaggcagaaaactctgcctaaacaccaaccaaaaatcacagcttttcccactcaaagaccccaggaacaattccttcgatccaattagttaaccgtgggatcgactacaaaatatntcctggaagtctatagtgcataagcctacatttggacgcgtgggatctacta

SEQ ID NO: 153914 - DNA, 164 bp, Glycine max
caaactttcacacggagtcgaacggcgcataaaagtcgagaggctcgaacatcacaacagaagctctcgacaaattcatctggtataacgcattcacacgggaagtactcgactaggcaagatcacaatatagagcacgcactacgattgaacaatcggaagca

SEQ ID NO: 153915 - DNA, 435 bp, Glycine max
  unsure (1)..(435): unsure at all n locations
agctttaaccttgacttggtagaacctcttgtctttngtattgttcccatgcttgctaaagtgagacaaaagctggtgcaaatcaaaactccgatatctcatgggtggaatggatgaatgcatgaaggaatgcatataacacagatgtaatctaggaatgcgggggtccggggaattcgtccccttcttagacacaatgtctaggggtagcaaagtgccccaacgtacgtttttaagaaggcgacacggaccctccgttggtttgtatacagaagggatcaagacagaacccatatgcgatgcctatgcaaaagacacaatgcgggaatgtacacagtatgataatattcactgaacataagcaaaagggtatatgatacttatgcatggcagtgtaaaaatggcacgcagcgtgtttgctccgtgcccctattt

SEQ ID NO: 153916 - DNA, 398 bp, Glycine max
  unsure (1)..(398): unsure at all n locations
ngccttgccnncttgatatattgagggactcatggtcactatgattgacaaattccttgngataaaggtagtgttgccatgttttcaaagcccgtactaaggcatacaactccttatcataagttgaatagttaagggtaggaccacttaacttttcactaaaataagcaattggatggccttcttgcatcaacacagccccaatcccaacattagaagcatcacactcaatttcaaaagatttttgaaagtttggcaacgcaagtatgggggcattaattaacttttgcttaagaacattgaaagcttctttcttgtttctctccccatttgaaaccaacattnttcttgagcacttcattgagaggtgctgccaatgtgctaaaatccgctataaa

SEQ ID NO: 153917 - DNA, 374 bp, Glycine max
ttttcataaatacctagctgagtgccatactactaagtgcattatcttggcatcaatgagttcagaactccagaggcaacatcaagacatagacccatatgagatcgtcgaacatcttaataagatgtatggtggtcaaagcaggacgactagatttcaattatctaaggccctgtttagatcctcactagttgcaaatgaaaaggttggaccccatgttcttaagatgattgatctcatagaacaacttgagaagttgggatgcactcttgggagagatctttctcaagatttgattatgcaatcactgtttgagtcattttcacaatgtattgtgaatctcaacatgaataagatgagttgtgacttgcatg

SEQ ID NO: 153918 - DNA, 432 bp, Glycine max
  unsure (1)..(432): unsure at all n locations
actaagctatgaaaccaacctcgtgacaacaaggtgtgnttatatttanncnaagaacnaacgacagtacattattaagttcaagctcatggtcttgcagtaattaacgctcatatatatcatcatatgtcatattactgccatgcgttatggaattttacacaacgacgactgctgtgcaaatataggtaattaaatatgtttttagtcttctaaatttaagtaattatctttttatttctataaaaataaatntatatttattagtcttttaaatattcaaacaaatattttaatttcctctttgcttattgtgtatatggtgatctcacaaagataaatatgataatattaaccaaacaaaataatttttatattcattgtttaaaaatgctcttcctaaaataacaacacctaaaataatattatcca

SEQ ID NO: 153919 - DNA, 419 bp, Glycine max
  unsure (1)..(419): unsure at all n locations
agctttccagccagaactagcatcaaatttttcttgttccttggatctataattntactcaaatcttgtctttcaagctcaggtcttatccactcaagtatgtgcattattccgttgccttttaatattgcagggcgacctgtgagtaattccagtagaacaattccaaaactgtagatgtcacttttctcattcagtgtccctaacttgtagtacctgaataaatgaacaatgtagttagtgtaccgtagcaagtccatgataaaataaaactatatatacttgcacattaagtagtaataatatatatgagagctacacatgaaccgattaaactgaaatgtgagctgaataaatgtagttattagactggattttttttcttaagcannataatttcaatttttttcgtcttaacc

SEQ ID NO: 153920 - DNA, 385 bp, Glycine max
  unsure (1)..(385): unsure at all n locations
ctcagctgtccctaccgtcccgcatagtggttgttacctcggcaaacttatttgttatataacgactccggcgttatggcggaaatggggaccacttggaggattcttctctccacttgtttcagcaagtcttttcacaaagagtctcaatcctttatagatgggctcctgtaagtcttttcaaattacacatgtatagtgctcatcatttgtaattnttttgtctactggcataaatttatctgcatgaatgggccaaagctaatatggttaaatatgatctatttgagaaatcctagctatgtctatgctcggtacctctggtgaatgaagtgatgagaattattatttgaaaaaacgctaaatttggttttttttctccctt

SEQ ID NO: 153921 - DNA, 453 bp, Glycine max
  unsure (1)..(453): unsure at all n locations
gtgcaagctgacagctcanaagaagactcattatatgtttggttgtatactgaaatgaagttaatatgtttattgaattaagagaaaactttagtcatgaaaatgaatcaataactcaaggacaagaagaacattgctcttaaaagaacaattatgagaaattatgaagaagcaacatgtgcaaaaataaacaagattgaatagtcatctttaaattcaaagaaacattacaagaaggaataatatgaggatttgtacaatgaatatgacacgaagaacaacatagttgcaacacacttagaatggaatatcatcaacaagatgagttcattctgaaaattgtatctagagttccataaatgcatttgagttgttcttgatggatggaaagcttgaagaaagatattgatctttcatgaataactagtgatcttatacaacttggatcataga

SEQ ID NO: 153922 - DNA, 400 bp, Glycine max
  unsure (1)..(400): unsure at all n locations
ctttaactgaattgcaatgttccaattganttttaaatggtgtaatcgattacaatatattggtaatcgattaccagtgtatctgaatgttgaaattcaaattcaattgtgaagagtcacatcttttcataaaatgctttgtgtaatcaattacatggttatggtaatcgattaccagtgacaagttttgaataaaaatcaagagatgtaactcttccaatggttttcaggtttttctcaaggttataactcttccaatggtttttcttgaccagacatgaagagtctataaaagcaagaccttgacttgcattttatgtacttaatataacttttaagatatacttntacaacatttgaatctctttgaacgatcttttgaacttcttcttcttcttct

SEQ ID NO: 153923 - DNA, 461 bp, Glycine max
  unsure (1)..(461): unsure at all n locations
catgcaagcnngaagagctggaacaactctccttttgtctatgactacttggcactcttaacttcagacacactcgtgtctctgaagatagaaaatccaattgattggtgcaattgttaagcattgcacacagattttgattaacaagcaatacctcttggtgtggcaagaagcatgatattgacaatgtgcagatgggttactgtatattatatatggaggtacaatcagagctaaaaccaaattttaggtgtggtgaggggctttgaggattttttttttgagaggggctttgaggattaatcttgttcatacgaaataaaacaaaattgtacaacacatttatgaatgcgttctttttgaaaatntcctttccagggacaaattcagcctgctaactacagttttctagcctttnggataatctacatttgtttccttcanaattttgtcctcaatta

SEQ ID NO: 153924 - DNA, 422 bp, Glycine max
  unsure (1)..(422): unsure at all n locations
agcttngatgatatggtcttcactgaagaaaggatcaatgggtgtctntaaagacgcaaatctgatcatcatgcttatataaatgcaaaaaaacaaaaaaaactagggcaaatgaatagggtgagaatgagggaaaaacccatgctgagactaccatttctatatggccaagtttcccaccaacccaacaatgtcattactcaaccaataacaacccatctccttacccaccacccagttatccataaaggccatccctaaatcaaaccacaaaacccacctaccaatgctaaacaccacctttagcacaaaccaaaacacccgccaagatatgagttttgcagcgaaaaaaaacctgtatgattcacccaaattccggtgtcctatgctgacttgctcccatatccactcgataatgcaat

SEQ ID NO: 153925 - DNA, 466 bp, Glycine max
  unsure (1)..(466): unsure at all n locations
ctggaggtgttgatcagtggctcaaatataagaagggggttgaattatttatttctaaacctttaccaattaaaaagttactcttctacggcttttactaaattgttaagagaatgaggagtagaagagaaacttaacagaaagtaaaagcggaaattaaatgcacagcggaaagtaaaagagtagggaagaaggaaacaaacacacaagagtttttatactggttcggcaacaacccgtgcctacatccagtcctcaagcgacctgcggtccttgagatttctttcaaccttataaaaatccatttacaagcaaagatccacaagggatgtaccctcccttgttctctttgaacctagtggatgtaccctccactagaattgatccacaagagatgtaccctgtcttgttctcagtcaaacccaagtagatgtaccctctacttgtaccacanaggatgtaccct

SEQ ID NO: 153926 - DNA, 360 bp, Glycine max
ctcgggtgtggactctcatccacttatgatagccgccgatgatctcattacggcttcccctaagctctatgtcctttcttcacgccgcatcccatgccttgcgaactccttggagtaccctcacgttgtggtcactgaaaccccgtgcgatgaagggcgtgatgctttcgtctgatggcactcctctcatggggtagccaagctgtcttatggcgaggacgggattataattaatacaaccccttgttccatcaagggaacatatggacatccttcgtatgaagatagaatcctgaatctttcttccttcttggagaaaaaggtgtgaaaccagccacacatatagagccagtgcacaac

SEQ ID NO: 153927 - DNA, 432 bp, Glycine max
  unsure (1)..(432): unsure at all n locations
tcggaagaaagtgatgaggtacaagccctaaaggcagagcttgatttattccgagtattcgaagagaagttcaagtccatagccatcaaaagtctgaaaagagtatgatgaactaagggacgtcaatatggccaccgctgaagccttggaacgagaaaccaagaaggcccgaaaggaagaacacgaccaaagcaaagttttgaggggctttatagggcagcaatagtgagctcacgctccaaagaggtgaaaggaatcatcacgggtcaaaggcatgatctggaaggacgagctaaaggtttgccttangtcgaaaagaaatttgtcccaacagttaagcgagactgaagggaatatgtgggccatcatcgataagtgcaaagagaagctaaatctagcggcgactcacgagcaaaggctagaggatgagta

SEQ ID NO: 153928 - DNA, 384 bp, Glycine max
tcggacaccgaggaggagtattgtcgttgatgttactcacagcctcagagtccaatctcgagcgtctcgatatattacgggactcaaccggacatcccgacttaaaatgaatacgccgatggaggtggctgacagctactatggtcaattacgagcgtcttgatataatacgggacacaatcggacatccgagccaaaagttatagtcggaagaacttgctcagagcttttgtttacaattacgagcgtctagatatactacgggacacaatcgtgcatctgagtcaaaagccatagtcgttggagatgtgctaaatcttctgttttcaattcgagcgtctcgatatactacgggaacaatcggacactcagcaaagttattgt

SEQ ID NO: 153929 - DNA, 461 bp, Glycine max
  unsure (1)..(461): unsure at all n locations
tgagcatattcagacgaacaataacttttactcggatgtccgattgttcccgttatatatcgagacgactcgaattgaaaatagaagctctgagcaaattcaaacgaacaataactttaactcgggtgtccgattgtgtcccgtaatatatctagacgctcgaaattgaaaatagaagcactgagcaaattaaaacgacaataacttttttctcggatgtcccattgagtcccgtaatatatcgagacgctcgtaattgaaaacagaagctctcagcatattcaaacgacaataacattttactcggatgtccgatagagtcgcgtaatatatcgagacgctcgtaattgaaaacagaagctctgagcaaattcaaacgacaataacgttttactcggatgtccgatngagtctcgtaatatatcgagacgctcgaaattgaaacagaagctctgagaaaa

SEQ ID NO: 153930 - DNA, 464 bp, Glycine max
  unsure (1)..(464): unsure at all n locations
tgcaagcttcaaggatatcaaatttcgcctgacaaataagaattgangtttnagngnnatancgntaggaatttatataatttggcttataaagaaaatcaaagatgaaaactaaaatacctgaatatcctcccatatcaaatccttttgagcagcagggacttccttacaagtctcgtatgtcacgtcgaccttatcacgagtgacaatcccaaaatatgttcttaatttcttcttgtggggaccgtcgaccttcccgatcgtaggatcgacgtggaccactaatctctctgccccatgtggtctagtggccaaggattataaccgtgtggctttacgtgtccgctttaaggtagaacgagacgctgatgctactgcacgataaggaggatgaggaagaggccacgcaaatggagtagccatgggcctgtaaagaaaaaacttgagttattaacattataaaa

SEQ ID NO: 153931 - DNA, 460 bp, Glycine max
  unsure (1)..(460): unsure at all n locations
ttgtcccacagataagcgagactgaacggaatatgtgnttcttttcgatgagcgcaaagagaagctaaatctagcggcgactcacgagcaaaggctagaggatgagtacgccaagatatcaatagaaaggaaagcaagggaaagggtaattgattcgttgcaccaataggcaacaatgatgatggaccgatttgctcttactttgaacaggagtcaagaactttcccgattgctagccaaggccaaagcaatggcggacacctactctgccctcaaggagatccacggacttctcagctattgtcagcatatgatagacttaatggaccatatgattagaaacctctatgaagtttgtattgtcgctcagatcttgactagttataactttntgaataaaatgagtttgttccacgttattactccaaaaatcaatgcgaatcaagcactcccgcattta

SEQ ID NO: 153932 - DNA, 455 bp, Glycine max
  unsure (1)..(455): unsure at all n locations
ctaagctgtacacnanatgttacagcataccgatttcttagtgttatatctggagaaactcactgctctctgcacacaaaagaaaccttgaattgtttgcctcatcggcataaacattagcatataggaaaatgaaagacaaaaatatttcgttataataatgataaatgacaaatatgtagacgcagtttcttgggtgtttttggtgttattctccaataaaaaattggtgttttaacttgataacccgcataataagtgtttactttaaaggtcagcataggttccagaggtattagagaacagcaccaaaagcacataaagaattacatctaagttttgtccttagattaattgctagcagtgtacattggcttaattttcattnttttttccacttgcaacaaaccaagactactccaataaaactctacaatcatctgattaagacagca

SEQ ID NO: 153933 - DNA, 458 bp, Glycine max
  unsure (1)..(458): unsure at all n locations
agctntgaggaatgtaagaaaaagatctcctctctcttcttcttcctttctctagaggattgtttgggcctcgaataccaaacgctatcagttcatttggagagaagggttcacttggtgaagtggaacacaattactatgaaaagaaagaatggtggtcttggtgttcgagtggctcggttccaaaatgtggctttgttgactaagctgatttgggatattttacatcacccaaacaagctttgggttcaagttagcggctccaaatacccttgggatgactttgatgatattttcgattataagagatcctatcttgttacctctttaagccatgcgtacaacttgataaatggaggatttcagctgcaagttgggaagggtgaatgcagttnttggcacgacccctggaaggggtgtgactctttggccaatgatngtggatttgttgatatata

SEQ ID NO: 153934 - DNA, 464 bp, Glycine max
  unsure (1)..(464): unsure at all n locations
ngagatgaggaagtatataagggtgaaactttcttcttttattctttgaccacagagnnggacttggagatatgtcgcggaggtcaagagaccttggggacgtcaagtggggtgctattgcccaaaaccaagcttgaccaatcccgacccaacccgggcatagtcggtcagtgagaacctgtgatgtacctaagcgggcgagctcctggcagtcaacagataaaaggaacaaagaccacaaagcaagggggcttgtggtgaggattttccttctatacctagttatggttaaaagagaaagaaatgaaaaagaaaaggaagaaaaaaaaaattaccatggttttcgttatttaaatcattaccattaaaccagtcattattttggggacgccacanatttgatatgagagatctaggggctgcaaagaaaatcttatgaatggagatctatagggacagaactt

SEQ ID NO: 153935 - DNA, 441 bp, Glycine max
  unsure (1)..(441): unsure at all n locations
agcttggtgcatcaagtttccataatccaatttttttcatcccaacaaaatcaaagtatcaaacaaccctacaccatgaaattaattagcttcaagttcccccatagactctntcataagcttttaatttaacccaaaaagacctaccttccttgaagacacaaaggaaggtggtaaccccaaagcttggtcatagcaaaccgctttgcatgccacacatgagttctcagcctcttggttccatccccagaagtgcaaaaaccattctctgggtttttctttagttcatatctccgacgaacacaccgaggaagcttctttaggtgattctcctccaaacctgattcggcaagggctttatcaattattcccagtttctgcctctttcttctgcacccttttcttggcaattggttatcaaacgcagttgtccttcttctc

SEQ ID NO: 153936 - DNA, 378 bp, Glycine max
  unsure (1)..(378): unsure at all n locations
cgctccataacacaatgtttgcttacaggtaatgttttgatgtttatacgttctgaaagnaagaaccacaacataagatcacccactgaggtaaaagcgtcaagctaatgatgttaaagaatcacttccttggaggcaacacagntttaatttttgttatctttgtttttcatgcatttaatcatttggaacttgttgtctgatctgtacataggagtatatcaacctatctttgaatgtttaacataagggtttcaatttcttggataaaggactgaaaaataatatataaaacatttttctgaaaaatagtctttttgctaagcggaatcctcgcactaagcgcatctttgttcatgcactaagtcgtaagtctta

SEQ ID NO: 153937 - DNA, 446 bp, Glycine max
  unsure (1)..(446): unsure at all n locations
caagcttttgaaaagacacgtctctncaatcaatttgttatgcatgangggcctatatatatgtgtgtttgacttcaaaaaaagagagaaatgttctaagagaacttaattgtaaaatgctctccaaacaactcttggcctaacacttgcaaatctattgagaatntatctaggatcttcaatttgtatcatctactctaaaggagaaaaatctttctgttcatcttttgaactcaattgtaatcaagagacggtgtgtctcttggagtgtgagaatcttgaacacaagggtgagggatcccaaggtgtgttcaaagtctgtaaaggatttacagagatagtggaaaatctcaagtgggttacttgaggactggtcgtatgcacggaaagtggccgaaccattataaattgagttncnattctctctgtcttatcttatttatcta

SEQ ID NO: 153938 - DNA, 434 bp, Glycine max
ggtatatggtcttattcaaacaggaccactgttatattcttctcttgcgttggcataacggtcaattactgtcaaggctattggagcatctataactcgttcaactatattttcagcgacattttggttgataagctgcaccaaatctctctttttcctctgtattctttcagcacgaaagtatcttatggttttcaattgcttggcaactatagcttgtatctctcctttggtatcttctttcgtatctcatccagagaagcccccttctcaagctctgctaacaattcttttcttgcttcctcagattccatctaattcaattaagcagtgagtgccaaaaagtattgttagagaaaatgaaatatagttttgacacatctaagtaattatatttaatactcaattgacaaaagaagaccacagaaatgatg

SEQ ID NO: 153939 - DNA, 444 bp, Glycine max
  unsure (1)..(444): unsure at all n locations
agcttaagtttctttctctctcactattgtgtatggtcttgnncagcgtatgttcaactgaaccttaacaccctttatatagagaaagtttacataacaagacaaaaccccttcagtcaagaacagtaacattaccgttcctttactctgtcacagggttgtcctttacagatacttttattacagataagcttggtgtctaatcttatgcaatagtaaagattcctgcctttntttctttttttttttaacttttctttgggcaggatacatttgtcatcaactcttgcttgcttttgtaattgtaacatcttcttcatcttggatatttccagaacagaaaatgtcagatgaatcttccatcgaaagatcagtagaagggaaaggaggagtttgttgtccatggcacccactggcttcataaatctccttgacttttttctc

SEQ ID NO: 153940 - DNA, 442 bp, Glycine max
agcttatcaacatcaaacttggagaattagttcttgtggtcaagacatgagaagcaatcaagtataatgttacttccttcactaaagcggtgatccatctccacacatattttatcaatagcaacataaaaaatctctgcacggtaatgatgaagattagtaatagtcctcccttctgctcttgaacgaccccgaactggtatttcgtcatccatatttggtaccagaatacttttagcaacacaaaatccttggacatcggcaaaaaaattattccagccactctctctcattgtgcccaaccgagctttgacaacatcaactaattccatggcattcacaatattaagatcttttctttgcaatatatttgaaagctcgtttgtttcctatgacctggatcacgcacaatctcatttgggttaaactcattaaccacatt

SEQ ID NO: 153941 - DNA, 464 bp, Glycine max
  unsure (1)..(464): unsure at all n locations
acactataaatctcagcttacacttaggngctaatatggataaaagaagagattggatgactaaaagaaaataaaggaggaatggctagagaaggagagtttctcctattagaaatgctcacgcttcatatattttcaatagagagctttgagactcggtgtgtcttttccttctgcttcctattctttttaaagccctaaggtagtttacttttcacgctgactntgcactgagcatgcactcttgggcttagcgagaatagcggtttaatcactcgctcagcgtgaccttgggctttctcgtgggtcttctttgcgctaaccctgagcttgcccgctaagcgagggtatgcgctgagtctggcttgtgcgctaagcgagctgtctctttctcaagtttttcttcaagtttttgcatcaattttccttcaaacacttgaaatttcttctttgacttctgtgat

SEQ ID NO: 153942 - DNA, 459 bp, Glycine max
  unsure (1)..(459): unsure at all n locations
tgcaagcttcccgccagtgtcaatggcggctccctttatattacaaacccncccccncccccccgtaattttttataaatgaaaccccattgagtaaattgtttctaaaaccaaccctccttcgtaaatttgccacatttaaatatgtaaaaacgttatttaatatacaatatattatatgcaataaacataatctttaatataattggacagtcagtttaaatttaatttatttttaaatatgtattctctgtaataaaaattaactcaacatatatatatatatatatatatatatatatatatatatatatatatatatatatatatattaaaattatacatattatatcaatatctaactctaacattaaattactagcgaaaatcgcacgctatctaaattaaaaaataatctagtcgcaacaagtaaacaacattaattgaccgactcccaat

SEQ ID NO: 153943 - DNA, 427 bp, Glycine max
  unsure (1)..(427): unsure at all n locations
tcnacaactatanataacaccaaataccctcaatacaaccacacacttgcgcataacataccttcacaaaccatattcaatctcaatactgtgacattcttgggagaaataaacactcagataatttctaactcgagattagcattcaatttcccaaatggatcaatcattgacaaccaaatttgtatttatttttaatgtcctactccaataccgatgcgagttcctgaaaagtgttctttatagacactgaagagtagaattcacaacatccttcgactaaccaatgactaatttgtggacgaaatctactaccgacaaccatccatagatgcaggtcaatatttttttttcattctctccaattgntaaatgatgatgatgtttgcataatgttaatgtgcaataaacaatactcatgtgttga

SEQ ID NO: 153944 - DNA, 443 bp, Glycine max
  unsure (1)..(443): unsure at all n locations
agctntaacatccagcatcaacaatagtagagttatttatatgtttgatggtctattgaaaggggttttgttctattgtccaaatctccctaatcggtatacaagtagtagagagaaatggaagtttgaaggtctatttaaatggttgtaagttgtaacatttatttagggagaacattaggtttatgaattatggtcttcttcgtcatgcaatgaaacccaatcttgatacacaatagacccaaggaatgaagcctagatttctgctattttatgatttctttaattntctctacaacactaacattttctatggtagacagcagtaaaaatccaactcatcaaacaatagttccttgtcttaagcttccctacaacccataaaattagaaaactaaccacagataatgttcactggctccttattgacactcattttatct

SEQ ID NO: 153945 - DNA, 479 bp, Glycine max
  unsure (1)..(479): unsure at all n locations
cactcaagcttctaaactntgtacaagaatgaagctctgataccacttgttagacaagtggcctcttatatcttatgaaggcgggggttgaattaagatattcgatacttcttcttctaattaaaaatctatcttactttttacttaagttatgaattcccttaatgacaatcttcttaaatattaattcaaatgaagcaacttgaatatgaatataaagcaataataaataaaggagattaagggaagagaaaatgcaaactcagttttatactggttcggccacacccttgtgcctacgtccagtccccaagcaacccgcttgagagttccactaacttgtaaattccttttacaagttctaaacacacaaggacaacccttcctttgtgtntagagattctttacaacaagagactcacagtctcttaatcccttatagaatgagaagaagaagaggaacagatctctcttgaaga

SEQ ID NO: 153946 - DNA, 433 bp, Glycine max
  unsure (1)..(433): unsure at all n locations
tgcaagctgctgtttcaaataacataaacatctgtactacaattccaaacagcaaccgggaatcttaggaatctgggatttcacccatttatttgaccagaatcatatatttctcagagtccagaggctcatcccaagatcccagacctccaacagctatcaacaaaaattctttactgccctttgagcttgaatgctcacnttnttgcctaaggaatatgtatgtctttcgactgggcagagacaaagcttcagtctcattaaaagcaggtctgcaatggcgtctcattgaaagcttgtggggatcctcatagacgtctgaaaccccaccaatccttgatcttggaaaacgtctatcctgccgactttgatgactttgacaagttggaaaatccaaactgacctcagagactcctaatataagatttgatct

SEQ ID NO: 153947 - DNA, 473 bp, Glycine max
  unsure (1)..(473): unsure at all n locations
tcctagattctccttaataaatctatctccaatttcaaccgtgccattggcccgcctaaccaacaagaaaggaaggaaatcagctcaagaanttgttgccatcctttttcgtactgagactgagaatcagaagcacgccaatcaattcattcatataatagtttgtttttctttcctaaaagcaaaatatctcacgagactaatcatctaaacacaaatatcattggagtaaattttgtttttctaacaactttttttccataggccacaaaatcaaataatgtattgattttgttaacagatatgtttcttaatataatagttatttcctctttcctacttctgtattgattttgttaacagatatgtttcttatttaaagattattcaggccacgccggtccactactntgtttaaatatttgttgacgtgcgtacagganaaagaataaaataagttacggattaatata

SEQ ID NO: 153948 - DNA, 428 bp, Glycine max
  unsure (1)..(428): unsure at all n locations
gatagtttacaagaaatatatacaatatttcaaacaagggccaaacaacacttcatatggcacgagtgttcacatgcactttataaaataatcatattggggtcgtgctattttatgacacatacgtatttgcacacataataattttgtgtgaaacattttacaacacctatccatgtacatattttttgacaaaccttctcaatgctacatcctatatatatacacaacattttttgggaggcttcttttgttacctactcacaaatacacatatcttgataaacacttttacgctacccatccaacactttgtaaggcacttcatgctatatatattcatattatgcaaggcattttcatgctatatgtattcatatttngcaaggcattttatgctatatatatattcacatatatacatactg

SEQ ID NO: 153949 - DNA, 431 bp, Glycine max
  unsure (1)..(431): unsure at all n locations
atcctggctcaccataaaccttatcttctgtagcaanaaaaggaaagaaggaaaggaaatttccaatcaaagagaaagcanagaaggaaggaaaggaaattcccaatcaaagagtgggagaaagagaaaaaaagaaacgagtggaaattcccaatcaaagagtgggagaaagaaaaaagaaatgatagaatattcccaaccaaagaatgggagaaagtaaaaaagaaggaaaccatgacctagaagtggtcttctccctttgattaccaaccaaaatcctgtgcgctagcgacttttcgtcccgcactaaacaaaaacagataaggaaaaaagccaaccaaaaatcaaaagccaaaaacacacaaaagccataaataaccatcaaaagaacccattcccaagggaagtcttatngatccatgatcacgcat

SEQ ID NO: 153950 - DNA, 424 bp, Glycine max
  unsure (1)..(424): unsure at all n locations
tactcagcttctcatgtctagagatntctagagagagaaaggtccaagttccagagagtntgagagatnttgctatgcgaagacctgcagagaccgaagcttgaagaggaaaccgtcctgagagcttgagatgagtttgtgagtgattgtgaggtcctaaaggtggaggagacatccccactacttgtattttttcaattcttcatctttctctcctctttgtttaaaggaagcttcccagttatggagagctaaatcctctgttggttcttccttgtaggtactngatgtanatatctgtatatctatttaatgatgttttgtgtgttcactatgctatcagaacttcattctaccatgctcttgacttgatcatgtagatgcatgtgttttataatcattcaacagtggaaaatggtctgat

SEQ ID NO: 153951 - DNA, 443 bp, Glycine max
  unsure (1)..(443): unsure at all n locations
agctngagaagaagtaaattttaatttttatatgtttangaataatttattcagccccccttcttaattattctaaggccacttgatctaacaagtggtatcagagcaggtatcttgtagaaagtctaaccacttcaagattcatggcctcttcaaatcccttgtttcctaaaggaaattccattcacagaccacccattttcaatggtgaaggttaccattattggaaaactcgtatacagatattcattgaagcaatagatctaaatatttgggaagcaatagaaataggaccacacatacccactatagtagatgtaagcacaagcactacaacccaaaaacctagagataagtggacagaagaagatangataagaatccagtatgatctccaagcccaaaacatcatcacttcaaccctaagaatagatgagtacttt

SEQ ID NO: 153952 - DNA, 444 bp, Glycine max
  unsure (1)..(444): unsure at all n locations
tctgaagagagtgatgaggtacaagccctaaaggcattattttgttagtgcctgcgtagncgaagagaagttcaagtccatagccatcaaagtctgaaaaaagtatgatgaactaagggatgtcaatatggccaccgatgaagcctttgaatgagaaaccaataaggcccgaaaggaagaacacgaccaaagcaaagttttgaggggctttatatggcagcaatagtgagctcaagctccgaagaggtgaaaggaatcatcacgggtcaaaggcgtgatcttgaaggacgagctaaagggttgccttatgtcgaaaagaaatttgttccaacagttaagcgagactgaagggaatatgtgggccatcatcgataagtgcaaagagaagctaaatctagcggcgactcacgagcaaaggctataggatgagtacgccaagatatc

SEQ ID NO: 153953 - DNA, 407 bp, Glycine max
agcttggtacaaccaatattctttatcctactttgttatttctacctctaacacaaattagatgatttggttgtttaattgcacaatgactaacactatatcgccttacagatggataaacagtttcaacacttagtctcttcactcaagaaaaatgaagtgttttgagatcttttctaaacttcacaagtatttacataaagatatttttaaagaaagaatttgaataatgagcacttcaattcatacttaatgtctttaaagcttctagtatttataggccaactttgatcaagtatctattgtctctaaatgaacatatttcctctcttaagtttacgtctgaagaatatggccattgagggattaaatgtgtgtattaaatgaatgtacttcttcatgtcgag

SEQ ID NO: 153954 - DNA, 463 bp, Glycine max
  unsure (1)..(463): unsure at all n locations
tgccatccacatacaagcatataatgaaacaatcatcattcatattcttcgtttacacacatctatcaacatcactagaggaaaaaccatcactaagcaaagtctaattaaacttttcatgccattgtttttgtgcttgtttcaaacgatatggagattttaaaagttttcacactntgttttcttgattagtgaatttcagctatggttcaacccactaatccaagatcaaatccaaaattctccactaagtgtgcttaggtttcatgaggcatgtaaagcatgaaggacatgcacaaagtgtggcaatggggtgtcacaagcaaatgctcacctcccccttangctggtccaaaatttaattggattgaacttctcccaattaaattaaatttctctcccaacacacacatcaaatagtgcacttaatgcatgtgaaattacaaaactacccttaatacaa

SEQ ID NO: 153955 - DNA, 434 bp, Glycine max
  unsure (1)..(434): unsure at all n locations
agcttctagccaaatggacttaccttaaattattttctttgatagcccttttgaaccttgtttccctttccttgttttgaagctcactacaagccttaagtgaaaaaccatgatatcaccatatccttaaggaattttggagctttggaattgttttgggaataagtgtggggggtttttgtttcattggacaacttgttttcttggctatgcttcatgatgtattttgggccatacttgatgtacattgtatattggttaaatgtttgacatgctgaatgaaatgttgtttctcaaaggctatagagtcaaaaaaaaaaaattcgaaaaaaagaaaaagaanagcaataaagttgagtgaataagatcttaaatggcacaagaatgatgaaactcttggttctactcttcatgtttaaatttaatcttacttc

SEQ ID NO: 153956 - DNA, 454 bp, Glycine max
  unsure (1)..(454): unsure at all n locations
gacactttaatctcagctagcaggggttgtaaggactcagatgcggtatttatttgtaatgtatgacactgtangagatcattggacggcgaaaccattaaatctaagtttttatgttgaaaggcgttttcttatttctcttttactgtcattaaactctatgtaataaatcgggcataaccaaatttacataggtagtgtatgttatgatggagccgctgatccactatacaatcattccatcaatattgagatcttaaaaataaattacatactttactttctaacgtgtgtttttttctgggattaagaaatatgtccatcacaaaaatacgaagggacgagtagtcctctgcaagttgttagcgatctccctcaacaattgtataaggcctaacgttaagggtgttttttctcttgagtttagacatcgctttgttttacttatctctac

SEQ ID NO: 153957 - DNA, 337 bp, Glycine max
agagtttatcttttttatcttaatgaaagtgattctcctaaattcttgagtgattcaagaacaccctggctgtatcaaaggactttcacaacctttgtgtgttgccctcgctggaaagagagattctttccttcctttcatcttcacccttggtctttcaaaccacaattccagaaaatccacctctgcccagaattatctcgtggccataactcccattttacgcactctaattaagtgattcttgagcctaaattgactttcaaaacgagacctttcacctcgttttggaatcacctcatttggagccctgtggcttcagttattgccatttcta

SEQ ID NO: 153958 - DNA, 421 bp, Glycine max
  unsure (1)..(421): unsure at all n locations
tgaacgaaatgaatatgaatgctaataaaataagaaatgaattgaaagtctcggattcaaaaacttacccgttgaagaacgaagaacggtgaagaacgacggaaaaccttcacggatttgctcacagaaacgtcttggaaacacctcagcttggatattcttcatggaaacaatnttttttcacccaaaacagctgaaatgcatagccaaaggggttagggatattaggaacaacctcccttcgcctatttatatgaaaaagggggaggacgttgccgcccaactcgcccacgcgatctggggttgcttctctataagcaaccctgcttcgaaaatattctggtagggcctatatttcaaaatttgaaaatggctatttgctcccccatcttgtatagttacccccccttctttatattta

SEQ ID NO: 153959 - DNA, 456 bp, Glycine max
  unsure (1)..(456): unsure at all n locations
agcttctagattagtgtaccatatgattccttttctttccnagctatcttgaaagaaatgcatcaataacttcttgtccctggaatacgcacccatcttgtgacagtacatttttaggtgattcttatgacaagtcgtccttttgtacctatcgaagttaggtaccttgaactttggagggatgacaatgtctggcaccaggcataggtcggtcatgtctgcgaacggataatcgccgaacccttcaacagccctcaatctttctttgatgagatcgagtttcccctttccctctgctgctcggggtggctctcccgcggacataaacattggctaggttgggtggtttcgaggttctcccgtgatgttgggttgaggtagtgcattgggcgccagcccctctgcatgaaacggggagtaggagtcgacgtctccctgagcatgttctcgatgatc

SEQ ID NO: 153960 - DNA, 354 bp, Glycine max
agacagaagttgaactacgtgttgtgatagacaagactctcgctgcgtcaaagatacaacgagtgtgacacactcttctatttatagactacgctgctctcttgcgaagatttcttgagaaaactatcttgagaagcatctttgagaagacttccttgagatgctagagcttttctacacacaccacgtgaagcttccttaagaagattccttgagaagctagagcttcacttctcgtacctcattaatagctgagcgcaccgccttgagatgagaagcttgagcttagcttcgcaccccctattattgctatgctcacccacgtgacaacccacatgagactacataaaaaag

SEQ ID NO: 153961 - DNA, 360 bp, Glycine max
  unsure (1)..(360): unsure at all n locations
agcttcttcctctacataccatntagtctgcttttttaagtaaagactttagcaaatntatagcaggaaacaaatagagataatagaagaagaaaagtcataactcgtttgcatccccactaaatagcaaaaattcaaattgcaaatggagatttatgcatcattagatgagactgatntttggacaatatgttccacatacatgattcttggttntcaatagttgaatcgtcattcaatggtttggagagggaggacactngttcatagtacaagctctanttttagggttttttatgttcttgcttctcaatttaataagcttgtgcctggtttgcttnntgatattgcatgcattat

SEQ ID NO: 153962 - DNA, 395 bp, Glycine max
aacttaacaagccagcttgtttaagtaataataatacgtcagaagaattataataactattatatataccatttttatgacattatgaatgagaggatgaagtgacaataaagtgcttagaaaacatcattgcatgtgaaaaaattttaaaaagaaaaaggcttaagttaaaaggatgatgcaaccagattaatatttttaaagaaaaaaatgttttgttaagacattttcagacaatctaaatatttttatctggctatattagtataaatcatctctaatccatatatattttaatattatggtttttttattttcttttgatatactctgtggtttaataaccttgattcaatatgattttggttatcaattattattggaattgacatcac

SEQ ID NO: 153963 - DNA, 445 bp, Glycine max
  unsure (1)..(445): unsure at all n locations
gtcacctgccgcatgcaagcttatccagattctantttagatattcgtgtattacaacctggcaacgtggaagttttaattcagtggcaaaatccccctcccaatgaaaatagttgggaatctgtggctaaattacaagaggtttttccgacttatcaccttgaggacaaggtgagtcttttaggcaggggtattgataagcataagcataagtcacacaacaccaaggtgtacacccgcaaacagcgagcaagagaagcaataaccatagaccactagcagtagggtgcacaacacccaaggggtgcaaaccacccgatagttacaacccacccaaaggatgtaaaccacccaacaattacgattcacccaaagagtgaaagatcaaaagatgtaaatcaaggggacatgaccttngggaacagtcacaaccaaccattatgat

SEQ ID NO: 153964 - DNA, 462 bp, Glycine max
  unsure (1)..(462): unsure at all n locations
gcttgaggacccgagnaagttttcacaatagtttctttcagacttcacactggtttgtttcaaacatggaatttatttttacctaaaaaagtcattggttcacatagatgttccttttctttgcttgcttatgattttgggtgtttatacatcgcgttggttatattttttttttgtttaacaacaaaaacccttttcctgtcaaagtttttcttttttttcttttgtatgatgaaatgcactagctcgttgatttgttgggtttcatttttttgtgtctttttctgttcttattttagttgatgtttcatgaaacatttaaatatttctttttttaaggtttaacaaaatgtcatatggtattataatgttcaatntagtggcataacaaaatgtcacatgatattacaatgctcagtttagtggcatatgatatacttaatactaagttttgagctttgt

SEQ ID NO: 153965 - DNA, 405 bp, Glycine max
  unsure (1)..(405): unsure at all n locations
aatataatgtcgggccacataaattgaactaatataaattgggattcatagtttttgtaaacagagttgtatccatttttcctcttttaaagccattatttacaataaatgaactaagatgttcatacgaagctctaagagcttacttgaaaccatataatgctttatagagtntgaaaacatggtgtggaaaagtgttactctcaaacataggggggtgttctatataaatntcttcttgtattactccattgaggaatgtgctttntacgtccatttgatatagtctcgtttttgtatgagtcgcaaatgagagtaaaatgtgtattgcttctagacgagcaacatgagcaaagggtnttgatagtctatacctttctggtgtgagaacccttgtaaccaatc

SEQ ID NO: 153966 - DNA, 513 bp, Glycine max
  unsure (1)..(513): unsure at all n locations
ctaagcttgttacatatgccaacatgtattatatgtcactatagcctacaccttatttatggaaaatagtttaattcatttaatattatataaaaaatttaaagcaatcattaataattaaaataaatttaagaataaaaaaataataattcngaataaaaaattaaaataaatttctttattataatcataaatatctatttaactacccattaaaatttaaaacaatcataagtaattaaaataaatttcattaataaagtcatgaccttaatatattataaatatctatctaattaaacatataaaaacatcaatatattaatattataaaataatgacaagagaaaaaacttcataagagaaaatgcactctcaatatatttcacaacacacataatgtaaatgtagcattctctacatattctcgttactaattagaagaaaatatatagttacatgaattattccacatgattccaaatagtgtaaaaaataactaacagacataca

SEQ ID NO: 153967 - DNA, 319 bp, Glycine max
cgagctcagctatatcagccaactggggatcttttttttggttagcccagggaggggctacctccctttctatttgcctttcgctgatctcttgatggagaatctgcattggaggaccttattgaagctcaaagatccagcctccgtagaagtttgcccagctagctttcatcatataatgttctagagaaattcctcttgtgttaccggagattgctcggtgtctacggtggtcccctccactaacgttatacttgccagtttgtgaagcatgtcaatctcccctatcttggaccaacgttgtctaagcatcttatga

SEQ ID NO: 153968 - DNA, 323 bp, Glycine max
  unsure (1)..(323): unsure at all n locations
cacctttttgaatggagaagccagcttctgtgtgtgtgtgtgtgcggaatctagaatcaacaatctgtctaagtttaatgcgacatccctacgttgcgttaaatctcattacaggagcatcactacatccaacagatgggatggcacagagacaatgggtgggagtggagctatatatggagaatgccactgttgtgactatgaaatagatacggctggtgtgcctctcaatgaggttcaggatatggccgttcatcaacacggacctgatgtgtgggaatggactgctgaccctacaggtcantatatagcaaacaatgcat

SEQ ID NO: 153969 - DNA, 497 bp, Glycine max
tcggcccttcagtcacctgaggcatgcaagcttgggcgaatctttcccttttggtcgagtgatcttcatggttaagatagaattcattagtcaaggcaaggttgtttggttttgtcttcatcgggtacccaaattgtcgtcgagcgaggagtgggttgtagctaattccgccacgcatacccaaaagaggtacgttgggatattcaccacaactcacaataatctctccaacatcactagctgcttggtaccaagcaatgtcagatgggtcaagagtcatgattcggcgaggccaggaaagcttgtcatcattggtcttgaaggcacgggattgaggtaagtggaaggtaaaccattgatagagtaaaggtgcacaacaagaaatggttccccggccagcctgcgtacggtcatggatagaatggtaggtatcggcgagtacagtgggtacggcgttctttgtaagaaagatcttaatggcattgatatcgatgaag

SEQ ID NO: 153970 - DNA, 493 bp, Glycine max
  unsure (1)..(493): unsure at all n locations
aaactcactgtgaagtgattatgattgaaaaacaaatgtttttaatatttacttcatgcctctgagttcggtaagcctagaaaatggctcaaacttgatgttaccattgagttgagtcattctctctgcttttcttgctatttcttttgctagaaaatattggcatctcctactgaaatagcacttgcttacttctgaaattcttccttccagcagttgtacttcttctaggactttctcagcatctttaagccacttttcaaccattggctcaatattttcattccttgtagtggctactctaacttgcttcttcatgttgtcttgggtcaataccaattcttctttggctattctaagattcctagcaaagttgttgaaacaacacaggtatccagcatggtgtaaaatcggatctactgcatattctaccatctatgctacgatggaaagaacganatcctccatttgaaataacacagtcctaagcatg

SEQ ID NO: 153971 - DNA, 492 bp, Glycine max
  unsure (1)..(492): unsure at all n locations
caagtcaactgagctgcagctcaaaggacaaaatgcaactcgtttcacttctttactcatcaaacccatctggctagaacagatgcgactgacaccacgtggcatgaaggaacccccttcatcacacaaccaatccaaggaccatcaaactctgacactcaaccacatccctttgttgatgggattatggaggaaaaaactctcacctagatggaagatgttgaccatcgattgctacgatggactcttggacctggatgaacacgtggactgattcttcacatagatgaacctgttcacgaatgacgatgcaatcatgtgccaagtgtttcctacaatgttgaacggtacatcgttccattggtatactcgattaccaaaaaactccatagactcattcgtgatgcttatcatgcantttggagctaagtgcgcgacgagaaaaccatactatcaatcttacttcantgattatgaccctgaactctggcg

SEQ ID NO: 153972 - DNA, 452 bp, Glycine max
  unsure (1)..(452): unsure at all n locations
tatcaatattgggtataatacaatgattgtgtcgttttaacattggcttaagcatgataaatacttctcaagatgtctgacatcaatatacaatagtaggtttgcttatagtttactaagaaaaggaatgaagaaaattatcattcattttggaaactctaaatattacagcattggagaaggttggcaacaagggtgctattgacagggaaaataaatttctatattttggttttatctaagatgatgtagtttgcactttgcatactacgtgtagtttgcatgcaaacaaaatggttacttgttatgataaaccaatacaaacttcttacatggtgactngatgcatgcatngtacttgctttacattgcanatggntngaacttatatntcttggattcttccatccnaagtttgtaacangggatcttgcatagtgatataataattc

SEQ ID NO: 153973 - DNA, 442 bp, Glycine max
  unsure (1)..(442): unsure at all n locations
ctgangcatgcaagcttagngctcacctaaatgctgtggagaaatattatcttatgatagtgcgtaagaccgaatggcctctataagtagccactgactgatcacaacgatgagttaagtcttttgcttggggtggataatccatccacctgtaatcccattcgtaactcctatacccaagattgctggaatagagagaaaactctgttataatatgtcattgcattgacaatttcatctagatagaaatatcataatcctggaaaggaacagacatcataagctaggtttaagatatataaatatcacatgctagactgaattctgaaaatcattctaagatcttcaatttcccacagtcatgcanacacaaatagagacagaatcatgagtccaacatgaaacatcattctcgatacaaaattacataaaatttccagta

SEQ ID NO: 153974 - DNA, 441 bp, Glycine max
  unsure (1)..(441): unsure at all n locations
tgcacgaatctaagcatagtataaattatctacaaaatcaattatggtggtgacaagtgagacctgcttcaaggaaattgggaatgtcagcttgccggatagttgaggggacttgacaatttccttcatgatttctctccaactgcggcaaactccggcgcaggcgacgacatgtttccgggcaggccaggaatcctcagaggcctcaattctcatgagcacatccctcaaaagctcagggggcatgttagcccaacaactctgcttcaatccatcaagcaccaccaaactatcctgngcaatagcatcactgtgtgactgtgacctggatctcatgctatatccaaacttcacctcanatcccttcctttcaaggatgatactcctaaacgacatcgtcaaccccccctttcttaaaacctctngcagtccattcccact

SEQ ID NO: 153975 - DNA, 291 bp, Glycine max
ggacctcattggagctaacagaaacagccttcatacaatcttcacaagcaagctaccatcacctcttttcctgtacatgactgtgtcagacgagactatgggatgcgtgttgcgcaacatgatgactctgggaaaaaggaacaagccatttactacctaagcaagaaattaaccgcatgtgagatgaataacacaaagctggaaaggacgcgctgcgccctggtatatgcgtcacatcgacttaagcagtacatgctcagtcataccacaaggaccatcctcaaaatggat

SEQ ID NO: 153976 - DNA, 436 bp, Glycine max
tgcatcacctctcaatgagctagggaagaagaatgtggcatttatctgcggtgaaaaacaagagcaagcctttgctttgcttaaagaaaagcttactaacgcacctgtgctagctattcctaacttttctaaaacttctgagctaaaatgtgatgcctctggagtgggagttggagctgttatgttgcaaggtgggcaccctattgcttattttagtgaaaaacttcatggtgcgacccttaactaccccacctatgataaagagctttatgccttaataagagcactccgaacttgggaacattaccttgtttccaaggaatttgtcattcatagtgatcaacaatcacttaagttcattagagggcaaagcaagttaaacaaaaggcatgcaacatgggtagagtacctagagcaatttccatatgtcatcaaa

SEQ ID NO: 153977 - DNA, 489 bp, Glycine max
  unsure (1)..(489): unsure at all n locations
tgaattctcacacttggtgagggtactacacttcttcctatataacgnnnngccacacttgagggctcgacaaatacatcacctactacttgtcaaggatactaccccgaacctcagataatctccttcgacattggacaacctcttttgcccacaagtgggctcagtggggggcttatgtactatccagggtccacaaactacacgtggcatcctacatggcactctaagacatgtgtcaacccttcacgtcagtccagaaacaggagtaagacactcaacccttagcagctgggctccctaactgacaggttacttctaacctcttattatttgaatatatttgaatctccttatctcttgagaggtatacaattatctacaaacttcacattatctatatggtacaattatctactagctnttatctttaagctatgtattatctctaacattatctataagctactgacacttatctataagtcg

SEQ ID NO: 153978 - DNA, 471 bp, Glycine max
  unsure (1)..(471): unsure at all n locations
agcttgtatagttccccaatttatggttatttttgtttgatnnttgtaaataaatcttcttttatggttaacgttgtctcttaaacatttccattggatttaatgatgaaatctgtgcattttcaggtgaaaaagaggctaagttttgaattgtaaaatgtagcagttgggctaagcgcatatccacatctaagcgcagcttcagcgcgtttagcgcaaaggagaatttggcagagcatcaacatcaaagctgcacgctaagcacgagatcagtgcgctaagcgcagcaggtgccttcagccaggctaagctcgagactggcgctaagcccaatttcacttactcgcgctaagcgcgagggtggcgctaagcgtcgtgatttcagagcctatttaaagcctttcttatgcagaattanggtacaacttttacatcttttacaacaccttttatgacagcttctacagaacg

SEQ ID NO: 153979 - DNA, 475 bp, Glycine max
  unsure (1)..(475): unsure at all n locations
tctctctatgatttcatcactcttcaaacacattacaagaggaagcatggcataaagccctacatgaacaattntcagcaacctagctaggcctcatagtggttgcgaaaaaggaatcccgatgaaaccttgtttgcagcaaacactattattcgccttggtgacaaggtgaacctttagagggtacaatattaatatgtaacccccatagttagttgaataattagagagttagttaggggctgagttgaaaaggagttcagagggagatttaactctttcatcttaacgccatcagtactcataacatttcatacaagctactgaaactaccaaaatctttcatcttaacgccaattataaaataaatcaatntactcatgtaattcanataatacttttacaaacaacatacttatatantaattattctccagtttattcaattacagacacaactaaacatgaagacagt

SEQ ID NO: 153980 - DNA, 474 bp, Glycine max
  unsure (1)..(474): unsure at all n locations
agcttaaacctcatacaagggcatatactgttttatgtgcttattatatgtatgattggaagttctaaacataaatttcagtctaaaaaactgagtgttaggggaagaagaactcctcaaatggagacacgccattagttatatttcggtacttgattctaaatttttgttagtgacattctatattctaatcccctcacatatatcaggtaaatgtgcatatgtgtactttggttaaataatactgacatcaattcacgcaagacaacataatgtaatgacaattaaaagttattaacacaagtgatttgatagttgaatctttttaattaagaattggagtttgatctttgacttgatcatgaaatcacaattaanagtataatttatcttanagtggattaacgaggtgaaacaaagataaatagatntctaaaataagatgtcttaaatacttcatgggaattcttttga

SEQ ID NO: 153981 - DNA, 462 bp, Glycine max
  unsure (1)..(462): unsure at all n locations
ttctctttctctcttctctttnntttnccttatcaaattaagcttacttatattacaacctaagaattaaattaaaggtgttaaaatgcctcaatattttgaacgttagatggtcctaataattttacaccttttaaaatctgagttgatgatttttaaatatttgtttcaaaaggtcaattgttctgggcgaaggatggatctgtcttaaagatcttcagtcttacttggttagtagttttagatgctttgacaccaatagagatgctaagaaacggcttcggatgagttctcagttggcaatagtatggtgtatatggttggaaaaacatgctaaaatttccatggcttgtctaagtttactgtggaatcatgccaaatgtctctttaaggggatttctctgacagatagtcagagaatggcatgctgttctacatgcttcatgctcttnagttatgttc

SEQ ID NO: 153982 - DNA, 469 bp, Glycine max
  unsure (1)..(469): unsure at all n locations
agctttaactaatctctttgggtttattatattgcatattaaaacaatatcccaaggcatatgataacaagacttcattacagaaacgtggatagcaaaaataaggaatcacttgcaacattgtctaatggtaaattcttcacctacatgttcaccacgtataacaactttgtcattcattgattnttttttgcatgtaggaaatatgacagttgcaaacatattaggatttctaagaacattcaaatgattggaagtagaagtatattgaagagcataaatgcacaacaacattctgctccatttcattcaaaaactccctaagtatacanttatttagttaaaaatttaaagattatttcaaagctccctcaactaaaggtaagtttttgacagtcacaggatgtgttcaatggtattgatgtagctctatgtagagcttgtagaccttggatctttttcttcaatg

SEQ ID NO: 153983 - DNA, 489 bp, Glycine max
  unsure (1)..(489): unsure at all n locations
tatgattcagtatcatggtctatctgnactatattatatttgctaggattctgtcctatatggaggaagtggatttctgcttgccttcaatcagccaccatctcaattctagtaaatgggagccctacaaaggaactagtcccatctagaggattgagacaaggagaccctttggctcctatgctatttaatatagtggctgagggccttactggcatgatgagggaggctttgaataaaaacctctatagaagtttcttggttgggaagcaaaacgtccctataaatatattgcaatatgctgatgacacagtntttgttggagaggcttcttgggataatattattgtgctgaagtccatgcttatgggatttgaaattggctcaggtctgaggattaactatgcaaaaaacccatttggcggtgttggttttcacccaattngctcatgatcaacccaacttctaactgtaagcagctgacattcc

SEQ ID NO: 153984 - DNA, 469 bp, Glycine max
  unsure (1)..(469): unsure at all n locations
agcttctatagaagggtcgtttctaatttctctctattgcatcacctctcaatgagctagtgaagaagaatgtggcatttaactggggtgaaaaacaagagcaagcctttgctttgcttaaagaaaagcttactaaggcacctgttctagctcttcctaacttttctaaaacttttgagctagaatgtgatgcctctggagtgggagttggagctgttttgttgcaaggtgggcaccctattgcttattttagtgaaaaacttcatggtgcgacccttaactaccccacctatgataaagagctttatgccttaataagagcactccgaacttgggaacattaccttgtttccaaggaatntgtcattcatagtgatcaacaatcacttaagttcattagagggcaaagcaagttaaacaaaaggcatgcaaaatgggtagagtacctatagcaatttccatatgttat

SEQ ID NO: 153985 - DNA, 449 bp, Glycine max
attccgagcatctcgtcttattatgtgcccttatctgaccttcgggtgaaaagttatgaccatttgaatttctcgagagcttccgttgttcagtttcgagcctctcgacatattatgcgcctgaatcggacatccgtgtgaaaagtcatgaccatttgaatttctcgagagcttccgatgtttaatttcgagcgactcgatatattataagcctgaatcggacctcagtgtgaaaagttatgaccatttgaatttctcaagagcttccattgttcaattttgagcgcctcgatatattataagcctgaatcggacctcagtgtgaaaagttatgaccatttgaatttctcgggagcttccgttgttcattttcgagcgtctgtatatgtgatgcgcctgaatcggacatccgagtgaaaacgtatgaccattctaatctctcgagagct

SEQ ID NO: 153986 - DNA, 273 bp, Glycine max
tctgctggcttagcgagcgttcgcttagcgcaacactcatgggctaagcgcgaggaagactctggaacaacatgagttgtacacgcttgctaagcacaccactgtatctgactaagcgcaccacttcaggtcatccgctaagcgagaaacgcacgctctaagccgaaattcactaatgtgcgctcagcggtccataagtgtgctcagcgcacgagtctgaacacggccacctatttaagtatgaaatcatattctacaaggggagtttggagt

SEQ ID NO: 153987 - DNA, 464 bp, Glycine max
  unsure (1)..(464): unsure at all n locations
tctatttggcatgaattcatatatcaactatttctcatcttgttggatagaacaaccaagaagctntacgagattgcggtgttgaagttttgcaatcaacatgacttcatttttgaattcatccaaaccttgtccagaagttttagaaagccttttgactgcaatctcttgcccatctggcaatatgccctgataatgattntggaaagattgagattatttgatgaagaatgaggacttagattaaatttaattntcttaccttgtacacggatccaaagccgccttgtcccaatttttcactttgcgaaaagtcatttgtggcattagaaatgaatgaanaatcaaatgttggtaaatcaatatccttctcactcttgtccttcgagtaatnntgtactgtgctcacaattattagcagaagttatgcaatananaatataaatagaagatattatctttgt

SEQ ID NO: 153988 - DNA, 294 bp, Glycine max
aaacaccagataaagctcgagagataaatttcatcacatgcgatactagcaacaaacaaggaaaccctggttctatttattgcataacatacatttgcacctgatcttgctcttgctatctttttctggaatttcagcgaggaaaatgcacctttctatattttattgcaaaacatgtataatgttcttaagtccatgcagctcacaattattttcctaatcaatgagagacactccttcacgacagacttgactaagaaaatatagacaattccattttcatacaaaatagta

SEQ ID NO: 153989 - DNA, 384 bp, Glycine max
agatatttatggagaaatatatcttcacacgacgtcaaacaaacaatgtcaaacacatgcaagatttcaatcctatgatactaaagcgcatagattaaagaattgaaaggcacctctacaactgcttcaatacttttcaagaaaggattcacgccaatgacattgccagcagtggcccctctgattctcacaggcgttcctttgcttatgccacaagcttcagtatactcaaacaccactgtgtacttccagaatttggatcagatttgtgaagccctcaaccaggccaagctaagaacatataggacagcaccagacactagaaacagtccaacctcaccttctcagttgctccaatcactgaacccaaatcacttaatggac

SEQ ID NO: 153990 - DNA, 333 bp, Glycine max
  unsure (1)..(333): unsure at all n locations
acctctgagtcacctgcggcatgcagcttctttggaaaacttgcttgagaagctttatcttatctactcgcacccctctcataactaagctcacctccttgagaagcttccttaagaagattcctaaagaagctagagcttagctacacatacctctctaatagctaagctcacctccttgagatgagaagctagagcttaactacacaccccctataatagctaagctccaccccctggcaaaaacctgaaaattccacaaaaaaagttcttactaccaagactactctaaatggcctggaatacaagggtaanaccctatactactagaat

SEQ ID NO: 153991 - DNA, 517 bp, Glycine max
  unsure (1)..(517): unsure at all n locations
tctcaaagaagcttctcanagaagcttctcaagagagctnctttatgattgtttctcacggaagctacctaggctataaatagaagcatgtgtaacactttttgtaactntaatgaatgaaagtcttatgagacacacttcaaagttccacttctctctctcttttattccttcaatttcgtgctcccccttctctttttcttttcctccattaaagcatcctcttcaagcttcttatccaaggcacattcttggtggtgaagctccttcttccatgacttattccctagtggatggtgcctcccctctcctcttctcctttgccttccgctgcatcttcatggtggaaaatcatcattgaaggacctcattgaagcttatagattcagcctccatagaagctccaatgaggtccttcanaaatcctccnctctcctcaaaatacacnccccctataatagctaagctcaccccatgananaatatatgaaaatacaaaaaaagtccatactacaaa

SEQ ID NO: 153992 - DNA, 424 bp, Glycine max
gcaacccctattacgttgaattggttcttcctttatacatgcaacaaagtttgagagccattgcaccgatggaacattaaatcccttttgatagccttttaaccatgtccaggattgtaataaaatctggtgaataacttcctctatgtacagatgtttctcatggaaaattgattgaattgtacacctccacaccaaccaaacagtagcgcaccacacatacctccatgtagaatttttcttcaccgaatcatgtatcaagacatgtcgccaataatgatgtcacacttcatgtggtagagccaatgaaagtgacataccgtgcaagaaaaacttccaaataccatcaatacacttgcaaatcacatgcaagacaattgcggttataactatccaacttcactaaaaacgataaagagcttat

SEQ ID NO: 153993 - DNA, 406 bp, Glycine max
ttataaatgaacaactcgcaaacaacacccactttgtaaaattaaactaaccaaacagattgagaatccttggcaatctagtgggctaaacaaaataactaataaaatttggtacactactttgtatacataacactataaattccaagatctcatcatcatgttgtttgatcaagttctacttaaataataaaaaaacatatatgataaacaaaacaaacactacaacaaactttgactatgctaattaaaaactgaccgtaatacatatgaaattgtcttcggataatttatcatcaatcaaatttctctagattttttgagaattctctaaacatattaagggaatatcgataagaaagtctacataaaggaaccgtccaagtggttaataaacacatactgg

SEQ ID NO: 153994 - DNA, 428 bp, Glycine max
  unsure (1)..(428): unsure at all n locations
ggacccttaagtcacctgcagcatgcaagctttctagctttccataggtgtataaagatcttcctttttgctctagattatgggaatgtactcaaatacgtgggggcaatttggtttgtttcttgcttgattgggttgaattgaggatttgtatgagatgaccctaggcctataatgcattttggagcaatggggcatgccacatcgtccccattctcttgctattaatgcctaaacgtgcgcccaccaagtgttcggtgaaatgcctcaatggcattcgcgcatgattttgtagggatacaacctatgggacaatttggtttgcgcgtgtttgctatctttggaacatgtattcagtttcataagggctagaatgatcgccccacatacactctatgcctangaactgaagcttggttttggatgca

SEQ ID NO: 153995 - DNA, 506 bp, Glycine max
  unsure (1)..(506): unsure at all n locations
gggagtggtgctaaaccaaatgtgagccatttcagaatctttgtgatcatctttgttntangcatatcccagatcagttaagaaggaagctagatgataaaggtgaacaaatgatcttactcggatatcactcaactggaggctataagctgtttgatccgaagagtaagcagataataatcagtagggatgtggtatttgatgaatctagaagctggaactgggagcagaatactgaaatgaagggaccttcaataatgataaggtcagaagaggaagaaacaagtgaagggaatggtaataccactcanagagaagtgagaccccagagaaatgcacccaaaccagctagatttcaaggttntgagatgttgtctgatgctgatgtaagtgcagatgggaatctttgtacatttgctctgttttctgaagcaaaaccaataaactttgaagatgctatgactgatcaaaggtgggtngaagctatgacagaagagcttaaatct

SEQ ID NO: 153996 - DNA, 243 bp, Glycine max
  unsure (1)..(243): unsure at all n locations
agcttccatcaagttaagaagattcctgaaaaagctttatcttatctacacacctctctaatagctaagctcacctccttgagatgagaagctagagcttagctacacaccccctataatagctaagctcacccctatgaaaaaatacatgaaaatacaaaanaaaatccctactacaaagactactcaaaatgccctgaaatacaaggctaaaaccctatactaatagaatggccaaaatac

SEQ ID NO: 153997 - DNA, 455 bp, Glycine max
  unsure (1)..(455): unsure at all n locations
tcttcacaatttntaattagatacacaatcaatatattatttgttattataaatcatacattntagcaaataacaacacatgtcaatgagtttattaagaaggatctcaatttgattctaacataatatatctttaaagaaaaacaaaattttttaagtttgattaaattttgaacttagaattaattttataatcgatctaaaagattaaaattataaaaatcttacaaaatttcaaaaaagaaaaataaaaaatccttattattaatatggttaaaaaattatatattaaataaaaaattgaattcacctcggttaataaatcttatatgaagttcaatcaataataaagtaatgacaacaaatgtattattagctnttaaaggaattttattcgatcacattagtccgaaaggtacataagtgagctctacatctaaacttcagaatgttca

SEQ ID NO: 153998 - DNA, 185 bp, Glycine max
aagtcacctgagctgcagctgtaaggagcagcgggattttttcttggaccacgtagaggggcgctcatgtattgagaccaagatatagttgactgaaccgcgctgccatatgttctccatgtggcctcattgtacgcatgccttacgttacagtggactttttcatactttcacataggacttat

SEQ ID NO: 153999 - DNA, 265 bp, Glycine max
acattagggtgcgctccgtatatggacataatttatgcatcatggtgggaatcacttaggccaattacgtaccggcagtgaccagcctgaggtatgctttccttaattgatagatctctttgttctcattacaacaatatcaaacacatgctcttagaagatattggaaaaaatagtcttagataggacccatgttaccttaactcatgagtaccgatttacttaagggtgctcgacttgatgtcatctattttaaaacaatgca

SEQ ID NO: 154000 - DNA, 512 bp, Glycine max
  unsure (1)..(512): unsure at all n locations
actcagctntggttagagctcctttgagatgggaggaatattactctctgttctttatgggtcatggncactagatgatttctagtgagtccatagaaatatttgagttctacccatccaaccagtagagttgggttcaccagatcttggttgtatgtaatagagtgcatgttgtcattactttgtaacagatgccaagtgtgttctagttcatccttcgatcttacaacaaaggaccaactgatttcaccataaagctacatttaacaatcaaactaatataagcaaatgtgttatatcatgtcatgtntatttgagactaatctntgaaattttaacatgatccataatatgaactgtgttgaacatttcctctnggtttttgttaaatcttcataattggcctaaccatttccttctagttatgttgatattcattcattggttctaaactccaattacaatattaaagttactattaaaaataaatatgcatgccatctactagtagt

SEQ ID NO: 154001 - DNA, 473 bp, Glycine max
ttaagcaccgcagcatgcactgcacaaatgatcaaacctgttcctagttctctaatgtcccatctctcaatagattatccgacgattcgctacggatattattagcactccaagttgttaaatgggagtgatttgcacctttaccctggttcttctcttgacgcggtaagaactgggcaatttcacccgctaaactcttcatagaatccacaacatcctggacgggtaattcgccaagcttttccaaccagatttcacaggtggcatatattggaggaccatacattcttaggagtggacgttggggtctctttttctttcctggttttgtttaagagaaacacatttgtgcagccatccatttatggcctgcagatagaacttctgagctccaatccacttggtaaaactagaggatagataatggagctcgctctcgagataagaagtaatatgctacgtaattagagtgt

SEQ ID NO: 154002 - DNA, 508 bp, Glycine max
  unsure (1)..(508): unsure at all n locations
tttggaggacatanagacccncacaagggttatctattatgtcttgcataaggngggcatgattccctacggcgggcgcagagaagactcttgctttatgcatccaggcgtactccatgacatggaaacatgtacggcagtaagagatctattacaacggatgatagaccaagttcggcttgaggtcagcagtgagaaggaggaggaacaacatgtatacatgtagtcggcagatgaagaaggacctaaaaagcctaaacccttggtaatacacttcaccaggaacacggctccccanagacctcaacacccctcagcagtgtcgggcggtagatctattccatttccttacgagaacagccacgcagttctgtggaggtatgcacctccaggcagtaggaagggaaaagctactgatatcagctcactatcggccaaagtgaccaatatcatcgggctgagcggcataacccacagggggtcgcgtgttcgcacccctagcctaccg

SEQ ID NO: 154003 - DNA, 450 bp, Glycine max
  unsure (1)..(450): unsure at all n locations
agcttagaacaataaacttggccttctcttatttgtctttgggcttggcgaccacgatcaacaaaatactttctgcacctactatatgttgacttgaccaacgctgttattggagtgctgcgacaatctttcaacaccttattcacacattctgataggttggttgtcatgtgaccatatcgtcttccagatgtatcgtaagccatgctccatttttcctttgaaatgcgatcaatccatcttgctatggctgatcaaacacatgcttgcaaggagtgtacactgcatcaaatctgttatcatcaaaagttgtacgtagacatgaaactcaaattaaattaatgtataaaataaaccttacccaatntcttgaacatctctttntgtnnttgcgttgtgaatntgcgattgaaattgctggctatgtgtcggacgcaatacacatgataa

SEQ ID NO: 154004 - DNA, 186 bp, Glycine max
tttacactcaagtttatcatcacaattgacttaactttccagaatgaaccctctttcttctgtctatgattgagaacctgtgttaggaccaacattatacttgcccttcattgagtagtaccatacagacctgtcaggcatcatcttttctgaccaattgctcatcgctttagtcttttgtatggg

SEQ ID NO: 154005 - DNA, 464 bp, Glycine max
gcttagaaatcaagagatcataaattccaaatcatatggggagtatggaatgagtgaacgatctatcttgtatatattctatcttgtatcttgatttcaggaattaaattgtcatcataaaaaagggggagattgtagaagcaaaggcattttgatgttttgatgatgccaaaggatcatgcgcttcacaagtttaattcaagacaagagtccaagaaattcaagatatatgatcaagataatctttacagatttaggaagggaattccaagttgaaacaataagaggtttggccaatgaatttaagctaaaatgattttacaagagatttactctctggtaatcgattaccagacgatgtaatcgattaccagtggccaaaacacttcccctgcatgcttttaaatgattttgaatacttttgaaagcatgtaatatattacatgagcattgtaatcgattac

SEQ ID NO: 154006 - DNA, 508 bp, Glycine max
  unsure (1)..(508): unsure at all n locations
actaagcttcctgaaagggagaaaggggctacttatacctctccaatatctaagctcacgcgcatgccacaatacatgaaaatacaaaaaaggctctactacaaagactactcaaaatgccctaaaatacaaggctaaaaccctatactactacgatacccttaacttgtagtgtaaagtgctcttaattcgtatgccaaaatacaaggcccaaaagaaggaaaacctattctaatatttacaaagaagagtgggcttatacttagcccatggacctaaaatataccctaaggcttatgagaaccctatggcattcttctgcatctctggcccaatcttcttggagtcttttatccaattcccttgcgggcaggattgcatcattccctcccccttgaaaaggaattgacctcanatccagaggttcttgaaactctcgacttcttttctcgacacttgtacaaacaataaaacatatatattagtggtgtcgggtaagctggagttg

SEQ ID NO: 154007 - DNA, 452 bp, Glycine max
gcttattatattcaaaggctttccatatatttctgcatattcaggggcaagatatccaaatgttccagccaagcgtgtctcaacagaatacttcccatctggcgcatttttaaccaaaccaaaatctgcaaccttggctctcatgtcatcacccaacaatatgtttgagggctttaagtccctgtgaatgaagctttgctgagccaagctgtgcaagtattccactccccgagctacatccaaagctattgctactctttgtttccaagtcaaaggagcacagccattttcaccccaatcaaacaggtgttgcgttaatgtcccttgaggcatatactcgtacaccaagagcctttcgttgccgttaatgcaataccctaaaagggccaccaaatgcctgtgccgaactttactaagaactgcaatctctgcttggaactcattacatccct

SEQ ID NO: 154008 - DNA, 501 bp, Glycine max
  unsure (1)..(501): unsure at all n locations
gtggagcactactaanaaaaatatntntttacaacgcacctttaactacggttctcgaanatcatcttagtatataaggcggtgacaattttgtaaataacagatttttcaacaaaaatgattttacaaaaatcgtcttagaaactaccattattctgagacgatttcatgaaaaccgtcttagaaaattattattataagacggttttgtaaaaatcgtattcattgaaagtactctctactctttntactctccctctcactccgaccctcattttcattcacaaaccctaggaccccttgttcttttcatcttccactcagtccatcttcttccttgtaaaggccatggtcgtcgctagcttccaaaggaggttcanagagtacaaaagtgactatccactccatttctttctctcttccaaatatcaaacccgtgtctttgttctctgtcacctcagtctctcaccctttttgaaaaagtcnttcctctcaccatga

SEQ ID NO: 154009 - DNA, 381 bp, Glycine max
  unsure (1)..(381): unsure at all n locations
ctgaggcatgcagcttcgtctcgaaagaaaattccaagctctacagagaaattgatgacagngctttcgcgcttgatccattccacgccttccatttccaggatcaagtatgctgtctggcttttcacttttattccctttatacttggtaaccgttatgttccgtgagcgtgtcgtttttcgttctatgctcgattctacgcgtgcttggtgttaaatatattgatttttattcatatcacatattatgactgtttatatatatatattttgatatggggtaactacagtgaagcgcaatatgtgctgtgtggaggatagccggtgcanattaagcgcgacatgagttctatggttaactatttacttatggaactcact

SEQ ID NO: 154010 - DNA, 491 bp, Glycine max
  unsure (1)..(491): unsure at all n locations
ctcagcttgacttattcgcttacatntccaatataatttcaagaatgaacttctcttattttggaaaatgtgtatgaaacaganaanaaaaaaaacactaaaacatgaatcaaggctccaaactcttagtgattcacgggatgatgagttaatattgtaaaaggaaaaatgattttaattcatttctctcgatatattgtcttatggagaaggtttgattggttttagtccctatctttcaattcataaagaaagtgaaacttttaagaaagctcaaactttttgtgtaaattttttttgaggaaaataaatatatttttaatagaccaactcttttaaatgcttatgttagtaagtaaaactctnttcaagcacaatttactttgtactaaaatttagcatatttgaaataataagaatggtagggtttagatctgctactataaaatatgcaatattagtatagtaaacgaacgaattattgacaacac

SEQ ID NO: 154011 - DNA, 416 bp, Glycine max
  unsure (1)..(416): unsure at all n locations
attttaagggccaacgccttataatgatcacctcttaaaatcaaaaagaatcacttgataagcaagaactacgtaggtctgatttcctcatcgcaattgaggatacgtaggagcaaaagccccgcttttgtcgaccaccccaagagatcgttaatggtccaatgccttaacgtttctctcctttcanaaacaagagatcgttaatggtccaacgccttaacgtttctcccctttcaaaaacaaaagaccgtgtaatggttcaacaccttatatgaccttttgttcatataaaaaacatattttgcaaaaaagacaaaaaacatacttaaaccaaacactttgttccaaaagaactacgtaagtctgatttctcatcccacatcgggaatacgtatgagcaaagggaaacatccttg

SEQ ID NO: 154012 - DNA, 415 bp, Glycine max
  unsure (1)..(415): unsure at all n locations
aaaaattcctcctcctcttggtggaagaggcaaatgatcaacaatccttttcaaaggatgtatccaaacagacctctactaaacctacaagtgatgctgaccctgtccatttccatatttcccccatgccttaacaggttccccttccccaaagaccttaaaatgtattggacgtgtcaacaaccttccaatgacaattcttgtggattcgggtagctcacacaatattttacaacctagaatngcacaccaccttcagctacacatcaaacttacaccgctcttctcagtcatggaagggaatggtgagaaaatccactgccaagggcattgtccacatattcccttaaaattccaaaagactactttcannatacgctttacctcttacccattganagggttgatctagtct

SEQ ID NO: 154013 - DNA, 375 bp, Glycine max
  unsure (1)..(375): unsure at all n locations
caacgangggcatcaaatactcataaggatatgccaatctgtatatctctatggcattgtaatcactagcaacaatgaagatcaccaagtaatggttttgaggtaaagacattgtcttcttgcatatatcgcttgatcatgttaaaaatctgtcgcttacttagttcatgaatgtgtacatcggtgactacatggatgtggctatgctattggttatcctgaatgatggatatcatctcggctgtgctaacgtgttttgggacataaatactctgtctngtttatgtgattgagctatttcattgatgtggatattttgttggttattgcggatgttagatatcatctgggctttgtaccaagtgctgaaaacta

SEQ ID NO: 154014 - DNA, 318 bp, Glycine max
gcacactccaggagaggtgttttcaaacacaccttggagactttgaagccaggggccggagcattcccccacttacaagacaccccgcatttgtgggaacttttcgaaggacaaactacaaaacgaacgaactgctcttccgaagaacagaactggatacataacacccttttgattacgatgacggaacccacaatggcacagctccttgaatccggggcacgaacaacgacggctaaaatccttgatccgcagccgaatacaatgcaagaagggccaccccacagacaacaaaggtggacacaaatccgacaaaag

SEQ ID NO: 154015 - DNA, 490 bp, Glycine max
  unsure (1)..(490): unsure at all n locations
atgaagactctcccaaaatctagatgtttattgtgatctctatcagagactatgctagaaggaacaccgtgtagtctaactatttcactgacatacaagctagtcaacctctctaaggaatatctgatgttaattgggatgaagtgagcagatttggtcaacctgtctacaataacccaaatggaatctaaacctttgggggtcctaggtaaccctaccacgaaatccatggagatgacatcccacttccactcaggtatctctaaaggttgcaacttccctgaaggcttttggtgttctatcttagctntctgacacactatgcatgcaaggacaaactcattaacttctctcttcatactcggccaccaaaacatctgcttaaggtcctgatacatcttagtcgctcccgggtggatactcagactacttctatgaccctcttccaagatcgttctcctaagcttgggtacactangaacacacaccc

SEQ ID NO: 154016 - DNA, 476 bp, Glycine max
  unsure (1)..(476): unsure at all n locations
gcaanctttaacataaagagcatactcagtttggatttctatcaanactcattggtctnggaaataacttgtcaatagcgagatatttcattgccctctgtgcttgctattagacacatacatacgccgttgttcaatatacaattacttttccttcttgaccttctatgacaaaacccatttgttgttctacatagacatnttcttcaagatagccattttgaaatgctgattttacatcatactgaaaaattcttcacttcatatgagctgccaaggaaataagaagacanatggtctacatgcgggcaaccggtgcaaacacttcatcataatcaacttcatattgatgcttgtagcctctagctacaaatcttgctttgtgtctctcaacctctacctttgcattcttcttgattttgaacacccatttgactccaatagcttcatgacctttgtgacgcttgatactccta

SEQ ID NO: 154017 - DNA, 444 bp, Glycine max
  unsure (1)..(444): unsure at all n locations
aactaagcctgaagaccacagtaagagtagtgttatagcagtggagaacatcctatcttctcttatctntnccatgttcacgccctaattctctctctcacacacacatatatatatgtatatgctccctcttatcttttccaaaccaaacatagcagcctcctgtcctaattatagaaagccactaatcaatttcttatttcatcatattatataattagctaatagggagggggaatgaatccatgcagagtcaaacgaaccaattcaagacaaataatatcattagcaatttataactgttggggaaagatgaaacattgtgcagacaattccaaaaaaaaaataaaatggaatgctataaacaaaatattactaataaattggttaattgacagatattntcttaatacgtctttctaaatgtaattcgagtaataatga

SEQ ID NO: 154018 - DNA, 408 bp, Glycine max
  unsure (1)..(408): unsure at all n locations
aacaaaaacaacaacctaactctgttctaccaatcttagtctgaatgaaacgacgaaaagaaattataattcccatgaaaagcaaagttaacgggtacggatggatctataggagggcggacagggtccgaaccttcctcctttaaaactattcatgtatataatatatatttgtaacttaattaatataaaattaattttgtgtgttgttattataatattggttaagattaatcagcataaaactgtataaaattagttgtgctggttattttactataatgatgaaagcgataattagtataaaattggatacaattagtagtgtatttatacgtgatatgataacacctaacgttattatatttaatataacaattaattncaattctatgtgtacaaatacta

SEQ ID NO: 154019 - DNA, 514 bp, Glycine max
  unsure (1)..(514): unsure at all n locations
ctaagcctgaagacaagactatacgaggtatcttccttgggttatcaatttcttattngggaccgngtctacaacttgcgaactaagacactcatcatcagtcgagatgttgaagttgatgaatatgcttcatggaattgggatgaagaaaaaggggagaagaacgttcttatacccgctcaactacctcaagaagaagatgaggaagaagacccaggtgaaccaccttcaccttcatcacaacaacaagatcaagaactatcatcaccagagtctactccaagatgagtaagatctttggtggacatatatgaaacctgtaacttggccatacttgaacctggaagctttgaagaagcgtcaaagcaagaagtatgggtcaaggcaatggaagaagagatacagatgatcgagaanagcaacacatgggatgtagtaaatcgtccccatggaaaagatatcattgctggtaagttggtctataagacaaagctcaaccctgatggcaccatac

SEQ ID NO: 154020 - DNA, 467 bp, Glycine max
  unsure (1)..(467): unsure at all n locations
agctntagcttcttaaggaagtgttctcanattatcttctcaaggaagntntcttaagaaagcttctcaaggaagttacctagtctataaataaaagcatgtgtaacacttgttataactttgatgaatgagagtcttgtaagacacaactcaaagttcaacttctctccctttttcttccttcaatttcgtgctccctcctctctttcttttagcaaatgctcacccccccctctaaaatataattggatggggcttctcccaattcaattaaatttattgtcaaccacacacatcaaatattcacttaatgcatgccaaattagaaaactacccctaatacaaaaaactagtctaggtgccctcanatacaagagatgaaaaatcttacatttctagggtaccttaactatattgtggagccctaaatacaaggcnccaaaataatgaaaccttaatctaatatg

SEQ ID NO: 154021 - DNA, 479 bp, Glycine max
  unsure (1)..(479): unsure at all n locations
acacatagatactaagcctgatgattacattctcccctttctaagcaaattctnattttttcttgacatcatcaaaatcttcatgatttacattctccccctttgtcaagcaaattctttttgatatcatcaaaacctgcatgatttaaaaaaacaagctagcaattctaatgaatcatcacttcatatcccttcccttntcaaccaagttagcactacttcctataccaaaatcccaacatataaaatttacaacaactttgtacagtttataacataatatgcttaagtcaaacatttatttattcacaaagaacttgtttccctttntctttttcttttctttcttttcttttctattcaataatntaatatntaatntaccttaataccctcatttaaaaatagagtatttacatcatattagccaccanatgatagagatccccaacaaaacacctttgctctcctatcctatg

SEQ ID NO: 154022 - DNA, 396 bp, Glycine max
  unsure (1)..(396): unsure at all n locations
acttggagaattgtgagatttggagatgtatttattgacatcagtcactggtaatcgattaccattaaggtgtaatcgattacacatcaacagatgtgactcttcatttagaatattgaaaattaaaatgttaagaagctttggtaatctaatacaagtattgtgtaatcgattacacacgtttaaatagatttaaaatagtctaaacagatagttgtactcttgaaanttgagatcttatcattttaaaacactgagaatcgattactaccttctggtaatcgattaccagatcagaaaaactctttggaatgatattgtgacaacttcttagtgtcatacattgttagaaaacttttaatacatatttgattgaatcttatttgattcttgaac

SEQ ID NO: 154023 - DNA, 428 bp, Glycine max
gcttcaatggtaatatcacatcatattatgtctaaaaccgtatcaaattatggatatcgtggtatggtattgtaagtgacatccttggccagagtgggtttgattgggatggcactatacacatgatcacagttgagaatgaaaatgcttggagtgaatattgcactgtaagtattctttaatatgttgctatttgttattcaaagtagattggatttgaattttattctttcttttcagtcgcataaatcggctaaaccgcttcgattcgaggtgcttcaaaactgggatgatatagtggatttgtgtgctaaagatagagccactagtcataaagctgaaatggctatggatgctgatgaagcgatgagtagagaaacacatgaagtggaattcatggggttaggtgctactactaccatagactt

SEQ ID NO: 154024 - DNA, 402 bp, Glycine max
  unsure (1)..(402): unsure at all n locations
acacaagaaactcagctgatgactanaatgatggctttgaatcgcattattgttcatataancgccgaacccgtactaaccaattaatattattaagactcgtttggttaagcaagaaaattgctggtccacaaaaatcatttacgcgtgcagcatacatcattgtcataattgacaacacataatgacatgcatgcgtattacagtttgagcgcgataacacattggctgacttgactacacattctgaaggaaacataatcacgaaacatgttcacgcgtgtctatttttttgtaaacaaagttaagaaatcgctcggtcacaaccatctatatatatggcagacacggctaataaatcacacattatcttgctttcaaatagtctcccaattgatacac

SEQ ID NO: 154025 - DNA, 447 bp, Glycine max
caagcttacgcaagcttacgtgtagatctgggacctatccatggcagaggtctccacagataccattgcctccctcgcccaatattatgaccagccattgaggtgcttcacctttggggacttccagttatcacccacggtggaagagtatgaagaaatcctgtgatgccttctgggaggaaggaaaccttacctcttctcgggattttatccctctttagctagaattcttaagatagtccaaatctcgacacaggaatcataccacagatagcaagtcaaaaatggtgtgtgtggagtaccgaggaaatgtttggagccaaagcaagagttttgcaggttaaggcgaatgggccccgttcatggacattctttcactttagatcttcggaggggtcctttttccaaatatggatgggttggtggaccaaacaacgatagacgctt

SEQ ID NO: 154026 - DNA, 358 bp, Glycine max
  unsure (1)..(358): unsure at all n locations
taacgaatgaagagcgncgaacaacgggtgaaaccttcgcgaaattcctcacggagaacgttacggatacgtttcggaagcgcctcggcttagatattgttcacggaaacaatcttttcaagcagattcgaaagatatagaaatgccaaaggggctaaacccttgtcttcttcacttcctcccctatttatagcataacaggggaggtggttgccgaccagctcgcccaggcgagccaggttgcttcctccagaagcaacagccttctggaggaatattctggatggcccaagtgggcttgggtgctattagcacccacatttttactaagtacacccactctgccttttttggtgag

SEQ ID NO: 154027 - DNA, 451 bp, Glycine max
  unsure (1)..(451): unsure at all n locations
gctngnngatattttactatatatgtgtgtgtcttcgttnatctctacctgtttaaaaatgtgataattcactcctcatgtgttgtttatatttggatcatgtgatgatcttaaaccttgtgtttgtgagagcaaatgactaggtgaattactttaagaaaccttgtgatggaggactccgagacacaatattttgatagaatgtaacattggaacaagagtttttattttaattgcatgacgtatcaaacatgtcattttactttatttgataaacttgaacagtcttgttttaagtcataaatatttctaagaaattttatttggtaacaagtgaagcgaatgtgaacattacccacgtggactgatttacgattntattgaataaaattgatttaattagattcccgcatttatatatngttttttcatttatatgtatgttggagta

SEQ ID NO: 154028 - DNA, 495 bp, Glycine max
  unsure (1)..(495): unsure at all n locations
tcattgtgagaactgtggtaaaacctatagtgacagacaattattcatcattatacgcctcctcaaagttgacggaagaaacgtccataggacaaagtctatcaaacatttacctacggattttattatttatagtgacagtttttgtccgtatgtataggtcatttttcttgtagtaaggcaaaataacaaataacaaatgtgaaaccaaggcattaatgtacccaaggcattaaaaattacaagatcatgtcatattttctttntaggttgaaaattcatacatgtaattnttctagtataagaaataagtaaaacatattaacaaatgctaaagaattggtttataagaataaattgttcaacagtgaccaaattttgctatctttataatttcttagtcactggctccagtctattgattctctattcaagatccattaacccctcaataaattggctggaattcattttcccatttccatctncatagtc

SEQ ID NO: 154029 - DNA, 497 bp, Glycine max
  unsure (1)..(497): unsure at all n locations
catctcgtcgccgatccttaagtcacctgctgcatgcaagcttgtaggattatggtgtacccatcacacgtggtactaggtggcggtcgggcgatggtgcacaacaagtttttccacatccacaaatcgcgcataaacccaccatcccctgttgcccacctccaactgagctcacatactcccacatagcccatatcctcgtttctctcaacaccgggtccccatcaatcctctcaagcttccccaacatccaagtaaaacaacattcaaacagcacaaactatcacagccaagaaaacagagcanaggcagaaaactctgccaaaacaccaactaagatcacagcttttctcactttaaaaccccagtaacaattcctttgttcaattcgttaactgttggatcgactccaanattttactggaagtctccagtacataagtctacattntgaccgttgggatctactagcaaacatccagaactcattttgcact

SEQ ID NO: 154030 - DNA, 499 bp, Glycine max
  unsure (1)..(499): unsure at all n locations
gacatttctggtcttcctctctntgggattctttttctattctcaccgtanngatttcaggcagtggccaaactgcatagtcttcttctatcagttcccaaagatctagtgctttaagatgagtagtcatccttgcagcccataggtcgtactcctcaccatcaaaaactggtggtggtattatgtgtgttgtgtttgcttccattatggtttctctcaactcacagatccctcaagataatgactaatttattgttgaagattagataaaagatagaggagagcagatatattttttaaggatgcatagttcttattcatttgctctttaaatagagctagagtcaaatatacaaaacaaaaaattccttatttttagacatgactaanacagtttctaatatgaataaaaaatagaatcataactcctaaagaatagatcttaagtaacagacaantttatattttaaaatagctaaacatctactaatgcactatt

SEQ ID NO: 154031 - DNA, 323 bp, Glycine max
  unsure (1)..(323): unsure at all n locations
ttgagtcacctgcggctgcagcttagaattcaattcgatcgtctcgattttttatttgtctcaatcagacatttgggaatangttattgtcgtttgaattgctgagagcttcaacattcattttgagcgtctcgatgtattacaggacttaatcagacatcccagttaaaagttattgctgtttgaatctgctgagaggcttcacattcaatttcgaacgtttcgatatttaccggaatcaatcagacatcccagtaaaaagtttgtggcgcttgaatttgttgaaacttttacatttaattttcgagcgtttgtatttttcc

SEQ ID NO: 154032 - DNA, 340 bp, Glycine max
  unsure (1)..(340): unsure at all n locations
tgcgagctcaaccgaagttgtatttcggccgacgccggcattttgtcggccaggaaaacattagcccacctcggcaaaaaaaaacatgattcaccggtattgacagaaaaaaatgctggccttagtcggccaggaaagatgaccgatcgaggtctaaaaaagaagcatgaccggattacgccgatcgaacatttcctaatagatatcctccaagcattattcagggattgaatggaaaaaacaatagccgacatcggtagttaaatagccgtgactgatatntttcagccaacactgcgcaacttgtttcacaaacgctggccgataatatntctttacg

SEQ ID NO: 154033 - DNA, 354 bp, Glycine max
gggagctaacgcggacagcactacaaaaaacgaacacggagacaacacatacgtaacagaagtacaacctaataaccacgtatactacatcaaaagcaaatgagatgaggggcgcaacactactatgaaacaattattaaacattaagcaccacaaatcgaaggatgagttgacaacgaggaaaaactacacagacatgaccagaaaaaaggactagactgttactctccccccttcattctagctatcacaatgatacaatgcaggctatatgtacgctacgacaagaccacaataagaatcacacgaaaaaacgacgaaatcaaacacagtaaataagccgtcccgccggga

SEQ ID NO: 154034 - DNA, 447 bp, Glycine max
  unsure (1)..(447): unsure at all n locations
ctcagctgcttctcagtttcttggtcttttnatagagnnntnttttactctactctatatacatnctaggngnctctttgaatcctagcttgcttttatgtgcttttcattgctttaattgttgaaaatccttgaaaatttatcttgttaaaactctattggtttacctttcatttaatttttttttggtctttggttattgcttgtctctttgtttccttgtttgtgagtttccatatacggaattggaaaggaggattggtgccatacattgaagaattgagtcaagaagtaaggggacaatcaccttaagagctattggactaagaagcgcttcaaattgactgaaacacgaatgagagaacagacacccaaattgagaacttcttcttgtaatttagaatcggaaatttacttgtaattggacacttgtacgttaccttcatt

SEQ ID NO: 154035 - DNA, 442 bp, Glycine max
  unsure (1)..(442): unsure at all n locations
agtcaccgcagctgcagcttctaccatcaataaactaggaatggcatttttcgttaccatcaaaataactntgaacttgtggatttagatcccatctggaaggcactagctcgtctctactaaataatctgtaactcgatgctaattggtatcttctgttatcatataaattcctatatttggttgagaccgatacttcattaatgtcactcttatttaatgttgggtttcaggtttgggctcactgctatttaccttttcgccattcaatatattaccaagattggtgcaaggtgtttgccaacttatcatgattgacaacattgaaacacacaaaacgggctgattcctagtctcaatgtattgcccgattgaaggccaagtgcttttttacctatccaaacttaactacggtacttctctccacgggtggctgtcttat

SEQ ID NO: 154036 - DNA, 520 bp, Glycine max
  unsure (1)..(520): unsure at all n locations
aactcaagcttcttccctatgataaatgtgatccacgtcaactagaagatatacatgtatatgaggctgngattcaacaatcgntggttctttcatattgtcatcctcatgtttggccatgaagttttgtctcattaaataaaagattaataatataatttagtttttaatcactacaaaaatcttaacgtcacattattattgttcacgagaatatgtaacattgtgatttttgtgatgattaaaaatcatcagattttgtgatctacattttgtaatggtttgacctccaaagttaaatattattatctctagttggcaaacgttgttcaattgtaacacatcatataaaatgaggaactaaaaatcaacatttaaaatagaggaactaagaactaaatttttaatatttactgatctaaatatatgttaagcccnccaaaaataagcttgcgggtacaaaatcaaaatatttcctctaagtatatatacttgtcaaagtgtaacgggtaaaataagt

SEQ ID NO: 154037 - DNA, 221 bp, Glycine max
  unsure (1)..(221): unsure at all n locations
gataccattaactattcaatatgttcttgagcagcttgaggacatcaatactatatttggaaagacccataaaaaggaaaaaacgtaaaacttggatatggaagaagaggatgatattgnttgatcttccatacttgtccgatctagatgtcagacattgtattgatattatgcgtgtggagaaaaatgtgatatagtgtcattggcacaattcttaacat

SEQ ID NO: 154038 - DNA, 472 bp, Glycine max
  unsure (1)..(472): unsure at all n locations
ggggatggtaccacattgnctctgagtgtttttgtangtgcatgcatcatactgagcatgatttgttggcacgatggactgatgatgattgttgttgggtatgtgttggactagtaaatgttggtgtgcacttatgatatttgttaatgttttctatttataatgaactcacccttgcattntgtaccgtgtggttgatacttgtgatgatcatgaatccttattcgtgggagcagaatgacagcggtagaggacgaggagtgagattcttttgtggagccaccgagccgatgtgatgacattgggattattttgggagagagtntgtgtttgttaatcaactcctccataccgtggtctgtaattcttntggtgatatgaggatgtaaatcatatatttatttatatgtacaaacaaatttacctttaactttgtgaatgatgtatactgcactacttactcatgtgtatg

SEQ ID NO: 154039 - DNA, 345 bp, Glycine max
tattgccatattggaaaccacagttacaatgttaaatgatatatataaaatggacatcctctcacgaacacatctttgcttattcaacttccaccggaatgtgagtgtaagccattggtctgtatgctcaagcaacctgcgctcctgagtgttgacttccaagaccgttcaatcagagattactcatcttgcacgttggtgggggtgccgtaaaacaacgagcaaagttaaaacaaataagttcaaaataaaaataaaaagcatttgttgaccggttttaagtaaaatatgacgtcatgtgacctctttgtttttttatagaaatgagtatcagatagatgtgac

SEQ ID NO: 154040 - DNA, 506 bp, Glycine max
  unsure (1)..(506): unsure at all n locations
tctggtgggacatcttgacttgctntccaatctattattcattatttattctgccttcttctattttcagattgggaatgcctctaacagcacctttgtcaatgattttcttcatgcctcttaagtgcagatgtccaaatctttgatgccatattctgacttcatcttctttggaggatagacatgtggaggagtaactggtttcttgaggtgtccataggtaacagttgtcctttgatctgctgcccttcattagaacttcactcttctcatttgtcaccaagcattctgactttgtgaagtttacattgaatccttcatcacacaactgactgatgctgatncaagttgcagtcagtcccttcaccagcagtactttgtccagactaggaagtccatcatgagctagctntcccattccagtgatctttcctttagagccatctccaaatgtcacatagctagtggagcaagggttcaatgtcaccaggaattcttaactcctg

SEQ ID NO: 154041 - DNA, 463 bp, Glycine max
  unsure (1)..(463): unsure at all n locations
agctcgaaatgaggaagtgtggaaggttgatattttctacttttattcgtagaccacagagtggtacctggagatatgtcgcgggggtcaggagaccttggggacgtcaggtggggtgctattgccctaaaccaagcttgaccaatcccgacccatcccgggcatagtcagtcagtgagaacctgtgatgtacctaaacaggcgagctcctgtcagtcaaccgattaaagaacacagaccacaaagcaaggaggcttgtgtggtggctggccatctgtgaatcttgagtgatatatgggatatggccactggtaatcgattaccaagggtgggtaatcgattacaaggcttaaaaacgagatcacgaagctaagagggcttctgctaatcgattacaaggtgcgtaattgattaccangcttagatatgggactggaatgttgaatgggcctctggtaatcga

SEQ ID NO: 154042 - DNA, 433 bp, Glycine max
  unsure (1)..(433): unsure at all n locations
tctcaagcaagtntccatcatctctgagcctaacatgtattttatttatntttgaaccctaagcctccatagaagcttctcaagcaagtctccatggctgaaatgattgctttgcacaccttgtcttatgttgtaggagagcattgtcctagaaaagatgtttggttcaaatttggggaagtgcttaaaaatatttatgtgtaaggattgtaacaacatcacacagtcaatgtaaattgcaaaatgtggcacattgccattgttgtgtcattgttaaaaaaaaccactgaatgaaaaatagaaacctgaagcaattgtgtcctaatagaatattgtgtgatgttagtagggtaataaaataaaagagggatgtagcaaggaagtcaagatagtaagaaaatatggaataggtgaatgctctcttataacctaa

SEQ ID NO: 154043 - DNA, 374 bp, Glycine max
  unsure (1)..(374): unsure at all n locations
atttgattatcctactttgatgaatagaaagcctgagaaaatgaagaggataagaaggagggaggttatctcatctatcacattgcacaagtgcatttaggtgttgtaaatgcaactttatatggataggcgatgaacaatattttccatcattcttacaaacaatttatgaatagttacatattaaattctgtgaaacattttgtgcaggatttttttatgcaataaattctctaagtccatatcatngtaaaaagccatatataacaatgcatctccaactcatacttattgtctcttatcatttacgatggaaggactctatgtacatgaacaatatggaacaaggatagatgcacgaaatgagaaagatt

SEQ ID NO: 154044 - DNA, 301 bp, Glycine max
  unsure (1)..(301): unsure at all n locations
atccatgacattaatgtaatgaacaacatcatttacacttttcttccaagcatcatggaccatggcagcttagttgatatgcttacattaaggtcgcttgtaaaccgaatcgtcaccttctctatggtgtaggttatctacaacgcaagagtaacggattgtggtatgagtgatatcacactaaatntttaatattttcttagagtgcgtttggatagagaattttaactgaagaaagtaatctatcagagaatttgaattcctcgtaattaaaattcatcggttggatgctttntatgaa

SEQ ID NO: 154045 - DNA, 418 bp, Glycine max
  unsure (1)..(418): unsure at all n locations
agctntgaagtctatataagaagctataagatgttcatgttaaggttctcaaattacaagaaaacattctgagacaaaacgaacaagtactgtaacattgttagtccgttggatgaaagaaacttgagtgaattgagtgaatcttagctttgttgagttagagagtttcactgtatccgagcttactgtgtaaacacttcgtaggttttgatggttgtttgttgatccataaaccaattaaaaggaagggcaaatagtcttttccaaagatttcaacattcatcgcctagctagcaacagctcgcttggctaatcagtttttgaaacataattatcactcgccgagcagtgagtgccttaagttagcacaattcgctggcaaattacttcgttggtggattgtaccctttggtttttt

SEQ ID NO: 154046 - DNA, 444 bp, Glycine max
  unsure (1)..(444): unsure at all n locations
ctttgctgcannaattccttttgttggtgtgttttttttgtgtttgtgctaaaggtggtcttcgtcattggaagtgcggtagacagactttgtggttgatttagggatggcctttgtggataactgggtggtggggtaaggaggaggtttgttattggctgagtaatgacattgcttggttggtgggaaacttggccgtatatgaatggcagtcacagcatgggtttctccctctttctcaccctcttcatttgccccagttttctcagtcgttctagtaggatgatcaaatttgcctcgtttcggatccacttcgatctttttgttggcgaagaccaaatctgttaaacttgaaggtgtgaacccaccattttcttttcatagtataaaccgggcacgtgtctactatattgcgaaatcttctctctgatttggggtgcactt

SEQ ID NO: 154047 - DNA, 344 bp, Glycine max
attcaacttcgatgcgttctatgtattacgggactcaatcagaaatctgacggacagattattgtcgtttgatttggcacacagcttcaacattcaagttcgagcgtctcgatatattatgggactccatcaaacatacgagtcaaacgctatcagtcgttgaattgggtcataggatgaacattcaatttcgagcgtgtggatatattactggactaacatagatatccgagtaaaaagttattgtcctttgaattggatcagaggttcaacattcaaatttcagcgttgagaatattacgggactaaatcagacgtccgactaaaaagatattgtcattcga

SEQ ID NO: 154048 - DNA, 433 bp, Glycine max
  unsure (1)..(433): unsure at all n locations
tcccagatccgatcatggaaggacttgtctactgctntcattatgcaataccagtacaatacggacatggctcccgatcggaaccagcttcagggtatgactaaacgagagcatgagtccattaaggaatatgcccaaagatggggagatctcgcagcccaagtcgtaccgcccatgacggagagggagatgatcacaattatggtagatacgttacccacgttctactatgaaaagctgataggctacatgccagctaacattgcggatctcgtcttcaccggagaacagattgaatccggactacgaacaggcaagttcgaatatgctgtcaatatggcccccaacaacaacaaaagagccccagtagtgggcacaaggataaaggaaggagatgcccacgctgtcaccacctgcccaacatggatgaaag

SEQ ID NO: 154049 - DNA, 357 bp, Glycine max
  unsure (1)..(357): unsure at all n locations
agcttcatattntgagaaaggaagataactcttctaatcatatgagcacaaactcattatagcaatcaagcaagacaaacaaataaaattttgttagtcatcatataaacaagttaaataaaagagaaatttcaaccaacttaaacttcttgagagatgttctcatcactttcataatccttggatagaaggttgattttcttctccgaaccatcggatgagtcattatcatcccaagcaatatacaccttcttggatgcttcttctttatacctnttcttctcattcttcttgggccatgactcatttgaggggcaggttgcctttatgtgtccgggtngatgtacctttttcatg

SEQ ID NO: 154050 - DNA, 511 bp, Glycine max
  unsure (1)..(511): unsure at all n locations
aacaagaatgtattanagtaatgaataatgataagtatcttttgaactntaattgtgcctagattattagctcatctcacctaagcatgcactcttttactatctataacattaactattactgtgtacacgcacatatataaataaaatatatataacagatagtcacaccttcaacatgtgccatgatgtggtaggaacacacactangacgagattgtggagaaaagcttgtggcaatgatgtcaaaatatctataaaaaagtgttgttaagtttagcttttgttattgtctctgcaatacatagatgtttcatgtttcacatggaaattgtcgataaattaaaattcagttgatacatagattatttattttccaaacttagtgacagatatgagattaatctatggaacctacctatgcgtgagaactataaacacgtgccatacctaattctcattcatccatgttgggaaatcaacgttctgataccactagtaggtaatcatc

SEQ ID NO: 154051 - DNA, 396 bp, Glycine max
ttctaaatctatggtcctgtaatatcttgcacactggcttattaaaggaaatactgtgtatttgatggccatgctgtatttcttgttctctgctagagatgctagagttttgagaattctctctattagtgtcacaggttgggggcagccacttcttggttagttggtcgacaatgattacatcaatggcgatctttatgccgtctatgcagatttctgacatgagcttattatttattagtactttagctatgtcacttctgctggttgacatgtacttttcctttcttttgttgtctcctcagtatgatgattcatattacacatggttcttaattgatgtgccaaattatttttctgggctatgtccataacgtctctatattttcattcttc

SEQ ID NO: 154052 - DNA, 458 bp, Glycine max
  unsure (1)..(458): unsure at all n locations
acttattttcttcaggtcagtctaaagccaaaattacttgagaggaaaatagattcaacaggcaactgatgataggataggagagcttgacaccatgaaatcatcatgctactctgattacccttttttcttcccatgaattagtacgttgcttgaagaaattaattaagctgtacttatgtattatgaccaatcatgtatttatatacactctttctttacatgattgttaactttggagtaaaactacatatgcaactgaaaaatgttgcttttacaaaggtaaacaaattaatgcgtagattaattagtatattctagaacatgtaaataaataaaaataagggaattgttattatgattaactctaattttaatttatntatattagttacatggaccaaaatntcacaatanagaaagggtacatgaaccacaatatttatatatgtattata

SEQ ID NO: 154053 - DNA, 428 bp, Glycine max
  unsure (1)..(428): unsure at all n locations
cagctgagtaggttcaggctggggagaccatcatgatttatttgtttgttttaaggcgnatnatggaggacaactactagctgcagttggacaagatgcaaacaaccataactactgtattgcttatgcaattgtggatgctgagaataaagacaactggagatgatctctcacactactgaggcaagatttgggagattgtaggcagcatgggtggaattttatgagtgacatgcagaaggtacgtgttctactttattgtactattatgattttttatatgctcttngaaggaccaaactgacagtaagtgaaatctttcatggactaatttgtcgtgacatgaagtattcccaaatgcacctcataagtactgtgctattgcattgtggacgaatttcattaagcaattcatagacttggtattg

SEQ ID NO: 154054 - DNA, 460 bp, Glycine max
  unsure (1)..(460): unsure at all n locations
nnagcttggtaaagatgtcggcgagttgatgtgtgattatacaggaagaagcttgatgaggttgatgttaatcttgtgacggataatatggcagtcaattttgatgttnttagttcgtttctggaacacaagattggaagctatttgtatggtggactaattatcacaataaagaatggctggttgaaggaatgaaactctaaaatcttggagaagataagtgagccactgaagctcgcatgttgtggatgctaaagcacgacattcagcttctgaaaaactgcgagagactgtggattgtttctttgatttccaggagatgtgggaggtactgagataaacagaaaacctagtgatggagtgtctggaatcccgacaccctgcccagtttgaatcgctgaaggcttttagttgaagagtaccatgagcagcaaagaagagactcgaacctgcaatgcct

SEQ ID NO: 154055 - DNA, 474 bp, Glycine max
  unsure (1)..(474): unsure at all n locations
tgtcactcatcactgcattgatctctctntctctctctggttttggtctgtaaggggagcttctatagaccccacagtgttaactgcagttaagcgtgtgtagtcatttgctacaacttcgtactattcagacagacgtatcatcttccttcttaattactacatcaacaatacaagtgcaaactcggtttctgatggaattntttcacaaacggaaaagttacttttacatgcattttaactgaaatgagacaaagtgttcagtagacgttgtcacgttgataagaacgaaagtatacagagagagaaggaaaatattaaacaaaaaanataaagggcaggtcatagtaatttttttttaacatatttactaaaggtgaaagggagtactctaattaaccagtcattntatttntcaaccacttttcggcatatattcattatgggtgtgcttatgccgcacctgaattgatc

SEQ ID NO: 154056 - DNA, 522 bp, Glycine max
  unsure (1)..(522): unsure at all n locations
aactaagctggctaagaagattcctaaagaagctagagcttagctacacatttctctctaatagctaagctcacctccttgagatgagaagctagagcttagctacacacacccatctaaaaactaagctcacctccttgacaaaaatacatgaaaatacaaaaaaagtccctactacaaagactactcaaaatgccctagaatacaaggctaaaaccctatactactagaatggtcaaaatacaaggcccaaaagaaggaaaaacctattctaatatttacaaagaagagtggatccaaccttgacccatgggctcaaaaatctaccctgaggttcatgagaaccctacgaccttctttagtagctctggcccaatctacttggagtcttctatccaatgcccttgcggggtaggattgcatcattccctncaccttggaaaggaattgaactcaaatcctaatggtcctcatactctgggcttctttcctcaacacctgcaaaaagaacanaaacatatg

SEQ ID NO: 154057 - DNA, 450 bp, Glycine max
  unsure (1)..(450): unsure at all n locations
cactgccgcagcagcttcatagagggaagcatttattaatttcacaagncgaatcttattcacagaattagagcttatacttttatctgagcgagagtgattctcctaagaccttgagtgattcaagaacaccctggctatatcaaaggactgtcacaacctctgtgtgttgccctcgccggaaagagagangctttcctttctttcatcattaaccgtgtacttccaaaccacaataccaaaaaatccacttctgcccagaattatcttgtgggcataactcccgctttaagtgctccaattaagcgattctggagcctaagtcgaatttcataacgagatctttcacctcattcggagcctctgagcttgagatatttccatatctatattactgtgcaacctcctcttaacctaccgtttatcaacttgaattctgatacccgggac

SEQ ID NO: 154058 - DNA, 133 bp, Glycine max
ccgggtatctggcaatactctcatgacatttgaacaatttagaacttccctgatttgcatggcatgattgaacaaatatgaattatgttatatgaccacgcggcccttatatcattgatctattcagagcatc

SEQ ID NO: 154059 - DNA, 427 bp, Glycine max
agcttgacaaccagaccgaacctatttgttctatcgtctaaggccaaagctttcaaaagggtgaatagaaattgatgagaaagatcaatagaagaacataaatgttgcaatttggaaagaaaatacaaccttgccacacagtagtatgtccaaacaaaatgtgcactccaaagtccaatgaaaacagcagaacttccaatgacaataatggaaaatgcaattggacctatcagtgcacctgccagaaagaaaccaccaccttgtcatgaatgtaaccaagtaactatatttatcaaattatatgttaacagacagattctgttaagtctgaatatgattcattaatatatatctttcatgtggctaggtctaactaagaataaaagaacgatacacacagaaagaagaaaatgaaaatgaaccttta

SEQ ID NO: 154060 - DNA, 416 bp, Glycine max
  unsure (1)..(416): unsure at all n locations
accaagaaatgctattcttaaaacgaaaatggcatacgacctcccccaataacacaaacatcaatgtaaatttagagcgaactcatgcacatacttcctttcgaacattcactcgcacaagatattcttctaactaaggaaaatgcacccaggcataatcaaggcaccttcgttacctagatcacttatatgtccttccaaggtgtatttgctacctacatcacatgtacttcctttgctaaatttacatacatgcatacttaaagcattttggctaccaaaaattgcatacgtgcacattctggtatntctaatacctatacatatacaaactntgtgatgaatcttggctatctacacaataagatgctacatttcatgctntaattcaagtgttntgctacctaaagccgcat

SEQ ID NO: 154061 - DNA, 300 bp, Glycine max
agcttaacaagtcgaaacagatagtgagtctttagttatggagacccacttgcggttcagatagcgaaaagcgtgttaaacacattcagcgcagctttcaagagtccttcggacaatttttgaaccttttcctttctagtatggggggacagccaatgaagaagaagaccgtttgaaaaggtccaagaaacattccaccccaaacaagtagttgtgttgggctccactttatgtcttcatttaggtggctaccttttaaccgcctagaaggggaattaacttgagcaaatatggcttttt

SEQ ID NO: 154062 - DNA, 484 bp, Glycine max
  unsure (1)..(484): unsure at all n locations
tcggcctggtatcaggtgacatatcatcctgagtgtttgtatatattcctngatctgcaagataaatcctcagagaaccaagaggctgatagtttgggaagtacggtgatgttgagttntccttggattgcagttgattacctagctcgcacaaagataaggcaacgacatcagagatgtggaaattttgactcaactaagccagttgattctctggcaaagtatctatctgaaaggttataataattctattgagcttgctcttggctactangccactctgccatcctataatattacgtataatgtgtcttcactttagctgcttcgattgtaactaggtttgttcccaagccaggaaatgcctctggttntgaggcttaagactgtatctagtctagttacatttgatactgattgaaccgtttgttatagtagtcttgtgcatgcgcgtatatgtatgtgattgtgattaaatttatgt

SEQ ID NO: 154063 - DNA, 353 bp, Glycine max
catgcagcataagttctttattttatattttgtatattacaacttcatgtaaaacatgtacgctatgtttaagttaaagaagttaactaattatgtaactaacatgcaattgtatcgtactagtaataaataatgcttccagatacatgcaaaacaattatattgtttttaagagaatatgcaatggaagttatttaatggattgttgaacaaaaaatatatctcgatgtgtaacatgtgattttaaattgtttaattgaatacagttacttatataagtaaccagttcattaattattcatttttgtcttaaatatagaagagagaaataaatatttatgagtaaacaactt

SEQ ID NO: 154064 - DNA, 318 bp, Glycine max
taaacaaatattaataatcattttaactagtatcgatctgtatgggataagttaagtagatatgtttgaagtttatcattgaaatgatatatctcatacgaaataagttaatttaaggttgatcgcgaacgaactttaatagacattggttgcaataaactttttatgtggacaaaagtcacaaatcctttgaattgcgtgacttctccgagtatgatgacgaaatgtattgaattatgactttaaaatcagcatattcttcttgattttaaaagattacgtaagactcttatgacttatcaatttttctaaagagtc

SEQ ID NO: 154065 - DNA, 443 bp, Glycine max
  unsure (1)..(443): unsure at all n locations
actaagcctttagactctngattttaggttggaaagttgatttataatttctcntgtgagacatgccacctattaggaagctctctagtgtcttggaattgcaagaaacaagcatgtgtagcactttccattgtagaagccaagtatatagcagctagaagttgttgtgctcaaagtctctggatgaagcaacaactcgaagactttggagtaaaccttgatcacattcctctaaaatgtgagaacacaagtgtgatcaatctaactaaaaatcttgtgatgcattctaggactaaacacatagaaataagacatcattntcttagagatcatgtgtaaaaaggtgattgctgcattgagttcatagatagtgagcatcaactagtagacattntcactaaaccactngctagagataggctcttcttcattagaaatgaact

SEQ ID NO: 154066 - DNA, 485 bp, Glycine max
  unsure (1)..(485): unsure at all n locations
atcctcttagtcacctgcggcatgcagcttggcgaatcttccctttgttcaatgatctccatggttaagatagaattcattagtcaaggcaaggttgtttggttctgtctttatcgggtacccaaattgtcgtcgagcgaggagtgggttgtagctaattccgccacgcatacccaaaagaggtacgttgggatattcaccacaactcacaataatctctccaacatcactagctgcttggtaccaaacaatgtcagatgggtcaagagtcatgattcggcgaggccaggaaagcttgtcatcattggtcttgaaggcacgggattgaggtaagtggaaggttaaccactgatagagcaaagatgcacaacaagaaatggttccccggccagcctgngtacggtcatgaatagaatggtaggtatcggcaagtagagtgtgtacggtgttctttgtaaaaagatttaatggattgatatcgatga

SEQ ID NO: 154067 - DNA, 422 bp, Glycine max
  unsure (1)..(422): unsure at all n locations
aaacataacaagactttctgtgattagtttaaagatacaatctctgtagatgaaaatgctttagaaaatttaagaaagctagcatatgggcctaaaagaaatgttataacttggcaaggatacaacataaacaagtattcattttacacaaaagcacaagaagacataagtacaatgcataacagcggggtcaccctaagggctgaatctcaacacttcgtaagtgtgcatgacgccaatccctgtgtagattccatcccttactttgnggttcattgatgaaattgggagcttaactatgtgaaatttactggttgtgttntcaaatgtaaatgggttaacagcaacaccggtgtgcgcatcgatgatatatgaattacgttcgtagacctaaagaaacttggtaccacaatgaccctttc

SEQ ID NO: 154068 - DNA, 503 bp, Glycine max
  unsure (1)..(503): unsure at all n locations
tcgaccggatctctnagtcacctgaggctgcagcttattacatagaccgctcttgcttgatcttctctatgcttaaaaatagaactttacgcattggctaaagatcaagaggagttattgggttaaaaccataaacaactccaaaaggagaactattagtagtgctatgaacagctctattgtaagcaaactcaacatggggtaaacaagcttcccaagtctttaagttcttcctcaaaactgtgctaagcaaagttcccaatgtcctattaacaacttccgttcgcccattggtttgtgggtgacaagtggttgaaaataacaatttagtgcccaactagccccacaaagtcctccaaaaatggcttaggaacttatagtccctatcactaacaatgctccttggcaaaccatggagtctcacaatctcctttgaaaacacatcagccacatacgaagcatcatctactcttctacatggaatataatgagccactttacaa

SEQ ID NO: 154069 - DNA, 376 bp, Glycine max
cgagcaatttcttttcttgatgataatggtgacttgtacttactctaaggctctagctgccccaagtgagattcgaatacgagaattccatgagagtcttgttttgaagtcatcatctgagtggagtgcatcatacaatgattactgtagtactcatagattagaagccttttgatcatgctctgaacaatatccaacaagctcaacaacatttgcatgccgtattctgtcaatattatttatcaattcaataaattcatcatccttctggtgtgcagaggctctcttgcccaacttgtctgcataacaaataccatcttctataactaaagctaccaaatatctatatattcttcataatcaaacttctgatgtg

SEQ ID NO: 154070 - DNA, 449 bp, Glycine max
  unsure (1)..(449): unsure at all n locations
tgcaagctatangaaaacccttcgcattgtagccttttaatttctcgcagaaacccaaaactgtctcggtaaaattatgatctcggtttcgttaaccgttggattntcatgagatttggatatgttgttagacgttaaagttcgcacgcttacaccgttgggatttgtgagataatatttgtggagggagaaaaaggaatctcatgaagataatacaagtggaggtttcaatctcttctccgtctctctgacgtntgagaattctatcggaacagtcggaggaataattgaaggaatctcagggaactgctagagatgctactaattaatatggattgatgaaatacaagtaggaacaatttagagagagatattgattntgtattctctctttttcttggctttttttagggttttatatataattcacaacattaatatcataattg

SEQ ID NO: 154071 - DNA, 395 bp, Glycine max
tgcagctgcagcttgaggaaacatatgccgtggatattcttgtgtcgctacgtgccctacacgggctagcgagggcgatgctcacggatgcgctattcaatgaagaaagatgcgcggagtctccaccaacgtttattgttgaaaacgtcatacaaaccgtaggacacctggcaaaatgaaaattctaagtttgagagtcgtatatacgtatgatgaatgtataacacctctcacgtttgtcttaaatgacaacagcctattttttagaattgtggaattggcgttctcataactttattctttatatttattgaggtcgacagaagcggggctttttgctctacgtaccttccttgggagaggaaatcgtacctacgtagttcttccttatgcat

SEQ ID NO: 154072 - DNA, 475 bp, Glycine max
  unsure (1)..(475): unsure at all n locations
gaaactcagcttaagaattacgatatcttaatatattntcatataggagaaattggatttggttcatgacaaaagcaattcaaacaattcttgtgtaagtgccaactggtacaatcaatcaataatcaggataataaaatgaattcaacctaacttcatcagattttgatattattttagtacatcttaaactttcgattgacaatgtgttgatgcgtatagacattgtgctcatacaagcattactcaagcaatcctgtcttattctcctttntattatttttttgaaggcattctcctttctattattgaaaattgcaaaattgtttagaacagacacaacctctgctnttctttttcttttanatagtcatgggaccaagccatttctatgttgtgtcctgctatgttggaactcggaacccaaaacatacataaatttgaatcagcatgaggacacatcagacatgaaatc

SEQ ID NO: 154073 - DNA, 319 bp, Glycine max
  unsure (1)..(319): unsure at all n locations
agcttataactgtgggtccgcatgcataccatatcaatgtaaagagnngctaaatggcacctggaataaaagaacatcaacatttatcctggtaaaccattatttatagaaaataagaggatttcattcaatgtcgttaagcaaaccatagtgacaaatacgtggaagtatcacctattgaagaatcacaacttgaaataaaaatttcaactggctttggatttattgggggtatggtttgtccataaagaaaactaatacgaattatgccccggctcatacgattattagccctaaaaaagccattttgcgatctccc

SEQ ID NO: 154074 - DNA, 447 bp, Glycine max
  unsure (1)..(447): unsure at all n locations
acagggcaaaggcagaaaactctgcccaaaaacacaaaccactatcacagcttttctcacttaaataccccagtaacattctcttcgttccaattcgttaaccgttggatcgactcgaatattttactggaagtctctagcacataaatctacattatgaccgttgggatctgctagaaaacgtccagaaccaaatctgtactactctttccacaaccagcaaatacacaacactttctgcacaaagccaaaattctgctgcacctatttgacaacaaaattctgcataaagtgcagattttcgaaatcacactttccctcatccaattttgcccaaattgaatcctacaagtcccaaatcatgtatcaatcatgtctaaaccaaggacaagcttcagaccaaagcaattcanaatctatgtatctaaaacccctcaatntaatgga

SEQ ID NO: 154075 - DNA, 277 bp, Glycine max
  unsure (1)..(277): unsure at all n locations
agcttgtaatcnattacacacatactggagatcttatttttattataggtncttcagaacacattctcaacagncacatctttttgtgtggttcttgaatgagtatcatatgcctattaatatgtgacttgagacacgaatatgataagagttttcaaaacaaaaaggtcttatcctcttatatagagaaatcgttttatcctcttacaaattccttgggccaattacctgtgattcatcaagaatatttgaatgctcaaattgttcatctatcttt

SEQ ID NO: 154076 - DNA, 515 bp, Glycine max
  unsure (1)..(515): unsure at all n locations
ctcaagccttatcaattgtcattattgagttgattaacttaattgccatgtttgtgttgcttggatgattntcacgaatgtcttgaccctgtggatctcttcatgttagatgttacccattccttgatgttcattgagaaatatgtaaatgttttgtctgtctctctttgatatccttggattttgttctttatttcattttgcccaggagtacaaaaggctaagtatggggggttttgatgtgtcattattttctcctatttcttaaccctttntgcaccattttaaatactgattagtcttaattgtcaaatttatgagacagttntattatttgggcccattaagctaatttgatgtttttaatctaatttcaggaattaatgaagcattgggcttggacttgaagagggcagactaatttattctacanaattagatcttatcttatcttatcttatctagatattatttagaattgatatcatctagatattatttcatctagatcttat

SEQ ID NO: 154077 - DNA, 375 bp, Glycine max
atcgaacgcagcatgcgagctacctcctgagatgagaagcttaacttatctctcaccccttataatagcttggctcacccccatgacaaaatacatgataatacaaaataagtccctactacatagactactcaaaacgcctgcgacaacagagctaaaaccctatactaatagaatggccacaatacaacgcctaaatgaaggaaaaaacctatattaatatttacaaagataaacgggctcatactaagcccatgggctcagaatctaccctaaggctcatgagaaccctagggcctatccttggatctctggcccaatctacttggagtcttctatccaatgcccttgcggggtacgattgaagcattcctt

SEQ ID NO: 154078 - DNA, 502 bp, Glycine max
  unsure (1)..(502): unsure at all n locations
ctaagctntgtctntgacgtgtanttgatggaaccggggaactatacttttttntttgggttncttgacgtccaaacatgagatatggccaccctccattgtctcacgccactggcccacccacgcaaaanaatcccaaacatgggtacttgaacatggaaaaagggtcgatttcctattttttaggattttcaggctttgtttttacgtgttagttgacggaaccggggaacgagaactattttttttgggttctttgacgtccaaacatgagaaatggccgccctccattgtctcacgccactggcacacccacgcaaaanaatcccaaacatgggtacttgaacatgaaaaaggctcgatttcctattttnttggatnttcaggctttgtttttacgtgttagttgatggaaccagnggaacgggactatttntttgggttctttgacgtccaaacatgagaaatggccgcctccattgtctacaccactggacaccca

SEQ ID NO: 154079 - DNA, 426 bp, Glycine max
  unsure (1)..(426): unsure at all n locations
tgcagcatgctagcttgtgttagataaagtattctatcttactctgtgacactcgcncacacactcattctgaagattgaaatattggttttatggataaataaaacaagcattaagtggacgggttcgactcctgttatcaggagctgctcctttgcctaagcatgtggaggagattttgagggtcacattttggagctactatgtcacaaggatatgggatggtatctgcatctttagctaaaaagtgctcgtcgtattgtttatgtcatttttatgacagctcttcaataataaatcttaattctgttaatctgttgtagcatgattctggcattccttgatttgaatctactctttttgtacttaaatgcactctatagaagtattagtctcatgctaatcataattctaatccacttgctt

SEQ ID NO: 154080 - DNA, 451 bp, Glycine max
  unsure (1)..(451): unsure at all n locations
tctagtggttanaanatcaaaaccttgctatctgtatgcattttgattntgacaaataacaagggctatactgcacaatcaagatatattatgattaggctgaacctatacttttgaccatatgcatgctcattcttaattatcctaataagtgcaattgtattcaaaatctataataatgagggaaattataagcaaaatgaaacttggcttatgttaatatgatatgacatgcttaaaaactacaaactaatcaatagaataaaaaaggttaaattagttnttggtcttttaatttattttttacgttcgatttggtcctctattttttttcaggtttaatttgatcttctaattnttaaaatcagttcaatttggtctcccatctaaattaatttgagtgattttgctgtctaaatatggtcctattgtctaaatgagcgttttgtga

SEQ ID NO: 154081 - DNA, 379 bp, Glycine max
tatgatcaaagtgagcccacaacagacgcaacatctgatcatcatactttgataaacgccaatataactatggcaaatgaatagggtgagaatgatggacaagcccatgctgagactgccatacctctattgccaagtttcccacccacccaacaatgtcatttctcaacctataaccaaccttctccttcccaccgggcagttatccacaaatgacatccctaagacaaccacacaagtctgtctaccgcacttccagtgacgaacctcctctttagcacaatccagatacaccaaccaagaaatgatatttgccgcaacaaagctctgataatccaccccatatccaccgagctatactgcctagcgtccatatcta

SEQ ID NO: 154082 - DNA, 359 bp, Glycine max
gctccttcaactgcacaaggctcttaatatttttagattttctcttgttgaaccttcacccagcgaagacactgaaaaaaaaacttatcttctcctttttggaaaaagtatgacaagctgggggcaagtaaattttcttcccattagaccttggatgcagctgtgatcgtgtccccatctcagctagatcttgacgggtattcaagccatccttcgtcttgccttgaatgttaaagagtgtcccaatgacattgtctcatactttttttttcatatgcataacatcaagacaatgtctaatgtctacattagaccagtacttgagatcaaaaaaatggaccttcttcttatatgtgtcg

SEQ ID NO: 154083 - DNA, 492 bp, Glycine max
  unsure (1)..(492): unsure at all n locations
ttctgtntctactattccaataatttcctagtgtcttttgttgtttctgaaataagtcttactatgacgttgatgcaatgcttttttatggtcatataaagatggtcatactcgtacattatagtcaagatttttaaaacgagagttgtcaccaaattggtaaagacatggtttatggtttaatgattggataagtaatttaacccgtggtaatttgatatatatttttntagtgatattctntttccaacactctttataattgtctgaaattaatttaaaattcttattgagtgtcacttatagattatgagaaattntttttttaataagaaatgaaacctatcacaatcggtgatttaataaactttcactaatagtcaagaagattcagaaanaatgtcgncacatttttcttatcttgaaattacataatatatggagtgataataaataatatctcatgtgctcgcatataaaatttgaatataa

SEQ ID NO: 154084 - DNA, 448 bp, Glycine max
  unsure (1)..(448): unsure at all n locations
ttaagtcacctgcgggcatgcagcttgcgaaatcaatggaatcctttattctctttaacacaagtcgctcaattctgctcttagaaatgtgacctatgcgcttatgccataatgctcctgagtttgtattatcaattctacgcttagtaccatgcaataggattcaccataagaagctacagtatcaagtcaatatagattatcattaaccaagagtgaaccagttccaacaatatttgaattaaaagacaacctaanaacacattggttccaaatgaccacaaataacccaatttgtccaaataagaaactgataccaaattccgtctaaatgacggtacaacaaaagtgtctttcacatccaaataaaaactagtacatagaaataatctaaagtgctctatagcttccgcttccaccgatttaccatctccaacatagatccatc

SEQ ID NO: 154085 - DNA, 346 bp, Glycine max
  unsure (1)..(346): unsure at all n locations
gaaaaaggatgccccacattatttccatgacacaaatgccaaaatgatgatttggaaactttatgcaaaactggtcatgcatgcacctatgtggacactccagtgtcaaaattttatggtcatgtgatgctatggctcacgattcatttcctctatgttagtcaacccaatgttgccaaaatatgttcttttatccatttgggcattcatcccagtccatttngggcgtccggggaaatttcacagcgttcacccttcgggtgtacacacatcttttcaaaaaccagctatgatcggcgaatttcccagagaagaagtggaagtcatcttttctcagaagcatgtc

SEQ ID NO: 154086 - DNA, 345 bp, Glycine max
acgccatgtctcggagataatcccttgattattatttttcaggggagacaacggattggctacaaatttctgttatttgtacctattcgatactacacgctaatttaagagccaaagcctgttcaacatagtataaaacttcttgggatataggagctgaaacttcctttcacatatttcaatattgggggttaaccctgcatgataaatggtttatgacaggcttcgaactttcttaatgcttgcacattggcctttgtggtagaccttggtaccaccttcgcttttgatatttgtctcactgtcacataaaaaaatatatgacagcgagagtgagcctgattt

SEQ ID NO: 154087 - DNA, 379 bp, Glycine max
  unsure (1)..(379): unsure at all n locations
tctattattgaactattttntaactatatatctatttatattcgtgtgcatccttttactatttaaataaagattnttacagtggtcgatcatatccatacattggatttggattaaatatacttatatggtgataattattattacacattcaatatacgaaaatcaattattattgcgtatccaattgggtggtgaaagtaatgacgcggctgttatcaaacgggaaaaaatattttacgaaatctgaaaatttacaaaagaagagaaaaatgaaaacactcatatcaaacttcgtgcatatcggcctctcttttctcttttactatagcatttntaatttcacgatgaataaaaacagaagcaatgtgagtattta

SEQ ID NO: 154088 - DNA, 503 bp, Glycine max
  unsure (1)..(503): unsure at all n locations
cttgagtcacctgcggcatgcaagcttcctcggaaaaacgcttcccagccttttttatccgttggatcttctcgaaatntggtctgcaacttcacaagacattnttccatgatcgtaccgttgggatcttcaagaacttgtctcgagtgtgctagaaccctcttaatgaagcttctggaggaagcctcttaatgaagcttctagagaaagctacatgaagctgcctcggtaaaaactctgcccagctttcgttaaccattggatcttcttgaaattttctgtgtaacttcacaagacaattttccatgatctgaccgttgggatctgtgagaagatgtctggagtgtgctagaagcttccattcccgagagcatttgttatttaagcatttcagcctttgctttcgtgtagcttaggaaaaacgtcatttcttcttctttctttcttccanagtcatttctaaagttccaagaacattctccatcacccacatccaccattag

SEQ ID NO: 154089 - DNA, 254 bp, Glycine max
ttgaacatcctactaggaccaccgagaataccgtggcaagcgattaaggtgaagatgatggagaaacccctgctgggactgccattcctgttctgacaaggatgccaccacatatactatgtatctactcaagcggataacaaacatgtctctctctcaccgtccaactactctcacctgctatgcctcaatcaaccacgccgtacgttttccctactttccctgtcgaacaatgactatcacactctccgcta

SEQ ID NO: 154090 - DNA, 470 bp, Glycine max
  unsure (1)..(470): unsure at all n locations
ctgcagctttaagctcctgtgattgacctatatctttttctgtgccaaccccaatatctccaagctctggcactcactgatatcagcaggtattggccctgagagagcatttatacctgaccttataactntaagctgtttcaactttcctattgatgatggaattcttccagtcaaattattgctatatatgaccagttcctctagagataccaaattcccaagctccgctggcacttcaccatacatgtaattttcacacaggtaaagctttctaagtgttgtgattttccaaattgggttcagaaggggtccatgaagcctatttggcaaaggtccataacctccaaaccaccacagtcaacataaccatcatgaatggggccagagatgaaattttttgacaaattcaactcaataagctctggaagaatacagatggcaggagccatagtaccagacagattgag

SEQ ID NO: 154091 - DNA, 478 bp, Glycine max
  unsure (1)..(478): unsure at all n locations
agctcggcgtgatgttnttgaagggcatctttctttctctngcagtagtgtcgtcctgtagagtattccactctagcttgtgctcctctcctcataaaatagttgaccggtctatcgtgcgcaaccataaccagagccgttatgggcatatttcgggcatctttgaaaanttgatttactacatttgacaaattcgttgtcatatggtcatatctgcatccaccctgatcatgtgtcaagctccatttttctttggaaatgccttcaatccaacattgtatcttgtccctaatatgcttaaattttccactcttcattcaaattagtgcaaacaggttttgtaccctacagaattgtgtaaaaaattgacaatttggtgacattttttgaccaataaatccatataaaaaaaacaatagaaaatctagccaatgtaataagggtctggtttaattatgcattctcgaatttgtggttg

SEQ ID NO: 154092 - DNA, 432 bp, Glycine max
ctgccatatgaaataaacacatagtctaactcttattctacacataagaattaacaagaaacataaaagcacacaatgtaacataaggaaaagaaaggtaaggttagaaatcccgagttgcttcccagtaagcgcttctttaatgtcactagcttgacataagaaaccttcatgggtcttggaggtggatgatggtggtcaatctctcaatattgccaccattgtagatcttcaacctttggccattcataatccagctctgctctgggtcagtagatgaaggatccatcaattcaatagcttcatagggcttcacatatttgattgtgaaggggctagaccacttggacttaagtcttttaggaaaaagaattagtcgggaattgaacaacaacacttgttgtccaagctggaagtcctctttagtagttt

SEQ ID NO: 154093 - DNA, 430 bp, Glycine max
  unsure (1)..(430): unsure at all n locations
agcttatgctgcanacatctacaagagaccttctcatttcatctgcaaaatcaaccacagcagaataattatgacctctccaacaacagatacaaccctggatggaggaatcaccctaatcttagatggtctagccctcaacaacaacaacagcagcctgctccttacttccaaaatgctgctggcccaagcagaccatacattgctccattaatccaacaacaacaacagccccagaaacagccaacagttgaggctcctccacaaccttccctcgaagaactcgtgaggcaaatgacgctgcataacatgcagtttcaacaagagaccagagcctccattcagagcttaaccaatcagatgggacaattcgctacacaattaaatcaacaacagtcccaaaattctgacaagctgccttntcaagctg

SEQ ID NO: 154094 - DNA, 485 bp, Glycine max
  unsure (1)..(485): unsure at all n locations
ctaagctntctaagaagcttctntgagaagctagattcttatctatctatacttctctctattaactaaattaacctccttgaaaataattacgaataaaaataacgcaacaaatataatcaaacatcaaacataattactaataatatgtagatatatatatcagggtgttacagacacatgatttctaaaagaggaattgaggtggataaatcaaaactagatgttattgataaacttccacctccagttaatgtgaaaggaatacgaatttttttaggtcatgctggattttatcagcgattcattaaagacttctccaaaattgctaaacccctaagtaatttgctgaacaaggatgttgtgtttgtgtttaatgaagaatgtttagaagcctntaacactctcaaagccaagttggtatctgctcttgtgattacaacaccagactgnngacaagagttnaatngatgtgtgatgcatgt

SEQ ID NO: 154095 - DNA, 313 bp, Glycine max
tggccactcttcttctgtgttgaccattgttggttgagggcatcaatttgactctcctgctgaactcattccaatgtgccttgctggagtgtcctaacatggcgctcttccagcttcatcctaacacgtgggcaatggagagggcctttgaagtcttgtgtcctttttttaacatttgacccaccctgcctgtgttcctttcttcttccagaagaagctgatagagaagatataatgtgtggcacttaataatgtatctaagaagaagtctatattgaatcccatgtgtttacaaggttcatgatatgtcttc

SEQ ID NO: 154096 - DNA, 477 bp, Glycine max
  unsure (1)..(477): unsure at all n locations
catcctcttagtcttggaccttatcatacaacctcattttctatgtatggatcattanactgggggcacctctatcaatagacctcatggccttaccataagtgttaggatcatcttcaagtagaaaagaataaaattcataatcaaaattcttaactttgttagatctttttctcctcccaggttcaaaaataatgtccttattagcattactacaagatgataaattaaaacaataagtatcacaaataggtgtagacaatttattttttaaaggaaaaatacttttaaagaaagtggcatctctagagtccataatagtatcattagaaanttcgaacacatatgaattaacaaccaagaatctataagtagtactatgaaaagaatatccaacaaanacacaatcaatgaattttggtccaattntcttttcttattaatagggatgttaacctttgaaagacactcccacac

SEQ ID NO: 154097 - DNA, 350 bp, Glycine max
ttctaaaagcccaagtaatggtaatataactgtaagtataaaatacaagtgtgtgctgctatttaacaaaaagataagcttactgtggataggcatgttctagagctggaataaaaagaaaaagtttgatctatggatgaatgctctcttagaaccaaagcttttgcatcccagaaaaaccatgaattgattgcagcccagcctctgtacaagcctagaaaagttctttggattcagtctgtgtgttctcgactatacgccatgagatgaattgcaaagattgagacttgagttagctgttgatcgtgaataagcctatacacttgtgtttgattgaaacagtgactatg

SEQ ID NO: 154098 - DNA, 403 bp, Glycine max
  unsure (1)..(403): unsure at all n locations
ccctcttcttctggaggggtgagcatctgcagccctggaacctatgattgaggagccactaataccagtagcagcagcagcagcaaaggaggagactactcctgaggagacccaaccatctacaccagttacggagccagagcagcctatccaggattcatcaatagctctagcactggatttgaatgaagaccagccacaggaggagcaggacgtttaaatctttgcattctgaacactctagtatattntcagttattntataatttatgtcatttaaatttcagcttttatgtttcagttctttaaatttcagcatttaaatttcagtagtgtagttggttgtttgcttgtacaaaaagcttgattgaacagtgaattggttgaactttgtatgcagtgg

SEQ ID NO: 154099 - DNA, 461 bp, Glycine max
  unsure (1)..(461): unsure at all n locations
agtcacctgcagctgcagcttaaatatcttggatagatattgaatactctttgtcnngttccataagcncctaagagaatcgatgagtgagataaaagttcatgatacgctttcctaatagactcaaggtcataaaaaattacctcattgtcctagtatgattcggatccattagaagttgtgtctgctatcaggcatatgtttgtttcttcatcgtcttcatcaaacgaggtgtcatccaggtcttcccacatgcacataagcctttagttttctatagtcttaaggaatctcttcttatcttanaatttctccagatgaggacattctgactagaagtggtcaagctttttgcactcatagctgactatggagctttcgtctatccttcttgtcccggggcattcttcttgaagagcttctccacttagacacactattgattctcaatatcttgcgga

SEQ ID NO: 154100 - DNA, 450 bp, Glycine max
  unsure (1)..(450): unsure at all n locations
aaaactaagcttctcgctgcaaaatacttcttagtgggtttttgatttgcttttgtggngcncgacatnggaagtgcggtagacagactttgtggtagatttagggatggcctttgtggataactgggtggtgggtaaggaggtggtttgttattgactgagtaatgacattgttgggtttggtgggaaacttggccgtataggaatggcagtcacagcatgggtttctccctcatcctcaccctctttatttgccccagttttctaagtcgtcctagtaggatgatcaaatttgcctcttttcggacccacatcgatcctttcactggcgaagaccaaatccgcaaagctttgagggtgcgtagcccaccatcttttcatagtagagtatcgataatgtgtctaccatcacgatcatcgtctccttttccattcattggggtaccacct

SEQ ID NO: 154101 - DNA, 472 bp, Glycine max
  unsure (1)..(472): unsure at all n locations
agcttttgcgtggtacattctaatgtttactctatctctgnnatccgntcttccagtcttgcttcaagcagttcatgcaactttctctccaattcaattggaggaactccaaatgatacatcataatttgctctttgaggttccattattatttcaccaaaacttgaactatggctttttgaactagaatcatcaagagctacctgcaaattcctgttttcagcaattctggaatataactaataactgataagtgaagtaaaaattaacacaagtgtaatcaaataattttacttacaacctgcataaaagggtcagcttaaaatcaatagcatgcaaaaaagaaatgcagcatatagccgcaaaaatagtataaagttcataattctagaagcagtatttggtagtataaggacttttcagtgaagcttcatctagatgttgactntcaacagattgagagactattctc

SEQ ID NO: 154102 - DNA, 461 bp, Glycine max
  unsure (1)..(461): unsure at all n locations
cgtagatcctccttcgtcagtggaggagctcctcttctctcttataagtaataacgccttttccccttctttcttctcttcaaatcttattattntaaccacttgctcgtgattttttagatttgttttgggggtgttattttttttcttttcatttttacgtgttgaggcatgttgcatctcgttgctgtttaatcttttatataaatcagtggtagaaaagtgacgattacttcatggaatgtttgatttcaaattgttattctattacctcaattggtttgcccgtcaagggataagtgttataccgtacgtgttaagttataatagacatcctatgttacggngttctaattggtacgtgatngctaatattattaattttgtggaattaattataatatacatcaatcttcttagttgtttggctagggttgtgtgaaataaatgatggaagtgaa

SEQ ID NO: 154103 - DNA, 412 bp, Glycine max
gcttgaaagtgtgttgtcaccttcttttaagtttatctgttggcttagcgagcatccgctaagcgcaacactcatgggctaaatgcgaggaagactctggaagaagatgggctgtacaggttcgttaagtgcaccgcttcatctcactaagcgcaccgcttcagtccatccgctaagcgagaaaggcacgcgctaagccaaaattcactaatgtgcgctaagcggtccataattgcactaagtgcacgagcacgaacaaggccacctatttaagccagaaatcagattttgtgaagggagtttgggctgggatttaaagctctgcatgtctagagattttagagagagaaaggtccaagttctagagagttttgagagattcttgtgtgtgaagatctgcagagactagagc

SEQ ID NO: 154104 - DNA, 407 bp, Glycine max
  unsure (1)..(407): unsure at all n locations
tatcctgctatcttcccctcaggtcttaccttgacttgcgactcttaaaatcatttttagacatgccttttactgccactttttaacttgcatttaggtataatatgggtagtttaaattggatctgattgactgactctgatatataaatacatgtgatgcttgatcatctattatcacataataaacattacgtgtcttatgatcacggcgcatctgaaatgaatccaaatagaaaataggcttanataactcttagcttatcgaaatatacctaacctaatttttgtcttaagtttttgataaaaacaatttattgttatgagcttttgatatatcaaaangtttatcttcgatctctatcgtcaattaagtaatgatgtgacatcatctcaacgatatatata

SEQ ID NO: 154105 - DNA, 487 bp, Glycine max
  unsure (1)..(487): unsure at all n locations
cggttgtttaaatgaatcaagctcaaactatacaagctcgatttttatagttccttaataactcatttgctcatttataaatgtgcgagtaagagacactacaacaaatctgttaaataatggaggttattttttcgtttagtggaggtttttaccgcaaaataaattacggaggttttcaaaaacctccgtagttatattcgccacaagcaattatcggcggttttcgaaaacctcttgtatcgagaatattttgcagaggttgtttgtagaggttttaaacctacgctaactgtggagattntttaaaggaggttttaaacatacgctaactatggtaggttattgtaagaacgtttttgtangacgttttaaacctatgctanatgcgaatgtctattaaaagaagtttcaaactatactatggatgggttttttgcacatcatgcttacaatagatgtttaccattgatttctaattctctta

SEQ ID NO: 154106 - DNA, 475 bp, Glycine max
agcttgtatggtaagataagagcaacacacacagtcttttatatgcagcaagtattaaaaaaaattgtaagtataaaataaaagtgtgtgtgcggctaattaagaaaaagaaaagctaagtgcggaaaagcaagtaatagagctggaataaaaagaaaaaggttggtctaaggatgaatgctctcctagaatctatgcttttacatcctagaaaaaccatgaattgtttgcagcccagccttgttacaagcctagaaaagaccttcggattcaatttgtgtgttcttgactgtatggcatgagatgaattgcaaagattaagacttgtgttagttgttgattgttgaataagcctaaacacttatgcttgagtgaaacaatgactgtgagggcttggttaatgatcctttcttgatatctgtcattcttactagcttaattcagctgtattccttaataatcatgttcacatctt

SEQ ID NO: 154107 - DNA, 312 bp, Glycine max
  unsure (1)..(312): unsure at all n locations
agaagcgaaaatgagaatggggtaaacttggagcatactttcacctcaaacaagtctatatcatcaatctaaacttgctcaaactggatatacgcctaanaatgcaccgaatcaaaatttgactcctcaacacccaattattaccctagaaatggttcttgccttcactttggtcnnttgnnacctctcttgcacagcccaagctttctcataagtcccccnngccctgccaactnggaataaactcatttaacctccatttaccactgaatccagaattggccnttccaaaccctcaaagcttacactttt

SEQ ID NO: 154108 - DNA, 473 bp, Glycine max
agcttgttgaaattgccatgtgtggatgagttaaacatacccattctgttttaggggtatcgtgatgatgtttgtgatgtttctatgctgaaattgcttatggaaactgttagagatgaagggtagagttaacctacggttagaaagtgagaatgtggtgttgtgagtggaaaaagagtgaggctttgagagttggaaggttaaatctggattctgtggtaaatggaggttaaagtgagttaatcttagcttgaaatgccatttacaacatgtgagaaaggttaggctgtgctatagagaaatacaaatgaccaaagtgaaccaagagccatttatatggcaaaattgggtgttgaggagtcaaattttgattcgtgtggaatttacgtgtatattcacgttgagcaagcttagatagatgttatggactcgtgtaatgtagagttcgcttcacattacctcactctaacttc

SEQ ID NO: 154109 - DNA, 429 bp, Glycine max
  unsure (1)..(429): unsure at all n locations
aagctggtgcaaatcaaaactccgatatcttatgggtggaatggatgaatgcatgaaggaatgcatataacacagatgcaatctatgaatgcggcggtccggcgaattcgttctcttcttagacacaacgtctaggggtagcanagtgccccaacgtacgtttttaagaaggcgacacagaccctccgttggtttgtttacacaagggatcaagacagaacccatatgcgatgcctatgcanaagacacaatgcgggaatgtacacagtatgacaatattcattgaacataagcaaaagggtatatgatacttatgcatggcacgtgtgaaaatggcacgcaacgtgtttgctcgtgcncctatntaagggacctantagggagagaactaactaggcatttagtgataacccncaaggtagtcatatc

SEQ ID NO: 154110 - DNA, 389 bp, Glycine max
  unsure (1)..(389): unsure at all n locations
aattaattnttctaacttagaaactattcttcacacaaaccatgatgatgcatgatgcaatacatatatcaaatgtactaagatgcaacaaccaagataacaaccaatataaattccactcaagggagttgagcatgtaaaagccaaaacttcttcaagcttttccttgagcttcaaactttagcctttaggttgttcaacatgttgctcatgttgctccccctatctctaatatgatcataaaaaaggctcctcataatggaatcctcaaaatgaccacctaagaataactctactagctgtcattttcttacagctgacatctctatntacttcctctaaaaccttgtcaattgagtggaccccacttcaacagtcttctttgcagc

SEQ ID NO: 154111 - DNA, 487 bp, Glycine max
  unsure (1)..(487): unsure at all n locations
ttaagtcacctgcngcatgcaagctatattgataaatagctttataattttttggtttttatgcatgacatatttatacgaatataaaaatgaacacctttaatttggcatggaagccacgattgataatattgacttcacaacataaatggagcttaggctaacttatacatcaccataatgttaaagttgtattcattagcaatgttggcaactatcaactaattgccctttggctgcatatcatggtagcagtgtcagcaactatcaacattgattgccctttggcagctacatccctttctaaaacattattcaactacaatatgaagattntagagttttttgcaaccataattatggtcacatcggctacaaatgatcacgatttcccacaatgttaaagattgcaatngaaatgtgatatgtggctgtgatcacaagttaaatgcttcatgttgtgggatcaaagaaacaatagtaacat

SEQ ID NO: 154112 - DNA, 490 bp, Glycine max
  unsure (1)..(490): unsure at all n locations
actaagcttgcgggccaagtttcttatgccatacctagtgatctcctttgtcttatgtangcatgacacattntgatctgatagctcatctagtctaatcttatagagattactnttcctcttagtagaaaagagaaaaaagtatggacttgtcactattctgtacgatgcactcatccttgttaaaggaaacattatatncattgtcacataattgacttataactagtagattgtgttttaacctttcaacaaataaaacattattaataggatgatatggcggtatacctatcttacccactcttgtattagctctttttattccctccaaagttatggttccactagggatcgagtcaggcattggaacatacacctttctnctgtcatgcgccatgagcaaccactatctatgtaccatgataagtgtttccttctgttgtcaagacatctgcacatgaatatcttttcttnggacccaatcttt

SEQ ID NO: 154113 - DNA, 468 bp, Glycine max
agcttaaacattcaacttcgagcgtctcgatatattacgagtctcaatcaaacatccgagaaaaaagttattgtcgtttgaatttgctcagaggttcaacattcatttttgagcgtctcgatatatgacgggactcaatcagacatccgagtagaaagttattgtcgtttgaattagctcagagcttcaacattcaatttcgagcgtctcgatatgtgacgggactgaatcagacatccgagtacaaagttattgtcgtttgaattcgctcaaaggttcaacattcaatttcgagcgtctcgttatatcacgggactcaatcagacatccaggtataaagttattgccgtttgaattgcctcagaccttacacatttcaatttgagcgtctcgatatatgacgggactcaatcttacattccgagtaaaagttattggcgttggaatagctcagacttcaacatcaat

SEQ ID NO: 154114 - DNA, 460 bp, Glycine max
tagagccaattcaaacgacaataactttttattcttatgtctgattgagtcccgtcatatatcgagacgctcgaaattgaatgttgaatctctgaaccaatccaaacgacaataactttttactcggatgtctgattgagtcccgtaatataacgagacgctcaaaattgaatgttgaagcttagagccaattcaaacgacaataacttcttactcggatgtctgattgagtcccgtcatatatcgagacgctcgaaatttaatgttgaagctcttagccaattcaaacgacaataactttttactcgaatgtctgattgagtcctgtaatataacgagacgctcgaaattgaatgttgaagctctgagccaattcaaacgacaataactttttacacggatgtctgaatgagtcccgtcatatatcgagacgctcgaaattgaatgttgaatctctgag

SEQ ID NO: 154115 - DNA, 487 bp, Glycine max
  unsure (1)..(487): unsure at all n locations
ctcgacccgtgatccttaaagtcacgctgccgcatgcgagcttgcatcaagtggtgatcagagcacaccatcttcaagcnggtgctccttacacctccatgtaattntttctttaccgtctcttccattgttgtttcttcatttatttctccatgtatctactcacatgtcttgtgataaatgtttttaacatgattctttagagtatccaccgattaaaattgctatagaagctacatttgattctctatggttcagatttcttgttcttgttcttgaaccatgaatagtgttaagtttacgttcctttgagttttgtctcgttatatatttgtggctgaaacctaaaccataaaattcttacataaatattaaagtagaagaaaacctcaataatctagagtgactcgttcacctatcgtagttttgtcatagaactcatgtctagtcatgaaacttgtcacataagaagttcttatgttgtgct

SEQ ID NO: 154116 - DNA, 395 bp, Glycine max
  unsure (1)..(395): unsure at all n locations
acatgcctaactcattgagtgacattcgtatagatggatgcgtctgagtcttaatctatccatttgtacatcatgcatcatcatgtagagataggaagattgtntctaaagttagaaacttcttcaacacataaactctatattttaattgattcccaggctatccgaaatcgattacacaagtcttttaagaagctcgcagagatctctttgagaaactctatactttaaaataaaaagctaatcaattacttctttatgataattgattacattgaaaatttaatcgattataggcggctataattgctttctctataaatagtcaccttgtgttctgactttcatgcattcgagtgaatgagtttagactgagcttgtgcgactcacacatt

SEQ ID NO: 154117 - DNA, 396 bp, Glycine max
ggcaattgatgcgaggaaacgtttcgagaaagacgtccgactccttttggttattgttttattcaaagatgttcggattactttagtattattctgtgcccgatatgttgagagtgttattattattgggctttgtctatttaactgaggttatagcgtgcacaatcggttagatgctgctgtgacagtgacttaatgaggttgccacgcagatgatcggttgaaagtcattttgtcatttattaggcgagataaccgcttaaacgatcgggtgaagctcgtcggtatggaggaagttgaagccgaagtgaacgaactgaagatgaaagcccgcaaaatcacgaatgactcgatagtctcgaatgtgacaacttaccggatgaagaacgatgatcg

SEQ ID NO: 154118 - DNA, 409 bp, Glycine max
  unsure (1)..(409): unsure at all n locations
ttgttctatagcaaaaggatcacgaatttttgaggggtgttccttcgtgattctactcccaattcccaataatgtggaagaatgccaccattacatgtgccttcgtttctttggaaaaagcatcctcaggacgacgaagcttaggattangtgacattgtaatactttggtggtactttattgcaaaccaatgatgaaggtaagtttcatacgaaggtatagagttcccttcttggtaactagttccgcataaaactcttaattcaacatgacctgttggaaactttatattctcaaatgtttttgttgcaattgatccgggtcccatttcanaactcccagtttacaaaaatagctgtcttaatatgattnttaggctntcgatatagtgaatatgatgcactctgta

SEQ ID NO: 154119 - DNA, 418 bp, Glycine max
  unsure (1)..(418): unsure at all n locations
agcttgtgtgaagagatagacttgaaaagacttactaaaactttttcaatcgggtgaatagttcagctaaccgcacatcaatgtgctaagctcaacatcttcactgtaattgaaccttaatcagtgggctcagcgtggatgatgtgctaagcacaacttctcctctagaaaatttcatagttggagcgttaagcacaggatacgctaagcgccaatctcttactgttttttaattcttggaagtgcgctntacgcacttgttgcgctaagcctgaactactctctgtaagttgaagcttgattgcacgctaagccttacatctcaggctaaacgcattatgtataaaatgtattgtgtngcagaaagtgctaagcgcagcctgctgcgctaagcctcagatgttcactggaatatgaa

SEQ ID NO: 154120 - DNA, 392 bp, Glycine max
  unsure (1)..(392): unsure at all n locations
ngccacccagctcgcccaggcaagcattgtagttttctctatattcaacagccttctggaggaatcttctggagggcccaagtgggcctggttgctatttgcacccccatttttactaaatgcaccccccttctatttttttggtaattctttttccataacgttacgaaaatttacgaatttcgtaacgatatttattttccttccgcaaggttacgaatccttacggattatgtatttacccttttttagctttcaaagaagttacggaaacccacggattgcgcanaaacacctctnttcgactctcgccacattacggaatttcacggattgcgcaagcctgctttcttatgatttccgagacgtctcgggacttcatttattgtgca

SEQ ID NO: 154121 - DNA, 463 bp, Glycine max
  unsure (1)..(463): unsure at all n locations
ctgcaagctggggtcactattcacttgtgattgtcatatgtgtcaattcacttttagcaaatcaccaggatggtaccatgaagaaggacacaagcancattagatgctgataactaccacttcatcacgagatgttgattcgaattctgagaagagtgaacggtggagaaaagttttaacagaaagataacatcggctgatatcgttcacataagtctcctctctagtgtcacagttcaagcactgcttggacttgatcaatttctaagatgcctaaagcagattggtagaagtgcagccctgaatcacaaggtagacacttgctgatttggagtcaatgatgagatttttggtgtgtgacttaaaatcacaaatggcacaagcgagaaggctttaaagtggtgttgtcctaactgttttgagtcataataactgaattggttctggcacaagcctagctaga

SEQ ID NO: 154122 - DNA, 395 bp, Glycine max
cttctaagtttctggcgactaaccgtgatatttggctattctccttcattccttctcctttggcaaaagaattcgccaggacaaccggctgaattcttttgtggctctttctccttttcaaaagaataacggacaaccggctgaatctttgtgtctccttctccttgtaaagaattaaaatgcacaggctgaaatcttttgattttccccttcctaaacaaaagtgtcaaagaacaactgcctgaaattcttttgttctcattacaagtatccatgttaacagctgaatcttgctcaccattggaggacatctttgggacaagagaggacattactgggttgatgaaacacaatggacattcatggatcattctgggatgtcatctctaggttaa

SEQ ID NO: 154123 - DNA, 325 bp, Glycine max
ataaagagggagagaagtctaactttgaagtgtctctcataagactttcattcatcatagttacaacaagtgttacacatgcttctatttatagactagcgagcttccttgagaagctttcttaagaaaacttccttgagaagcttctttgagacagcttccttgagaagctagagtttagctacacacacgcatctaaaaaactaatcttaactccttgagaagctagagcttagctacacatacccctctaataactaagctcacctccttgagaagagaagctagagcttagctccacacccctataatagctaagctcacc

SEQ ID NO: 154124 - DNA, 490 bp, Glycine max
  unsure (1)..(490): unsure at all n locations
tatggaggtggctttagaaaganataccttacctttgatcagtctcagntaatcaatgactaatttattgttaatttaaaaactaataaagtggaagcagaaggattagaataatgtgaaatattggacttttaacatttagcatgccatcagtactattcactgactcttgtggttgtttgcaaaaatcgacaaaggagaataaaaattaattgcctcaatctgactctaaaggaatctgatatacccaatagcttctaataagacagacaccgtgtcaatctgcaaaagtaaaataaataaataaaattaccacacactacagtcatattcccaatcatctcttctcttttatgtaatgctaaacagagagcatatatttttcttttctctaaaaaattgtgcgaaagaaagacggcatgcntgggaaagatgaatcatatcaagaanataacgaagaatcaccatagtcagactacatgtaatatgt

SEQ ID NO: 154125 - DNA, 275 bp, Glycine max
aaattaacctcctatattaataattagataaaattatattccgaaaaacataaaataattcttatatatataatacattactaccttaattaaacattatagtattaaataattcatataaagcagacttataatataatatttctattaacaataaacttcattattattttaaatagacagagaaaactcttgagaatgcctccattattacaccactaggaatgacatcctctatccgtccataaaaaaattatcctaatatcccgatccaa

SEQ ID NO: 154126 - DNA, 329 bp, Glycine max
cctttgctaaaaaccgcttgtaggaattcggcatgtcttaaaaaaacttctgatgcctttggcatttgcgggtggtggaaatttttcaatgacttccaccactaaggtgggtacattgcacatgaattgctccttgaatgttgaattttttattccaggatgatgcaacttgagttactgatttatgttttgtgttttgtgctgaacaattattaaaaaacacatcaaaattcacttattggttgctataattgggaaaagtgacggcttcaaagaaacttgcaactaagagggccaggaaaaccattgcaagaaaaggatctatcatg

SEQ ID NO: 154127 - DNA, 246 bp, Glycine max
gggtacctggagatatgtcgcgggggtcaagagaccttgtggacgtcaggtggtgtgctattgtcccaaaccaagcttgaccaatcccgacccaacccgggcataatcagtcagtgagaacctgtgatgtacctaaacaggcgagctccttgccgtctacagattaaaggaacaaagaccacaaagcaaggaggcttgtgtggtggctagccaagtgtgaatctgtgtgatatattggatatgggc

SEQ ID NO: 154128 - DNA, 399 bp, Glycine max
  unsure (1)..(399): unsure at all n locations
ttggaaatgcgaaagctctactccttcattaggattaatacctgacatttcaaacaaacaaatcatacctaacaagacaattatagttgctggttgaatacctcacccactcaagtgtatcacacaattatggcttttctctaatgaaacactcttgccttttaccactctaattccccttgagttcttaggcaattcaagagattatggccacaacaaagaacaattcaccaatatgtgtaaggtaaggctagagagacaaggaaaaggttaaccaaaaaaaaggctaacaatgtttttaggcacaaatgaaggaaataaaattcagaatttaggaattcaagtaacaatccttcatgcaaccaatatattaccttaaagagatttttttntttaaaa

SEQ ID NO: 154129 - DNA, 483 bp, Glycine max
  unsure (1)..(483): unsure at all n locations
aagcttatgcgcacccttctntacgaacgttcacttgccaagacattcttatgacttataaaaatgcacccatatacaatcaaggcaccttccttacctatattattcacatgtacttccaaagtgtatttgttacctacatcacacacattatctttgctaaattcacatacatgcatactctaagcactttggctatcaaaaatngcatacgtgcacatcttggtatttctcatacctatacatacacaaacttcatgatgaatcttgactatctacacaataaggggctacatttcatgcttttttcaagagttgttactacctaaagccgcatgcaaattgaagtatatnttcttttgcttactaaaattgtattcaaattaaaaggtatgtctgtaatgtattttctttcataacatgcaacatatntatagattattgtgagacattttgactacaaaaaaatatatgttcatacat

SEQ ID NO: 154130 - DNA, 408 bp, Glycine max
tgcagctttgtcaacgcatgatactgttttctttctacaatgtaccgggaacttgaatgcagctcctctggataaaattgattttaaattaaagtgattttaaataattgattttgaaagtaaaattactaaaatagaccttaagtctttgaatacttatttgttattataatttactattttttatatacatataaataaattaaaattaaatagatatataaactcgtattcattgtaaaaaattaaaattaacataagtacacaaatgtatcgaaattaaaaagtataaataaggaacatatataaagtcaatcaaattcaataataaatataatattagttttttctcttgtactgtataatttcatctcgaatatagtctcgaacatgatccatttctggtgc

SEQ ID NO: 154131 - DNA, 445 bp, Glycine max
caactagcttatgtgaagagcactctccattgatgtgaattaatgttcaaggcactgggtatcgattaccacaacattgtaatcgattacaactttttgaaattaattggaacgttgtaaatcaatttgaaaactttttcgaaacaatcttgctactggtaatcgattaccacaatctggtaatcgcataccagagagtataaactctttggtaaacatgttttgagaaaaatcatgtgctactcaatttttgagaaaaacttttcatacttatcttgattaagccttctctagattcttgaatcttgagtcttgaatcttgagatcttgaaccttgatcttgatcatgactttaactttttttacagcttgaatcttctgattctatatgacccttgattgtcttgatacttgatgtctttgatgacttgactttgtctcactt

SEQ ID NO: 154132 - DNA, 387 bp, Glycine max
  unsure (1)..(387): unsure at all n locations
agcttgttcgtcgcattgctatattttttaatatgaatctctacatatacaagcagaataaatatcttatttaagccattttgttatcatcatttttgctacaaaccaatctaaggaaaaatgacatcatgactgatttgaaaatcaccttgtttcatttcataagattaccaacatggtacttccatgttcgaacatgatcattcagttcatgtcagttaccaacaccttttctgtcttgaagaggtaaaattaaagaaagagtagtgatacgcacttgaattatatctgccaccttttttctgtgacaaattnttggttcaagatactggagttcttctgtttagttttcctgaaatagaaagataacacctaaatctagggaac

SEQ ID NO: 154133 - DNA, 373 bp, Glycine max
  unsure (1)..(373): unsure at all n locations
aacagattacatacttgacatgcattaactgtgatgccatggtatgaagtgtggttaagagaacatttcagactactcattgattgcttcattagtgtacaaatctatatataatctcttgattgaatacaacaacaacaacaacgccttatcccactaggtggggtcggctacatggatcaacttcccgcataatgttctatcaagtatcatacttntatccaaaccattcatttcgagatcctttttgataacctctcttatagtcttgttgggtcttcctctgccgtcgaatggttgtctgctctccatttggtctactctcctcactacagagactaccggtcttttctttacatgctcaaaccaccta

SEQ ID NO: 154134 - DNA, 406 bp, Glycine max
agcttctttgagaaaacttccttgattagctagagcatagctacacacacccctctcataactaagctcaccttcttgagaagtttccttaagaagattcctaaagaagctagagcttagctacacatacctctctaatagctaagctctcctccttgagatgagaagctagaacttagctacacaccccctataatagctaagctcacccccatgacaaaaaacatgaaaatacaaaaaaaaagtccttactgcaaagactactcaaaatgccccgaaatacaaggctaaaaccctatactactagaatggccaaaatacaaggcccaaacgaaggaaaaacctattctaatatttacaaagataagtgggctcatacttagcccatgggctcgaaatctaccct

SEQ ID NO: 154135 - DNA, 456 bp, Glycine max
  unsure (1)..(456): unsure at all n locations
aaaactcagcttttgctctatggtcaaggaaaaagaatcatgatatcttatcatttgttatggcatcgtgcttggtgcaatntatggaagatgagaaatgaggattatgatgggccaaaatgacttcaacattctaagattatcttccttgggcttgatgtagaataggccatagatagtgctttgccctgttttcttgnggcttgatgttgcctatttcaaaaatgaataagttgcataaccaattggagaaagtcgagtctcttactcaagatctcgaagaanggcttgagtttctatttaggtgtttgataaagactagacttgcctttcttattccccttaaacactaacaagtacccttaaattactacactgtccctaanataccaacattatactaactgttgttcagcttcccaaaatttatataaaaaagaagatgtcataccctaa

SEQ ID NO: 154136 - DNA, 404 bp, Glycine max
  unsure (1)..(404): unsure at all n locations
atcttctcccctattatgctatttatggggaagaagtgaagaagaaaagggttcagccccttaggcacttctctctctttcgaatttgctgaggaaaattatttccgtgaagaaaatccaagccgaggtgcttccgtaacgtttccgtgagtaattacgcgaagattctcgaccgttcttcaaagattcatcgttcgttcttcgttttcttcaatcttcaacgggcaagtacctcaaaccaagcttttcaattcactctatgtacccgtggtggtccacattttgtttcatgtatttttattctcgttttcatttactttttataccccctttngacgtgcttaagccatttacttaagtcatttctcgcttaatctaaaaataaaataaatttccaccgatcg

SEQ ID NO: 154137 - DNA, 409 bp, Glycine max
  unsure (1)..(409): unsure at all n locations
ctttaccttctcttccattggtagttcttcatttttctccatgtatctcctcacatgtcttggtctaaatgttgntaacatgattctttagagtttccaccgattaaacttgctatagaagctagatttgattttctatggttcaaatttctcgttcttgttcttgaaccatgaattgtgttgagtttacgttcctttgagttttgtcttgttatttttgtggctgaaacctaaaccataaaattcttacaaaaatattaaagtagaagaaaacctcacaaatctagagtgacttgtcacctattgtagttntgcatagaagtcatgtctagtcatgaaacttgcacataagaattctatgttcgctgaatttatttcttgttctctgctactatttgtcatgagtgat

SEQ ID NO: 154138 - DNA, 403 bp, Glycine max
cattcttacctgaaccatttcgtccttattcttaataatgcaaaaatgaaagcagttgtagccgcaaagcttccctgactttgcatgcaacaaggtgaccgtgccgaccatggccatcaaagacaccacaaaaggccaccatcttcagacatgaaatcctacaaaaataaagatccaaaccaagagagccaacttccaaaattaactaaatctccattcattcaattagaacagtgcatcctcaacactacaagaagaaaatacttacttcccacacaatcatggcgtcctgattaataccctttcgaccctgctgtgtaaatatgcaagatgacctgctctttccattggtgaaaattctgattggcaaggatggtaattggtgcagagagacaacatgatc

SEQ ID NO: 154139 - DNA, 310 bp, Glycine max
ccatgatcaaaacataggcaataatgaagactttcccaaaccctcgcatttgttcagaccccaatccgatatttgtcttaaaagagtgaaaagcacgaagtcaacaaggaaagtcgtcatgggtgtgtttatgtcaccttggtgggatcgatgtgagtgccgttagaagaatcgtggttggtatagtcctcctcgtcgcacgaataaaggatgtcaccggaacccaaatcaaagtctgtggaaccaccgctgctgcgacccgaaggtaaagacgccatggccggagctcatactggaaggaggggtgttg

SEQ ID NO: 154140 - DNA, 406 bp, Glycine max
agcttgctatttagtgataattcttattgtggttgcacataactttcaaaggtttctagagatatcatcccctttgatatcaatcattgtggcggtagggactaccagtgacaacgtatcatcaaagagaaaaactctagatgaggtttcactgtcatcaagcaagtcgacgacttagcatgacctcagattcacctccacttcctatgttcccatggactcgggtgtagggcccttaataactcacagtgtgtgcaaaaagtgtaggtgtcgtgtgtgcatcaaatgaacaaatatttatcaatgcatgaattaaataaacaactaaacaaaatataaaagcatcaaaagggttacatgaatacaagaacataaaagaaagaaagggaaacaaacaaaagagaaa

SEQ ID NO: 154141 - DNA, 363 bp, Glycine max
  unsure (1)..(363): unsure at all n locations
aggtcagaccaataattatgagcagaggatagagtttcttggatntgaggtccaagtgtctcctgcgagctactgaagttgagtaaatttgtctccccatcttattcctctatcattgcttttaaacactctatttcatgaatactgagcataacagaatcacaatatgctttaacagttttgctaacaatcgctaacaaagtgataatagtcctaacaatactagtagttataactaacttctagattattcttttggaagtgtagagataacattcacactccaagctntactcataatcctttcaatgagcaggatgtgttgtgcttctcttgggcctactgctgcatcttacttctatc

SEQ ID NO: 154142 - DNA, 366 bp, Glycine max
gcctaatactcggtggaggctatgctcaatgcctttaaagtctgaccatgacctatttaacccctactatttgcctcaacccatacccaccgcttcacctcgatttgagaagtgcacattcatcaacaacttcctctttagtggacatgcaacaattccttctctttatggtcctccctccttgctgcacatccgattacattagttatcaacgaagtcctttgctataggcacactaacatgtatttctctctaactctcactcacattttttcaaaaaaaaattgctcgacctaaggtccctttcccccgaatcatatagctgagtcttacatgttgtgagcggccacaccaattccaacctat

SEQ ID NO: 154143 - DNA, 392 bp, Glycine max
  unsure (1)..(392): unsure at all n locations
tgctnttaagctntaaagtgggaatggagtagagtccatcacgaccaatagagccttgaagcaagatctcattggaaacctgagatttaacaacacaaaaatgtgagtgaaactcgaagtaaacttgattatttcttgcaaatttacttacacttgtgagattcttagtaatagagggcacatgtaaaagctgatcaagagatagagaaacattaattagaattatgaggagaaatgagataagaagaaccaatagactgaaagttcaaacattgaccatttccaatgaaaatntagtctggactcaagaccatcaaaaggggctagttgctggatattttgagattctcctgtaacatgaaaagatgttccaaagtcaggaatccaattat

SEQ ID NO: 154144 - DNA, 394 bp, Glycine max
tggctctagtggcatgtagacatagacgatttcctgtgctggttcccttcacagcatttaccacatacaccctctggagcttcaaattctggcaaaccagctaccatgcccttcatctgcaactttctcatgctgttgaagtacaagtgtcccaatcttttatgccatttccacacactttcattgacttgagcagctacgcatttctgctcaaatgagctcacaccaaccttgaaggtcctgttctttgatacaagtactttcaagacacatttgccatttgtatcagcaacttccatatgctcaccttgcatatgcattgagaggcccttcttcaataattgccgcaagctaaacaagatgcgttccatattatgaacataacagacatcac

SEQ ID NO: 154145 - DNA, 380 bp, Glycine max
  unsure (1)..(380): unsure at all n locations
cctattctttccttcctcatcattatatatgctcgatcaatgtttacttttatgttgcctttattctctaataaagtacttttttaaaaaaaataacttaattttgattcatttttttctgtcctttggagtatatgcataacaaaaagaaaaagaaaaagttccttgtcatcaagaggcagagcaagagctgtggcaagaagaaagtagtcactgaatactccaatttcgagtgttttcttcgcattcaggattttatgcaaaatagatatgaactgcgcttcctccgctggaatactcaacanataacccctgctaacatatatataaatgataaacccttcacaacaataatttttaatatactatatcaataaaat

SEQ ID NO: 154146 - DNA, 407 bp, Glycine max
  unsure (1)..(407): unsure at all n locations
agcttgcattaacttctcattccatacttaatatacaatttcaaaatcccatctcattttgaattgtacaccatatatcaaaaccaaaataatctaaagtagtacacaaaggccaaacttaatagttaagtcctcgttgacgcatgagtctattttaggaaaattgtatgtgtatgcctaagtttttattcatgatgaactcatttttagactcaaaattacccaaatccacccctattatacctagacatgaaactaccctacacctttcccacaaaccaataaaactcattttcctaattccaagagttgtagaaatctgatctttgcaaactatatattgaactcaagattttcaagtatggtgaattcattccaatggtcaaaatagaaccatatntactgaa

SEQ ID NO: 154147 - DNA, 236 bp, Glycine max
  unsure (1)..(236): unsure at all n locations
ataaaaggatgtcccacatntatttccatgacacacattcaacaataatgatttggaaatttaatgcaaaactggtcatgcatgcacccatgtggacactcaagcatcaagtttttatggtcatgtgacactagggctcacgatttcattttcctatttaagtcaacctagtgtttccaaaatatgctcatttatcaattcatgcattcatttgagttcattttgggtgttcggga

SEQ ID NO: 154148 - DNA, 205 bp, Glycine max
caccgtccacacctccagctaaaaaagaaaattccacgtatggctccgtgccaaagcatcagcattacaaacatgaccaatatgaacgaaggtaaccaaagtcccacattctcacaacagagtcatacccacaggataatatgacctgtgcagaagccaatatgaacacattactaaatcgaagtgttaatctgaatgcattact

SEQ ID NO: 154149 - DNA, 404 bp, Glycine max
  unsure (1)..(404): unsure at all n locations
tagctngactttaactatgatatgatctttattctcattatggtgggcttcgtttcatgttttaaatagtgagtcttaacatggattttaccaaatcatgatgagaaggttgtcaaatttttgcaatacattctctgactctcttttgggtgggtattattattgattgaaattcattgtaaactacaatttggtagttgctaataaatttcgactaataatagtgtctaaaagtgttagggcgtgttgctatatttatattgcactggttgtacttggttggtggttgaattaaggtgtacttcattaatttggaagtgaaaatggtatttgaaaattacagaaggttaaataaaaatctaatttacatacatcgacaatgttaatggagtcatactttgtta

SEQ ID NO: 154150 - DNA, 220 bp, Glycine max
tctgctctttcgaaatattggcttgcgtttaggtaaaaggagttgctatcactactcacatgagtgcttcctaataatatcctgaaataccctctcgttagaaacacaaaggaatcttaattctgttccatatgttacctatatggaggtgggaaaaaaaaaaacaaacgtcaacgatcacaacacagttgcttttcatcatgtattttttacctccaat

SEQ ID NO: 154151 - DNA, 341 bp, Glycine max
  unsure (1)..(341): unsure at all n locations
cgaagccgcagcaacanaccgganacacacattatttatgtttctcaaagcaccaangcgggacggctgccaaaatgggaaaacaaaaccccagcccccgaaagtggatattcgacggaacggaaaaagaaaggacaagcagagacagaacaagcggcaaaccgcgggcaggggggacaacaggagagaaggcccataagggaagagcctgaccgagcacgcaacgaatagacccggacccgacgacgagtaataagcggaatcatacaggtgcgcgaggaactcagcaggacggcccggaccaaaaaacgctgacacaacgaaaaacggcagcccaagaa

SEQ ID NO: 154152 - DNA, 211 bp, Glycine max
agagcaaaaggatgcaggaaagaccaaacagcaacatgaatccactgcgggaggtgagacaccggtaactccggaagaacatgtggaaggcccctaacgcaccagaaagtaaatacaaatggaaatataaaaatatgaccgaagggacggttcaacatccaaagatttagaaaacaaagcaataattgaaccaacaaaatggattctaaat

SEQ ID NO: 154153 - DNA, 414 bp, Glycine max
  unsure (1)..(414): unsure at all n locations
cctataaatactcagcttctccccccaatttctataaatagggggagagtgatgtattataatgttcagccccttaggcacttctctctctttcaaatttgcttaaaaaaatcggttccgtgaagaatatccaagccgaggcgcttccgtaacgtttccgtgagtgatttctcgaagctttcgaccgttcttcgacgttcttcattcgttcttcattggtcttcagtcttcaacgggtaagtacctcaaaccaagcttctcaattcattctatgtacccgtggtggtccacattnggtttcatgtatttttattctcgtttcattcactctttataccctcttttgatgtgcttaagccattttatttaagtcatctctcccttaaccctaaaataaaataaatttcaccgatc

SEQ ID NO: 154154 - DNA, 399 bp, Glycine max
agcttcttctgagccattgcctactttgatatatccaactaaaattttagcgtgaaaattattttgcatgaaatacataaccacattatttagttatcccaagtatagcaactaagaagtcaatcaattttgtgtgttttttattaattgtatgtgttaccatacaactaataaaaatcacaactcaatgtgtattattttgaaagaaagaatttgacattctacaacaattcatgtgcaatgtacccaccctagtgtagcaagtttagccaaacaattaggccaattcaatgcaaacaactttaagcattcattaatgactcatgtatttgcatctaaagaaatgcctgaaatttcaagcttagcttatacccttggcatttaattcaacaacctaag

SEQ ID NO: 154155 - DNA, 399 bp, Glycine max
atcttgcttgtggagcttctatgtttgttggatctttgagcttcaatgaggtcctttaatggtggtttttcaccatggagaagcatcggaagacaaaggataagaggggagaggatgcgccatccactagggaataagccatggaacaaggagcttcaccaccaatatgagcctcggataagaagcttgaaagggtgcttctatggaggaccagaaagagggagagaatgagagaggggggagcacgaaattgaaggaataaatgagggagagaagtggaactttgaaagatgtctcacaagactctcattcatcaaagttacaacaagtgccacacatgcttctatttatagactaggtagcttccttgaaaacttgctgagaaaacttccttgaaaa

SEQ ID NO: 154156 - DNA, 332 bp, Glycine max
  unsure (1)..(332): unsure at all n locations
gaccanaagcaccgcggctgcactgagcaaataacgtcttgcccgcccggataccagcagagaaatgacgcggttacacagaaataacctacccgaagatacttcacaaaaaagccatgcttaaaaaaaagaagccaagcctcaaaaagataacatcaagccacccttgtacacaggcatagcccactatcacgcctagcaaacacaacacaaacaaagtcaccacacgaaacacgaaagaagccaccgtcccactttaaagaaaacccctaccccacgacgacacaattagcaccaaagggtactaacacgggggcaaaaagctgagagaa

SEQ ID NO: 154157 - DNA, 400 bp, Glycine max
  unsure (1)..(400): unsure at all n locations
agcttgcatattnttttctacttttctgttngntaatttatttttccttgtttttccaacattaaaataattaaaaaatatattttttgttatgaataattttttggtgaatgttcatatcttcgtttatctttttttgtttatctttatttgcattaatttttttaactctctcattaccttttgtatctataaatatattactcatctttaaatgaaaatacacaattctcattctttctaaactctccttttctctattttttttttctctattattttcctccaattacattatatttaaaagttatcaacacgatcgtcttttattcatttagcatattttttcattaacatctcgacttgttagaaaaaaccttgtagacaattttatcaaaaa

SEQ ID NO: 154158 - DNA, 490 bp, Glycine max
  unsure (1)..(490): unsure at all n locations
atgccttaatctttccatatattcatgttaattangacgcatcaacaagaatcaagccaaggctattgtgcaatcaatcaatggggcaaaacacaccaaatgattataatgatggatggctcaaattctcacaaaggtaaaatcatcactttcaaattgagctttcaaaactatcatgacatgtagagaagagtcaaggatttcaagtcacaaaatgtcaagaacttttattttcaaaacaattacccatttcttgaacatatcctataattcanagaaaaacatgcaaagtcgtacgtgcacacgaaattgacccaaaatattaaactgaagatccgatgaaacttacaacattaacaaattaacacaactaacanagtaacaaaactcaccaaacttagcataaccaaagaacacttctcccccatacttaaacaacacattgtcctctatgtagcacaattaaaagaaataaaacaattaaatcatc

SEQ ID NO: 154159 - DNA, 396 bp, Glycine max
agcttctcccctaattttctataaatagggggagaagtgaagtggaaaagggttcaaccccttaggcacttctctctctttcgaatttgcttagaaaaattgtttccgtgaagaagatccaagccgaggcgcttccgtaacgtttccgtgagtgatttcgcgaaggttttcgaccgttcttcggtgttcttcattcgttctacatcgttcttcagtcctcaacgggtaagtacctcaaaccaaatttttcaattcattctatgtacccgtagtggtccacacttggtttcatgtatttatattctcgttttcatttactttttatacccctttttgacgtgcttaagccattttattttagtcatttctcgcttaacctaaaaataaaataaattt

SEQ ID NO: 154160 - DNA, 433 bp, Glycine max
actcagctggggagctgtctcgataccggagctgggggttttgaaggggaagaagattgggtgaagaaaattgttccccttcacccctttatattttcgtacaggggttgctcgcccaggtgagctaacctgtacccttcttttttttttttttatgggtgcattaaccatgtctcccccctcttatgggttagcggtttgcctaacttgagcctacttaagttagaattaggtgtcgattacttattaaaacaaacaatagtaaaaaaaactgtcaacgcaaacgatactgggctggcttgcagcgacgttctctgcttgttaacgatcggaagggggcgctcggtcgtcgggatctatcctcataccctccatccctagtcctgaagtaagaccaaatgattgcgacaatctgacggcatcgctacctggt

SEQ ID NO: 154161 - DNA, 287 bp, Glycine max
acttaaacacgagctgcactaatcagctatctcttacgtagattcaatcttctcccccgagcgccaccacctacttgttttttaactttgtcgacggcttttacttgaggagttctaacccttaacaaattaggttgacccaaaaaaactctttggtatctggtccttttaaggatacataacaaaattccccatacaggataactaaaaagggttacaaaaaacaggggacacgtttgtttttttttcataccaaaggccaaaattttaccccttaaggaggaata

SEQ ID NO: 154162 - DNA, 370 bp, Glycine max
cagcttctaccatggatggctaaacatttttgcgagcctctgccattacggtggctaaacactcaaaaattatgtcctgcactctgcttgaatggttaaacaccatattaatcctctgctctcgatggtcaacctctgctgatactacctatatgatggtaacatactttgcgatggcttgcttctatcttgagtggctaaccatcaaacgtagcttctgctcttgatgattaattcggtctgcttctaccttcaaggcggctaagtgcggtcgcttccggtaagcggataagcatcgtgatgtggcttccgcttaaaggttcaacatattcccaatttcctttgaaagtagctcgcgcctatccaatct

SEQ ID NO: 154163 - DNA, 247 bp, Glycine max
tttcttgtcctcaatctatatttcctataaaagataattattaccacaagagtcaaacaaacttactggatgaataatgcaggcattaaatgaagtggaacacaaacacaattgtcgcgaagaataaaatgcggaaaactcaaatagagatttgggaccttgaaattaattcataatcatttgaagtttcacctcttttttatctaaaagagaataaacataagcgacttgttcggtaataaaaata

SEQ ID NO: 154164 - DNA, 261 bp, Glycine max
acttttatactgcgctaatgaatctctgattttatgtcattctcacataatgtaagcacttatttcatctatcccagaccttataagatgccttgattacgttgcattggatgtgccgcatcatctaacaaagacactctcccaattccccaagtggagatcatgcctctgtcacatatatccctctgccaaacatgtgctctaatgcttgtgatatgagtgccatcacttcattgcacctagtaccaaagagagaaccaa

SEQ ID NO: 154165 - DNA, 407 bp, Glycine max
agcttttacacataaatctccttgctcttctatctgacctatgctccaaaatataaaacacagaataaaatgaagcaaaatatattattgagtttcattttatttgtagtttaaatagcatcacaatgtaaaacaagagacttacctttgacaagcaaaaccaagatgatgaataaaggagaatagtttgagacgtggttcaccattttttggatacaaatactctcttatttgcttttggctttgcttctcagcgctgtttttgaaatatataattataatattttgaaatctatacttataacattggagctcattgttggaggtatgtttgcaacgtgtcaacaccacagcccttctgccattttttcaacttttacaaatcatgtcacattcagacaaaactt

SEQ ID NO: 154166 - DNA, 389 bp, Glycine max
  unsure (1)..(389): unsure at all n locations
ttacattgatgtttgtatttgtggaggaggttatatgccatnntttgtttaagagtaatgtcccactggtaaaactaactttccaaatgtttgccttcgcacgaatggccccgaggaagctcgcctcaaagaggtccatgaaggacaaggcggccgaaggaactagttccgctccggagtacgacagtcaccgctttatgagcgctgtacaccaacagcgcttcgaagccatcaagggatggtcgtttctccgggagcgacgcgtccagctcanggacgacgagtatactgattntcatgaggaaatatggcgccggcggtgggcaccactggttactcctatggccaagtttgatccagacatagtccttgaatnttatgccaatgct

SEQ ID NO: 154167 - DNA, 401 bp, Glycine max
agcttgctgatactgtcatccagtgatttctatttatatggcctattacaaacagttccaaggaggttatgtttctacgcgagctggaggaaattttagaagtaactcaacctgcagagtttcaacgttgtatggtaccattgttccaccaaataatcgttgtttgagcagttcacatttccaggtttgataacttttactagttttcagtgagttctactttctcttgttatcatatatacaatttctcaactgctcaagaaagaacgaaaagaaagtttagccgttggggcttatttttcacttggggtgatgaaatttggtacagaaagttactctccatgttcatgggtttagacataacagatttgcctaagtcaataaactagaatgtctttgac

SEQ ID NO: 154168 - DNA, 406 bp, Glycine max
  unsure (1)..(406): unsure at all n locations
agctngttcttgatttttcctcatttctttaacaagctctgaacaatatacttggccttcatttaactgtctttgggcttggcggccacgctcaacaaagtactttcgacacctactgtacgttgatttcaccaatgctgttatgggaatgttgcgacaatcctttaaaaccttattgatacattctgagaggttcgttgtcatgtggccatatcgacgtccttctctatcgtaagccatcgcccatttttcctttgagatgcgatcaatccatgttgctatggctggactcagttcacgaaattgttctaaattttgatcaaaaaatgtgcttgcatggagtgtaggctgcataaaattagttatgaataacaattttaagtataaatgacagtaaaataaacgt

SEQ ID NO: 154169 - DNA, 397 bp, Glycine max
  unsure (1)..(397): unsure at all n locations
ctcagctgcacatgagngggggananatgggtgattactgcaactttatgttaagactacatgtgtttgttagttattgtgcgcaaaattatattaacagtgtaagagtttgatgttactcattgaataaattatatgactaagtaaattcaactgatattttgatgcatcaatgcttatcaacctcgagggtttcaatttacatcgaatgcatgtatacttcatgcaatgtttatacttagggcgcataagagatgtgatgtaactcaagtttagtgtgagcttgtattaaattctctgttgggctaaatgatatgatagcgtaatggtgaaacccttaattctgagtcatgataatcaacttctaaggctattatctataaggtgtcattcaatt

SEQ ID NO: 154170 - DNA, 430 bp, Glycine max
cggatctctaatcacctgcggcatgcagcttgtaagttatgtctcgtatcggtttaattgattacaaccttctcgtaatcaattacacaattgtttctgagacaatgatgatttattcaaattctttgctttaatcgattaccatgtgatataatcgattacttctctttctataagtagtttaaaagtgagcgagaacactctaattgattaatttgagtatctaatcgattacattattcttgagttatttccaagtgtttggaacaacacttcaatcaattaaaaagataatctaatggattacttaatagattataggcggttataactattttctctataaataaccagcttgtgttatcttaaaaaagatatcgaaaataacacaataagcctctaaatgagctaagatcacatgttgttatta

SEQ ID NO: 154171 - DNA, 398 bp, Glycine max
  unsure (1)..(398): unsure at all n locations
tgcgggctttgtattgctgtttgtatgcccacaaagcttcatctagcttttgggaccaatccttccttgattaagcaactattttttctaaaattgtcttaacttccctgttagaaactatagcttacccattggtctaagggtggtaaggtgaggctaccttgtgtttgacactgtaatgtggaggactcttatgagttgagcattacaaaaatgagatcctctgtcactgattagtactctgggtgtgccaaaccttgagaagatcattctttttacgaagcaaataatggttgttgcatcagcatgtntgacttgtactactctcacccacctttgtacatagtccacaaccaataaaatatatttatgtgagtaagatgaaggaaatggaccta

SEQ ID NO: 154172 - DNA, 436 bp, Glycine max
  unsure (1)..(436): unsure at all n locations
aattctatcaatagacctccaattcttaatggagagggttaccactactggaaaacccgaatgcaaatatttattgaggcaatagatctaaatatttgggaagccatacaaataaggccttatatacccaccacagtagaaagaggttcaatagatggtagttcatcaagtgaatgcataaccatagaaaaacctatagatagatggtctgaagaggatagaaaacgagtacaatacaacttaaaagccaaaaatataataacatctgccctgggaatggatgaatatttcacggtttcacattgtaagagtgctaatgaaatgtgggacactctttgattaacacatgaacgaactacagatgttataagatctatgataaatgaactaactcatgagtatgaattatntagaatgaatgcaaatgaaaatattc

SEQ ID NO: 154173 - DNA, 340 bp, Glycine max
  unsure (1)..(340): unsure at all n locations
tgaagaagaatatggcatttacctggggtgaaaaacaagaacaagccattgctttacttaaagaaaagcttactaaggcacctgttctagctcttcctgacttttctaaaacttttgagctagaatgtgatgcctctggagtgggagttggagctgtattgttataaggtgggcaccctattgcttattctagtgaaaaacttcatagtgccaccctcaactaccccacctatgataaagagctttatgccttaataagagccctccanacttgggaacattaccttgtttccaaggaatttgtcattcacagtgatcatccatcacttaagtacattat

SEQ ID NO: 154174 - DNA, 406 bp, Glycine max
agctttctcgctgcaaaattcacttcttggttggtgtttttggtttgtgttaaaggtggtgttcgtcattggaagtgcggtagacagactttgtggtatatttagggatggcctttgtggataactgggtggtgggtaaggagaaagtttgttattggctgagtaaagatattgttgggttggtgggaaatttggccgtacaggaatggcagtcacagcatgggtttctccctcatcctcaccctctttatttgccccagttttctcagtcgtcctagtaggatgatcaaatttgcctctttttggacccacattgatcctttcactggcgaagaccaaatctgcaaagctttgagggtgcgcagcccaccatcttttcatagtagagtaccgataatgtgtctac

SEQ ID NO: 154175 - DNA, 274 bp, Glycine max
  unsure (1)..(274): unsure at all n locations
gaatgatttcaagattcagtccacaggttccagaacaagataaatttcagtttcatgagaagaaatcaagaagattcccgaatccagagaacgttgatttccagatccacgagaagattaattccagattcaagagaagaaatcatgaagacttcacaacggaagtattgaaaagattttcaaaaaacaaacatagcaccacttttggttttctaaagaagttttctcacaattttctgagttaccagagtttntactctctgggtaatcgata

SEQ ID NO: 154176 - DNA, 408 bp, Glycine max
  unsure (1)..(408): unsure at all n locations
ncaagcttgcatgtctagtgattctatatagagaaaggtctaagttccagagatttttgagagattttgttatgtgaagatctgcagagaccatagcttgaagaggaagtcgttttgagagcttgagatgagtttgtgagtggttgtgagatcctataggtgaaggagacatcctcaccacttgtatttttgcaatctttcatcttgttcttctctttgttgtaaaggaggcttcctggttatggaaagctaaaatcctctgttggatcttccttgtaggtacttgatgtaaatatctttctatctatttaatgatgttttgtgtgttctctgtgctatcagcttttcattcttggatgcctttaccttgatcacatagatgcatgctttgttagggtcattcaacac

SEQ ID NO: 154177 - DNA, 427 bp, Glycine max
  unsure (1)..(427): unsure at all n locations
ntggatatcattggcagagatatctgcgctttctttcaaaaagaacgacatgnattaaatgatcgaaggatctccaaaatatctggctctactgaatgccataacacaacgcagagttgatagtcaagcttctcccattcatgtcttttatcatctggaacagaatcaaaagctttctccaagtggtcatggtgccctcgaccgagaaatcacaactncatggaagcagaccacgaaagggaattcttccagttacgctttgcagtggtgatggttcgagtcccagacaaggagaatatatgttcagaggaggccatttcagatccaaacaacaaaccctaacacgataaatggataacacacaagggctgacaacaatagctgccngaagcgagatgtgacgcatgaaacatgctcacggactgat

SEQ ID NO: 154178 - DNA, 401 bp, Glycine max
agcttgaccaatcccgacccaacccgggcatagtcgatcagtgagaacctgtgatgtacctaaacaggcgagctcctggcagtcaacagataaaaggaacaaagaccacaaagcaaggaggcttgtggtggctggccagctgtgaattttgtgtgatatgtgattatggcctctggtaatcgattaccaagggtgggtaatcgattacaaggcttaaaaatgaagacaggaggctaagatggtctctggtaatcgattacaaggcctgaaaacgaggtcaggaagctaaggaagcctctggtaatcgattaccaacctgtgtaatcgattacacagaggaatgggtcactggtaatcgattaccaggtatgtgtaatcgattacacagtgcatttttgcat

SEQ ID NO: 154179 - DNA, 465 bp, Glycine max
  unsure (1)..(465): unsure at all n locations
gtttactngatacggtgggtatgcaatttcataattctngtataacaacttagcaaaatatcttgtatgaaatggctataaaaaggggtaatgatgaaataaaaagatatcagaattattccctgcaatttagctcttcttttattccagttagctatcaactggtccgaccttagcttttcttttattccagttagctatcaacagactaataggaaagaacaaaatactaaacatttatttaattaaatctaattaaaaatttacttcaatcacattatgtaacaaaatacttgcaaggtangggtgtcttctaagagctggagtgtttggcagcctattataagaatagttgaagccaaagtttgcaaatggaaacaaagaagtctatctatggggggcagaatcactctcattaattcagttntatcaacaaagtgtaccataattctatttatcaacaac

SEQ ID NO: 154180 - DNA, 411 bp, Glycine max
gcttggaaggatgcttcaatggatgaattgaaagagggagagaaagagagaggggggagcacgaaattgaaggaagaaaaagggagagaagttgaactttgagttgtgtctcacaagactcttattcatcaaagttaccacaagtgttacacatgcttctatttatagactagctagcttccttgagaagctttcttgagaaaacttccttgagaagcttctttgagaaaacttccttgagaagctagagcttagctatacacacccctctcataactaagctcacctccttgagaagcttctttaagaagattcctaaagaagctagagcttagctacacatacctctctaatagcttagctcacctccttgagatgagaagctagagcttagctacacacccctataat

SEQ ID NO: 154181 - DNA, 107 bp, Glycine max
tctctttttttgctctatatagtttgtcttaatattataccccacgaacacacgtgggtgagtgtttgctttgatgactatgcctttttccacatctgcaaaattga

SEQ ID NO: 154182 - DNA, 394 bp, Glycine max
gtctcatgattgtcacgtgctcgtgcaacaattgttagccgtgactatacgaaacatcttgccaaacaaagtcaggttagccataactcgcttgtgctttttcttccttgctatatgtagcaaagtcattaatccagtcaagtttgatgagttggaaaatgaggccgcaattatactgtgccagttggagatgtattttccccctactttctttgacatcatgattcacttgattgtgtatctggtcagagaaatcaaatgttgtggtcctgtttatctacggtggatgtacctggttgagtgatacatgaagatcttaaaaggtatacaaagaatctatattgtccagaagcatatattggtgagaggtacattgtagaagaagccattgaat

SEQ ID NO: 154183 - DNA, 435 bp, Glycine max
  unsure (1)..(435): unsure at all n locations
acacaaacatcatacaccaaatagtcacacttttgacattngaaattgtcctcaccaactatatctcacaaccataacacataatgttccatgaactaaacaaaaatgactttacacatcataaagtcgaaaaactattccttcattcaacagttacatgatcaaatactgctattgtgctctatcaaattatccaaaaaattattcctctgctcaacagttaatgtaaacaaaatcaaattcaatttaccgatggttcacttggcaaggacacactattcttacttgccaacattcagttcccaaaccatagcatattattgtgctctatcaattaacngngaagaagttggcagactacagtgtatatacagagtggatattttaaacaaggctcaaccccgaattcaaaatcctatctagctcacattctac

SEQ ID NO: 154184 - DNA, 358 bp, Glycine max
agcttgatagaagctgggtggttgacttttcaataagatggacccaacataaaaacaaacccgcttgccaatcatggaggggggggcggttaatgccatcaaggtgagtgggtcacaccggcccaatcttttggaggacctaaagaccctcaaaaggtttatctacaaggccttgcaatacgtgggcatgattccctccggcgagcgcatagaagactcttgcttaatgcactcggatgtctgcatgacatggaaacatgttccgccgtaatgagatatattgcaatggatgatacaccatggccggcttgacgttagccctgagaggtaggaagaacaacatgtatgcctgctctct

SEQ ID NO: 154185 - DNA, 263 bp, Glycine max
ccatggagatgcagcggaatgcaaatgagaaaaagataggggatgcaccatccactatggaataagccaatgaagaaggagcttcaccaccaaaaattgcctttgataagaagcttgaagaggatgctttaatggacgaatagaaagagagaaggtgggagcactataattaatgaataaaatagggagagaagtggaacattgaaaatgcgcttattataattttattcatcaagattacaaaagcgttacacatgcttata

SEQ ID NO: 154186 - DNA, 403 bp, Glycine max
agcttgtagaatggctagacataattcttggcggggtttggtttggttcaaggataaaagggatgccccacattatttccatgacacaaatgcaaagatgatgatttggaaattttatgcaaaactggtcatgcatgcacctatgcggacactcaagtgtcaaatttttatggtcatgtgatgctagggctcaggattcatttcctctattttaaatcaacccaatgtttccaaaatatgttcttttatcaatttgtgcattcatcctagtccattttgggtactcgggaaaatttcacagcattcacccttcaggtgtacacacattttttcaaaaactagttatgatcagtgaattttttcaaagacaagttggaagtcatctcttttcaaaagcatgttg

SEQ ID NO: 154187 - DNA, 458 bp, Glycine max
  unsure (1)..(458): unsure at all n locations
ctcagcttctgccactccgatattttctaaagatccacgggtgaatcatgtgtaattgtcttgtgaagntgccaacccaatatctagaagatccaacggctaacgaaggctgggaagcgtttctaccgaggcagcttcatgtagttttctctagaagctccattaagaagcttccttcagaagcttcattaagaggcttctagcacactccagacatcttctgaaagatcccaacggtcagatcatggaaaagtgttttgtgaagttgcagaccaaattntgagaagatccaacggttaatgaaggccggcgcagcgttttatcgaggcagcttcatgtagctttctctagaagcttcctcgcggcttctttgagaagctttctcaagaggcttcttgagaaagctcatncttatctatcacccctctataactaaattaacttccttacaaatatta

SEQ ID NO: 154188 - DNA, 352 bp, Glycine max
  unsure (1)..(352): unsure at all n locations
agcttgcctcaaagaggtccaggaatgacatggttgtncaaaggaactatttctcgcccggagtactacagttacctcatttaaaatcttcttacaccagcatcgcttcgaagccatcaagggatggtcgtttctccgggagcgacgcttacatctcatggacgaccagtatactaatttccaggaggaaatatggcgccggcggtgggcaccactggttactcccatggccaagtttgatccagaaatagtccttgagttttatgccaatgcttggccaacaaaggagggcgtgcgtgacatgatatcctgggttaagggtcagcggaatccgtacgatgccgacgctatc

SEQ ID NO: 154189 - DNA, 375 bp, Glycine max
ggaccctaagacaccgccgcaacaacttgctaacacccagatttttcttctatggcccaaatacccagcgcgggcacacgaaccatgaatcgtgtcgacatcaggcacctttgatttttgcctggatataacttggggctgaaacctaaaccataaaattcttacaaaaatactaaagtacaaaaaaacctcaaaaatctagagcgacctgttcacgtattgtagatttgtcatagaagccatgtctacccatgaaacttgacacataagatttcttatgctgcgctgaattttattttctcgtctctttgtctaactcattcgcccatgagcgcatgaaactattccaccctataatatgatccgagtcaaatc

SEQ ID NO: 154190 - DNA, 209 bp, Glycine max
ggggcgcaacgtggcgagcgcttggcgaaaggggacctgaacaaggcgccgagaaagggggaagaaggcgaatgcgaatacaacgacgggaaacggcagcgagagcacctggtcccctctcattcccatgccagctccatacaaccgaaacaattccctctaaccctcacctccgcaaacaaacgaagtaagggaccaacactccaaaa

SEQ ID NO: 154191 - DNA, 407 bp, Glycine max
agcttcttgattgcctaagtgtggaccctctatggcaatcctccattctccacttttttcggagccccatgaatgtcattgcctagcgttgttcatgtgtcctccaccttcgagtctggagccccgcgaatgtcatcgcctatctctattcgccaattctccattccccacttttatttggagccccatgaatgtcattgcctagcgctgttcatgtgtcctccaccttcaagtttggagctatgcttcatgattgcctaagtgtggaccctctagtgcaatcctccattcttcacttttattcggagccccatgaatgtcattgcctatcgctgttcatgggtcctccaccttcaagtgtggagccaagctatttgattgcctaagtgtggaccctctattgcaat

SEQ ID NO: 154192 - DNA, 496 bp, Glycine max
  unsure (1)..(496): unsure at all n locations
acagtgcgtgtgactntgtgcatncatatatctttttgttttttcttctcttgggtttatggatgaaatattgcattcagtgtcttaagatggagatcaattgttaattgaattgagttcttataataccgctttcatacacctactgaatggattctacagttgagtaattcattggatgttaatgaggttggttttcttgcttctgttaagctgttatataaaaactgttgagattaagaatatttaatggattttgtatttgagtacaagttggctttattaacttccaatctcggaaaaagactttgaaccaaattggtaatcactgtgtatattcttacanccctttttactctatgagattntaatttttaaccttactangttcactgattctgaggcctttgatgcctagttagtactatgaattactgtctgttccatggcatggatagaaaacagaatatgatgctgagtgtgttcagtgaaaatg

SEQ ID NO: 154193 - DNA, 404 bp, Glycine max
tgcttaagtaaacatcaattggtattaacatgattaaagtagagaatcttaaaaaagtaaaaagagacaacaaagttccaatgatgaattgcaagtttattataaaaaagtaacaacaagtaatttgaacaatgactacacagattcatcatgcatcagagcaattatctcattagtcattcttggtttccttggtttgtgtagcaaggcaagaatttcatgtggagaatgcccaaaagttgcattcaactcaatctttggtaccaaattctaaatagaagaaaaacatttttcccacatcatcgtcacatttgagctctatacaatcgtattcatcacaaccatcatctacatagattggttgacaataaaaaagatttattaaaattttgcaacctccattg

SEQ ID NO: 154194 - DNA, 399 bp, Glycine max
  unsure (1)..(399): unsure at all n locations
tctaactntgtncaanaatgaagctctataccacttgttatacaagtggcctcagatatcttaagaagggggggttgaattaagatattccaaactgtttcccctaattaaaaatctatttcactttttactcaagttatgaattcccttaatgacaatcttcttaaatattaattcaaatgaagcaacttgaatatgaatattaagcaataataaataaaggagaattacggaagagaaaatgcaaactcagttttatactggttcggccacacccttgtgcctacgtccagtcctcaagcaacccgcttgagaagtccactatctntgtaattccttttacaagttctaaacacacaaggaccatccttcctttgtgtttagagatcctttacaaca

SEQ ID NO: 154195 - DNA, 403 bp, Glycine max
agcttaacatgtagagattggatcttatctttgaaagtatcccaaaaggtatgtgttcggttctgcaagttaaggacgttgaagtataacttctcaatggttcttttgaaaaattgcatttgcaggtgcaagaaagaaaaggactacctatataagcatgaagtttagccgcttcaagaagctgggacttggctttgatatgcttatgaaggatagggacgcaggctagtaaaactagtgtcgagcaagagtaatgttataaactattgtgcagattatcttcatgtattcattatgaatagaaagggttcaatccttagtgataccctgatattcgaatatttgaaacgtgtaatttgctaagatgaaattcaatcgtcacgatatttcatctatgcagtag

SEQ ID NO: 154196 - DNA, 420 bp, Glycine max
  unsure (1)..(420): unsure at all n locations
tatatantagaagtttctcatanatctcttcgctgaaatgtatgtaataataattnctagtattctaaatcatgatccaattatagaagcagttactataaggtagatcagttacaatttttaccggtcaggcaaatttccattacattttgtgtgactccagatgatattgattgtccctatgctcgatccttgatcagcttacaggttatgactcaaaacctgattntagtggtcatactcatatcattatcattacatgctaattcctcatggttcatgatgaagtctgtatataaaaatactacatgcatgtatgtgtacatttgggaanaattactgcaacaccttatgttgggggaaaagtcttgaatattatgaccagncctttgcttatatggtagctttagctttggagtg

SEQ ID NO: 154197 - DNA, 361 bp, Glycine max
acaattggttttcaagttggtttcttgtgctaagggggcttctcgtattgagcgataatgtcgccttgaatgggactgttgcactccgcgtgttcccatttttcaattattttccaggcctccctgtgtgtcattactacaaaaaaaaacattgtaaattaattaactttaacattcacagaataaacacccaccaagaaacttacatcccaaatattttaacacaaatgaaatattaaaagagagaaaaaaatagattattattatgtgattcaaatataaaaattatgtatgcataactaatatcaaaaagccacgtaataaagacaacttatcggtttaatatatcttaatatataat

SEQ ID NO: 154198 - DNA, 399 bp, Glycine max
  unsure (1)..(399): unsure at all n locations
actcactgcagggcctggccaaaaaagagttgtatccctttagattgngagttttgagccgaanaaaaaatcaagaattatcgatccaaataataatcgggtcacagtgctgcccatatacaacgacaagctgagcttggtgtagaagaaacgtatactcaatcacaagtgagccatcttctatttaacattgataattcacattgatattttacattattatccaaacctaccgcgcacatgatgttgaatcgcactactcacaaatcatgcaatcacttatttatttgagcatcgccatctagtacgaaagacagaaaagcccaaaacacaccaatctccatgtgaatggatatcttttgtgtgaaacaattctaaattaacaaatttaaaaacata

SEQ ID NO: 154199 - DNA, 395 bp, Glycine max
  unsure (1)..(395): unsure at all n locations
agctntatacctttcagaaccttattgctctagtgtcattataggttctttgcattatccacccctttgaatctcacaaacttgtatctacgaccacttctatttcggttccttacaatgtagacctccctaaagccttcccacttgttgaactcaatccatagttccttttcacccatgttttctgggaaccttgtgaagtagagcgagatgatgtctagtgcatccttctagttttttgccccttcccttcccccaactggtcacgatggccatcacaccgtgttgcacatgccccttcccaaggtagttgagacatggcctatctctcacactctctctgtgtctctctccctcccactctttgtttctctctctatctcactctcattctc

SEQ ID NO: 154200 - DNA, 342 bp, Glycine max
  unsure (1)..(342): unsure at all n locations
ctgagacanattaacagactcacctaatgttgatgtgaatgactgccgcacacagnactacagtttctctaaaatcgaaagtgttgaanagtctatgggattagtgggagagcggtctcaaacagctgataaatctctttctangacattaattaatatgctgaccatcattgaagttgaccgttcgcgtactatgcatgaacaagtcattgagatgacaaatattgcaacaagactcaagaccttgggaatggttgngaatgagaacttgcttgttcaatatatttcaaactcattacgcctgagtatggcctgttcaaatgagccataataccactgaaa

SEQ ID NO: 154201 - DNA, 363 bp, Glycine max
  unsure (1)..(363): unsure at all n locations
tgatcattttgcgatttgggttttcgcatggtgcttattgcttctttttacttccttttccggatctattggttctacattttaaggtatgaccttttntatgttatgcatttgcatggctgtttttgcggcgcctatatctattttacttccttttttgtgctattttccagctttgctttggcttctttgctaactttcctactttgtttctggctgagatgggtttgtttcacagtttgggtttgttgcgttgttcggtttggttgggtgaagtgaaggtaatacttttgcagcaatgctgttatttgttcaaggttgattcatgttctgttaagttgagtgtgttttttccggctgttt

SEQ ID NO: 154202 - DNA, 328 bp, Glycine max
  unsure (1)..(328): unsure at all n locations
ctatctaaaaacagtccccagtggagttgccaattgtcacaacctaccctttggcgggtgatgtaagctccattggagctngtaggcctaggatcttcttcactaatggattccttcgcttcttggaagatgaatggcagcgaaatggagaacgaatacagagaggagatgccacttcaaggaaaagatgagtctagaagaacctcaccaccatatgaggcaatggataaaagcttggaggaagaaagagatgaatgaagggagaggaagagaagncacaaaaatttgtgctctaaaagagctctgcaatctgaaattaaatttcaat

SEQ ID NO: 154203 - DNA, 411 bp, Glycine max
  unsure (1)..(411): unsure at all n locations
agcttcggtagaagatgaagaagtcctatctctaaaatnggagctagggaaagcaaggctctccaaggagaagttcaaatcatctgctacacacatccggaaggagtgcactgagttacaagaggaaaacgcggccactgcaaaagcccttgagcaagaaaccaaaagggcccgcaaggaggaatatggccgagagaaattccgaggagcattgtggggtagcaacaatgagctcaagctccaaagagaagagagagatcggtcacgggtgcatggcatgatcttaaaagaagagttagttgcttgcgcaaggtccaaaaggagtttggctcaacacttggaagccacggagcaaagcatgctagccatcatagggcaatacaaggaagaatagaaccagtccatggccca

SEQ ID NO: 154204 - DNA, 302 bp, Glycine max
  unsure (1)..(302): unsure at all n locations
ctatgatnnggtttgcatcaatttctaattgtcataacatatgattcatggaagtgatctacgcattctttctttctaagccatttgccaaaccaattgcccaaatatatgttatttatgccatttgcaagccttttgaaccagacgcttgatttttatcaaaacactaacctacgatgaaaggttcctaccttaccttaagataggagagcaagggtgttttcaaaggagatttctatcattcttgtggctagtcatggattttgaaggaagctagatatttatcaataaaggaaaaaaca

SEQ ID NO: 154205 - DNA, 396 bp, Glycine max
cgtcccgtgaccttagatcgactgcagctgcaactttaaaagcaacaagggtttattcttatatccactaaactgagaacctttacaccttaaattttgatgttacaaaagtataaattcttgattatcgaatgatgtgatattaagtgcaaaggatcacttcgtaaaaggacttaatcattatctacaactctagtaattcatgtgtgtgcttatagcggaaaatgctttgttaagatatatctagcattcaacatgctgtaaaatctattgcagctacttattgtgaaaactagtgtttttacactgaatgttcttaccactctcatacacttgttgtaactcacatacatactcattttatacttatataactaatggctattgagtaccaaa

SEQ ID NO: 154206 - DNA, 340 bp, Glycine max
  unsure (1)..(340): unsure at all n locations
atgactatggcatcatttctggcgctaaattgttgggagttggaagccaatctcctaattaaatttctagcttccgtaggagtcatgtcttcaagggcttcaccactggcagcatctatcatacttctctccatattgctgaatccttcataaaaataatggagaagaagttgctccgaaatctgatggtgagggcaactgacacatagtttcttaaatcgctcccagtactcatacaggctctctccactgagttgtctaatacctgagatatctctcctgatggctgtggtcctggaagcaaggaagattatntctaagaatactctcttaacgtcat

SEQ ID NO: 154207 - DNA, 388 bp, Glycine max
agcttcaacctttggccatcatttctgtttcaaatcgcgaaaggagggcattttcggggtcgtgaagtgcgtggctacaagtgggacttcgaaaattcaggtttgggtggacttctttctcctttgattttcatgggtatggggtttggggagatatgatgggtagtcttgctaggtttctactgtgtgatgattatttgtgaagacatttgttgaaattgccatgtttggatgagttagacatacccattctgttttaaggttttcgtgatgatgtttgtgatgtttatatgctgaaattgcccatggaaaactgttagagatgaaatgtatagttaacctatggttggaaagtgagaatgtggtgttatgagtggaaaaaaagtga

SEQ ID NO: 154208 - DNA, 311 bp, Glycine max
tgagatgagggaagtgtgaagggcgaaacttccgctttattgttacacagagtggacctggagatatgtcgcgggggtcaggagaccttggggacgtcaggtggggtgctattgcccaaaaccaagcttgaccaatcccgacccaacccgggcatattcggtcagtgagaacctgtgatgtacctaaacaggcgagctcctggcagtcaacagattaaaggaacaaagaccacaaagcaagggggcttgtggtggctggccagctgtgaatattgtgtgatatgtggattatggcctctggtaatcgatta

SEQ ID NO: 154209 - DNA, 367 bp, Glycine max
  unsure (1)..(367): unsure at all n locations
agcttcttttggaccttgaccaagcttctatctcctctntcaagaccatgctatgtgctcgtgattggncactctcttcccttcgaagcttgagctcactgttgctgccccacaaagctccacggaatttgtctcggccatgctctttcttgcgagccctcttggtatcttgttcaaaggctcctgcagtagctgcattttcttctcgtaactcagcacactctttccggacgtctgtagcgaccaccttgaatttttctttggcaagccttgctattcctagttcggtttttagagctcggactttttcatcctcttccggagcttcgaagttctcctcattgaataatttcaactgggagagcca

SEQ ID NO: 154210 - DNA, 369 bp, Glycine max
  unsure (1)..(369): unsure at all n locations
gtctctcctatcaagtagggaacttcatctttagatgcggtgtggagacaatggcttcaagcttgttgagtgttttcccaccaatcaaaacaaagtaagagatatttgcattgacgattaaatacccaattgtaaagatcttggagagttggccttgaccaanagtggtcattatgtcaacatagcctctagtctctactcgctcccctactaagccgaggagttgatcagcgtgagattggatggtgttaggcaaaactttagtttagatggtcattangtcaacatagcctatatgtacccagcttgtatgagctcttctattttcaccttaagggcccaacaatctttggtgttgtgaccgatact

SEQ ID NO: 154211 - DNA, 407 bp, Glycine max
  unsure (1)..(407): unsure at all n locations
agctngctaacccatggaagcttcttatatctccacactttatggggtgggccattcttggatggccttgattttctcagggtccacttggaccccatttctaccaactacaaaacctaagaaaactatattatctacacaaaaggtacacttctctatatttgcatagagggtgtttttcctaaggactgaaagaacttgcctgagatgtcctaagtgatcatctaggctcctactgtacactaaaatatcatcaaaataaacaactacaaatctacctatgaaatcccttaagacatgatgcataagcctcataaaggtgcttggtgcattagtgagctctaaaggcatcactagccattcatacaaaccaaacttggtcttgaaagtggttttccactcatcac

SEQ ID NO: 154212 - DNA, 338 bp, Glycine max
  unsure (1)..(338): unsure at all n locations
aaaccactcactttcaaatgactcgtccctgtttcagtggccaattctaaaaggggggggggatntcctatcccccctccctctcctcattcggaaatcgcaaccagaacacttttctcaaaattcctaattttactctctctctcttctattatcacccctcctctacctccacacccactttattccatgatccgctccctctactcaccnctgatacgattatcatcctctacacccttcatctccccatcccccaccccaacctccccacctcccatcgatccctcttctcatttccacctcatccctcccctctcattccaatacaaatcccc

SEQ ID NO: 154213 - DNA, 390 bp, Glycine max
agcttggagaatgtggattccgaattttgttcaaggggctattggacaataaagaggtatctgtgaatagagtctctaagaactcacgccaagggaagcaagaatttgtggcagaagtgacaacaattggaagccttcaccacaggaatttggtgaaactcacgggttggtgctatgagaaaagagagcttctccttgtgtatgagttcatgcctaaaggaagcctagacaagtacctctttggtgacaaaatttttggtaacaacacccttgaagaggggtgttcttcaacactgacttgggaaacaaggcacagtgtgattcatggtgtggcttaagcattagactatctccacaatgggtgtgaaaagagggttcttcacagagaca

SEQ ID NO: 154214 - DNA, 404 bp, Glycine max
  unsure (1)..(404): unsure at all n locations
aaaatactcagcttaagattaatcaatagtgcctgtgaacattatttgctattatttattcaatgttggtactggctatggttgctattgtcaaattgaaatntgtactctataaggtttttgttttttttttatttggtatatattgactatgttctcaatttctctgtctttaacatctcaaattctaaattgggatgctctttctttgttattcatggatctaattaaaggctatggcacacaagtttgatctaatcaaagaaatagatgggaaaagggaaacattgaagctagctatatgagtaaccgatctttggtttgtgcaacactangataacccaaggcattttgaaatgataattatggatggaaaggtatntatatcatgcataatttatttg

SEQ ID NO: 154215 - DNA, 336 bp, Glycine max
tttaactctatagctctctcacactaaaaaacggacacacccctgtattggaaggttacgaatgaaagctcccaccttaactatactactccacctacacaaagaatggcggacattactcgcaccctaaccgaaaaactaacccctcaaaaagcttcacacattctaagactccctacactctactactcccttccatatccttccaaactcttccataaggactcacacatctccagaaaacttcaaacagttccatattcttccacagcccactaaccagtactacactactcaaagcttccaggacgctcagaaaatacacactcttcgaaa

SEQ ID NO: 154216 - DNA, 402 bp, Glycine max
agcttctaaagaggtttttgtggactgcttgtctcatcataccagcaatgccttcttctacaatattgaaaagcaagggagctaggggatccccttgtctcaaaccccttgtaggtgtaaattccttagaggggctaccattaatcaaaacacaaatataagctgaatggaggcatgctgatatccaagacctccattttgggcagaaccccaatctaaacagcatatagtccaggaaagaccaagacactgaatcgtaggccttttcaaaatccaccttgaagatcatcactggtttcttgcttctccttgcttcctcaaccaccttattgagaatcacaataccatggaggatatgtctacctttaatgaaggctgactgcctttcatcaattagcccat

SEQ ID NO: 154217 - DNA, 378 bp, Glycine max
  unsure (1)..(378): unsure at all n locations
gtgtctactatcattgtcatcatttttttctccgtcattgaggtgccacttagagctgccaggttctctccacctttgggcgtattcttttgaaagatctgtgccccctttttgcacatgttctgtagtngcattctatccaaagacattatactaacactgcctaacgaaggcaaccactatgtctttccaagaatggactcgggaaggttccaagttagtgtaccaagtaacagctaccccagtaagactttcttggaaagaatgtattagcaattccttatcttttgcgtatgcccncatcttccgattatacatatttagatgggtcttggggcaagtagaccccttgtacttgtcaagtccagcaccttgaac

SEQ ID NO: 154218 - DNA, 402 bp, Glycine max
agcttgcctgtggagcttttatggttgctggatctatgagcttcaatgaggtcctttaatggtgattttccaccatggagatgcagtggaagacaaaggagaagaggtaagaggcggcgccatccactagggaataagccattgaagaaggagtttcaccaccaagatgagccttggataagaagcttggagaggatgcttcaatggaggaaaagaaagagggagagaaagagagggggggagcatgaaattgaaggaagaaaaagggaaagaagttgaactttgagttgcgtctcacaagactctcattaatcaaagttacaacaagtgttacacatgcttttatttatagactaggtagcttccttgagaagctttcttgagaaaacttccttgagaagc

SEQ ID NO: 154219 - DNA, 417 bp, Glycine max
  unsure (1)..(417): unsure at all n locations
aaatacaaatcagaattcacaagttttttggacaataaaatctaacgtatgaatgtagagttccaccttatatagaatgttatttaaaagtctacaaataaaactatgttntctgcagaagtcattgactagtaatgcaatttcttttttggctacaagtttcacctttcttccttcacaacattttatgactgaagcccgagtgaagttcttactcacaattgggtcacttcacctcaagttgtgcaacttccatttgtggaggtgtgtgtctgccatatgctgttgggaattaatgcttctctatctagtggttgtctcgcttattcttantatangggaaacttacaccaagaagataaacaccatatcaaccaccaaaatggttttccatttcgaagctacatctatgatata

SEQ ID NO: 154220 - DNA, 384 bp, Glycine max
agcttgaatcagacacccgtgtgatatgttatgacaatttgaatttcacgagaacttccgttgttcattttcgagtgtcactatatgtgatgcgccaaaattggacattcgagttaaatcttatgaccatttgaatttctcaagagcttccgttgttcaattctgagcgtctagttatgtgatttgcctgaatcggacaattgtgtgaaaagttatgaccatttgaatttctcaagagcttccgttgttcaatttcgagcctctcgacatattatgcgtcggaatcggacatccgtgtgaaaagttatggccatttgactttctcaagagtttccgatgtttaatttcgagcgtatcgatatattataagcctgaatcggacat

SEQ ID NO: 154221 - DNA, 388 bp, Glycine max
  unsure (1)..(388): unsure at all n locations
ctcagcttctcgacatattatgcgcncgacggacattcgtgtgaaatgttatggccatctgaatctctcgagaatttccaatgtttaatttcgagcgtatcgatatattataagcctgaatccgacatccatgtgaaaagttatgacaatttgaatttcacgagagcttccgttgttcaattctgagcgtcacttaatgtgatgcgcctaaattggacattcgagttaaatgttatgaccatttgaatttctcaagagcttccgctgttcaattctgagcgtctcaatatgtgattcgcctgaatcggacattcgtgtgaaaaagtatgaccatttgaatttctcaagagcttccgctgttcaagtctgagcctctcaacatattatg

SEQ ID NO: 154222 - DNA, 399 bp, Glycine max
  unsure (1)..(399): unsure at all n locations
agctttgagcaaaatctaatgacaataactntntactcggatgtccgattgtgtcctgtagtatatcgagatgctcgaaattcagaacagaagctctgagaaaaaccaaacgacactaacattttactcggatgtccgattctgtcccgtagtgtatcgagacgctcgaaattcagaatagaagctctgagcaaaatctaacgtcaataactttttactcggatgtccaattgtgtcctgtagtatatcgagactctcgaaatttagaactgaagctctgagcaaaatcaaatgacaaaaacattttgaacagatgttcgaatgaatcccgtaatatatggaggcggtcgtatttgaaaacggaagctctgagcaatatcaaacgacaataacttttta

SEQ ID NO: 154223 - DNA, 473 bp, Glycine max
  unsure (1)..(473): unsure at all n locations
catcgatagtcagatcctgngagaatgtctctacaaaataaatctcagatgtagagtactaaatgaagtctcaaatgttatctttaattttgtatcagatcatgattttatcttgctatcgtctaaaacatcatacgcatacttcacaaaacatgttctgataacgcataagacacaaattttaacctttgtatttgcttacatctaataaaaataattaagagttttgattcgtcttaagacataaatntcttttgacttgacaacataagagaatntaatccaaactttggattaactcggcataaaatattttaaatgatgcgtcaattaaccattcactntataaaacaaatatttatttaattaaaatccanaatttcttcaaccaaggcacatgattagagaaaacanacttgacacatatttgtcacanattaattaagaaaatgggtctagaattaaacagtgta

SEQ ID NO: 154224 - DNA, 404 bp, Glycine max
ctgccagctttgagcaattaaacgacattttttttctcgaggctgattgagtcccgttatatatcgagaccctcgaaattgaatgttgaacctatgagtcaattcccacgaccataacattttactcggatgtctggttgagtcccgtaatatattgagacgctcgaaattgaaagttcaacctatgagccaattcaaaggacaataactttttactcggatgtctgattgagttccgtcatatatcgagacgctcgaaattgaatgttgaatctctgagccaattcaaatgacaataactttttactcggatgtctgattgagtcccgtaacatatcgagaccgctaaaattgaatgttgaacctatgagcctatacaaacgacaataacttgttacttggat

SEQ ID NO: 154225 - DNA, 401 bp, Glycine max
  unsure (1)..(401): unsure at all n locations
ttcagcgtctcgatatattactgacgttatttatacatnccgagtaaaaatntatgggcgtttgaattggctcataggttgaacattcaacttcgagcgtctcgatatattacgggacttaatcagacatccgagtgaaaagttattgtcgtttgaattggctcataggttgaacattcaatttcgagcgtctcgatatattacgggactcaatcagacattcgagtaaaaagttattgtcgtttgaatttgctcagaggttaacattcaattttgagcgtctcgatatattacaggactcaatcagacatccgagtaaaaagttattggtcgttgaattggctcacaggctcaacattcaatttcgagcgtctcaatatattacgggactcaatcagaca

SEQ ID NO: 154226 - DNA, 403 bp, Glycine max
  unsure (1)..(403): unsure at all n locations
gcttattatcaaaacactgttgatgtatttttactcgaaaaactctctaggtgttatattaagcaaaaaacaaaccagtaatatagaacactaaaagaagaaaaaattaagagccaatataaaagagggcacaaaaaaaaaatcctcactnaccatggctgttagttctggagtgtgttgagctaatggccttttaacaacagtagaagcagcaaattaacatatgatggtttcggaggaggaggagggggcctatttgctatatgatcctcttcctggaagtttggaggaggaccaggaggaagtggaggtctcatcattggaggaggaccaaggggaggaccatatggcggccttggcattagggggaccattattccaggaggtgggggctgagcatgta

SEQ ID NO: 154227 - DNA, 324 bp, Glycine max
ttaactatcataccctaatttcgtccggggaccatcttgttggtatgatgcaaccttcgtttgatcgctttgaggtacttaacacccatcgttaggcaattcgtgaagttccgtgacatgccggaagtcgaaagcaagcattgttgcgcaatccgtaaagttccgtaacattccaaaagtcaaagaggggatggttgcatatccatgaaggttcgcgacattacgaaaagaaaacaagtatcgttacgtaatcccgatattcccgaatgttacggaaaaagaatcagctaaaaaagcaaagggggagtgtattattaaacaggg

SEQ ID NO: 154228 - DNA, 351 bp, Glycine max
tttttattttaaagcaacaagagacctaggctcaactttaatccggggatgtttaaaggggaaaaaggttgatgcaaaacgcccctttatactttatatttggtgcagagggtcgccaacgagcaacctgcactttttttttctctgagggaaattaacaatgccctccttcttggatagcgcttgctacctgacaacttagataaatatgcgcgatacttacttattcataacaacaaaattaataaactggaatcatagaacaggttgctgcagaactgcctgttgctccgcgaaaaggcaacataagctatgcacccttccacttgctctctaggacttattataaca

SEQ ID NO: 154229 - DNA, 408 bp, Glycine max
agcatggagaggatgtttcaatggatgttatgaaagagggagagaaacagagatgggggagcacgaaattgaaggaattaaagacgtaaagaactggaactttgaagtatgtctcacatgactctcattcatcaaagttacaacaagtgttacacatgccttctatttatagactacgtagcttccttgagaagctttcttaagataacttccttgagaagcttccttaagaagattcctaaagaagcttgagcttagctacacatacctctctaatagctaagctcaccttcttgagatgagaagctagagcttagctacacaccctctataatagctaagctcacccccatgacaaataacatgaaaatacaataaaaaagtccttactacaaagactactcataa

SEQ ID NO: 154230 - DNA, 418 bp, Glycine max
  unsure (1)..(418): unsure at all n locations
gcactaagctttcgaataaattctgatttagccagtttggataaattnttgaataattacttatagtagaagaaaataaaatgaattgaacttcacttctcttgtaagttaaaatcaacttaagcacttcgacttctataaaagttctctcatctgacttctccgaaaagctgagatatattatgttttctcttacatgctataagggcttattgagaactttatctaaattgatccatagtatttaattaagttgttgatgcaatcctaccccgcaagggcattggctagaagactccaagtagatggtgctagagatccaaggaaaggccctangggagatggaccatttcaagtgcttgaaagaatcaatgacaatgcttacaaagttgagctgcccggtgagtataatggttag

SEQ ID NO: 154231 - DNA, 408 bp, Glycine max
agcttatcccatgcttctttggccgtcgtttcgttggatatcttctcaaatgtatcttcatccaccgattgataaatgagaaagagagctttcttgtctctctttcttgactccttcaacgtctcctttacaccttggcttagcgaggcttcatcttgctcctcgaagccattctctacgatatcccacacatcttgagctcctagtagcgccttcatcttgatattccaattatcatagttgttctttgtgagcatcgacatttggaaaggaaaacctccattcgccatcttttgaggatcttgaagctctgataccaaattgttggaaataaggctttttatgtttatgaaaagtgtctaggaatattggagactttgaatagaaacttgataggaaggagaattc

SEQ ID NO: 154232 - DNA, 439 bp, Glycine max
  unsure (1)..(439): unsure at all n locations
tgacttatgcacacacacatttatattgttgcactagaatcagaagtacggtcaaaagagtattctttatgaattttnttttatgagtcattgaactatagagtatcaccatcgctaagaacaagaatctcaaacaaccatactctttatgcaattaagggtaaacaccatactacaagtatacatagaattataatgttcttataataagtatacaacttacatataagaagtaagaattaaatagttaataaggttggattaaggaatcataaacttcaactactacattcacgactacgcacaaaataaagggagttaagtagtcatgcgtttacacatcaagaaagacacactcatccaagaaatatatatgggtcagaagaatttccaacacttatccacacatcaagatagaaataagtttattaacaacata

SEQ ID NO: 154233 - DNA, 423 bp, Glycine max
ggaccttaagcaccgcagctgcaacttaaaaaagaaacaacttttctgtgaacgaaaacgctgaagaatgatcatggaattgatcatggaaacgtttcgaaagcgcctaaacttcgttatatcttcttcatactccttcttatcactaatttcattgaaaatctctcagtctaagaagctgaacccttctccttagccccctcaggcctatttataggaaatgaggggtggaggttgcacagcagctcgcccaggcgagctggttacttcagccctaagctttctagtggcctaagcgagccagaggctagcttaggtaagccaggggcctgaaaagtcgccaaatgaccattctgccctctcttttgggtatattccgcattgtcttttgaaacgtcgaaaaaatctacggattgcacgaca

SEQ ID NO: 154234 - DNA, 317 bp, Glycine max
  unsure (1)..(317): unsure at all n locations
tgcagnnggtattaaacaattgaatcgactaaagctatttgaaggaattgagtaaatctttatccacatctgtactaagcatttgctaaatgcccatgacttcattgaaatataatctcggatatagatatacatgttcaccacagatataaatcttttatacgcgatatatatatatatatatatatacatatatatatattcaatatcgtcatgtccatatattcaatgtgtgtaattatttttatgcacctatatataccatatttatctaacgataccctcactcatattgcgattatcaactatatatatat

SEQ ID NO: 154235 - DNA, 311 bp, Glycine max
  unsure (1)..(311): unsure at all n locations
gtgtctcttcacgtctggaatatgaatgtancatataaatccaaagacccttaggtgctttgttgatggcttcttcccgttccaagcttcaataggggtcttgtcttttacagacttagttggacatctgttgagtatgtcaacaacaatgtatactggttcaacccagaatgtgttaggtagtcccttctcttgagcatcgatctagccatctccataactgggcgattcattctctcggacactccatttgttgaggagaatatgccactggagttgtcattcaagccctcatcctcacaaaatccttc

SEQ ID NO: 154236 - DNA, 378 bp, Glycine max
acatgacctctatttatagcctaagcgtcacacataattggagggaaatttgaatttcaattcaaatttcacttgaatttgaaatcgaatttgtggagccaaactttggagccaaaatttcactaattatgattagtgaatattagttatggttcagcccactaatccaagatcaattccaagattctccactaagtgtgcttaggtgtcatgaggcatgtaaagcatgaaggacatgcacaaagtgtgactatatgatgtggcaatggggtgtagtaagcaaatgctcacctccccctctaaaattaattggattgggcttttaccaattcaattaaatttatttcccaacacacatcagatattcacttagtgcat

SEQ ID NO: 154237 - DNA, 411 bp, Glycine max
gcatgcaagctagagacccatcttcaagacattatctatacacaacacaagggcatgacttcaaatcaaattgggtcagtaacagtaccacctatgtttcatacaaacaacagagcgagactagatttgatcttatggaagacaaggctgacctcatcattggaaattacactgatggaaaattggtatcatccttaatggcttctagagctcgagttactcgggttgttttgtggtttcatcatgctactgtggccataacagtataaacacaccgcaactagctaggtagattaaacctcatcattgcgctaggtagaataagaaatcaacaattaaaccggaaatagagtcagggttgtcgacattacctgtttcacgatgtgagtactgatgcgcgcgtgcaaccac

SEQ ID NO: 154238 - DNA, 402 bp, Glycine max
caaattgtgtgtttatgattgtatgggatgagatgaaatccaaaagttgggacttgtgctggttgttgattgatgaatagcctaaacacttgtgcttgagtgaaacagtgatcgtgaggatttgggttgatgatccttccttgatatttgtcttgcccgctagcttatttcacttgtgttgcttcattatcatgttcctatcattgaagctctgcatatttttatgagaagctgttggttgaaagcattgctcgccacttgtgttcatgtgattgaattcttcggaacaaacactcttttgaatcaccactgtgagcttatcacttgaggacaagtgaacctgtcttctttgcttgatgacaacaaaactgtaacttgggggagtttgtagtcatctctatg

SEQ ID NO: 154239 - DNA, 390 bp, Glycine max
agcttatatgtgaaaatatgtgacttttcacatttaatttgaatttccacattcgaaggccctggttatccgttaccaaaaccttggaattgattaccaccttttgaaattaattggaaccttgctaattcaatttgaaaatttttcaaaacaagtttggtactgggtatcgattaccaccattttggaattgattaccaaagagtaaaaactctttggtaaaagggtttggcaaaaacttatgtgctattcaaaggtttgaaaaaccttttaaaacttatcttgagtgggacttctcttcatttctgaatcttgaggcttggatcctgatccttgatcttgaaatcttgacccttggatcttgattcttgactcttaactttcttctta

SEQ ID NO: 154240 - DNA, 444 bp, Glycine max
  unsure (1)..(444): unsure at all n locations
aacaacccagaagtgttacaagattaccgggctgaaagttctcaatcaatgctactacatatttgaattcttctagccctcgtccagattcctttgaaagcctcttcacagctaacacttgnccatctatcagctttccctgaaaaaagtcatcagctaaacttaaaatgcttttaacgaaattagaatttctggatattggttttctttatcaccctgtacactggttcaaagccaccttcgccaagcttatttttagttgaaaagttattggtagcattagctaagactgacaaatcgaaagttggcaaataccatctttctttctcggttactcttgagatgcttgatgtaaagattcttgctgtccctgattggttgcaagatacaaacaatatcatgtcatatacatagattctgtcatggtcttacttttcaattatg

SEQ ID NO: 154241 - DNA, 399 bp, Glycine max
  unsure (1)..(399): unsure at all n locations
agcttctttnggttgggatgtgtgctctatcacgcaagattacgtggtcactagcagcaatattctcaatcaattccatagcttcttcaggggtcttcaattttatttttccccctgcagaagcatctaaaagctgcttggattatggccttaacccgtcaatggaaatattaagctggattggttctgaaaatccatgagtatgcgtctttcttagcaacccatgaaatctttccaaagcatcactcaaagactcgtctggaaattgatgaaaggatgagatggcagcttttccttcagcaatcttggactctgggaagtatttcttcaagaatttttcaaccacttcatcccaagtcttaagactattacctttaaatgaatggagccatctttttg

SEQ ID NO: 154242 - DNA, 322 bp, Glycine max
gttccagatccagtttcatgagaagaaatccagaagattccagaatccagagaagtttgatttttagattccagagaagatgaattcaagtttctagagaagaaatccagaagacttcccagggaaatattgaaagattttcaaaccaacatagccagtttgttttcaaagagtttctcaaatttctagtacatgagtttctctctctatcatgaccgttctgattgatccagggcaagttgattcaaaagcttcactgattgcacatccattgttcaaatgtgtatcataccggtttaacgtgaattcaatcatggagagc

SEQ ID NO: 154243 - DNA, 406 bp, Glycine max
agcttcatgatgatgaatcaagttgattcaagaagttttgatgatgacaaaaagctcaagagaatgatttcaagattgagtcaaaaagttcaagatcaagattaatttcaagattcaagaaatgacatcaagaagattcaagattcaagagaagttgatttcaaagattcaaaaaaagatgaattaaagattcaagagaaatcaagaagacttcacaagggaagtatcgaaaagatttttcaaaaaaccaaacatagcatagttttgttttacaagaaaagtttttctcaaaattttctaagttaccagagtttttactctctggtaatcgattaccattttcctgtaatcgattacctgtggcaaagtttgatttcaaaagcttttaattgaatttgcaacgttc

SEQ ID NO: 154244 - DNA, 450 bp, Glycine max
  unsure (1)..(450): unsure at all n locations
tgtgtcccacatttggtagctgtggacctttgtatattcttccttggagggggtgcaaaatagagcatttcaaggtttagagttcagcataaaccttggtctttgagcatatgttcaagaggttttggtaactttatttagttgatcgtctaatgggatagagttgccatgttctatgacatcctagaagtctatatgaatggaatcgaaatgagctatcatatgttccttccagtagtcgtatttgacgccttagaatagtggtggcttgtttatggagtatccttcttccatanttatttgactttaggatttntcctctatatttgtgagaatactcaacctgaaaggctgagctctaatgcccaattgaatacaataaatcatactacaagaaggggtgaantatgtgttagtcaaaatataaagccttttaaattgaagatgtta

SEQ ID NO: 154245 - DNA, 391 bp, Glycine max
agcttatatatacacacatatcttattttacatatccgcccgaaggatataaagctaattcacacataaaaaaaacttgaaggaaggaggaataaattgggctattcaatcccttcaactaatatttttaacaaaactatccgaataataaataaaataaaagaactgcatataccaccactctcaattcttgtccccttctcaaaaagttactaaaggttaatccatcatatatgtatatatgaaatatgaacctaatcgtatatttaaaaaaaaaaataaaactgaaaccgacaacccaaaagaaaaaaaaaagaaaaatgaaattaagaatcttgtactaaccccacccccctcgtttctgtgtgtcgcatattgcgctgctgatgat

SEQ ID NO: 154246 - DNA, 342 bp, Glycine max
agagcttatagatacatgcttttagattggtctggcactgaatccaactcttaaatattgatatggactatgaatcagcttactgtttttaaagaaaaatggcttgaaataatatctgtattcacatattttgtggaagataatgacagttatatggcgtaattgcaggacctagattcatgaagttgcttgatcagtttggcagctgaattatgattggttactggacatgtataagagcagcatatggtattataaatataaatgacttcatggttatggacatataaaagtataggatgaactcatgtcttagattatgtaaacaattatggatttttt

SEQ ID NO: 154247 - DNA, 106 bp, Glycine max
gatatttgtctgtccattagctctaatgcttaaaggtactttctcgttgacatcttttgtcttgaatggaattgccatgacaggtttaatggtactggctttgata

SEQ ID NO: 154248 - DNA, 491 bp, Glycine max
  unsure (1)..(491): unsure at all n locations
taaagaagctagagcttactacacacaccttcttgagatgagaagctagaacttagatacacaccccctataatagctaagctcacccccatgacaaaatacatgaaaatacaaaaatagtccctactacaaagaccactcaaaatacctcgcaatacaaggctaaaaccctatactactagaatgaccaaatacatggcctaaacgaaggaaaaaaaacatattctaatatttacaaagataagcaggctcatacatagcccatgggctcaaaatataccctaaggctcatgagaaccctagggccttcccttggatctctggcccaatctacttggagtcttctatccaatgcccttgcggggtaggatngcatcagtatntgagcataacaactgccagcagaaatatatntcgcctcagtagtgggataaacaacgctatnntgtttcttactatgccaagaaactagagcagatccaatgaaatga

SEQ ID NO: 154249 - DNA, 405 bp, Glycine max
  unsure (1)..(405): unsure at all n locations
ngcttgaagaggatgcttcaatggatgattagatagagggagagaaagagagaggggggagcacgaaattgaaggaataaaagagggagagaagtggaactttgaagtatgtctcacaagactctcattcatcaaagttacaacaagtgttacacatgcttctatttatagactaggtagcttccttgagaagctttcttgagaaaacttccttgagaagcttctttgagaaaacttccttgagaagctagagcttagctacacacacccctctcataactaagctcacctccttgagaaacttccttaagaagattcctaaagaagctagagcttagctacacacaccctataatagctaagctcacccccatgacaaaaaacatgaaaatacaaaaaaaaagt

SEQ ID NO: 154250 - DNA, 418 bp, Glycine max
gctttaatttgactctatttaacgaatgaaccaagcttgagtggtgtggttttttttccacaagccaagcctgagctttaaggaccaacttggttcaacttgttttacacccctattctacacccttctttgttcaaaaaataaacatacgcatcttactttttgtactggtccttcaccatttctctttgtaaataccaaggtgtaatattccaaaaatagagcattatatgtaataggaatttaccttgggggatgtcaatacccttacattttttcaaaaaaataatgaattatgtgctccaccccacacatggtgttctgggtaggtatctatttgtggcttttgcaagtaaataaatgttgcaatgggtttctatggaaaagctaaaccattcagtatgcaaaatggtctctc

SEQ ID NO: 154251 - DNA, 407 bp, Glycine max
agctttttgcagtatttacattgggccttgtcttgcccaatcttatcaaaatggttccacacaatacttttgagcctccctcctccaatttttgttgatgatgcaacatggtcatccacctccatgttaggtggttgttgcataggttcattattaggacctccagttttattggtagaactttctattggagttggttggtgtgaagaaaatggagtaggatggtgtgaagactatggagttggttggtttgaactaggttctttagtttgcatattttctatcatgtgttcctaaaaaactaagtatgttaattcatgttatgatattagaataaaaaaagaaaaaaaaaatttatatgtatgacaatagtgtgatatatagacatttaatctttatataagata

SEQ ID NO: 154252 - DNA, 463 bp, Glycine max
  unsure (1)..(463): unsure at all n locations
ccttagtttcgctggttatttctcatctcatttaaaaagaactttcaaagtaagtgtccgtttgaaaatttcctttttgatgattaaccaaggttacaacatgaacgatcagttgaattttattttaaaggcgattaaacgagattacaacacaaacgatcgattgaaattcattttaatattgattaagtgagattatgactcanacaatcgatcaaaactcgcttaatacgaagaaaaagaataccgaaagtagacaagatgaagattaaaacatacaaagcaagaatggacccctaagggtacatagaatgaattcaaggcttcaaagtcgaaaactagccgggtgaagattgacgaacaatgaagaacgacgaagaacgttcatggaattgatcatgganacgtcacggaagcgcctcggccttgatttctccttattcttcttctctcactaatttaa

SEQ ID NO: 154253 - DNA, 410 bp, Glycine max
agctttgaacaatatacttagccttcatttatctgtctttgggctcggcgaccactactcaacaaagtactttcgacacctactgtacgttgatttcaccaatgctgttatgagaatgttgcgacaatcctttaaaaccttattgatacattctgagaggttcgttgtcatgtggccatatcgacgtccttctctatcgcaagccatcgcccatttttcctttgagatgcaatccatccatgttgctatggctggactcagttcacgaaatttttctaaattttgataaaaaaaatgtgcttgccaagagtgtacgctgcataaaattagttatgaataacaattttcagtataaatgaaagtttaataaacgtgaccatcaaatatgaaatcttacccaatttcttcaa

SEQ ID NO: 154254 - DNA, 390 bp, Glycine max
  unsure (1)..(390): unsure at all n locations
agaaacgatgagcactactctgatgctaaacgagacggcgtctccttcgaagtagggcaatgggtttacgtgaagctcagaccangccgncagagctccgtcatcggacagccccacccgaaactatccaagcgtntctttggtcccttctagatcatggagtgcgtcggagcggtggcatatcgactccaactcctgcctgagtgccgaatccatcccgtcttccatgggtctcttctntgagctcatcatggaccgaaaccagccgcacatgatgtntgccccttacagatcctggatcagcaacctctccgacaaccattatggttcctcgacgttaaactcgatcagtcgacaacaccacccaccctgtngagtcctacacaatgg

SEQ ID NO: 154255 - DNA, 398 bp, Glycine max
agcttgtgcttatgagtgcacaactctttcaagaatttagcatatcttggaatttgctttattgcatccagcagaggtatgtttacctctactcttctaaatgtttccaagatctccttctctgcctcttccattttttgttggaaattgctcttggagggaatggaagagggatatgctgctgctgtaagtcagaattaccagtaaaagattcacctacatagaaatttttaggcaacttactctttaaatttttgtcatcatctttttctaaagtagagtgaagttgggcaggttcatttgcggatgaggaagatgctactggttgaggtccttgatactgctttctcgacctcaatgtaatgacactcacatttttgggattctggatagaatga

SEQ ID NO: 154256 - DNA, 455 bp, Glycine max
  unsure (1)..(455): unsure at all n locations
cctgcttttatttgtgaccacagagtggtacctggagatatgtcgtgggggtcaggagaccttggggacgtcaagtggggtgctattgcccaaaaccaagcttgaccaatcccgacccaacccgggcatagtcggtcagtgagaacctgtgatgtacctaaacaggcgagctcctggcagtcaacagataaaaggaacaaagaccacaaagcaaggaggcttgtggtggctggccagctgtgaaacttgagtgatatgtgggttgtggctctggtaatcgattaccaagggtgggtaatttgatacaaggcttaaaaatgaagacagtgggctaagaatgtctctggtaatcgattaccaggggatgtaaatcgataccaggcttganaacgaagtcaggaagctaaggaagcctctggtnnatcgatacacagtgcatttttgcatatttcatg

SEQ ID NO: 154257 - DNA, 402 bp, Glycine max
agcttgtatgtagatactgaaaatattatgaagagtttaaaaaataaaagaaacgaaatggaaattgttatatatgaaattagccttttaaacttaaaatattatttttgtgtttaaaatacttatttaatattactaaactttaacgtattattttatttttggctattgtttttattttataatgttatcttatttttgttttctgattattaacttttatttgttatatttttttgtctgatttgataaattcttctatgattttttaatgattacagtcatatctaactttttttatattttagtatctttctaatttatatttatgtcaatgttgataatttttaatttaaattattctatatttttcttctttttttaattcagataggatttatg

SEQ ID NO: 154258 - DNA, 351 bp, Glycine max
  unsure (1)..(351): unsure at all n locations
agtgctagtctgctgcagcttgaataatgcaccttgaggatcatcataaaatgaaggcgcaaaacgcgattcaagggcttgcagcatcgcggtccacgaggggaagaatccattgcggtacatncactggtaccaggacagtgcagcgccttccatatagaatgaggccaccgtgacacgttcttgctcangtatgccctgatactcaaaatattatgaaattttgaatatccaacccaatgcatcatgaccttcaaatctaggtacatccaatttcatatgatgatggcaagaggccggtgatggcggtggttggcctgcagagatggtggaggccgacgaagctgtaat

SEQ ID NO: 154259 - DNA, 307 bp, Glycine max
ccacaagtcagacgacagacggacggacacgtcgacgacgaaacatccgactagacgctccagcgtggccggcgtcgactacgccgaacccatagacttgcactgaatcagacaaaacgtttctttttatcgcgtgtggcggtatcaaggaaacggcatcgcggaatcacagtggaataccaacagggttggaccgggagatgaaaagtgaggagggtcttgaaaatgaggggagttgatgcatcacagacaccactagaagaggaaggaacaatgacttcaaaaccaagggtcttgtttcctccca

SEQ ID NO: 154260 - DNA, 403 bp, Glycine max
agcttagcccatcatcaatattgatttcaagaaacaaaaaagcaagtagatatatcagtgaactgagccagaccaaggaaaaatacatcaaagaaaataaataatctagtatagctaattttataatcagataaagcatctgagacctgctgccatgtggtatcaacaggaggctgccgccgagcatcgccagcatcaaaatccagtacaccataatccctcaaccgaatctacacagcaataactaaaatcagaagtctttttgaggattaaatgcatggcattatctataagacacatttttcaaattgagacaaacccgaaggaaggcacggattctttgcaaattcccaacaccaccaccaagagcagcctaccattagataaaaaagcaagcagaaat

SEQ ID NO: 154261 - DNA, 454 bp, Glycine max
  unsure (1)..(454): unsure at all n locations
tctgtgtatccatagctgcagaaagtattttcaatgtgatacaataatagtgcgttcactgtctatctacattgagaccaaatagaagaataacaatcacgaacattctaatagggtattatctaacaaccagctaaatgacaagtatatagacaaaaaggcattctccttcaagctaatcggcatcagatctttagctacaaatctaagaattatcatctaaacggggatgctcttttaaaatgttgagaggttatgaattttgacaactctcgaaacactgtaatgtgcactcacatgtttttagcaaacagagaaatacttattcgctcccgggttaagatgaggaaaattatggatacccataaaggggaaaaggaaacaatggaagaaaaggatanntaattgtttggtgatagttggattgagaaagcatacataccccatatgcatg

SEQ ID NO: 154262 - DNA, 402 bp, Glycine max
agcttcgtcaccgcagcaacactgtataaaccttaaagcttccgccatcgacacctactggttcttttccgactaccgccttccccttttttttcggttagtaattgtttaatttcaactgattgtggttttaaattgaaacaattaacacaaaggtaacagagaagaagaagaagaaaaatttgggtttatttgcaccgcctagtagtagcagacacagagaagaagaaaaatttgggtttgtctttgaaaggttaaatattttatgttatatagaagtactaacattgtgaaaatgggtcccatatttttcaagtttatctaaaatctcatatggtgaaattataatattgtatcatactgatcacttcaataaatttcattataaaaaatatgtacttt

SEQ ID NO: 154263 - DNA, 441 bp, Glycine max
  unsure (1)..(441): unsure at all n locations
tattctatntttaacccttatttcaagtgttgtgtgtctcttaatagaatgattcttcactcaagttcttcgtctgatgaattgcggtcattgggacatttaatgcttgcattaaaagcacatcccttcatcatgcaaagagtccatgctgatatggttgcgtgacaagcacttcagtagaaaagtcatctcttccattatagtgggtctactcaattgagcacaccttttgatgaagataagcactttcagaccttggacttcatntattcttctaggagaatgtttatgtaaaataaaatctcaaacccagagtattaaatgaatgtcctaaattcaaaacttaaatgctatgccagatcaatgttttgagagatatcatctaaaacatcagattgcaaaatacaaatcatgatatgatagcacatcagacaccacttt

SEQ ID NO: 154264 - DNA, 401 bp, Glycine max
agcttcctcggggccattcctgcgatagcaaacatttggaaagttagttttaccagtgggacgttactcttaaagcaaaaatggcatataacctcctcccataaatacaaacatcaatgtaaatttagagcaagcttatgcgcatatttccttacaaacgttctcttgcacaagacattctattaaccgaaaaaaatgcacccatatacaatcaaggcagcttcgttacctagattatttacacgtacttccaaggcgtatttgttacttacatcacacacatctccttggctaaattcacatacatgcatactcaaagcattttggggtaccaaaaattgcacatgtgcacatcttggtatttctaatacctatacatacacaaacttcatgatgaatct

SEQ ID NO: 154265 - DNA, 435 bp, Glycine max
  unsure (1)..(435): unsure at all n locations
actcagcntgtagattatgggggacccatacatgtggtactatgtggcggtcgggcgatggtgcacaacaagctttccacatccacaatgcgcgcataaacccaccatcccctgttgcccacctccatctgagctcacgtactcccacgtagcccatatcctcgtttctctcaacaccgggtccccatcaatcctctcaagcttccacaacatccaagcaaaacaacattcaaacagcacaagctatcacagccaagcaaaacagagcanaggcagaaaactctgctcaacacatcaaccaanatcacagcttttctcacttaaagaccccagtaacaatttcttcgatccaattcgttaaccggtggatcgacttcaaattntactggaagtctatagtgtataagcctacattgtgaccgttgtgatctacta

SEQ ID NO: 154266 - DNA, 409 bp, Glycine max
  unsure (1)..(409): unsure at all n locations
agcttantagtctctccgaaatgatttctacacattatccaaagatcataaggaacttcaaaaagtctatgaagctaaagtagacaattctttggaagaaaccattcaaaaatgtaatgcttatgaaactgtcaagttggaagagactaagatttaccttgagaatgagtagctatccaaagaaagagatgcataaatcatagcttttctaatttagaaaagaaaatttaagttttgcaaaaatattttaatgaacttatttagttacatgagaatcccaaagaagatagatatgaactttggagaaacaatgcatctctacacttaaaatatgagaaattggaaaatagtaaacataatctttgggtacaatgtgagccctacaaaaggtgtgtgaaagtattaaatg

SEQ ID NO: 154267 - DNA, 481 bp, Glycine max
ccaccttccacgaccaccatagctagctcctatcaagactcataattaatcatttgcaaaagggccaattgcaaggaagaatgctaaagttgagggtgaagatccgttaagaaacctatatcttaaatgactcagcgaaaaacactcaaggtggaagttagttgtgcctaaatcaaaagtgtttggccacctctcccgtggctttattatatttttggttaaaatgattctagtggttgttaaatcgacaaaaactttaacttactttttcgaaatgaatattggcatttcaaaaatgtcaaaaatcacattttgaaatctttaacgaacacatcataacttaactaaaggcagagagactcataacaatttttcatatatttgagatccaacgtaaagaaaaaattattagggacccataacaaaatctggttatttatataaatatcgtattataatggaatatttctcgagtcatatg

SEQ ID NO: 154268 - DNA, 312 bp, Glycine max
gtgacaactaccttgtgtgttacatagtcctctctgtgcccaactatacttggatatgccacaaaagcatttgccctttacaaacatcttatgatcatttgtcaaaaaaaattaaaacgaaaggggcatgtcattcactaaaatgcgaactatatattgaatgcataaatcttcaataagggtattccttcacatgatttttaaaaaatctcatttataccttcattctatggggggaaaaaagtcacttacattatatttctgacatttacttgaaaaaatggtataaaaaatgtcatgttgggaagatgc

SEQ ID NO: 154269 - DNA, 408 bp, Glycine max
agcttcagaaaatcaaccttatgtgctaggtggattgtctagtcctcctaaacgtagcctctgaaggaatatctgaatgtggaggggaccttgggggtgttgccatgaatctgcgcagtcaagccaattgagttaggacataatcagttatataagcaacatataagcattaagttgtaaatatccaaatatataaatgtattacaattatgcgatatgttatatacattactttgttcatatgcagttatgcaggaatattttgccataaaccttcatcatgatcattacgatttgcttgtacatcatcctcctgatattcaccatttatgaaaggaatttgttgggagaaagtcgacatctcattgacatcaagtgttgaaccatcaatatggtcattgatacaat

SEQ ID NO: 154270 - DNA, 409 bp, Glycine max
aatgaccaataatatggtgttgaaagagcataacaagactttccttaattgatttagagacataatttttggtgaccataatgaaattgaaacgttaaggaagttagcagatgggcctaaaagaagtgttataacttggtaaggatacgatatcaacaagtattcgttctacacgaaatcaaaagacaacaagagtataatgcaaaacaatggtgtaagtctaagtgctgaatctcaacactttgctactatacatgatgacaatcctcatgtagcttcaatgccttactttggagtcatttaagaaatctgggagggtaagttatgtaaaatcaatgtctgtgtttcaaatgtaagtagtagatacaatatctgtgtgtcacccatgattctgattactttggtgatt

SEQ ID NO: 154271 - DNA, 410 bp, Glycine max
agcttatgcacatatttccttacgaactttcacttgcacaagacatcctatcaactaagaaaaatgcacccatatacaatcaaggtagcttcattacctaaattatttacatgtacttccaaggtgtatttgttatttacatcacacacgcctccttggctgaatttacatacatgcatactcaaagcattttggggtaccaaaaactgcacatgcgctcatcttggtatttctaatacccatacatatacaaacttcacgatgaatcttgactacctacacaataaggtgctacatttcatgctttttttcaagtttttgctacctaaagccacatgcaaattcaagcatattttcctttgctgactaaaattgtattcaaattagaaggtatatattttctgtaatat

SEQ ID NO: 154272 - DNA, 335 bp, Glycine max
atagcgggttgcaacctcaaaccaagatgatccttgatgcctcagctggaggcactatgatgtccaagagtccagaggaagccatagtaatcattgactccatagcagccagtgattatcaaagtcatcatgatagagctccgactctaagaaaaggtataatggagctggacactcaaagtgcaattctagctcaaaacaaactcttgacgcaacaaattgaggtcttaacaaagcagataagccaacttcctcagcaatatcaccaaagtagaccacaaaaaacacatcaagctcaccaagttcaacaaattttgagatgtgatttctgtagt

SEQ ID NO: 154273 - DNA, 403 bp, Glycine max
  unsure (1)..(403): unsure at all n locations
agctntgcggatttggtcttctcctatgaaaggattgaagtgggtctaaaaagatgcatattttatcctcctgcttggactaatgagaaaactggggcaaatgaagaggatgagaaggaaggagaaacccatgctgtgactgccattcctatacggccaagttccccaccagctcaacaccatcattactcagccaatatcagccattctcattacccaccacccatttatccataaaggctatccctaaatcaacaacaaaacccacctaccacacaaccaatgctatacaccacctttatcacagaccatgacaccgacctataaatgaattttgcagcgaaatacctgtaagatttaccacaaatttcggtgtcatatgctaacttgctccattatctac

SEQ ID NO: 154274 - DNA, 360 bp, Glycine max
aacaggttattcctacttggcttggaaaagtatgggaaaggtgactggcgaagtatatcaacgaactttgtggtgacaagaacgcctacacaagtagcaagccatgcccaataatacttcattcgtctgaactcgatgaataaagacagaaggcgatccagcatacacgatatcaccagtgtcaacaatggagatgtttcaacaccataaggaccaattactggtcaaacaacggatctgcggatatatctgctggataatcaaccaaaccagcctcaccagccccaactgctgccttgggtgtaggaatatatgctggtcctaccatcggacaacctatatgaggacccgtcgtatctg

SEQ ID NO: 154275 - DNA, 402 bp, Glycine max
tgcttgaatgacagctgttgctttatttacaaattcagcttctgttgaacattgagcaacattctattgctcttcgagctccatgagaagacacctgatccaaagctgaaacttaccctgaagtactcttcatatcatcaattgaaccaccccattcactgtcaaacaagcctatcagcttgaacttttcagttttcttgtacttgatgccaaaattacaagttcctttaacatatctaatcaccctttttgcagccttgagatgcatttcacttgcacaatgcataaaccgagacaaaatgcttacaacatttaggatgtcaggccgagtcactgaaaggtacaacaaacattcaatcatgcttctgaagtatgcttgatctatcttctcaattccatctt

SEQ ID NO: 154276 - DNA, 476 bp, Glycine max
  unsure (1)..(476): unsure at all n locations
ctcagctagcacatgggaaaaaagatagtaaactacttcttattttgagcataccccttggcaatgatgcgagcctttaaatgagccacagacccattaaaatccactttgatagtataaacccacttgcaaccaatatccctctttcttgcatggagagaaaacaaatcccaagtttcaatttttctcaagagctatcatatnctccttcattgcttggctctagccaccatgactaacggcatctaaaagagatttagggatagaaacaaaatctatgtagcaacaaaggaacttgaggtggatgacaaatgagcaatagacatatgtgaggaaataggataagtatgtgtacaggtgtgtntacctttacgaagtgcaatatggaaatcaacgcatgaatgacgatctgcacatgtcggagacgtatggtagaacctctggtgagctcacatgtggttcagcttcagtgacac

SEQ ID NO: 154277 - DNA, 402 bp, Glycine max
gcttgaaatgtgattcctgcaaataatggtttttttttataaaaaaaacatttcattgtccattttgagcttttcattttctttctgagcatcagaaaactgctctttcaaattaggatatttttgagctaaaatgtgagaataattgagtaagttgtcaaaggttgttctaaaactttctaattagaaaattccaaatcacttttagaattgtataccttatccttttcttagcctgccataaggaataggttggttgtatgctcttcatctttctctaaggatgatgattatgtatcatcccatgtagtcatcattgccttcttctttggattatttctcttgaaatattttttaaggaagggatagtcagtcttgatgagatcaagtttattgcactca

SEQ ID NO: 154278 - DNA, 395 bp, Glycine max
  unsure (1)..(395): unsure at all n locations
gtcagagatgtaaaccataagattcagagctgtccatatttgtgattgaaagatgctttctgagcttaaagggaaattntaccacacaaccatagggcctgtgatactgtatggtactatatgtaaggcggtaaagagctcacaagagcatgagcttagtgttgcagagatgtggatgttttggtgcataaatagacatacaagacatgataggttaaggaatgaatgcattaagagaaagaagtgatagcatctattgtggagaagatcatagaatcttgttgaaactggaggatgtttggccatgcgagaagacaatagaagcctcactgtgaanaggggactagaatcactacatgcaagatagtcctattcctatagctgatgatgatgat

SEQ ID NO: 154279 - DNA, 396 bp, Glycine max
  unsure (1)..(396): unsure at all n locations
tatcttctntccttaattgtttgttcttacgtgagtaataaatggctgatagctatacttgtatattgactaatttagaagttatattcatgtcagatctctttgaagtgggagtcatgcccacagacagtgcttatattgaccaaaccaaattcagtttcagttcaaattctgtgtgctgaaatgactacgtatgaattccaatctatcggttgttttcactttaagatctcccaaagtcgggttttctttaattcggtactgatctgagctataaactcttcacaaaagtatggaatgtgttgctaaagaatataatcttaatcatagagctcagaagtcaaaactcattgtatatttttatggaaacatgctacctcatggtgtcttccattc

SEQ ID NO: 154280 - DNA, 403 bp, Glycine max
agcttttaataatttgtttatgaatatacgtgtaattatttttttttttagaccttttccttcttttgacatcttccaccaccttattagctacaagtacactatgtaaaagttgtctcccatcaagaaaaatactttgacaattatcaatcaccttttctaatacctttcccattctattagctaataattttaccaaaattttgtacatacaaccttatcaatgaaataggtctaaattggcctaaactttgaggattatcacatttgacaatgagagctataaaagaagaattgatacctctaggaagcacaccatttccaggaaaattccttcaagagccacaaaatgtcttccttcaacatccccaaaactccttcatgaataagaaatgaaagtttt

SEQ ID NO: 154281 - DNA, 457 bp, Glycine max
  unsure (1)..(457): unsure at all n locations
ncggcaganacgaacacgnggataacgcatattactatcattcaacaaaaatattcacacaatcatcacagatccaactaaaaggagcaacacccagatcacaaaaaccacccattagttcaaatttcacaactttccacaacaaaattaagaaacaccaaatggggtagcacccagatcatcatccacaaacagatatagaaacggagaaaaacagaggaatgagagtagaaaataacttacgaattggcaagcgatgaagcgaataagaacgagaaaacactaagacaagatagagaatattttcatacacagaagaaatggacaatggtagntctcagatttagatttggactctacacactctctctgtatatatatagacgcgcgttttatgcatgaattatttgatcaactctgagttcgagacagctaangcgagccacacgatcatatc

SEQ ID NO: 154282 - DNA, 400 bp, Glycine max
  unsure (1)..(400): unsure at all n locations
agcttggttactgcgattctatgcccatcaattcaaccaaaataatcaaaaacacagaactgtccttcgatgattatttaaatagactttaatatgaacgaaattagctactgcctctatactaagttttgtcgattagtagttttagtactgcaaccagcaggttcataaatcaaaattccacctcaaggtccatccaaaataactgaaatagttaaattcaagaaacacggatcaataatggttatgcaccaatctgttagatccaactaagctcaaagagcttttgagcaattgaaggttcatagacatccaacaatgctgaagcatatccaacctgaagcattttacactatgaaaccaagatttactacaatnttagcaattcccctcatgtact

SEQ ID NO: 154283 - DNA, 383 bp, Glycine max
atatatttagggactcatggtcactatgaatgacaaattccttgggataaaggtagtgttgccatgttttcacggcccgcactaaggaatacaactccttatcataagttgaatagtttagagtaggaccaattaacttttcactaaaataagcaattggatggccttctagcaacaacacagccctaatcacaacatttgaagcatcacactcaattttaaaagattattgaaagtttggcaacacaagtatggggggcattagttagcttgtgcttaagaacattgaaagcttcttcttgtttctcttcccatctgaaaccaacatttctcttgagcacttcattgagaggtgctgccaatgtgctaaaatccttcacaaa

SEQ ID NO: 154284 - DNA, 402 bp, Glycine max
agcttgcagttgtatgacactctttttgtttttgcaatgttcgacgagccttcaatgaagttatgcaggaatcactttatgaatttattaacataaataaagaaacttcccaatgcagaactgatggttaggaaacttgcatgcgatagcatacaaattaagaatcaatgggtacagagagaatttcaaataaaaaagcagggtagacaaggcactaactataaataaaatacttatattttttctttcctctacaaccaaaaatttgaaatattaaaagtgaaataactgtggttgcattttcatctgtaagtatttctactgcatttatatatggaatgccaatgaagcctttcagataattataacttaggcacatcagttagtataacaaaattgtat

SEQ ID NO: 154285 - DNA, 410 bp, Glycine max
  unsure (1)..(410): unsure at all n locations
tgttacgtacctctttaaggggagaaagtgatcattatatattatactattgagctgccactgagtgcattttccactgatcatctagttntcagaattttacacttttaagattggatggagggaaagagatagaggaataaagtttgttactttaaaacttcatttcgagtaaaaattctccttatttgatacattttttatattgaaatttatcatgtaaacttacaatcatttaatgcttattaattattataaacattctataatggtcattatgatccattcccttttcctttgtagctctcgttctgaacatactctctatcctgctgcacttttccgtactgtgatttctactcatgtatatactatatggagctgaagtaggctcgagcaatgatgatgat

SEQ ID NO: 154286 - DNA, 404 bp, Glycine max
agcttgcctgacattgtctacgaatgttgttttttgtatgccataatcacagatgaaaggaggtaacttgcggagtcactaaagaaagggacaagtcttggtagtagattggggtggtgatcgattctagtttgagaaatatttgggaaaatgttataagggtaatttaagaaaaacattgaaaaattgggaaacagaggggagagtataaattaaaggaagctagtatatcgacaagaaaagattaaagattctaattagacaatagacattcaactaataaagatagaaaattagggtaattttaaaagtaagagataaaatgacagaaagtaaaaatgctatcacaaaatttagaagataaaaaacgcatgaaaataaggagataaaatgtattaagccta

SEQ ID NO: 154287 - DNA, 443 bp, Glycine max
tgaatctcacgacaaatgtttgacaatagcatgaaaatttatctactcagaagaaaatatggagggagtcccacaattcgatttgctaagctctcaaaagcagaaaggtactggttgacaaatctggactgggtgagcttgaagaggggcacatgacacctaatgagtcacatggttcctaaattcaaagaatctaaatcttagtgaataaaattttcccatcctataggtctcttgcttatgcccctgagcttttccctggttgcatcatcattcgtatgaggcccaacatcaacaatcgtacttgtaacattgaggattggcccaataggaataaatgtactatcatcacaataggtgtactatcatcacattagtcacaatttctcacactgtcaaagatagcaacgaaatggcaaccacaaccacaaaacaatccaaag

SEQ ID NO: 154288 - DNA, 414 bp, Glycine max
  unsure (1)..(414): unsure at all n locations
catgcaagctaggnatcaagataaacttatcacctttcttctctttcccttgacatattagagaactcttttagcagctctaagatgagactcattagcacaattcataaatcttgaaagaacacttaccgcatacataatatctggccttgttgttgttagatacatcaagcagccaaccaaacttctatattcgaactcatccgctttagttggtccatcatccttgcacaacttctctttttgacacatatgagtggtcatactcttacagttacccatgcaaaacttctttagaatctcctctgcatacttttgttgacaaatgaatatttcattttgtctctgcttgatttttattccaaagaaataagacatttctgcaagatcagtcatctcaaagactcgaatcat

SEQ ID NO: 154289 - DNA, 439 bp, Glycine max
  unsure (1)..(439): unsure at all n locations
tctacggcgtatctgcttctaacggatgggtcgtgcgttttcttctcttangtgcggtctcatcactgtgctctgtttggctctgcgttgttcgtttgcttttagagtggcttttgaaaatatccaatatcatttcacccaaacactccattaagaataatagaaaatagtttatgataaagtatttttcagggattattattcctggcttattagttatatatatatatatatatattaaatttaaaaattttgaacgtagttttagttagaaaagaaattgtccatatatctattgatataagtgataacaactagtatattttaagtaagtcaggatttaaattttgattcataattaaatatgagataaattctattgaaagaaaatacttattttgtgtgtttactctctttgaaaaanaatggtcattacttc

SEQ ID NO: 154290 - DNA, 412 bp, Glycine max
  unsure (1)..(412): unsure at all n locations
agctnngatggaacaacaatgttagaaattgtctttttgtggganatnnatatgccacttctttatcctatgcacctagtccataagttaaaggagttatcaaatgattttatactttntaatataatagatgatccatttttttataattntttttaaaaattttgtcctcttaacctaagtatttgttgcatatgatagtaaaatatacacgcacatgtattaaaaaaagatcgattgacttgtgttgtcaaatttaataacatgacacttgattgcatttttcggttagtctgctttcttaatcttgcaaatttcatccttttattatttttacaaatttgatctctcactattttttacctatcggntaacttaacaattaatattttacaaaaatattgatgtaacc

SEQ ID NO: 154291 - DNA, 434 bp, Glycine max
  unsure (1)..(434): unsure at all n locations
ctaagctttggccaggtgaacctanagagcagagggggattttttcttcttctattgaagacaatggaatggcttctctaacctatatctgagcagactgagcttatcgctatttaactataaaggggatttataggaatggggtggggtcagattaataaatgatcctatggaaaactaaaaatcatatgatcattgagtatagatgagagaatgcatatttacattttgatcacacatcataaaatatcctgctctttaatttttcctaaatttttttgtttcaccttgtctgttactatgtacaagtatagtgaataaaccacaacacaatgcttatatctataattaagaaaatttggattgttcaacaagaggcttcattccaacatagactacaaaaaaatgcacacaatatgtgggaaattgaaatt

SEQ ID NO: 154292 - DNA, 421 bp, Glycine max
  unsure (1)..(421): unsure at all n locations
ttaagcacctgagctgcagctagaacaccctaaagaaaaaattactgtttccaagagggnatncaaaaacaagcaagaaaatgcaagtaaggtagagcaaaataaagcaagattagttgccaaatgctactcacaacaagaaagtataaactatacaaaaaccttagctctcgtttctcgtctagaggcaatacgtattttactttcatttgcagctcatactaaaatgagactatgtcaaaaggactatgataggatccctactatatctaactgcgttcaaactagacatattgtttagagttggactatgtactagatttcaacaagacccaaaggaagctcacgtcattattggtaaaagaatatttatatatttaatagaaacttctaatcttggtctttactctaattataacaa

SEQ ID NO: 154293 - DNA, 438 bp, Glycine max
  unsure (1)..(438): unsure at all n locations
ntgcttctacaatctcncccttttagatgatgacaacgtttgttataagaaacccacacacactttntcctagtcgatcactctcataaattctccccctttgttttggaatcttgtgcttatcttaaaattaaattgattactcttgtgagttcttgatttaatcccatttctctccccctttggcatcaacaaaaagccaaagtgcgtatcaaaatttaagtatgcaaatataacttaacattcatacaacattcatgaaaaaccatcaatcaaatcatgaagtaagaaccatgaagcaacaatcataaatagattaactatgaaatccacatagtcaaataacatacttgttcaaccataccatgcaaataaggaaatagtaaattgttcaaataccataataatatagccaaaatacaacgctgaaaatcaaag

SEQ ID NO: 154294 - DNA, 357 bp, Glycine max
  unsure (1)..(357): unsure at all n locations
tgaaaagaggaagtgtanaagggtgaaatatcctgcttttattcgttgtccacagagnggtacttggagatatgtcgcgggggtcaagagaccttggggacgtccggtggggtgctattgcccaaaaccaagcttgaccaatcccgacccaacccaggcatagtcagtcagtgagaacctgtgatgtacctaagcaggcgagctcctggcagtcaacagattaaatgaacaaagaccacaaagcaaggaaggcttgtgtggtggctggccagctgtggatcttgtgtgatatatgggttatggcctctggtaatcgattaccaaggatgggtgatcgattacaacgcttaaaaatga

SEQ ID NO: 154295 - DNA, 395 bp, Glycine max
  unsure (1)..(395): unsure at all n locations
agctntgcctcacaatcatagagcttatcttctttgctcttaagaaagaatcgaaagaacagctagattacgtgtttgaagatgtattccaaacaatgagatggacttactaccctccatgccctcaaccagaaaatgtcattggaataaatcctcattcagatgcttgagctcttaccattctactccaagccaatgaaacagaaggcctacaaataaaaaaagatggaaataggatccctgtcaaacccttgcctaaagcttttgtcatcaacgttggagacatttaggatgtaattaggagaatatcagacacatgtcctttcattattntaaatcgaactcactgtatgagtagagaagatatcacttctggacatgcaatcgaccatata

SEQ ID NO: 154296 - DNA, 434 bp, Glycine max
  unsure (1)..(434): unsure at all n locations
tgctntaaaccatataggctttgtctgaacctacattatttgtttctttcccttcaacatgaaaaccatcaggttgcttcatgtagatctcttcctccaaatcaccatgaaagaaagcagtttttacatccatttgctctacctccaaatcaagagtcgaagtcaaactcaacatggttctaatggatgacattttcaccataggagagaagatctcattaaaatcaacacctttcctttgactatagcccttcaccactaatctagctttgtacctcggagatgtagagttactctcatgcttcaccctatagatccacgtgttatccaaggcccccttacccttaggtaacttcactaaatcaaaagtgtgattatcatgtaaggatttcatctcatccttcattgcatccaaccactttctctcttctcac

SEQ ID NO: 154297 - DNA, 350 bp, Glycine max
  unsure (1)..(350): unsure at all n locations
agcttgnagaaaggcgatagctatttcctttttcttccctataagatggnnaaaggagaaagctttaagtttctttatagacaattacaacctcaatttaatgtcccatcaagatatacagaggctaaagatagttttaagatataagttgatgagaaaattagagtaagtctttattcagatctgagtctagtaaggttgcattgactacaaattgtaggaacatctattcaaaacctgaattatttggccctaacatcacattttatagataatgattggaaataccgaaaaatgattattagtttttcaataatccccaatcacaaaagagagaccatagctaaaaa

SEQ ID NO: 154298 - DNA, 421 bp, Glycine max
  unsure (1)..(421): unsure at all n locations
tgtaggccttggatcttcttcatcaatggagtccttttantcttgaagatcaatggtagtggaatggagaaggaggaaaggtgattggagatgccacttcaaggagaagatgagtcaagaacaaactcaccaccatagaaagccatggataagagcttgaaggtaggagaagatgagtggatggagagggagagaggggggcacaaaatttatgcctcatataaggtctaactttgaagtctaatttctcaaatgatcaaagttccaaaaattcacacacaaggcctctatttataacctaagtgtcacacaaaattagagggaaatttgaatttctattcaaatttcacttgaattcgaatttgtggagcccaatctggagtcaaaatttcactacttatacatagtcgatttcatctat

SEQ ID NO: 154299 - DNA, 410 bp, Glycine max
  unsure (1)..(410): unsure at all n locations
agctagnncttgattcttactctcttctttttctagcnnngaacaacanactaggccttcatttaactgtctttgggctaggcggccacgctcaacaaagtactttcgacacctactgtacgttgatttcaccaatgctgttatgggaatgtagcgacaatcctttaaaaccttattgatacattctgagagagttcgttgtcatgtggccatatcgacgtccttctctatcgtaagccatcgtccatttttcctttgagaagcgatcaatccatgttgctatggctggactcagttcacgaaatttttctaaattctgatcaaaaatgtgcttgcatggagtgtaagctgcataaaattagttatgaataacaatnttaagtataaatgaaagataaataaacgcgacc

SEQ ID NO: 154300 - DNA, 410 bp, Glycine max
  unsure (1)..(410): unsure at all n locations
agctntncgattcattctatgtacccgactgtgtcnccatagagnnncgagtatttctattcccgtttcatttactttttatacttcctcttgacgagcttaagccattttacttaagtcatttctcgcttaacctaaaaataaaataaatttccaccgatcatttgaattatattatccgttaacttcggttaaaatgaattccgaccgttcggtcgagccgtaaccacgttggaaataaaaaaaaaagagataaataataatataataataaaaaaatatatttttttagtaaaataaagcgaaaaatcaataggacgtttctctttgggatttctcattcttaatcgaattgactaataactaaagaggaactaaggctaaaatcaactcacttagtcaagctcgtc

SEQ ID NO: 154301 - DNA, 439 bp, Glycine max
  unsure (1)..(439): unsure at all n locations
tgccgccacggagtnttccgactatgctcttgtgtggtttgtcaagctacaaaaagagagagcaagaattgtggtttgaaagaacaagggtgatgatgaaaggaaggaaagaatcactctttccagcgagggcaacacacaaaggttgagaaagtcctttgatacagccaaggtgttcttgaatcactcaagaatttaggagaatcactctcactaagataaaagagataaactctaattttctgaataaaactcaacttgtgtttattgataaaatggttcagcttatatagaagctctacagcagattttagtaatgacccactaacctagaattaaaataacttaatgccattaacctacggaattaaaaaaaacttaatggctgagtgtaactgaaaatgtggcaaccaaaagtcaccctcaacagccaacaagt

SEQ ID NO: 154302 - DNA, 369 bp, Glycine max
ggctcaaagataaaaaggatgccccacattatttccatgacacaaatgcaaaaatgatgattaggaaattttatgcaaaactggtcatgcatgcacctatgaggacactcaagtgtcaattttttatggtcatgtgatgctaaggctcaagattcatttcctctattttaaatcaacccaatagtttccaaaatatgttcttttatcaatttgagcattcatccgagtccatttcaggcgtccggggaaaacttcacagcattcacccttcaagagtatacacatttttttcaaaaactagttatgatcaatgaatttttttcaaagaaaagttggaaatcatctcttttcaaaagcatgtcggttttt

SEQ ID NO: 154303 - DNA, 385 bp, Glycine max
agcttgcagcgcagatctttgtctcttttttagcggacaacaagaaaatagcttgggttaattggaaaactgttcgcttgccgaaagcaaaaggaggtcttggtatcaaagatctcagaaccttcaacacagcactgttaggcaaatgacgataggatctgttctacagccaacaagaaccatgggctaaagttctgcaatctaagtacagaaggaggagagcattggaagaaaggagtagaggaagcaaagattctgcatggaggaaggatctaatcaaatctcagcaactagagcgaaatttacctctcaaaagaggaaacaatctggaaagagggaaggggagatatgatcaagttttgggaggatctgttgacaaacactg

SEQ ID NO: 154304 - DNA, 434 bp, Glycine max
  unsure (1)..(434): unsure at all n locations
taatatcttgaatgtttgattaagttgtatgtcattgttttcacttantccaacaacttaggtccatcttctttattgttcaatagctcaaaatggatgatgacttatgtccaatgttccatttttaaatttcgtagcttatgaaaatgttaaagtcttaagcttttgggctctaaatcacaacataacataacctagtgatataggcacgaaataatatcctttaactgtgaaattaaactaaatgtgcaaccaattatatttgtaaaaaacattattttgtataaataatgtatttaaatgacaaagaccaaagattttcataccaaaaagaatataaacatcgaagactacattttcacacataaaactgggtaagaagatatttttaacatgattacctaaatattacacaaattataagttaagaacac

SEQ ID NO: 154305 - DNA, 406 bp, Glycine max
  unsure (1)..(406): unsure at all n locations
agctaataatactaagcctctttcttttcttcnnctagagagggggaggaaatttttatccaagcatgcccttatatacctttcgaagaagtcgaaagaaaagatcctttatagaagtgcataagtcgattctagtttatgaggaatatcaactcattttaccttatcatcttctcctgtaagtacttatagagaagtctatctagagaggacctcgtacactttctaaagagtaatataatcctttctttttgctctaagaaaataataacagggtcttgcagcggaaaaaagtgacatcgcaagaggcacagatttcactgcgacattgcctctgcctcacacaacagctattgatttcaggcaaacttccgaaaagacatttctatttattatcaaacataat

SEQ ID NO: 154306 - DNA, 434 bp, Glycine max
  unsure (1)..(434): unsure at all n locations
tgcatattgtcgttgcaacttgcaagctcgcacatcactttcgcaactcgcaaatcgttgtcacattaaccacagcatcgcatgccatcaccatattttctagtttgtgtctctaattttgctcttccatattggcctttgtcatttcaacgcctctctctctctctgttcagtttatgtttatgtttatgtgttctgcccaatttttgttctgctcgtggcatactaattttggacctcattagttaggctcatgaaaaaagcaagctacatgttatttccacctaacatttttgctttttccaccccaaattttctttgtaatttttgtttctaaatacagaacttataaattgcagggtgcacacccaaaaccttattggtctcatccaaacatattttaatcaagcctgtntatgtttctagaaaaaaaa

SEQ ID NO: 154307 - DNA, 398 bp, Glycine max
  unsure (1)..(398): unsure at all n locations
agctntntaaatnnatttacgaaaaattgttattgttctatatcggacccaagacagccaggaaatgacattgatttttatctcagtcccttgattgaaaactagacaaagttatgggacaaaggggttgccgtgttagataggtattgaaatgagacattcaagttatgttcaatgctattttgtaccattaatgactttccaacatacgggaatttgagtggatgcaatgttaaaggccattgagcatgccttatctgagaagaggacacaagctgcgtacaattgaaacatgaaagaaaaacaatatacactcagcatcaacattttctgaaaccttatcacccttactggcgatagaaaaaagcttttaatggaagttaagagcatgataatgc

SEQ ID NO: 154308 - DNA, 459 bp, Glycine max
gacaccataaaagactcaagcttgaaggtgaactagatgccttggttaacctggtaacctatctggctatgaataaaaaatctgcacctgtcgccagactctatggtttatgctcctctgccgaccaccacacagacctttgcccttctgtgcaacaatctgatgcaattgaacagcctgaagcttatgctacaaacatctacaatagacctcctcaacctcagcagcaaaatcagccacaacagaacaattatgacctctctagcaacacgtacaatctcgggtggaggaatcatcccaaccttagatggtcgaatccttcacaatagtagcaacaacaacaatagccttattttcagaatgctgctggccgaagtagaccatacgttcctccaccaatccagcagcaacaacaacaacaacaacaacaacaacaaccccagaaacaacaaacaattg

SEQ ID NO: 154309 - DNA, 440 bp, Glycine max
  unsure (1)..(440): unsure at all n locations
tgcttaacggatattcacttactctcgctcagcgagacatgctctttgaacgcgcctttgtgtgttgagaagtccaaaaacctttaaaacactgagttggttgaaaatgaggagacactaagctttcactacgtaaaaacagaaggaagaagtctctgaggctggagagaagatattttcttcatcctttaccattttctttcacaaaaatactcatttcctatttgtagtaagtcctccttgttaatggagggctaggaacttcattgttagggggttattctactgagcactcttaatgtaaacttctaactatctatttaatgttattttctagtgttctctgcttctatctacatttantttacatgcttatagcttgatcatccatctgtatgtttagttaggcttttgagtgttggaaaatgcttaaaatcctt

SEQ ID NO: 154310 - DNA, 346 bp, Glycine max
  unsure (1)..(346): unsure at all n locations
agctnngaagaaatacacaagatagtaactcttttctcacaaggacgccngagggccgnaatatttcgagacgctcggggactttcgttgccgatgccagctaggatccctttcgatcagtctcggggaattatatctttttccacgagtggcatataggacccttgccgagtaattgatttcatggaggcgtcgggcgtatcactacttcggaagagctcgtacgagagatcctagccgaactacattgtaactcttttctgcaccaccgaagccaagagcttgctcttacgtacaataatcttatcagccagcttgtgaaaacaagcctgcgcaatgtccgctg

SEQ ID NO: 154311 - DNA, 410 bp, Glycine max
  unsure (1)..(410): unsure at all n locations
ctaagcttggtagtcattacgagcgtatcgatgtcctgcgggtcttattctgtatatcanagggaaaatttattgtgctataaatatgctcagagcttcagctttcaattaggagcgcctcgatctattgcggagctcaatcggacatccgagttaaaaagtattgtcgtatgaattttgccagaactttcgttataatgacgagcgcctggatatcctacggggcttaatcggacatccgaggtaaaacttattagtcatagatttattcagagctttcgcttcgattaaaacgttcgatatgctctggacacaacaacatgcattcaaagcattgtcatggactcttctagagcttcgttttaaatccctagcgttggatatattacgagggcatctgactccgagta

SEQ ID NO: 154312 - DNA, 413 bp, Glycine max
  unsure (1)..(413): unsure at all n locations
agctagncccgataatacaacggtccctttttcttcttctgctgaatcatcataaaatncgaacaccaggttcgaaactcattttcacacatccccaccgttgggatttgagaaataatatttgaggagagagaaatgtccctcgcatagagacagagacatgaaagctttaatcccatctccttctctttaacacttggaaatcctagcagaagaacctgaagaaaagcttgatgaatcttaaggaaccgctagagatgtcgctatcactaccggactatacacgtgagcccgcttagaagtaaagaatgagtttatcgcaactgggaataaaatgaacatgtgtaaggatccttagatgactaattaggggttnattcagggatgttcattgnattataattcttccttta

SEQ ID NO: 154313 - DNA, 444 bp, Glycine max
tatgaaactaagctttggttttatagtccccttaatcaagtattcgtttgtcttatttggcatatttcctctcttaagtttgcatctgaaaaatttggtccttggttcattaaatgcacgcacttcctcatgctaggaaactactctttgttgctagtgttttgaacaccatagcaggaaaccacttcctttttgtatcaaagcatgtctatgcagcataacttttcttttgatggcaactgaggaattgcatagcttgacttcatttattcttcataagattcgagagatcctaagagaatgtttctgcaaaatagatctcagacacagtatttaatgaaattttaaatgttatctctaatgttgcatcatattaagatttcatctttctaccatctgaaacatcaaacacaaactttgtggaacatgttttgatatcttata

SEQ ID NO: 154314 - DNA, 253 bp, Glycine max
  unsure (1)..(253): unsure at all n locations
aaacaggacnnaaagagatgagatnnnaattnnncttgaactaacatgttcttaataatggncactttacatgagtgtaaagaaaatgaagtaagagagtaaattaattcaaaaatttgaatagaaaaaaaaaactaaaacatcaaaattgtagncttttatttgatcaaacaaaaaataatngaatacatcattgnncatgttnctttttctttctatcttctttcctttgcattcgacttattacccattt

SEQ ID NO: 154315 - DNA, 302 bp, Glycine max
  unsure (1)..(302): unsure at all n locations
tacccggcaaaaaaggggcgcaccagcgcttggtcaatatgcagaacangacgaacaacggatgaagggccacctcaaagagattaaaagcatgaaaaaattaaaaaaatagaatagttaatatatatagaaatacaagaatgaacaagaacactagggatgctagctccccacattgaacctatgagaagagggatggaaggtcgtgctaatgaccccttattctttatctttgttggtcgcattttccaataatatataatggaatatgggagagttgagattcctctaatggaatgaga

SEQ ID NO: 154316 - DNA, 290 bp, Glycine max
  unsure (1)..(290): unsure at all n locations
agccnaacaagaagcaaatctgatcatcatacttcgataaacgccaaaaaaactctggccaaagatgtaggacaagaagaaagacaagcccgtactgtgactgccattccaatacagccaagtgtcccacgcacccaacaatgacattactctgcccataacacacctttttcttacccaccgcccagatatgcacaaaaggcatccctaaatcaaccacaaagcctatctaccgcacttccaatgacgaacaccacctttagcaccaacgaaaatcaccatccaagaaa

SEQ ID NO: 154317 - DNA, 132 bp, Glycine max
cccacgaaccccccgaaaccaccagcaacccaccccccccaaacaaacaccccggagagccccccacacccaaaagcgaccacccccaccccaaacaaccaccggaagaagccagccaccccacccacaagc

SEQ ID NO: 154318 - DNA, 356 bp, Glycine max
  unsure (1)..(356): unsure at all n locations
aacaaaatnagatatttacaagcataagagtttgagcatctgcccaaagttggttacatggaaggagaagattacatgggtggggaccttctagaaactaaatggaagctattaagaggtaccgggcgtgccctttcgatcaaagagaaattgaatgagttatagatgaatgttgtcatctaatatccatataaggagcataagaatgtaagagcctttactagagcaaacactttattttggctttactagacgtgagactaatgtgaaaccttatctttcagaaaagagattgaagcagtttgggcatgtacaaatgattccacgccggccacctccctattgtagtacgtatg

SEQ ID NO: 154319 - DNA, 443 bp, Glycine max
  unsure (1)..(443): unsure at all n locations
tataaaactcaagctgctgcttccatcttgcatcctggaatcttttatgttatttagtcattnngagggatggtcaataccacaccatattgagacaagggtaagtgaaggtaatgcaggcgttttgtggtattgtttcaaattttttgcatgatgccacttcctttgttcaaagcttaagggcaggtacgagtaggtgctaagcccatgatcaatcaatcatcatccccgtccagctcaagacgttaaagaaacgctcctaggaggtagcctagtatctctaattttgttctttaaaatttttgctttatacttgtttgttttcttgaattatatcttgaattcacttaagtttgtgtgcaaccatacgatgttaggaaaatatatacataaccttgaacaaacacattttttgcaaatgcttgtgtgatcatgtgtgatgc

SEQ ID NO: 154320 - DNA, 394 bp, Glycine max
  unsure (1)..(394): unsure at all n locations
agctaggactgcgctagagagaatttccatcgtcctaagagaacaaagatgcctnnctaaggtaaatttgggagtagaagagtcaaattttgattcggagatattttaagcgtaagtccagttagaacaagtttaaattgatgttatggacttgagtgaagagagagtttgctccaaatttacctcattctcaatttcacttctctaacctagaatacccattgaattgaagggttttggacacctagattctgagttgctgagctttaaagcttgactttggtttagatatgattgatacatgatttgggacttgtaagatttgatttgggcaagtttggatgagtggtagtgtgattttcgaaatctgcacttatgcatatttttgctgtca

SEQ ID NO: 154321 - DNA, 439 bp, Glycine max
tcacggaatgcccaagagcttggtttcagatcgtgacctactatttattagcatattttggcaagatctatttcaattaagtggaaccaagctacgaatgagttatgcatatcacccacaatctgacggctagactgaggtaactaacaaggtcattgagcaatatcttcgtgcattcgtgcataccaagccatcttcttggggtaagcttttgatttgggctgagtggtcttacaatacctcaagacattcaacttctgctgcttctccttaccaaattagttatgggattcctcaatatattacttaaacgtcaacaaatgatgcaattgacacttttttgagtgataggaaggcaatctttgtagggctgaaaaagaagttgttgaaggcctatggagttatgaaacaatatgctgattccgaatgcagagacatt

SEQ ID NO: 154322 - DNA, 414 bp, Glycine max
  unsure (1)..(414): unsure at all n locations
agctncaccacacaaaaggaaagtataccttttttctaganannannagaaaaacaagntacaaactttgttcttagaagagtaagaacctttccttcacaagaaacctaactctcaccaaataggagtagtttgctctcctgtcatacattatgcaatctacctaccttcccaagtttatttgtgatagactatgtaacaccccttattgtcgacttgncaatgactctcacactgcgacacttnactcaacacccttataggncggaaccttccaccaatcgttgtacccacaaactaacataaggcttcttagagagtttagttttcactcatgttttttggcaaacttcctagataagaactcatctcataactactccaagtcaaacatgcgtaattatgaagntctta

SEQ ID NO: 154323 - DNA, 424 bp, Glycine max
tggagactgcttaagaaatgaacagatttatcaatattttcttatgatcatagcacaattttcaaattctaatgaagcttagagactcatacttattatgttatttgccaattatttatattttttgtgcaagctgtaacttggaagcttcatttgagatttaattatgcagttgtgttgatttgttttcaaatccacacaactattattattattattattattattattattattattattattattattattattattcaagttatacttatggccagattaagattggcttctttgcatgttaaaaacaaaaagttagcctatgccctattgcttcaattctgaaaatgtagaggttgttatctgtaacattgactttgggtattttcatttgatatatgatattttaattagacaaata

SEQ ID NO: 154324 - DNA, 357 bp, Glycine max
agcaaaagagaagaatatacaagctacaaccatttagacatcccgccattattgaagaccttaattgcaacctccttcataattattgtcccagtagggatgccacgactctcacacataagtcgcggaatgggagacacaaactcagtaatagtactttccctctcatgaattaatgagttctgcgttccaaaactggtgatgtgtacctaactgtctttcttctatgtaaaaaaactgtttggctttcttctaaacgagaaattattgcaaatcatttcgaattattggtcccaattgttaagagggcgagacaaaatggggaaaaacataactctaatcatttatctaaaatat

SEQ ID NO: 154325 - DNA, 428 bp, Glycine max
  unsure (1)..(428): unsure at all n locations
tatntgcaaaagttntctcatatagcttctctaaaatgtgattntaacttgngcataagctaattttagcttatgaagaagttcatttcaattttttattttattttcttctcctagaagtgcttttggataagcttatccaaacaagcccttacatggaatcagagtttgaggacaattgaacaagtctaaaatagaattttgtgtttttttttctccaaaaaatgcaaatgcagcagttgaataaaagtaacagagaaaaaagactttttctaggctaatagcagccattcatacaatgaagaatgaggaaaacataatggactttcagatatcaatagcacaagtggtgattagtgacgtatgatgtcaaatattacctgtagtgtctttgcagcttgtcctgatactagaaccagaactgagca

SEQ ID NO: 154326 - DNA, 438 bp, Glycine max
  unsure (1)..(438): unsure at all n locations
cgctggcactacagcagttaactgaacaaatgaagtggcctangtcattggatggttgcctggtagaggtacatgttataaactaataagatttcctgcgtgttaggtataattattaagaagaggcactatatatatagacttttatatataaagcttattagagttttaacacactctccactgttggtcctcaatttattgagaattataaaatcagaataatgactcatcatatgagtagttggacctgtaaaatttgtgatttttaagaaatttgagccaacaaaaaagagtgttcaagagaatgtgttagagacagtgttgctaccatttctctgtttaggaatggtgtttgtagttattagtgaaaatagaaatagaaaatattttccttatgtcaaacaggcttctgcattactatttttagtttttaca

SEQ ID NO: 154327 - DNA, 311 bp, Glycine max
cacgcaccttgacccttataccagaaccatcacctgtattattcccgccttgatctttttgctaatagcttgtgaaaacacatgccgttggacaacctttggatttgagccacaactataaagccaccaatttgttggttattcttcaaaactgtcaacatttttaaattctcacagacgaaatctttaattatataacaatcttcaggggaacagaaaaacacaagtctcacatactaaattctatgtgacttacaaaacagaattaataacatatattttaaactatttaaaatactaaccttcaattt

SEQ ID NO: 154328 - DNA, 384 bp, Glycine max
  unsure (1)..(384): unsure at all n locations
agctagctatagnagagcgcgctgcaatgtctgtatctctanagaaagnaataatctggntcttatctattgacttaagagattagttctcccattattcaaggagaacttttaaatattttcaagaaaaatatcatttacgacttaaagagctagaagagagtttgagaagaaattctaacagtagtaatcgcggtaccccagatggaagaagtatgagcaacggcccttctcgtcgtcaatccctaagcggagctgataacttctcaaaactaacctctaatgggtttttatctaaaagatcaccatcctctcaactgaagtcatccctatcctctatcacagntttgaagcatgctaaaagaacatctaaatcttttgatg

SEQ ID NO: 154329 - DNA, 450 bp, Glycine max
  unsure (1)..(450): unsure at all n locations
ctaagcttcctcggggccatttcctgcgaaggcaaacatttggattgttagttttaccaagggatgctactcttaaaacaaaaatggcatacaacctcctccaataaatacaaacatcaatgtaaatttagagcaagcttatgcgcatacttctttacgaacattcacttgcacaagacattctcataactaagaaaaatgcacccatatacaatcaaggcaccttcgttacctagattatttatatgtacttccaaggtgtatttgttacctacatctcatgcacttccttggctaaatttacatacatgtgtactcaaagcatttggggtaccaaaaattgcacatgtgcacattccggtatttctaatacttatgcatatacaaactttgtgatgaatcttggctatctactcaagtttttnttttcccaagtgtttttactaccta

SEQ ID NO: 154330 - DNA, 395 bp, Glycine max
  unsure (1)..(395): unsure at all n locations
agcttctcccccaattgtctataaataggtttgtgttgtgtagnanaaaaagggcnagccccttaagcacttctctctctttcgaatttgcttagaaaaatagtttccgagaagaaaatccaagccgagacgcttctgtaacgtttccgtgagtaatttcgcgatagttttcgaccattcttcgacgttcttcattcgttcttcagtcttcaacgggtaagtacctcaaaccaagcttttcaattcattctatgtacccgaggaggtccacacttggtttcatgtatttttattctcgtttcatttattttttatacccccttttgacgtacttaagccattttattgaaggcatttctcgcttaaactaaaaataaaataaatctccaccgatc

SEQ ID NO: 154331 - DNA, 344 bp, Glycine max
ccttggccataaagaattcgccaaggactaaccgcctgaattttttttgtgtctctcttctcccttttccaaaagaacaaaggactaaccgcctgaattcttttgtgtctcccttctcccttgtcaaagaattcaaaatgacacagtctgagaattcttttgattcttccctttccctcatactaaggtgttcaaaggactaacagcctgagaattcttttgtatccccattcacaaagtatcaaagggttaaccgcctaagatctttgtcttaacacattggagggtacatcctctgtggtacaagtcgagggtacatctacttgggtttgactgataacaag

SEQ ID NO: 154332 - DNA, 414 bp, Glycine max
  unsure (1)..(414): unsure at all n locations
agctagcacacgccatattagagagattatcttctatgtaagnatnnnatnctctatnnnatgtctttttgccaaccatacttgaatttatagcctgtaagacgtaactcattatccctctctgccttggaaagcaattagaacgccttttccagtttgctcgaaagatagaagactagatattgaataatgttgcacctgaagaagttagtttctgtataattcagtttgttaatcttcatatacactcatgctgtacagcatctcaatatatttggatttattttatcaaacaattgattgcaacgtttctcctacattgatagaactaaacattgtagatctagnttaaaattccattctaggcatcatgtataataaattatgagaaactaaatagattggtatactaat

SEQ ID NO: 154333 - DNA, 441 bp, Glycine max
  unsure (1)..(441): unsure at all n locations
tcgacagcacctganaccaggaatccacaatatgacatggtttctaacgatttccaaccaacggatccagggcacagtcccggtgccggccattcctccccacacgctaacatagtttcaatttcaaagccataaacctatattattcttatatgtccatactcaataaccagtaatatgcattttttacttaaaaaatgttactcgatcatataactaattcctaacacctttctagctatatactcgtcacttttggagagtgggaaaagggtaagaagccaggctgctttgaaaattaatttccagcagtgataagcgtataagagaaaggtagaatattttaagtgtacaaaataataaggttgcctttcaaaaaaaaaataataataaggttgttaatttatgtntctagttgagggattaattgtgtgtgtgtat

SEQ ID NO: 154334 - DNA, 262 bp, Glycine max
  unsure (1)..(262): unsure at all n locations
agctagaccaaancagcaaggagagagacatattctttgctatnngcncgctcctatggccttacaaggtttgttcgaatcagagagaaagtaattcggcaaatggataatctagcatccattgtatatctgaagatgtcacaagcccaaggaataattctatgcctgagagaaacgtaatattaattttggccaccaccctaatttgaatatggctttggccttgccaaatagagatgaaaagtaaaaaatagaatgaggc

SEQ ID NO: 154335 - DNA, 443 bp, Glycine max
  unsure (1)..(443): unsure at all n locations
ctcaagcttatatcattcaaaatatattagttgctcaatattgtgtttttactattcaanctcgcccagattcaaactaaattttatatgaaacacaatatgctctaaattgaggatgaagtaattccaaaatttcagtttgatttcatgtcattttctaacattctttcatcaaccacagaagatgtattaattggttagcatttacataatccttaactttgattttatttagttgcattttttcttttggtttgttaatattaattaatattatatttattggttccagatgttattgggcatgttctggagaaggatagtatcaacgaaattgtcaagaatggaaaaaggaccaaagtcttggacaccatgctaccggatttgatgtataatattatcttaataaaaaattaatctttntacttacatattattcttta

SEQ ID NO: 154336 - DNA, 329 bp, Glycine max
  unsure (1)..(329): unsure at all n locations
gttatcgattaccagtgtatctgaacgttgaatttcaaaatcaattgagatgtgtcatatcctttcattaatagctttgtgatatcgattacatggttttggtaatcgatttccagagacatgttttgaataacaatcaaaagatgtaactcttctaaaggttttcaagttttctctaagtcattactcttccaatggttttcttgaccagacatgttaggtctataaaagcaagtccttgacttgcatttaaaagtatatttactttcaactttttcatatactatnttacaacctttgaatctctttgaacttcttcttcttcttcc

SEQ ID NO: 154337 - DNA, 364 bp, Glycine max
gataagctcacctccgtgagatgagaagctagagcttacctacacaccccctataatagctaagttcacccccatgacaaaatacatgaaaatacaaaaaaaaatccctactacaaagactactcaaaatgcctcgaaatacaaggctaaaaccctatactactagaatggccaaaatacaaggcccaaacgaaggaaaaacctattcaaatatttacaaagataagcgagctcatacttagcccatgggctcaaaatataccctaaggctcatgagaaccctatggccttcccttggatctcttctcaatctacttggagtcttctatccaatgcccttgtgggggtaggattgcatcattcc

SEQ ID NO: 154338 - DNA, 408 bp, Glycine max
  unsure (1)..(408): unsure at all n locations
agctnnnaggagtagaaacatggttcctttattttatnncaaaaagaagncgnatccagtcaaagtctgagagaccatacaagtttcctaacgatttctaattatgtgggccattaagtctatcatatgctgacaatagccgagaagcccatgaatctcttcaggggcggagtaagtgtctgccatcgccttggccttggctaacaatcggggaagttcttgactcccgttcaaagtaagagcaaaccgatccatccacatggttgcctcttggagtaaagagtcgatcacccttcctctagcctctttttccgcgtatacttgggcatactcatccgcgattctatgctcgagggccgaggctagacctaactcttcttcgtacttggcgatgatagctaacatgtt

SEQ ID NO: 154339 - DNA, 439 bp, Glycine max
  unsure (1)..(439): unsure at all n locations
tcaacatcagaccacttccgggtgctggaactactccatangtatttgatggggcctatgcaagttgaaagccttggaggaaagaggtatgcctatgttgttgtggatgatttctccagatttacctgngtcaactttatcagagagaaatcagaaacctttgaagcattcaaagaattgagtctaagacttcaaagagaaaaggactgtgtcatcaagagaatcaggagtgaccatggcagagaatttgaaaacagcaggttcactgaattctgcacatctgaaggcatcactcatgagttctctgcagccattacaccacaacagaatggcatagttgaaaggaaaaacaggactntgcaagaggctgctagggtcatgcttcatgccaaagaacttccctataatctctgggctgaagccatgaacacagcatgct

SEQ ID NO: 154340 - DNA, 373 bp, Glycine max
  unsure (1)..(373): unsure at all n locations
agccagacgaatatatatgagatatcctctttnngnnagnnncccccgcnccagncctggattccaatctcacttctccggatagcaagctcttatttccgtaaaggatcgaaagcttgtgggaggttagctcccaactnccttgcctgcatatcatgaaaaatattagtctgccttaggtcattagaaagccaattggaacatcttatgatctagcaccgtctatggagcacaagaaaaacatatgctaatgatataaataaaccgtgtcatataatgttatcgaatcatgaaggcaagccttggaactacatagatgttgttgcttatgacctatagtcagtaattcacatctatatagccgcctctccac

SEQ ID NO: 154341 - DNA, 409 bp, Glycine max
  unsure (1)..(409): unsure at all n locations
agcttggggcagagcgtgagagtcttggtatctcgncggagagcgtgttctgagagagatcttagagagcgagtcctgcgagctgcgacaaattcatgaatatctcaccggagatgccactattagaaagttctatgccaacctccctcttcgtagcactgcatgaaatgcctttccattcacaaagataggagctataggcgttcctatatatgtaacctcctctgtctgcaagaatttcgctgtccagggaaaatttcagcttcagcagatcctctttgtttttgtccaaagattcccctacagcaactttacctgccagaaccaaacacagaaacaagaattgcttcggtcatcacaagaacacaaggttagtataattgaataacagaatcaccaagcttcgaaa

SEQ ID NO: 154342 - DNA, 433 bp, Glycine max
  unsure (1)..(433): unsure at all n locations
tgtatactgacacatttattgcctcgttcccaggtttanatactctttcagaacttattcggtataaatgtgttttgtttttaaatatctaacgatctagtaattaaatttgcagatagatatttatgtccaagttctccaagcagatggaggtaactaagacctgataatcttgtgactatcttctctcattgccattatattggctctcttctactctttaaatatgtccccgttaatttctggcaatgctaaaacatgtctttgtacttaaatataactcctgttcttgacatgcattcgacaggatctagatctgcttgtataaatgctgctactttgggccttgccgatgctgggattcctatgcgtgatcttgtaactccctgtaatgctggataccttattagctcccttatgtttgtatatatct

SEQ ID NO: 154343 - DNA, 338 bp, Glycine max
ccgaaggggaagcactctttattgacacggattctcatctttaccaaaaaaatgacaccaaccaaaactgctgagaataacacaatgaactggaacttctaaacacttatgaattccacttaccctaccctgcaacgtataagatcggaaatcatatttatccaaacatatgtaggaacttcaatgtatatagttctatacaaccaagacaaatatcaaccatctagtgctgctgcagtaccactaagaaggatcgtggtttatccatgtgttccccaagattcagagaacgttttatgtaagagagtgcattggtttagatcaatccaatgagcccg

SEQ ID NO: 154344 - DNA, 444 bp, Glycine max
aactataaaactaagctttgaagaattatgggtcaccttaaatgttaataattctgaggaaattggaaccttaaaatccacattgaccaatttttttgtgggatagagaatcttgacaaactattatgatacagttaatgtccctcaaatagatttggtaatggatatgagggaaaggtttatgttcatgatgaagacaatgttgtttgttacttttgtggtaaagttggatgcatgatgtccaagtgcaaggatcgacctagaataggtgtgtccaatgcatttaaatctaacacaaaaggacaaaaaaaaagatttgggtacctaaaagatatttcctattgtagatgtctttgatagtaggaagtaaatgcctatcacgatatctggatagttgctgctcacggcacatgacaggagaaaggtgtatgttccaatgtctga

SEQ ID NO: 154345 - DNA, 380 bp, Glycine max
  unsure (1)..(380): unsure at all n locations
nagcttatgccgatccctctgtgttttgctttncnnnaaaaacagcatgaccctgactggtctccctatgattttacctagtgagatagacctgacttactagagtgtggttagtctcgtcatgtactcctatgagcccgacgaagtttttcactaccatggtaccacattgcatataggatagagtcttagtgtatatgttgtataacatttatgtatagattgatttagagatattgtgttttgatccttgagtgcgtgaatgatgtgaaaatgaatgagacatgttgtgttgagatgagatgttacgtgacaaagaggaggaataacgtgagctatatttaagtaagntagatttagtttatatgatatgtacatct

SEQ ID NO: 154346 - DNA, 409 bp, Glycine max
tggactcttgtgcagtagattcaccaccagcacttgtctgtgttgatggtgatatgcacaagagtagtccagacactttggaatttcctgatgatagagatggcacttttcttcacacaacttctgacaccacagaatcaggtccaggttcggttacaacctctctatttgccccttctgatgagatttgttccttcagagaggaagagcaaacaccaagtccaactccaaagcatgtgaagcgtgtttctgcggtgaccttctgtgatcctgagtcaaactacatggtggagacagatagtgatgagtttggtgactctcaggttgagagtgttccagtgatggaacgtgctgtgaggcctgtgaagaagggttcttgctatatgtgcctcaaggggaaccgtcttac

SEQ ID NO: 154347 - DNA, 409 bp, Glycine max
  unsure (1)..(409): unsure at all n locations
agctntaaatagagtagngatcttgttctttctcttatncacattctttcagaagaatcaaaagaattcttagactgagtcgttttgaattctttgacaaaggagaaaggagacacaaaagaattcaagaggttagtcccttgttcttttggaaaagagagaagagagacacaaaaagaattcaagtagttagtccttggcgaattctttttggcaaaaggagaagagaatgaaaagatgaatagcacaagttttcaaagtttggaaaaccagaaaacttcagaaagcttttggtacaaagaagaagaagaagtttaaagagattcaagtgctagaaaagattgtaagagatagctagaaagattcttgaaatgtaaaacaaagccttgcttttatagactctccatgt

SEQ ID NO: 154348 - DNA, 441 bp, Glycine max
  unsure (1)..(441): unsure at all n locations
nntaaaattgaattaaaaccttcagaaactgctggtaattgattatcatatatgtgtaatcgattacacagggcaaattttgaattcaaattttaatagctgtttgtaaatcagttttggccattggtaattgattatcagagagtaaatttcttgtaaaagattttttaacttaattttcttggccaaaccttttgctacttcaattggaattcccttcctatttaatataccctttctaagactctatagactgtcttgatcatccatcttgaatatctttaattgctttgtcttgaataaagctttgagacgcatgtgatcttttggcatcatcaaaacatcggcttgatcctttgtctacaatctccccctttttgatgatgacaatccctgaaatcaagacaaactatatacaagatgatagcacgttcacacaac

SEQ ID NO: 154349 - DNA, 404 bp, Glycine max
agcttcccactgaccacacagtcactgcctctcttgccggcacagagcaattttctcagtttctatacttagatgatgttctatacatacctagcttttagttcaatttgatctctatatctaatctaagcttctttcttcattgccttgcaagctaattttcatgaatgataaaagttttatccaggatatgcagaacctgaagaagataggtacagttgatatggaggaaggtctttataagctgaagatgcttcctctcaaagagtatgctcctagttctatcacagcttttgtctctgctacttttgttcctgctgtttctactagtgtttcatctttttcatgtaataaaatagctatagacttgaggcactttaagctaggccatccatcttctgaaa

SEQ ID NO: 154350 - DNA, 457 bp, Glycine max
  unsure (1)..(457): unsure at all n locations
cttgaatactaagcttcctcggggccatttcctgcgaaggcaaacatttggaaagttatttttaccaaggaatgctactcttaaaacaaaaatggcatacaacctcctccaataaatacaaacatcaatgtaaatttagagcaagcttatgcgcatacttctttacgaacgttcacttgcacaagacattcttataactaagaaaaatgcacccatgtacaatcaaggcaccttcgttacctagattatttatatgtacttccaaggtgtatttgttacctacatctcatgcacttccttggctaaatttacatacatgcgtactcaaagcatttggggtaccaaaaattgcacatgtgcacattccggtatttctaatacttatgcatatacaaactttgtgatgaatcttggctatctacacaataaggtgatacatntcatgctttattcaagt

SEQ ID NO: 154351 - DNA, 402 bp, Glycine max
  unsure (1)..(402): unsure at all n locations
agctagacaaacctacaactctcgcaccctccttggntgtctccctgntacactaccgnaataactcctacaaacaaagaactgaagctcccatccaactctataaatactaagttctatttcacctttttcaatctcattcacaactcattcacatatttacttgagagtcagagacttttgttttgtaagtccctcctattgttctcctaacagaagatacctacagtcagacatgtgaaatcgaggagttcatccaggctacttctatcctgacgttagtcagttgcagatttaggtaaatacaccatgtttcttcaatacaccctgaatcacatttctattcatagctaaggaacaagttaataatccatgtcaccactatgaacttgtattaatcgc

SEQ ID NO: 154352 - DNA, 345 bp, Glycine max
gggcgatattgaaggtcactcgtcgacatttatagagaaagatggccacaaccaaatgatgcctattgcatacgtagtcctggatgcagaaactatagatccatggccatcgtcctatcgaccctctattatcatacctaaatggaatccaaccaaaaaaaatgggcgtttatatttgatcaacaaactgcgagtataacgttaactaaaacttttctgtacttcttatatcatgctaagaataattaagtgtcgtctttttcctctcgtacatcgactgaagactgccattaaggagtcaggaccaactgttgaacaccatctttgtgtgaggttatgtatagc

SEQ ID NO: 154353 - DNA, 414 bp, Glycine max
  unsure (1)..(414): unsure at all n locations
agctntagccttaagatgttccatgttgttgcttccttagctctaataaaactgtcaacacaaacggtagcaaagagcttcaactccaaagattaaactttgagcttgagtagaaacaaatccatgtagtctcttttataacgatgtattgagcatatggtcaaccatgtttatacttttctaaaaagaagccttaagttcaatataagtatgttatccattgcatcccaacaagtacataaatctttcatgctatcacaaagcagtttagagtaatgtcaacataagatacataacaaacaaaatgtgaaacaagcacttacaaaaatgaacctattagttgtagagtttcaaagatgcatatagccatgcataataaacatactcctgaaatagccatgcaataataaacat

SEQ ID NO: 154354 - DNA, 417 bp, Glycine max
agcctaagctcactattactaccccacagagccccgcggaacttggttcttctcgtatactcccttacaggtcctctttgtttctcgttccaatgcttcggtggtggccatattgacgtctctcacttcgccacactcttttcagacctagatggctgttgtcatgcatctttccttgactgcttgtgccctgtcaagctccacctttaaggcttgcacatcctcactcttcttaggggtttcagcctctgcctcatttgaaacctttagctctaggagccaatccaactcttgcgcccgagccttcagccacttatgatagccaccgatgatcccattgttgctttcccaaagctctgtatctttcctttgcactacgccccatgccttgcagactccttaaagtatcctcacatt

SEQ ID NO: 154355 - DNA, 356 bp, Glycine max
  unsure (1)..(356): unsure at all n locations
aaaacccatttncatcttttccgcctcctagatatccaattattaaaaaaaatatggaatatttaaaaaataattttttcaaaaagtaaaagggcaaaaatggattttcgaaagaggtagcaaagagagttgcaagggttccaaaatattcccaatcaagggatgcctctggggaagagacagacactatttggttagatgccccaatcactctctacatcatcggtcactcaccaatgtcccttcaaatctctcaccccacaaataaaagtcaattgcttcataatagacgaaaacaacctcacaccacaaccccacccccccaaaacaaaacttgcagagatgctttaaatgcc

SEQ ID NO: 154356 - DNA, 436 bp, Glycine max
ttggaatgcagctactagttccagtgttggttttcacttttctttgtttcatctgaacaagactccaattttgatgaagatgaaggttgtgagataaggctttgactcactactccttcttcctttcccttgatcatgcgaaatgattttccaacctctgaatgccaaagttgaagaaagtgatcagggcatgttttactcgttggccatgaattgagcattgtggattccaatgacaaccttgcctctgtctcaactctcacactctcccactgtaccatgtgccgcgtcgaaagagattcggacttgacaatggattgatcaggaatcacacatagctgttttgctctttgggaatgacatgatcgaaggagacgcttctttagatgggtgttccacaagttcttaatctcattgtctgttcttccacgtagtt

SEQ ID NO: 154357 - DNA, 403 bp, Glycine max
agctttctgcaaggaatctaagtctctttatgcaatcctgcataagattggcactgccaactgggtacccaccaatcatacttccactgttgccacaagttagggtaaatttctgtatgctgtaggaaccgagtccaaatttaatttaggaaactatatttttgatcaaactattaagcattcagaatctttagctgtcaaattacccattgccttcccaactgtattgagtggcattatgttgagtcaacatcccaatatcttaaacaacattgactctgagaagaagagagaatctcctctatccctgcattacaaactgtttgaagggacacatgtcccagacattgtctcgacatcaaggaaagctgctgcttcaagagctgtgtccaaagatgctttg

SEQ ID NO: 154358 - DNA, 392 bp, Glycine max
ctgtcaagctggctctctcctaggagtatatagataatttatttgaatgaaataaaactaagcaactgagggaaaagtttctctcctcacatattcaaactttaagttggtaccagagcgggtcgtatccaccgccgtccgcgccgccgtccgccaccgtccgccgccgtccgccggccgtttcaaccggcgactacagggttttgtgcgcctcgaggagcgcaactcatcgcaactaaccgctgggccaggagcttccccacgcgccgtcacgcaccatcttcgtgcgcgccaaacgccggcgcgtgaccaccacgcgccgccctccccttgccggaaacgcgcgcccgttgcttcggacgtctcgtcaggctctcctgagtccatatcag

SEQ ID NO: 154359 - DNA, 387 bp, Glycine max
catgcacagcggccaacgatgcatgggagatcctgacaaccactcatgaaggaacctccatagtgaagatgtccagattgcaactattggctacaaaattcgaaaatctgaagatgaaggaggaagagtgtattcatgactcccacatgaacattctggaaattgccaatgcttgcactgccttgggagagaggatgacagatgaaaagctggtgagaaagatcctcatatccttgcctaagagatttgacatgaaagtcactgcgatggacgaggcccaagacatttgcaacatgagagtagatgaactcattggtttccttcaaacctgtgagctaggactcttggataagactgaaaagaagagcaagaacttggcgttcgtgt

SEQ ID NO: 154360 - DNA, 350 bp, Glycine max
  unsure (1)..(350): unsure at all n locations
aaatatnaacgagccattagtttacaaattcttctctacagtttattagaagaaacaaattcatctctatacaagattaaaacacatgtaaaagtctaataactatttatatttttaaaatattactttcaaatatctttaaagacaattaacctttaaaagaacatatagatttttaattttactatttccttactttaaatctatttcttttcaatacaatatgagtcttacctatctaatgcataaaaagccttactaggggtcattaaaataataaacgttaattaaacatcctaacataaaagctagttcagcattgattaagttgaaaagattgacagtacagc

SEQ ID NO: 154361 - DNA, 407 bp, Glycine max
  unsure (1)..(407): unsure at all n locations
agctagcaagagaagacaaatnactctgtcttttgcncgcannacaaagaatagggagcactatattcagaagggacggtcaaaagagtattctttatgaaatatatctcgatacgagtcctcgaactatagaatatcagcattgctaagaacaagaaatcacgaacaaccatactatctatgcaattaaagcaaaacaccatactacaagcatatccagaattataagggtcttataataagtatacaacatacatataagaagtaaaaattaaatagttaataaggatgtattaaggaatcacaaacttcaaccactacattcacgactacacacaaaataaaaggagttaagtagtcatgcatttacacatcaagatagacacactcatccaagacatatatat

SEQ ID NO: 154362 - DNA, 301 bp, Glycine max
ggacccttcatacatgtgactccattagcatgcatgatcatgtcttgcgcatggggattacattaaactattttgatatttgttgaaaataataattttaagattaaatgtttatttatttttcatcaatgcttttttttttgcaggcaatggaatttggtcattctgtacatattgatgaggtatttcaatagacccatataagaaatgatactagtgaatttgttgatgaaatatctatgacacgtgttaaatttttttaaatatttttttcttcattttattcacattaatatgttac

SEQ ID NO: 154363 - DNA, 323 bp, Glycine max
  unsure (1)..(323): unsure at all n locations
aaaaaacaaagaacagcaaccaggaagcccaccccccccaacaaaaccaaccagagaaacgccccccacccaaagacgagcggcaaaacaaaatcacacaaccgaaaacgaacaaacggcgccacccacagaaaccaccaagacgaagcaacccacccaaaaatcacacgaattcaccccgaccttcatagacccaatcggnaaaccaccaccatccaaccacgaggaaaaaacacagataaagcaaacaaccnactcgaagaggacaatcaatgtaaacccccataccccacccatcacattagagagtagcaaaaaaaaaa

SEQ ID NO: 154364 - DNA, 443 bp, Glycine max
  unsure (1)..(443): unsure at all n locations
aaaactcagctttgactgggtttgagtcaaatagttgtggtctaatanttttatttggngaaaatagcatagcccttctttcttctaacactttccagatgtaatacctgccttaaatattttgtttgtattaataaaatatttcaatggtttataggttatcattgatcacaatttctgtttgttaaatagttttaaaatgtcttaaattagtggggaaaaaaaagccaaaaggtgttgggataacgggtacgcataacaagtcaatgaagggcgtattctaatttctaagtttgttttgaatgagggcatatttgtttagggaatgtcagtgtattcaaaggtacactctgttttaagacaaattttttggatgtaatttctcaccttaggacactcatatgggacaggagattcttcatggcttcttttgctgtacagca

SEQ ID NO: 154365 - DNA, 363 bp, Glycine max
  unsure (1)..(363): unsure at all n locations
agcttccttgtagcaagtctcaccttacttctntnnnctcaatctttgagagaaagtctctagtcaaaaagttaattcacataagccatcaatcttcttctccaatctaaggttgatctcataagtaaccatttgaataccactagatgacatcaactcctatctaaggttgtaggccctccataaaagataaagtcacttacattttgcttattaggctgataaagtaaagaagatactctcaagctagataggtagaaccctatctatggcagggcgcatcactctagcccaatctaggctgatgaaccttccttcttactgcatctaagncaccatcattcttgcctttattagtaaaga

SEQ ID NO: 154366 - DNA, 384 bp, Glycine max
  unsure (1)..(384): unsure at all n locations
agagggagaggttgttatttacataaacatcnaaccctcctggcatctgacgatcacttgaaactaccgaaaaaatcagcaccgtgaagaaaatccaagccgaggcgcttccgtaacgtgtccgaaacacttccgcgggtgattctgagaacatttacctccgtctcacgctcggacttcggtcttcaaccggtaagcgcccacaatggaactctccaattcatactatgcaccctcggaggaccccactagaatcgtgaactttgatcatcatatcattcactgtacgaaccccccgtggacgcgctttagacattcatttaagccattctctcgcctaacaaaaaacaaaaaatactcacaccgatcacctgaatcgaacac

SEQ ID NO: 154367 - DNA, 337 bp, Glycine max
  unsure (1)..(337): unsure at all n locations
agctatacaaagatnactcttcgctgcctcagacnaaaggggccatatcagacttatgtagccatgacaagaaccgaaagcctatagatcgacatccctgttttctgcatctatgtactgtacaatcaccatctaacagactatcgctgatctaagattactcgaccataggttgtagcttgtcccgaagtccctctctaaacttcgaagccacgaccaaagtagaaaggatgcgtcgtccatgattttgtaggcatcaaatgagtcgnaggataagagtatcttattccgttgctgccaaatagaccatgtgagagccagccaccaccaccttcac

SEQ ID NO: 154368 - DNA, 439 bp, Glycine max
ttcaggcttattttgatgatgccaaaactcaagtctttattcaagattcaagcaagtttcaagaatcaaagagtctttcaatcaagaatcaagattcaagcaagtttcaagaatcaaagagtcattcaatcaagaatcaagattcaagtaaagaattaagagaagactcaagatatgcaagaaccattaagaaaagtataaaaagagtttttcaaaatattgaatagcacaatttgtccaaaagaatttttcaaagaaaaatcttttaccagagttttttactctctggtaatcgattaccataaggtcgtaatcgattaccagaagcccaaacagttttataactgttttacaaagtagtaatcgattaccatgggcatgtaatcgattaccaatgtttttgaatgttgaattccaaaattcaagagtcacaacttgg

SEQ ID NO: 154369 - DNA, 411 bp, Glycine max
  unsure (1)..(411): unsure at all n locations
agctnagataaaaaaaaaaaaaaaaaaatttttcttccatatagnagnaactctcagnccaaattcatgacagatttttcattttactaaaggtcattaaatttattttattngnaacttttgctaggaaaatccaattagggtgaaatttaaggctaactctatgttttaacatgcaaagaactcattttttcatcaaaagctcaagcaaaatatctcagcacacagattcgggacatgaaaacaagctcaaaaatttcaaatccacaatatgttcaagagaagttcaacaaaaagcatatggttcaagtgttagagagacccctgtcataccctaattttagccagagaccatagttagtcggcatgcaactttcttttgaccacttcaaaatgtttaacacccatcac

SEQ ID NO: 154370 - DNA, 441 bp, Glycine max
  unsure (1)..(441): unsure at all n locations
tatggaccaagtcagtgtgatgtctgtctactataaaatgttctttaataataaaagttaatggattgatgggtatggttttgtggaacatcctanctagaacccactgctgctttcaaataaggagttctcaaatggaatctatgatgttataatggtgtggtagttctctaaagaatgtcatgcaaaagtaattggataagaaataaagtgggttgccaaggatttcacataactcccaaactaacattcattacttgttgaaatttcaaagcattcctaacaaacttttagctaggacaatcataatcatatacttatttgatgacattaacaataaaaacagagaaaaatcattgttcatctaactatattttctaacaagcttaaaatacattacaaataaacagtaacattaacttttgattgtgtaaatctcta

SEQ ID NO: 154371 - DNA, 360 bp, Glycine max
gacaagtggcctcagatatcttaagaaaggggggttgaattaagatattccaaactgtttcccctaattaaaaatctatttcactttttactcaagttatgaattcccttaatgacaatcttcttaaatattaattcaaatgaaacaatttgaatatgaatataaagcaataataaataaaggagattaaaggaagagaaaatgccaactcagttttatactggttcggccacacccttgagcctatgtccagtccccaagcaacccgctagagagttccactatcctagaaattccttttacaagttctaaacacacaaagacaatccttcctttgagtttagagatcctttacaacaa

SEQ ID NO: 154372 - DNA, 439 bp, Glycine max
ctgtagagttgtgttgaggcttaccaaggacaggccttgtgattttttgaacctgtgtggagcttaggtttgacgagtcttatgtgcagcgcatgtgctgtgctcttgcatacatgtcactcactgtgagtggcatgtacttgagacttaatggtgtactcttgcatacatgtcacctacgaagtggcatatactggagacatggtggtgtgctctcgcatacatgtcaccgtgggtggcatatactagagatgtagcatcatgaatcagtacaagtcaccaagggcgaaacatgggctttgtgagccctttggatgattaataagggatttgtctgaccagggttatggtagttatgctcttgcatacatttcattcattgttggtggcacatactggagacgtagtggcgtgctcgtgtgtacatgtcactcgttgt

SEQ ID NO: 154373 - DNA, 359 bp, Glycine max
ctaacattttctttgagattagagagatcccacttctcctaaagtttcctctattcagaagtactagaatctgtaagagaaaaaggtttctcaatcctagatgcaaggtctagatccatgcagccaatatcaattagcatgttctctttccagtccttaaaatttgcaccattaagaactggaaccgaattcagattatcatatgtagaagcaacaactgaaaaagatcaaaacaaaaatacaataaactcacatagcattcatcaatgcatttaaataatgatatatctcatcacaagattttcagagcaccattaatatcaagtctttggacagagatattaactactagagaaatc

SEQ ID NO: 154374 - DNA, 315 bp, Glycine max
  unsure (1)..(315): unsure at all n locations
aaagaagcatcgggacccgggaaaagaatacaaattctatcacaaaacaaaaacactgatgccaaagatcacccgtgaataaaaactaacagcgtgggcggatgaggaanattaaaattctaaagaattgcaaattctgagaattccaaacgcttcaatttaaatgccttcatatctaaaagtccgtggggggacaaaaaatcagatcgcatcagtcctaaaatgttgtggtcggacaaagaaacaaaacttcgtcatcggcaaaatcttggggccgaataaggaaattgaatttcttcatttctaacacttctt

SEQ ID NO: 154375 - DNA, 413 bp, Glycine max
  unsure (1)..(413): unsure at all n locations
agctagaagatgatgctttaatggaggttctttttgtgtgaaggggggagcncgannttgaaagatttaaagatggagagaagtggaactttgaagtatgtctcacaagactctcattcatcaaagttacaacaagtgttacacatgcttctatttatagactaagtagcttccttgagaagctttcttgagaaaacttccttgagaagcttctttgagaaaacttccttgagaagctagagcttagctacacacacccctctcataactaagctcacctccttgagaaacttccttaagaagattcctaaagaagctagagcttagctacacatacctctctaatagctaagctcacctccttgagatgagaagctagagcttagctatacacaccctataatagctaagct

SEQ ID NO: 154376 - DNA, 439 bp, Glycine max
  unsure (1)..(439): unsure at all n locations
ccttgggctgaggagctatataacaacaccagggggnntattttatgagttnnttntagaggagaataattctagggttttagaattctagtttttactgttcatgcgcactgttcacgtagaataaaattcattttctgcaatttcatttctgcttcaatctacaatttcattttctactgattaatggaaggctaagtctccagtgttgttttctcttgaggatcaagcacatctctctttgaggttttgttattactattgaattctgatcagtttttcctcttcaccaattactctgtatttgttgatattaatccatgcatgcttagtgcttgattaattgtctttgcgcttaatttacgttcatgcttaatgatcagtttcgttcatgattaattggtgtatgtgttgcttaatcacataatgatagcctaat

SEQ ID NO: 154377 - DNA, 416 bp, Glycine max
  unsure (1)..(416): unsure at all n locations
agcttgcncatgcatgagtagtatgaatctactctttgttaagaaagatgcacatgctagtcaaacattatctcatgaagcatgcttataaggtctcttacatgaaaagatgtatcatacccatggaattttggcagaaataaagctagtgaataataacttctcatcacggaccactaaaacaattaagagttgagtatataggactccacgttatgcataaatattatacaagttaagttatcggaagctaacacttcggcaaaaaaccaatacttgagtcaaccatttctttacaccacctaactttcattcttctgcattgttattttcatccttctatccatttcttgagttcttcattgagaaccaatgacacatgcataacctataccaattgacggctcgttgttgcg

SEQ ID NO: 154378 - DNA, 439 bp, Glycine max
  unsure (1)..(439): unsure at all n locations
aactaagctcccctctggtgggncctaggtttcaagcgctagatgatttataagggacnggagcctttatttcactgtctccgtgctatggacatttgtctcaccatagacattatttctaaaaacccaacgggtgggatgtgcgatattaagttccaaactcggtgttcaaatttcatgatgatccaacggttaacgagtttgagattgtagttntaccaggacagatttgagtgtatgtgggaaaaagaaagggtgttaggagaggggaaaggaaaatggatttaacaggaagagagagagcgtatagatgtatcataaatggtaaaattgacctaatatgtctctattataggtatagtacccttagcctattatctacttttattttattattctatagaaagaaactctatttacttcctataaacgaataaaa

SEQ ID NO: 154379 - DNA, 361 bp, Glycine max
  unsure (1)..(361): unsure at all n locations
cccgaagaaacaccatcgcctagattaccatgcattaagtaccatgtccaattattntgtttttaagtgaaacgggtttatgatcccaacatggttggctcgtggagcctaacacatgatactaagaatgtagtgagaagtttcacgcttcccccttttttgcttttgttttgttgaggaaaacgcaaagatgagctaacatgaaaacaaatggtatgcaattctgcagatcaaaaagtttgttgaacgcatatgcatgattatgccatgactcatgcaaattgtgtagctggattttgttcacagaccattgctagatatgtccattatgatgttatgaagagatgcttatgcgatgcat

SEQ ID NO: 154380 - DNA, 359 bp, Glycine max
  unsure (1)..(359): unsure at all n locations
cgtctcacagaacgcacaaaggagaggcggattactactctggcacnnccgcccgacagcgggacccaaaaggcagaangacagaacncgngagcacggaagaagaacgaaaccaccgcgagccaacaggcacagcagccgcgaacgacgaagggcgcaaaagacgacganagccacggcgggccaccaagccgagcgccgcacaaacaacaaaaagcgaacacggagaaccacgcgggcatgaccgcccgccagcatgacgcacaacncgaaaagacagcaaccggcagcgcggaagacgacanaaaacacngcgagccaacgggctagacggacgcgaccgacgcgggccgcaaaag

SEQ ID NO: 154381 - DNA, 283 bp, Glycine max
aaactagcagactatgtcctgggtttaagagtatgtttctcttcatagtgtttggccaacgaaatttttctgaagagtcatgtaagagtttgtgcaatgacatcccttctgatttcttgttttactcctcccactaagcagatccaatagagcttctagagtcattccttgtactcgatttgctaaagccgagaactgcgcgtattttgactgacctgaccccccgcttgcgagtttaaacatctgagatctaagacatccatacggagatgggccaaattct

SEQ ID NO: 154382 - DNA, 370 bp, Glycine max
  unsure (1)..(370): unsure at all n locations
ttgttgttgctatgtaaacacaactgagagcatcttttatgtcttctagntatgngctaaaaaaacaaactcttctcaaccttgcatttcgtaacggaacaaaacatattaaaatctgcactggtaaacaataagttacctccaatactataataaaagaaaggaggtcatcatggtaatcgtggtatactaatcgcgcccctactcttatttcttagcatacgaagccattccattcatgacaccatttgcgtattatgagtaatactctcaaatactgaaaaacacctccctcaacataccttacgttggtcggcttcacaaatcatgtcttcttataatgttcaccagtcgtacgcaatatcatcct

SEQ ID NO: 154383 - DNA, 329 bp, Glycine max
  unsure (1)..(329): unsure at all n locations
tctattttttacgagtccatttgatttaagaagctttataacccagtccatctaactcaaatataattggattaactcaattcaagctataattttcaattttaagaagagaaaataagcactttgtctctcattatatttcntatgttttttaaatnaaaaagaaagatataatattagaggatggcttgagaaagtaatcataaggatacaataataactcgcaatagactcatagaaataaaatggatatcaaaatgtgtataccaaaatgtcatattccttgatatagattnttaaaataaacactccatcctaacttatcaata

SEQ ID NO: 154384 - DNA, 403 bp, Glycine max
  unsure (1)..(403): unsure at all n locations
agctnctagcacactccagacatcttctttctnttcccaacggncagatcatggacaagtgtcttgagtagttgcaaaccaaatttcgataagatccaaaggttaaagtagtctgggtagcatttttaccgaagcagctccatgtagttttctctagaagcttcattaagaagcttcctctagaagcttcattaagaagcttctagcacactcgagacatcttctcaaagatcccaacggtaagatcatggacaagtgtcttgtgtagtttaagaccatatttcgagtagattcaacggttaatgaaagctgggcatcgtttttaccgaagcagctgcatagtagctttctctagaagcttcattaagaagcttcctctagaagcttcctcgaggcttctttg

SEQ ID NO: 154385 - DNA, 413 bp, Glycine max
  unsure (1)..(413): unsure at all n locations
tgaagganaactngatgccttggtcaacctggattctcttcttgccatgaatcagaaatctacacctgttgcaagagtctatggtctatgttcttctgcagatcaccatacagatctctgtccttctttgcagaaatctggagtcaatgagcaacctgaagcttatgctgcaaacatttataatagacctcctcagcagcaaaaccaacaatagcagaataattatgacctttcgagcaataaatacaatctaggttagaggaatcatccatatctaagatggacaagtcctccacaacaacaacaacatgtccctccgttccagaatgctgctggtccaagcaagccatatgttcctcctccaatacagcagcaacaacaacatctgtcacaacaaagacaacaagcaactg

SEQ ID NO: 154386 - DNA, 386 bp, Glycine max
  unsure (1)..(386): unsure at all n locations
agcttgcnaagctggtatagaagatgttatttttgaagngngggacatagnctaaagagtgaaagcaaaactgaacaaaagatcaacttcaatataacaggaatcttgaaattagagaaaaaagaaaaaagatccataaagtggttgatgttgagatacctggaaatatttttagaaaaaaaggtatgagcacccaagccacaatcaattncttgtataagaagaatgaaagagaggaaacttgnttagcaattgagagatttttctacaatgatgccataccattcaatgagaggcaagaagagaagaattccatattatgtgtgaattaattcctaaacatggccaaagatttattccagcatcctatcacaagattagagaga

SEQ ID NO: 154387 - DNA, 422 bp, Glycine max
  unsure (1)..(422): unsure at all n locations
taagtactctagatntcttttatcatgatatgatatattttgttttaccttgtgatattttacttttgtaaaaatattagaaattatttcttgctcccattaagaattttttttgaatccgccactgaacctttgtctttgtgatcatcaccatttttgttgtcatcattattgtgactaccaccactattattgtcattgctatcactatcactattagggatagacatataattcaataagtgaggggccaaaatcaaataaatatgtaacattaaaattgataaaaaaaataatttggcttaaatatgtttttggtccctgatatatatcgtttttggcatctggtccctaataagtttttcctttgaatcacgtccttaatattttaaaagttttgtctgaggtccatgccgctagtt

SEQ ID NO: 154388 - DNA, 411 bp, Glycine max
  unsure (1)..(411): unsure at all n locations
cctgcaagctgcagctaggagagaaaaactcttatnttctttnanncncnctctctctctctctctctatatatatatataaaccaaaatatgtnattcaagaatatataggagtcatgaaatttataaatcctatatatcttcatagaaaaaaaaagcatgtacaagacacaacattgaccgttcaataaaatgaataaaaaacaacaaattttctaccaacatctaagaatatcaaagacaaagcatttggcaggctacaagtgatctaggaaatgggagagtttatatgggaatttatagcttacatattcttaatcatcatagttgagaacagatacaatgaccaaatcaaaagttactaagaaacaaatatagntatatgaaacttaataagacaaaaaactacaa

SEQ ID NO: 154389 - DNA, 435 bp, Glycine max
tgtaatcaattacagatcatccttggctataaattccttgttttctctctctttgcgcagaccctcattcctccccttctccttaacagagcccaacctccctaaaacttcaaatcctcataactttcttgtttcttaaccaaattacttcaaacaaagcccaatcttcttctttttcaattctctacaaagcccaccgattaaaattagctgaaacaaccttcaatggaagaatcttcgaacaaaacaaaagggatcctcctccaccaccaccactgcaagccaccaccgccatagaaccttcggtgacccaccagcaccaattcctccttctctttcatctccccagtcatccactttgttttccttcgatgctcaacatcagaggtattattctcaattctgcaattgtgttattcttcaccctaagtactt

SEQ ID NO: 154390 - DNA, 297 bp, Glycine max
  unsure (1)..(297): unsure at all n locations
agcttcttcatataacatgttttctgtgttttatacacaatgcctggtacaccacaacaaaatggagtatcanaaaagagcaacagaactttaatggatatggntaggaatatgttaatcaattcaactttacccgcatctttgaggatgtatgctttgaaaactatcatgtatttgctgaatatggctcctagtaagttagctccaaagacaccttttgaactgaggacaaataggatacctattataaagcacctgcatgtttggggttaccagacaaaaataaggacttataat

SEQ ID NO: 154391 - DNA, 434 bp, Glycine max
tcatacaattaatataaaacctatatcctaatgtcacattctatcagagcgttgtgttctagtgtcctctagcatgaggttcttcatagtcatccacctattcatctgctcctccgaacacaagttcaagatcatcacaggatccaaacacaacaacacacagggagtgagttatcacattcctagctaatagagaaacaagacaattaaatatacatattatataaatgagataccacttgcttaaacataactcacgtaatttcaccacgttgtcattcaaaattcactttcaatcatcaatcacattacacaagaatcccacactccaatcaagatataataacacatcaatttcataataaacaattagcaagcgtatgcaacagttatgctaagactcaatcctatatgcaatgtggtaccatgtcagt

SEQ ID NO: 154392 - DNA, 439 bp, Glycine max
taagaaaaagcttaacaaacttagaaatcaagtgatcatgtttctttttatagggggagaaaacggatgcacattttatctatatacaattgtttgttgcttgcttgaatcttgatttcaggtattgtattgtcatcatcaaaaagggggagattgtagatgcaattggctttgatgttttgatgatgatcatgatgatgtgttgcaattgatgcaaatgggcttttcaagattaaaattcaagacaatacttcaagattacaaggcacaacatcaagatgatcactataatattaggaagggaattcctaattgaattagcaaaggtttggccaagtgatttaaaataaaaagtgtttttcaaagggtttactctctggtaatcgattaccagaggatgtaatcgattaccagtggccaaatacattttataacagct

SEQ ID NO: 154393 - DNA, 412 bp, Glycine max
  unsure (1)..(412): unsure at all n locations
accatgaagcatgcaagctagnnaaacaaatatagtagnaatattctttgtctcttgnatcatatgggnagcaatnattatttacaaagggagagagagagagagagtcagcaatcaataattagtgcatcaatttaacaattgaaatccaatagcataatgcaataactgaaatacgaagttcgagaattgcaatcccgtcaatgaaattttgttgaattcctagtagaagacaaattaaaaagcttacttgttgaagacaagatcaaatgtatcaaaattgtagatagttgcaagaacattattaaaggggcaaaccgagaagtcaagccttcctttgcctaaccacacgcttcaaatactaaagttttcaatgggcaaacactagcaaagaattgaataacgtgacggc

SEQ ID NO: 154394 - DNA, 440 bp, Glycine max
ctggcctttttctcgccaccatactcacgatccacttttttttttacattttttcaaagtgacaacaatattatattatttattgtaataaaatttttcctttaatattatgctatttactctattgtatttttcaatcaaatatttgatatttctccaagagtttaaaattaaaattatccttaccaatatcttttttttgtgtttttttttttttgcaaaatagatatataaatcatataaacataacatttatgtcgttttatatttataattaactaactttctagcttatagttttatcaaatattttcttaatagtaaaaagtttgtcaattattaggttattgataaacatgttaagaagatatcattatagttaaacaacttgtgcaactttgccggttagtcacctaataaaaatccatattaagtagtac

SEQ ID NO: 154395 - DNA, 360 bp, Glycine max
  unsure (1)..(360): unsure at all n locations
attaatggggagaccattatttgaccaaagtattttatttgaattatccttattctttatagactttagcttaaaaacttaagagtttaaccatgcctatgtatcctatgatagcatctcatttttttccatttcaatagtctataaccacttcccaatcgaacgacaataatattgnctatcacacacacacacacaaaactgggatgttacaattcaaatcaattttcaaaattatattgaaaattttagtttttgatttttttcccgagtttttattaaattgntaatatttcttttttcaatttacatcaattcaaataatggtttatctattattattagatgatgaaatataat

SEQ ID NO: 154396 - DNA, 438 bp, Glycine max
taaaggaagtgaaagaattagatgggcagaaatgtctttctattgtttggtaaatctgttccctaaatccctgaaaaatgtaaagatctatgtacattcagcataccttgtattatagggaacaataaggttgacaatgccatgctagatttatgagattctgttagtgttatgcctctgtctatttttaattctctatctctaggtcctttgcagtcaactgatgtggtaattcatttagctaatagaagtgttgcctattctgctggtttcatagaggatgtcttagttagagttggtgagctgattcttcctgttgatttttatatcttaaatatggaggagggattttctaaaggattatttcacatcattctatgcagaccttctattaaaactactagaactaatacagatgtatatgcagacacactatct

SEQ ID NO: 154397 - DNA, 345 bp, Glycine max
  unsure (1)..(345): unsure at all n locations
agctatgaatcgattacatatagctagttttctttttctctgaaagaannnncaaaaataactcccaagtgttacatctgttcaagagatttttgaatggccatcaaaagcctataaataagtgactagggacacgaaattcctaagagacagnnnntctgaactaaaaagtcttatcctctcaaaaagattccttggtcaaacactcgcatattcaataaggaatcttaattgatcttcaattagaatatccttctcttaaagagagaaacttcttcttcttcttattcaaagagatagattaaaggaccgagtgtctcttaagatgtaaagatttctgaacac

SEQ ID NO: 154398 - DNA, 429 bp, Glycine max
cttaaatactaagctatggttcctggaccttccttttgagaatgcttatttattctaaggagattggatgcaaaattctaccctttaactgattggatgcaactgcccttggatgttgaggaagagattgtcacatgcccttcgttcgtgtacaaataatctgaagcggaaccatcttctagtgtattggatcaatctatacggattgaagaccttcctccaccaacttggaagtgttttcaccctaagatatccaagcctacatccatagcagtcctgcgcaaaagtgtgtacaatattccatccggagcttgcaaagaagtggtgtgatatgattgagatattattggatgttgcacaagattgatgctccatagattgacccatcttctaataaccttctgccaccattcctacatacgaagcaca

SEQ ID NO: 154399 - DNA, 396 bp, Glycine max
  unsure (1)..(396): unsure at all n locations
tagcttaaggatggaatacttacttgntgttgttgttcaaaagcgcggaacggtatcaaaaaatgcgtattgagatgtcccttagtctgcaaactcgtaaatcccgagggtatggcttttgaaaaggggaaaagaagtttttagaatgaaaaaaacgccccccctttcgtcacttttatatttaggagcagaagtgagctcgcccaggcgtgccctgctcgcccaggcgatctaacctgcactttnttttttttttttttgaagggaacatttaaacatgcccctcccttctcatggattagcatcttgcctaacttgaacttacttaagttagaattaagcgtagattacttattttattattggtatcatttttttctttttaaaacaaacaaa

SEQ ID NO: 154400 - DNA, 406 bp, Glycine max
actaagcttgagccaaatcctgactcacataaaccttgacccattgtggattgtcaatccttacccttggaagcaaaaaagaaaagaaggaaaatttgcaatcaaagagaaagcaaaaagaaaagaaaggaaattcccaatcaaagagtgggagaaagcaaaaagaaaagaaagaaaattcccaatcgaaaaatgggagaaagttaaaaaaagaagaagaagaagaagaaggaaagaaagctcctgatcaaggatcgaaagaaaaaaaaaagaaatgtgcagaaaggtctttataccagacaatatctgaacaatacagaattgtcaccaaatgaacaaaagaaagaaaaggaaaccataacctaaaagtggtcttctcccttcgattaccaaccaaaatcctgtg

SEQ ID NO: 154401 - DNA, 411 bp, Glycine max
  unsure (1)..(411): unsure at all n locations
gagncgaccagcaagcaagcaagccccgaaggaggcgagaagaatcanacgccctgccancannaaaaaaggggagaaagagaacggacgnacacacgaccccgacgaagccaaagaagaaccaaacaaagccgccccaaaagaaaaagcacccgccccaagaacaacccaagagggccncaacaagcaaagccacgccncaagacccacnaaagaccaagcccagccccaaaacaaagaggggccaagacacccaaggccccagcaaccgaccaccanaagacaaggnagagaaacagccgccgaaaaacgcnncgaaccngaaccnccaacacagaancgaccaccacacgcccagaaccgaccaccagcaacgaaaccccggaaanncaaacccaaaagccacaaccc

SEQ ID NO: 154402 - DNA, 417 bp, Glycine max
  unsure (1)..(417): unsure at all n locations
accaaaccccaacaacagagcgaaccgcagatacttttctcaacatcntgnctccgagacggagaataattgcactgtgtgccttttgcactagtgctttcttatccccatcaaccatcatctgtttgagtttgacttctccatcaagtgctttcactacgccctgctgaacaagaagggctctcatcttcaatcgccatagcctaaaatcattttgccctgtgaatatttcaacctcatacttggccgagcccatttcttgaatggagcccaaaatcatccacgctcaccgcatcagtttgttgtgccaagaccagaatcactcatcgtaacatatgacgatcctgctcgaacaagaataagcaaacatgtagaatatggatgaacaaaagaacttcacagaaatgtgatttgact

SEQ ID NO: 154403 - DNA, 392 bp, Glycine max
agctagccacccagctcgcccatcgtgtttttttcttcctccagaagcaacagccttctggatgaatcttctggatggcccaagagggcctggttgctattttcacccccatttttactaaatacaccccctgcctttttttggagattcttttttcgtaaagttacggaaacttatgaatttcgtaacgatactagttttctttccgtaatgttacagaaccttgcggattacataatcatcccctttttgacttacggaatgttacggaacctcactatttgtgcaacgatgcttccttttgatttccggtgtgtcacagaatttttacagaatgagcatcaatattttcttttgatttccggcacgtcacggaattccacaaattgcct

SEQ ID NO: 154404 - DNA, 435 bp, Glycine max
  unsure (1)..(435): unsure at all n locations
tagctgtccatagtcgtgctaagcgcgctagcaatttctttgtcttctatataaccctgaaatcagattttggagaggatttttggccattttcttaaggagcttctgcatgtgagagattctagagagagaagggtctaaatccagagagtttgaaagattttgctatgcgaaaacctacagagatcggagcttgaagaggaagttgtcctgagagcttgagatgagtttgtgagtgattgtgaggtcctagaggtggaggagacatcccaactacttgtatttcttcaatccttcctttttctcttctcttttttgtaaaggaagtttcccagatatggagagctaaatcctctgttggttcttccttgtaggtacttgatgtaaatacctatatatctatttaatgatgtttgatgttntctctgtgctatc

SEQ ID NO: 154405 - DNA, 435 bp, Glycine max
  unsure (1)..(435): unsure at all n locations
tctacttatgtggcaaggcgggcttccttcacttttcttacttctacgcgagctctgaccactgtttttccttcccgcgatgcttcttttcatgttcgcctgagtgggcttatagcctaaaccatacttcccacgatttccttgggtttttatcaggctagttatgccgccattgtctttgcctaaacccatcccgggttcataaccgttccccaacataactcgggccatcattaccgtcgcatctgacaggcaaggttgcccaaagagggagtccacggaggaaatgctgaccacctcaaaagactgaanagcggtttctaacgattcttctgcggcttccacataaggcatggaggatgggcagcttaccaagatatcttcctcgcctgacacgatgaccaagtgcccctccactacgaacttcagcttttg

SEQ ID NO: 154406 - DNA, 342 bp, Glycine max
  unsure (1)..(342): unsure at all n locations
aaanaacaaaagatataataaagttaactaagtagacaaagaaaagaaaatctaggtaaatgatatagcaatacaccaattcaactttgatccaggggggaagagagagcattcgcagcacaaagaggcaaatgtggatcactacaccagcctggtttctcttctgtcaccctatttgccaacacatacaaaaatgagtcaagactgaagcttgaagtcatgatatacaaaagcatcttattacatcaatgacttaagttaagaaagaaaggaaaggcaaaggagtacatgtgaacttctttggcaccccttctttttgtcatctcccatgtcaatccatta

SEQ ID NO: 154407 - DNA, 414 bp, Glycine max
  unsure (1)..(414): unsure at all n locations
ttaatagtaattcattctcatttttatgtgggtgatattttattctattacgaatgattaaacctgtgttatgaagttattattttattcgtaccattacaactgtggtttaaaagattttaaaataattatcattttaaaattttaatatgatgttaattttttgtccatctatttctcttataatgttaataatgaataacatgcatatataatctgaattaacaatgatataaagttaattttataaaattattattatttatttatttatctgtgtaaaaaatctatgaggataattattnttgagacggaaggaatataattgtagttattattttattatccttttaatatatagactctcacttattaactcttgtgttcagggtagaacagcttccagggaacaaa

SEQ ID NO: 154408 - DNA, 434 bp, Glycine max
  unsure (1)..(434): unsure at all n locations
tacacgtgtgacacaccattngaggggggagggtttttttattatatannatataaataataaacaccagtgttttgttaataatttttttaagggtaattaattatttatatcttatactttattatttatatattttattttttataatttaaaagtgatctttttagttttaataatttatatgataattctcttctaatttttataatttaaaaatgatatttttaattcttataatttatattattttttttagtcaataatttttttaatttttattatttatattttaattatcttttttccttgctgatatatatatatatatatatatatatatatatatatataaataattagttacaaattatcaattatttttctattataaattatcttacgataaattaattataaattatttattaata

SEQ ID NO: 154409 - DNA, 360 bp, Glycine max
  unsure (1)..(360): unsure at all n locations
aaannnaagnnnatctagaggatcaccacctatcagattttgttnctcaagtgcatgtaatcctctttcactaacatgacctaatctcaaatgccatatggtggttttatcaatcaatgtattactagctaccgatgcatgtctaacaatagtggaaccttcaagaataaacaagccatcacttttattataggtacccttagctatgattaaagattcattcgaaatcttaagatcaccatttaaaattctagttgaatatcctagatcggcaaacatgttnatggaaataagatcccttttgagttctggaatgtaccctacatgtttcagtagatattctttggtatcaaacatgtt

SEQ ID NO: 154410 - DNA, 434 bp, Glycine max
  unsure (1)..(434): unsure at all n locations
ggacagaatttaaaatcgttttgctngaatctaaactttaactgattnagntacaaaaccaataatttaattaaaatataatgatagtgtataggcttttctatattgtcttttaataatagatntgataacattgtcgggttttctaatacttattttaaaaaccatatctagaatgatttatgattaattaacaatataaaaaaacctacagttatagtttacgaaagttaaactctaaaatcaaaagaaaggaaaaatattatgctactatttagtacgaagagtttaagttatatacatggtcactgttattcaacaaaaacatcacaaatcataatgatcaggtcaaaccgtcaaagttctagacttctagcgacctggcttccagtgataataatcaatacaactaannattccgtcattccattcac

SEQ ID NO: 154411 - DNA, 407 bp, Glycine max
  unsure (1)..(407): unsure at all n locations
agctttctcataaggcctttatgtcattttttgctagnannaactcactttaacctccatttaccacagaattcagacttagccttcccactctcaaagcctcactctttttccactcataacaccacattctcactttctaaccctaagttagttctacccttcgtctctaacagatttccatcagcaatttcagcatataaacatcacaaacatcatcacgaaaaccctaaaacagaatgggtatgtttaactcatccaaacatggcaatttcaacaagttttcagcaaatgccttcacaaataatcatcatacagcagaaacctagcaagattacccatcatatctcccataaccccatacccacgaaaatcaaaggagaaagaagtccaccccaaccagaaat

SEQ ID NO: 154412 - DNA, 432 bp, Glycine max
  unsure (1)..(432): unsure at all n locations
ntgactcggatatccgattgaggcccaatattatcattgttctcgaatatagaaatggactgaccacgcaaattcggacagccataacgtttgactcggattcccgattgaagctcataatatatggagatggtcttaggaaaaaaatgaagcccatcgcaaatacaaacgaccataacttttccaccggatctccgaataagccaagtaacctatcgcgatgctcaaaatttatcatggaagactcgggtgaattccgacgggcaaaactttttactcggatgtccaattgaggcccataatatatcatcgccctcgaatatagaaatggactgaccacgcaaattcggacagccataacgtttgactcggattcctgatngaagctcataatatatggagatggtcttaggataaaaatgaagcccatcg

SEQ ID NO: 154413 - DNA, 345 bp, Glycine max
  unsure (1)..(345): unsure at all n locations
ctcaaatgaatacattctataggttgaggactatgtaaccaaatgggagaaagaaatagttgttctacatgcagatgtaaagatcattcttcgcttcccaaagaaaacatattttcaatgtttggcacaccaaaggtactgataaatgacgaaagatctcatttctgtaatgtccaactcaagaaagttctccaacactatagtgtcagacgcatgatagcctcaccttaccattcccagaccaatgggcaagtagaagtttctaacaaggaagtcaagaagatcctagagaaaacagntgctcggtcattagatggatctctgagggcatatgaaatagcatac

SEQ ID NO: 154414 - DNA, 441 bp, Glycine max
  unsure (1)..(441): unsure at all n locations
ntcctttttttttgttctgattttttttactagatgttttttttttttttcttttaaatttctatgcttcaatgaaattttatttgtggcggttgagaaccataatgttaactttaatcaaattgtgaatcaaaattgtgatactttatcaccagaaatcacaaatgatagatgcatgacaaaggtttattgttacacatttatagagatgagaaaccaaaagacgatgtttctaaaaggaaggattacaacatatgtttaaccatttaataaattacattaacaagttatagtgtttgagatattttatttttattcataacctagtgattctttttacagcaacctcatgaaaaaatagacaactaacatagttaatttaaataaaaaaattcacaaaatatcttaaaaatactatttaaatgaatcgtatataataaa

SEQ ID NO: 154415 - DNA, 331 bp, Glycine max
  unsure (1)..(331): unsure at all n locations
ccgagaagcgggcgggagaagcgagagcnnagccacacacaccccnccaanagcgaagcncaccccacgccaaaagacaggaaaaggcncagcgacacacaccccgnaaanagcaaggcgcacccccacgccaaaagaaaggaaaacacaaaaaaaagcccgaggacaaagaccacacacaacgcccggaaanacaaggccaaaaccctacaccacaagaagggccaaaatacaaggccaaaaagaaagaaaccctacgcacaaaatgacgaagaatggacccaaccccggcccacgggcgcaaaaacctaccacgaggggcacgagaacc

SEQ ID NO: 154416 - DNA, 424 bp, Glycine max
  unsure (1)..(424): unsure at all n locations
agaagcatgcaagcnacagacgnngaacaaaagcacggctttcctgtcttcacganaaaaccncgnaggagaggggtaacaattagagaagcaataggcatcaagcctgtcaactctgacataggtgatcatcttaaattagaaacttgctaatgcaaagggcttgaaattttcaatggagtctgcccctggaaacataagaagaagaaccactaattnagagttcaaattaagcaaaagccaatcttgcataaaaaattgaagcactaaatgatatacatcattacctataacctcccaaaaatattggaaaaaaatagcccctatacccattcgggccaagagctcctgaaccattcatactaaagactacaaatttcacctcgtctttagtcggggatattggagatcaatgcattttctt

SEQ ID NO: 154417 - DNA, 447 bp, Glycine max
  unsure (1)..(447): unsure at all n locations
tactaagctttngagaaccatttcgctactggtaatcgagtacaattttctgtttatctatcaccagagagtaaaaactctttggtaaacaggttttgagaaaaatccatgtgctactcnagttttgaaaaaactttttcatacttatcttgattaagtcttctcttgattcttgaatcttaagtcttgaatcttgatcttaattcttggaaacttgaaccttaaatcttgattcttgattcttgaaatcatcatctttgttatcatgaagtgttcttaacctttgagctttttgccatcacctttgttatcatcaaaacttctttgaatcaatcttgatatcatcatgaagcttgcttttacatctttctctctaaacctttgttttgataatcaatcttggtaatggaattgctgcaaaagggtcataatactttgtttttcata

SEQ ID NO: 154418 - DNA, 362 bp, Glycine max
tccagatgcaacaaccttctggatgaatcttctggatggcccaagagggcctggttgctatttacaccccccgtttactatatgcaccccctttctatttttttgtaattctttttccgtaatgttacgaaactttacgaatttcgtaacgattcctattttccttccgcaaagttacgaatccttacggattatttatttactcttttttagctttcgaagaagttacgaaaactcacagattgcgcaaaaacacgtcttttcgatttccgccacattacagaatctcacgaatcacgctagcctgcttcctttcaatttctgagacgtctcaagacttaatttattgcacgtcatctagt

SEQ ID NO: 154419 - DNA, 443 bp, Glycine max
  unsure (1)..(443): unsure at all n locations
aaaactaagctaagcttatagggccgagagagactagtcgagaatctatatgttgatattggaagacaagttgaaggcttgtcaaaggtcaaagagaagtttgtccgaccaattgagcaagacggaagaaaccatgtgggccatcattgaccaatacaaggagaagctaagtcttgcagcaacccatgcataaaggctagaggatgagtatgcaaaggtgtcggtcatgtaagcagaaagagaagtgagagaaagagtaatcgattcattacacagagaagcaatgatgtggatgggtaggttcactttcaccttgaatgggagtcaagagctttcgagactgctagctgtcgcaatgtgcccttttgcgggcgagcgaaggcgaggctcacaggtgcgctntccaaaggaggaaagatgcacggagtcgccaacaacgttta

SEQ ID NO: 154420 - DNA, 450 bp, Glycine max
ctataaaactaagccttaatggctctaaatcgtgatgttgcacttagcaccatccttgcttagcgcgagtaactgaaattgggcttagcgccagtttcgagcttagcctggctgaaggcacttattgcgcttagcgcactgatctcgcgcatagcgcgcgactttgatgctgatgctctgccagattcttctttgcgctaagcgcgctgaaattgcgcttagtatgcgctaagcccaactgctgagcttagcccatctgctacattttgtaattcaaaacttaggctctttttcacctgaaaatgcacagatttcatcattaaatccaatggaaatgttctagagacaacattgaccataaaacaagaattatttacaaaaatcactacaaaataaccataaattgtggaactatacaaactttggaaaatgatttctatacaaaagtta

SEQ ID NO: 154421 - DNA, 298 bp, Glycine max
  unsure (1)..(298): unsure at all n locations
cgtccgattgattttccgctcttattttactaaaaaaagatgtgnnttagattattatattattctttatctctttttgttttccatcgtggttacggcacgtctgttcggtcggaattcattttaaccgaagttaacggataatacaattcaaacgatcggaggaaatttattttatttttaagttaagcgtgatatgtcttaagtaaaaaggctttagcacgtcaaatgggggtctttatatgtattggtatgagtataaatattcactaaacactatgtggacctccatgggtac

SEQ ID NO: 154422 - DNA, 436 bp, Glycine max
  unsure (1)..(436): unsure at all n locations
tcttatccaaggcacattcttggtggcgaagctccctcnctcatggcttattccctagnggatggcgcctcctctcacctcttctcctttgtcttccactgcatctccatggtggaaaatcaccattgaaggaccttattgaagctcaaagatccagcctccatagaagctccacaagcaagcttccatcaagtggtatcagagcacaagagcttcaagtatgtgctctttaaacctccattaattttcaactttaccttttcctccattgttgtttcttcatttttctccatgtatttcctcacatgtcttgtgctaaatgttattaacatgattctttagaatttccaccgattaatcttgctatagaagcttgatttgattttctatggttcaaatttcttgttcatgttcttgaaccatgagttgtgttaag

SEQ ID NO: 154423 - DNA, 343 bp, Glycine max
tacccacacccctctattaactaaattaacctccttgaaaataattacggataaaaataacacaacaaatataatcaaacatcaaacataattactaataatatatagatatatatcaaagagttacaactctcccactcttttagaaatttcatcctcgaaatttacgttactcaaacaaagatggataagcttctcgcatttgactttctaattcccacatgacatcatctcctgaagcacctccccagatcaccttgaccaacagaatctctttccctcttaagagtttagtttgtcgccataccctatatttcgtctaggaccattctttgatggcata

SEQ ID NO: 154424 - DNA, 316 bp, Glycine max
tttctttatttgcatggtttgattgaacaattatgaattatgttatatgactatgtgttttttatatatctattcatgttccttgcttcatgattggtttatattcttcaatgtatgtcttgtgaatgattaatagtatatgtttgtcttatacttgttacgcactttggctttttgttgatgccaaagggggagagaaatatgaattaaatcaagaactcacataagtaattaacttattttcaagtgaagcataaactcaaaaacacaggggagaatttaagtgagtgatcgactacgaaaaagtgcgtgtatg

SEQ ID NO: 154425 - DNA, 411 bp, Glycine max
  unsure (1)..(411): unsure at all n locations
agctagatncaattaaagatagcactttttgatttgnnagnagcgaatnatttccgagattcatatgtcaacgccaaattaaaagactaatatccgataagaactaatttactccctgactcgatttttccatgttgtactttaatttattcaatagatttcattaatatgataaaaaaaatagatttcattaattacttcctctaaaagtttctaatagatagttattataacattttatttttcgtaaaataaattaaaaatgatttttatttaaaataaatagaatttttaaaaaaatatcaagtttttataattaaataaataaggagaaataattntattaatcaaaataataattagaagaaaaataaaaaggatgttttatttattcattagaaaggaaataaa

SEQ ID NO: 154426 - DNA, 375 bp, Glycine max
  unsure (1)..(375): unsure at all n locations
agcnnaagagagaatagctgagactcttcttatggtctagaacgnnatttatagaccaactcatagttggtatttatgaatataaccttcatttttacttcgtaatttatacgaatttaagtataataatatcacatgaatccaaaacaaaaaataagaacttttaggagacttacaccttccaaatctcaaatataaacaaataaataaatctcaattattaaaatcttatttaataagatcattttaaaaataatgttcatttaataagatcaattgttttatatctaatatcaagcttaaataaaaattaattaaaaaattaaaaataactcaatctaataaaattaactaatttctttaataaatataaat

SEQ ID NO: 154427 - DNA, 408 bp, Glycine max
  unsure (1)..(408): unsure at all n locations
nttgtctttccttaagctaaactatagagaagtttctttttttttcatttatttaagggaagtgttaaacaacaatatttctgttaggagatttatatcaattttcatatattatccaatcaatttgataaagagaaaaaaaattatgcattgttaatgtacagatttttataaagtcattcaatcataactcattatatataataaatntattaacttttaaaataattattagttattttaaagtaattcaaataataatttataattaaatggtagtataaaattattttacatcattagtacatacaattaaactctttaattaatttttttagatatttaattaaaccctttagtaaagttgtctttctttatgaggtacttatctcataaataaattggatg

SEQ ID NO: 154428 - DNA, 346 bp, Glycine max
  unsure (1)..(346): unsure at all n locations
gatnaccaggcatagtaattaattaccaaaagacagaataattcaagattaagctttttcctcagaacaaagagtttccaagagatcaaagctctagtaatcgattaccaagtagtgtaatcgattaccagaagacaattttgaaaaatcagctcttagaaaggttttgaaatttgaatttaaaagttgnaataaatnaccattgatgtgtaatcgattaccaccaacgaaactcttaaaattcaatttgaaaaatcacgacccttcaagatataactgtgtaatcgattaccaatgaagaatttcagaanaagctttttggaaagacacatctcttcaaaccatt

SEQ ID NO: 154429 - DNA, 432 bp, Glycine max
cttggggttgaggacctatataacagcaccagtgtttttttttatggagttttttagagttttggagaggagaataattttaggttttgcaattccagttttttaatgttcatgcacattgttcatgtagcaataaaattcgttttttgcaatttcattttctacttcaatctgcaatttcattttctgcttccaattgcaatttcgttttctgctgattaatagaaggctaagtctccaacattgttttctcttgaggatcaagcacaactctctttgaggttttgttattactattgaattctgatcagtttttcctcttcaccaattgctttgtatttgttgctattaatccatgcatgcttagtgcttgattaattgtctctgtgcttaatttacgttcatgcttaatgatcagtttcgatcatgatc

SEQ ID NO: 154430 - DNA, 417 bp, Glycine max
  unsure (1)..(417): unsure at all n locations
gacctgcaagcatgcnagctagccacccaactcgtctattcttgctaggnagcttcctccagaaagcccgncttctggaagaacttcctggaaagcccaagagggcctggtagctatctgcacccccatgtttacaaaatacaccccctacctttttttgctaattctttttccgtaacgttacggaactttacgaattccgtgacgatacttgttttccttccataatcttacggattacgtaatcatcccttctttggctttcggaatgttacggaacctcacggattagcgaacaaagcttccttctgattttagacatgttacgaaacttcacagatcgtgcaacaatgctctctttagacttctggcacagtatggaaccttatgtatcgtgcaacaatgggagccaagtag

SEQ ID NO: 154431 - DNA, 428 bp, Glycine max
  unsure (1)..(428): unsure at all n locations
tgtgcgaatcaaatcactcctgcattnnatctattctttcattnnnnnctttnnntacccactcctcacgtttggttttttagggaaaaacaccataactaaacgcgccacaaggcatccctatcgccccagatccaaatctagaacgatgggtgatcaagaggagatacaggaacagatgaaagccgacatgtcggctctgaacacaactcgcccggccggtaattccaacgcaacaaggaacttcccttcgaggccatttcaagaattcaccccactcccaatgacgtgcgaagacctcttgccgtccctcatcgccaaccatttggctgtggtaactcccggaaaggtcctccaaccccctttcccaaagtggtatgaccataacgcaacttgcaagtaccatgggggtgtcccggggcattcca

SEQ ID NO: 154432 - DNA, 368 bp, Glycine max
gcagcaagtattaaaaaaaatagttagtataaaataaaagagtgagtgcggctaattcagaaaaagaaaagctaagtgcggaaaatcaagtaatagagctggaataaaaagaaaaaagatggtctaaggatgaatgctctcctaaaatctatgcttttacatcctagaataaccatgaattgtttgcagcccagccttgttacaagcctagaaaataccttcggattcaattagagagttcttgactgcatggcatgagatgaattgcaatgatttagacttgtgttaggtgcagatcgctgaataagcctaaacacttatgctcgagtgaaacaatgactgtgatgcttgagtaatgatccttcctt

SEQ ID NO: 154433 - DNA, 440 bp, Glycine max
tgagaccaatataactcaaaatctaggcgtgtaaacctctttatttttattggatttccaaggttagagaagtgaaaatgagaatggggtaaatttggagcgaactttcacctcaaacaagtctatatcatcaatctaaactcgctcaaactggatctacgcctaaaattgcaccgaatcaaaatttgactcctcaacacccaattgctaccctagaaatggttcttgccttcactttagtcatttgtcttcctctcttgcacagcccaagctttctcataaggactaagtgacatttcaaactaggattaactcattttaacctccatttaccactgaatccagatctggacttccagaccctctaagcatcacactgttgcactcacaggactacattctcactttctaaccctaggttaactctacgctacatgcct

SEQ ID NO: 154434 - DNA, 351 bp, Glycine max
taactcccgcgacatatctccaggtaccactctgaggtcaacgaataaaagtaagaagactgactcttccacactttctcacttcaagcttgtaagattatggggtacccgtcacatgtggtactaagaggcgatcgggcgatggagcaaatcaactctccacatccacaaatcacacatcaacccaccatcccgagttgcccaccttcaactgagctcacgtactcccacgtagcccttatcctcgttcctctcaacaccgggtccccatcaatctctccaagcttccacaacatccaagcaattcaacatccaaacatcatgaactatcaaaaccaagaaaaccgggca

SEQ ID NO: 154435 - DNA, 444 bp, Glycine max
  unsure (1)..(444): unsure at all n locations
ntgtagatttagtgtttgtgggcgagaggatcgaagtgttgttttataagaggcaaatttgattatgctactttgatgaataggaagcctagggaaaattgagagaataagaaggagggagaaacccatgccgtgactgccgttcctacatggccaaatttcccactagctcaacaatatcaatactcaaccaatatcaatccttctcattacccaccaccctactagccaagaacacccaatcatccacaaaggcagcccctaaatcagccacaaaacccgcctgctgcacatccgaagccaaacaccacccttaacacgaaccaaaacaccatccagggaaggaatttttcagaaaacaagcctgtagaattcaccccaattccggtgctgtatgctaacttacacccatatctactcaataatgcaatggtagccataatc

SEQ ID NO: 154436 - DNA, 272 bp, Glycine max
aaacaaccaagaagaggagggacaacccaccacccctcaaaacaaaccgaacacaagaccacgcgcaggtggagcggacaaacaggacgaggaaccaacagacatgacgcaaaaacgcccccaagggggaggggaagaaacaatacaaccgaagaaagaacacccaccgacaccacgagcaagaaacccccacacgagcgggcaaagaccgtgagaaacgcccaggacgcacacaaccgcaaggacaatgaacgaccaacgggccaaagaag

SEQ ID NO: 154437 - DNA, 429 bp, Glycine max
  unsure (1)..(429): unsure at all n locations
agaagcatgcnagcnnnaaccncatcatctctaaaagattttctttcttctgannncctcatcgcaatagaagatacgtaagagcgaaggaaacacccttgtcgaccacaccaaaattaaaaacataaaaagcataaaaagacataaaaatacataaaaacataaaaatcataaaaagacataaaaacatgaaaaaggaaaataaaacaaattgaagacatgatattgcacatctgattaaaagtagacgtcccttgagacagacgagaggggagctaataccttctccgagcgtaaaaataactcccgaacctttcacactcaaagttcgtagactacacctttccgattttttcgacgttttcctcgaataaacgttggagacgactccgcgcattttcctctcatggaagacgcacccgagatccc

SEQ ID NO: 154438 - DNA, 438 bp, Glycine max
ctataaaactaagcttgtcgcacatcgtcgcgtgttgatatccactccactatttgttaagtagaggagagcttcaaccctataacgcaacgtggcggacaaaagtgggcagtaaacttgaatggttgtcattgtcaatgcggaaggtattctgcgcttcactatccatgttcacacattattgcagcttgtggttatatgagcatgaactactaccaatatatagatgttgtttatacaaacgagcacatcctaaaagcttactctgcacaatggtggcctcttgggaatgaagcggttattcctccttctgatgatgcatggacacttatccctgacccaactacaattcgtgcgaaaagttggcccaaatcaacaacgataagatatgagatggattgtgtcgaaccatctgagcaccgaacaatatgtagtaga

SEQ ID NO: 154439 - DNA, 201 bp, Glycine max
  unsure (1)..(201): unsure at all n locations
acccattcctaactatagtatntttctattctatttatcctcactgcactccatacccatacctctgagatttacaaatccttggtaaagataaaagagcatgtccggagaatcttaatgccacaattgtgaaaccaatatactatagccaggaggaattntcgataactttatataatagcacatgagcaccattaattc

SEQ ID NO: 154440 - DNA, 434 bp, Glycine max
tatcaaaatatccttgtcagggggttgttatgtttgttattattcaaatcacacaatttgaaattcatcgtgcaagtcaaacaactaaattctcaaacaatacgaatctgacaatgaattggaatatggccttgttatgcaatttgataaccatgttatgcatcattatccattaaatatctttttcttataaacttcccttttaaatatccttacagttacagacatcattttgaaaatcaagttattcatgttgtaggagatttattattttaccaattttattaggttgggcttgtactagttgtactcaatgctatcaatagcggatgtaagcctcaaaatatgacaagtctcaaaagaattgattttaggtgcacatcattgtccaataagtgaaaaagaattggtttaataaataataagcatgaaca

SEQ ID NO: 154441 - DNA, 270 bp, Glycine max
ctgtcttctcatgggttagattcaggcaccccatgttttcgtttttagaggctctttctttttaatatacttcggattgtgttgcggaagcaccactttagcttaaaaaaaaaatagtgataacggcaaaagaaatacaagacgcattatcattaaaaaccctcagtcatccctctaaagataaaaccataattcgccaatttatcgatgacttgattagcctccctcaaatcatgggacctaagccaactgccaccatttgaaggctga

SEQ ID NO: 154442 - DNA, 440 bp, Glycine max
  unsure (1)..(440): unsure at all n locations
tcagagccaggcctatgactgcacaaaattattctgtttcttaaataaagaacccccattcttcagtatcctcggccacaacggtagtaagagatccaactacaatttaggctaacagtagttctcattcctaaagcagtggaacactttttcatttataagagtccaggatgataacctgagatcacttaattattaaataattaaaatataggaatttagaaatatatacatatagagataaggcgttgttgttgttgttgtatacatatagagatacaatagaaaatcacataaaagagtatgtgattgcaaaacaaaaaaaatatcattcattataccacaaaagatacacaagttaatatgtaacgataaattattatttttctttctttgtcactattaaattcaattntctctaacataaacggaaccctgat

SEQ ID NO: 154443 - DNA, 410 bp, Glycine max
agctagatagcatcaattatcagatcttctcctctttatatcaataagctaactccaagcttatgagaaagatgacacacttgggttagcaccaaaatgatccaagacttaaaccctcaagtcaagagtatattttaaattctaatttctactcaatgagtgatctacttcttcaacattgtcttgcatccactcactcacatgtggcttactctaacatttacagctttcatttgtcagaatattaattgccagactttacagatcagagcacatatataacagtgaattagtagttcatcatggctattggagattctctaaagttaaacttttactttcagtcatgttaatggagctgaattagctggaacaataaaatccaagataataaatcttatcttcatcac

SEQ ID NO: 154444 - DNA, 437 bp, Glycine max
  unsure (1)..(437): unsure at all n locations
ngagataagagactggccctttggcgacatggcactcttattttcgtagggaagtatgaaacaatgcgatccctttggatgtcgtcctgtgaagtgactgtcggagcctgcaagttgctagccaagaagatgccaaggttgaatgtggagatcttcaatgaaaacgagcaagaagattgtagtctggaagatgggcagaaggtagagaagatgtatttgtatcgtacattggctgggaaaaggaaagatgcaccagaatatgtatggactctgtaggtgcattttttaggtcatttaatttcttgttattcagaagtttgtacttggttttaggctgactgaattaatgcaattttagccgggtgtagtggtttgtaacttccttgcatttgctagttttatacatatgttagtttgtcttttctcctagatattat

SEQ ID NO: 154445 - DNA, 412 bp, Glycine max
  unsure (1)..(412): unsure at all n locations
agcttaaagtatgcccgagtcattcttctctatgtgatgtagnagaagnataggcgattagaattgccattctttggattataaggtagaaccaagctcatgcttttacaaaaaagttcatcaagtcatgttgaaatatggaagtaaccgtcttgcaaaattaaggcaaaagatgaatcgagtcacatcactgcttcgtctactgccaaacatatttaagattgttgatgtccttgttacttccagtttcaccttgacaaagatatcatggaccatgtagaaaatctaaatagattcaaccccatatcctgagtaaaaattcgcaatacttcaactgtacatcattcacgtacatccatgcttttcattggttgcattgctcattgcattctttccttgaaaaataaaataa

SEQ ID NO: 154446 - DNA, 435 bp, Glycine max
  unsure (1)..(435): unsure at all n locations
tatcccaagaggagatggaccttctcaggtctctgtattgatcaataacatgcctataggtttaacctcctagaagagtatggagtcagcaacaccacttttaacatttctaatttaatttcttttgcaggtggagctgatattgaggaggaggaaccaatagatttgaggtaaaatcgtcttcaagggggaggggatgatacaatactccctaggaaggaactattcaccaaagccatgagcaagagactccaagaggattgggctagagttgctgaagaaggccctangattctcatgaaccccagggtagatttttgagccaatgggccaaggttgggtccacttatatttgtacatattagatttggatttcattatttttgggctttgtatttagggctccataatgtaggcagggtaccctataaatgt

SEQ ID NO: 154447 - DNA, 405 bp, Glycine max
  unsure (1)..(405): unsure at all n locations
agctnngagacgcatgagatattttggcttcctcttaacancggctagatccttaggctacacctttatcatttaagaacaacgacctgagtgggtaaacgcacagagacagattctgcaccctttatcattcaagaaccacaacctgagtgggtaaacgcggagagatagattctgcgccctttatcattcgggaacaacaagctgagagggtaaacacacagagatagattctgcgccctttaccattcgggaacaacaagctgagagggtaaacgcacagagatagattatgcgccctttatcattcaggaacaacaagctgagtgggtaaacgcgcattgacagattctgcgccccttatcattcaagagcagcgaagcgggtgataaacacagagacaga

SEQ ID NO: 154448 - DNA, 436 bp, Glycine max
tcaacatcagaccacttccgggtgctggaactactttatatttacttgatggggcctatgcaagttgaaagccttggaggaaagaggtatgcctatgttgttgtggatgatttctccagatttacctgtgtcaactttatcagagagaaatcagaaacctttgaagtattcaaagagttgagtctaagacttcaaagagactgtgtcttcaagagaatcaggagtgaccatggcagagaatttgaaaacagcaggttcactgaattctgcacatctgaaggcatcactcatgagttctctgtagccattacaccacaacaaaatggcatagttgaacggaaaaacaggactttgcaagaagctgctatggtcatgcttcatgccaaagaacttccctataatctctgggctgaagccatgaacacagcatgctaca

SEQ ID NO: 154449 - DNA, 410 bp, Glycine max
  unsure (1)..(410): unsure at all n locations
agcnagcnagacacaatagggctgtctatnatcttcagagaagacaaagctgaactgcttctatcaaccccactgtcttcaaactttccatcatcattgtcctcaattccaaccacagtttccatggagtatcaaccacatgcacctcaagtacagaaactgcaaaaccataaagcacaaagcaaataacttaccaacacaaaaaacccactatttcaacaaaatcaactcaaacccagataacgnaaactgaaaattgataccatcaacaccttaaaccttcaaaaatcaaaactttcaagcaaagaaatcatgccccagaagcctaaaccaccaattgaccaccaattacacacacacacaaacgcacacactacaaaactgaaatcccaattcacaaatgccacaaa

SEQ ID NO: 154450 - DNA, 426 bp, Glycine max
tgggcctatgattgggtccactaaaacaattctatcattcttgaaagaaaaattttaggaataacaagagaagtataaaaccacctattccaagggccatcaaagatattttccagttcagggcattgtggatcatcttcatcaggtacccatcgctgtaattctctccctgtctcgacatgacaggattgagatattactgaatcaaccatgatctcctgatgcatatcatagtgagattcactaggtaggccatctctagaaacagcaacatcctgtcaaaatgatgcataaaaaatatcatcaggaaacaaattaacagtgttttcaatgcaatatcacctactcctaaactaaaactttgccaacaccattcattactatacatcatcttttttggttgtttgttgatttaaacacacagta

SEQ ID NO: 154451 - DNA, 405 bp, Glycine max
  unsure (1)..(405): unsure at all n locations
agcttagagcaaaagttcatattctatctgtggaggaatncttgcaaatccattaccttttttcccattttctgttcatacttccatatgctgaccttttagaatctatgatcatgattcatgaacaccttttgagcaactcgaactaatttttttatctctgaaaagtagaatatgtttatcaaatcgagattgataccaaaccctgaaatggcaaaaaaagacattccttatttttttttttcaaaaactttaaagagagagcatagttttgcagacgggtgaagctaaacaaatggctaaaattgcctaacgcatctcaaacaactagagtagaacagagccacttttattctcactgagtagtgtttgcgttgagtaacatgtaaaacaaacatgtctttt

SEQ ID NO: 154452 - DNA, 392 bp, Glycine max
tgtgcaatttcgagcttagtaagcgtgtgacttgtgatttatcttgaactagtacccttgtagggagtagtataagccaagaagcagctcataatattgactgtgggcattgtgaaattgaaggatcctccacgaggttgcatgatttgtcaagttgtctttagatacttgccattaaaatatgcaagtgaaattcatgtttctatattatacagtatacaatcttttatcaattcttatgtgagcaacaactatctctgattcaataatgccttgttgtctaaaaaaatgatgttttattgagaactttagattgagtttgccctttgataattttgaatctgctgaagtcctaccccaaaatgtagatattgagacctctgaatgttatt

SEQ ID NO: 154453 - DNA, 382 bp, Glycine max
  unsure (1)..(382): unsure at all n locations
agctcttagagaaaagatttactcttctatnagaagnagaatnncaacgnncaaaagcactggtaatcgattaccaaaacattgtaatcgattacagcttttttgaaatcaattggaacattgtaaattcatttgaaaactttttcaaatccattttgctattggtaatcgattacaacaatctggtaatcgattaccagagagtaaaaactctttaggaaaggttttgtcaaaaactcatgtgctattcaaagntnagaaaaaactttttaatacttatcttgatagggtcttttcttcattcttgaatcttgaattcttcttgattcttgaactcttgacttgttcttgattcactagagtagttctttgatctttgagc

SEQ ID NO: 154454 - DNA, 419 bp, Glycine max
  unsure (1)..(419): unsure at all n locations
taacacattggaacctctaaatatctcccacacttttttgtggtgggccacatcttctgatgtgccctgatatttctaaagggtccacatgtgaccccatattctaccaactacaaaacctaaaaaaactatattatctacacaaaaggtacacttctctatatttgcatagatggtgtctttcctaaagactgaaagaacttgcctgagatgtcctaagtgatcatctatgctcctactgtacactaaaatatcatcaaaataaacaactaccaatctacctatgaaatcccttaaaacatgatgcataagcctcataaaggtgcttggtgccttaatgagcccaaaaggcatcactaaccattcatacaaaccaaacttggtcttgaaagcgttttccactcanaccctttttcata

SEQ ID NO: 154455 - DNA, 298 bp, Glycine max
agacttgtgttcacaggatcatttgaccaaataaaagataacttcctaaggcaggaatgaaagtagtgagatgcttttagttctttgtatttcacaccacactaattctaaaagcattttatcttaagcaaaaatacaattggcaggggaaatatttctcagcgatctcatgctgaggttaaaattcaggaaaaaataatataataattcttgttgtttaataaagcataatacattgtgtcttcatccattaattttccaaacttactaaaagggagtcaatcgtattcatgacaga

SEQ ID NO: 154456 - DNA, 395 bp, Glycine max
  unsure (1)..(395): unsure at all n locations
tctgtgcagggtatcattgtttttgcatgactgatggctaccttggggctggagatnttggttgaatctgcctcaagtgttattttgaaggtaattgagataatcttttgttgttgtttgtttattatatacctaaatttgggttgaagactagttattcaacatgtggattatctaccataataagtgattttatcatttgagcagatgatattatcatttgaccttgcttttgcttggattccgctcctaaagttcagtagcagcaaagtgactagcagcacaagcattgaagaggtgtgtgtcctcctttgttgtggattcatgaactataacttaatacatganactgaaaaatgttctagttataaaaattgattagctacgcttacatg

SEQ ID NO: 154457 - DNA, 452 bp, Glycine max
  unsure (1)..(452): unsure at all n locations
ctgcgcacgagctccgatntcgtgtttatttatagaagatgacgcattgtaatcgattacaggtattggttatcgattacatgcccaataagccttctggtaatcgattacaggatgttgtaatcgattacaggctgcctgttcatgtgtaatcgattacactggatggtaatcgattaccagagcctatcctaggctagtttctaagagaatatctatatttatgctcaaatacatcctatatgactaattttcactactaatacactaaattcaatcattcaattgctatatacacaagaaatcataaattctatcacaaaaacaagaattcaaacaagatcaaacaaaataatctacaatcaaaaggtaaaaagtaaatcaatcaatcaatcaaccaatcaatcaattcctattgttctaaatctcttacatctaagagacctaattct

SEQ ID NO: 154458 - DNA, 145 bp, Glycine max
aacaaaataccgctgcttacgccaaaacgggaaatatgtcctcatgggggggatcccagcaccccgggacacaactaattcaagaaagcgactcacaaccagaaggctgaatatgtcgggcgaaaaaggcgaaaaaagggaataa

SEQ ID NO: 154459 - DNA, 472 bp, Glycine max
  unsure (1)..(472): unsure at all n locations
gcagctttcatcagtgaacgccatatgtaagaagaacttggcgtaacatggccattcataatcatcaacccattcatatatttatccgtaagcattttgacctataacttctctggatggtgcatcaaagactaaacatgtttcccaagtaaagagatattggcctctcaagatttgcatatgccaagtccttattagatttcgggtcaagtgatttgtcccaccctaactaatgcgtagaaggtttatcacaaataaagttcctaacagctgcatcaatgcgattacatatgccctcaagactccacaagttctgcatggtataggtaggaatagtagataagacaaatntggctaaagtcaccttgctcgccctatntagtaatttactcttccacccagctagcttgttattcactctgtctataatatgagaaanattcttatttcgaactcttcctttcaatggagt

SEQ ID NO: 154460 - DNA, 279 bp, Glycine max
  unsure (1)..(279): unsure at all n locations
aacacataatctctccgatgaacacctgcgggtgtgatcacaattcccagtaacagaagatcttaatgtggagttaattctatacattgtaggataaaagttttacatggcagacaatcagaaccctgatactttgacttaataatattgtggacacacaaacttttcacaaaacacatgtgatatatgagacatacaaactcagtcgtggactattactctaaaattcatattttcaatgnatctaattaacgtccctcgataaattgaatgctgctt

SEQ ID NO: 154461 - DNA, 295 bp, Glycine max
tataccttaggatagaagatatttagttagcaatttgtttttttgttagattttaagggaacagataaagttcagactctgtaggagttgtaggggagataatttgtattgggtgcatgtctgatacgggcctcctataggactaaaagaggaagtcaaaagacttcctcgtctatgatttttctggaaaatacgatgaactcgctaagcgcagcttatgtgctaagccagttcatcaattaagccctgaacatatacattttcagatgaactcacttagccagcatgcatgtgc

SEQ ID NO: 154462 - DNA, 482 bp, Glycine max
  unsure (1)..(482): unsure at all n locations
gtgattatagccttagtttcactttagttattattcaatccaattaagaatgagtaatcccaaagagaaaacgtccgattgatttttcgcttttattttactaaaaggcatnttttgattattatattattattttacctctttttttatttccaacgtggttacggcacgaccgaacggtcggaattcattttaaccgaaattaacggatgatacaattcaaacgatcggtggaaatttattttatttttatattaagcgagaaatgacttaaataaatggcttaagcacgtcaaaatgaggtataaagagtaaatgaaaacgagaataaaaaatacatgaaacaaaatgtggaccaccacgggtacatataatgaattgaaaagcttgtgttgaggtacttacccgttgaagactgaagaaaacgaagaatgaacgatgaatcttgaagaacggtcgagaatctttgcgtaattactcat

SEQ ID NO: 154463 - DNA, 381 bp, Glycine max
  unsure (1)..(381): unsure at all n locations
agctaaactctagcttctcaaggagctttctcaaagaaacttctcaaggaagttttctcaaaaaagcttctcaaggaagctacctagtctataaatagaagcatgtgttacactttgtgtaactttgatgaatgagagtcttgtgagacacaactcanagttcaacttctcttcccctttttattcttcaattatgtgctcccccctctctcttttcctccattgaatcatcctctccaagcttcttatccaaggcacattcttggtggcgaagctccttcttccatggcttattccctagtggatggtgcctcctttctcctcttcttcttttccttccactgcatctncatggtggaaaatcaccattgaaggacctca

SEQ ID NO: 154464 - DNA, 310 bp, Glycine max
gaatgcacacattaatgttgcacatatatgaacatgcgtatgtgctcaagagtctactatataggtcaacatacaagaacattcaacacgttctagttaccacacatatatatatacatctgtgagaagaacacacattctcgtgcttctagcattgtgagagaatttacaccttatcaaatactaaatattctgctatcacagactacctatacatatttgaagtatttaacacacacatctatgttgctatactcacattcttttatatgcacattggacagctaattacgtcatgcgcatacttgca

SEQ ID NO: 154465 - DNA, 371 bp, Glycine max
ggagtacgtgagctcagttgaaggtgggcaactggggattgtggatttatgtgtgatttgttgatgtggatagtcgacttgcaccatcgcccgaccaccacctagtaccacatgtgacgggtaccccataatcttacaagcttgaagtgaggaagtgtggaagggagagacttcctacttttattcgttgaccacggagtggtacctgaagatatgtcgtgagggtcaggagaccttggggacgttaggtggggtgctatttgccaaaaccaagcttgaccaatcccgacccaacccgggcatagtcagtcagtgagaacctgtgacgtacctaaacaggcgagctcctggcagtcaaccgataaaagaac

SEQ ID NO: 154466 - DNA, 307 bp, Glycine max
tactttgatagaatgcttggctgaacggatgacgctcgaaatgctggttatgggtgtggaatgatcgctctgtatgatatatgatgtctaatgtgaattgagtttgatgttagaagcgattgatgccctactcaagagattggaagctttgattcattattatgcttatgccacgcgaaaaatgatgtataagatgtggtactatatataggcttaactgctgtgaatctatgctcatctagatgaatctacatcatgaatcttgcttaccatcagtaacagagtgtgtgtgattttacttatcctg

SEQ ID NO: 154467 - DNA, 434 bp, Glycine max
  unsure (1)..(434): unsure at all n locations
atgtgtgtaaaacatgtttcttgaattttattaccaatattaaaatattaatttaaaaaatgtttaatcttagaaacatatttgatggaaattgtggagatctacattgctcgaatctcaaccgttgaatataccttactccccccatgtgattgaatgccactctcaaattctataagatgaaagacaagtaattattatatttggattgacgctaacggtcgtttgtagacattaatggggcgggtagacattaatgggggcggttgagtatgggtattgtctctccaatcatatatcctgattacttaatatatctcagtattcgatatctgacgggtttgaagttattgtctcatccccgtacccatcgtgtattcccaactcctntcacacgccatttagaaaatatacttttgtaaaaaatattaaaa

SEQ ID NO: 154468 - DNA, 449 bp, Glycine max
tgctgatataataatctcctctgacctgatattatttttaaaaataaaagagatagatattccatatctagatagaagaaaagaaaatacaatcagtttctactttctagtttttctacgaagctagtaaaatttagtgtttcaatccacatttttcatagaaacaaactaaatttgtcactcagtcaatagtaaagaggatacaaagaagtataaattaattgatgacagtatcatactgttagtccttcacatgtattattgttgttcacgcaaacttgttcatcaagtggttccccaactcctcgactatcatcatggagaatacgccttgagtagtaaacattgtgttaatactttgtgtgcaataaaatagtagtattgaaatagcaataaaaagacagctggaatacctatgaagcatcaattccacctcaccatctattgat

SEQ ID NO: 154469 - DNA, 393 bp, Glycine max
acattactttctgtacacatattcattttgtccaaataaataataaagcatctcgactcaaagaaagtcatataagtctcatacaattaatatagaacctatatcctaatgtcacatcctatcagagcgtggtgtttccgtgtactctagcatgaggagtctcatagtcatccacctattcatctgctcccgcgaacacaagttcaagatcatcacaggatccaagcacaacaacacacagggagtgagatatcacattcctagctaatagagaaacaagacaattaactatacatattatatgaatgagagtcttcttgcttaaacatagctcacgtaactccaccacttgtgcagtcaaaattcactgttcaattatcaatcacattacac

SEQ ID NO: 154470 - DNA, 334 bp, Glycine max
  unsure (1)..(334): unsure at all n locations
aaaaaaaataatttaactcattcttatgcccctcccctagctcttttactttttgtcattgatctcaggaccaggttttcaatgaggttatataaattcttacatgggacaatgtcatgacagtgagtaaaaaagaattgcaaattcacttccttattatatntaatcttctaatttcatgattntttcctacttataacaccaatatcaaattctgtgggattcttgctcttccatgctntatggtggtatntaacataaccactctttgataatttagtatntttctgtacgattttatggtgaacaataacattttttgttcatgattgat

SEQ ID NO: 154471 - DNA, 398 bp, Glycine max
  unsure (1)..(398): unsure at all n locations
tattggatgggtatttaggagggcttcaagtcagaccgattgaaaaacaatcatactaaataacaattgtcaacttccattcccaataaatatgggactacaccaatctataaaaagtcctaccttgaacctgaagcaaccaactaaactaaaacattcttgcaagaaatctccaactcttggatttgaagcttatggcctttactcttcctggtttcttttattggaaaaattaggagaaataaaaaaaaaaaggcacgtcgaanagggtattgctacttgctggcgttcacagaaataaaatcttaaactaataatattttatttctattgaatatctttaaatttatatattaaaaatcaacatgactatctgagaaagcgatagtaataaataa

SEQ ID NO: 154472 - DNA, 359 bp, Glycine max
gcgatgcttcttttcatgtccgcctgagtgggcttatagcctaaaccatactctccaccatttccttgggtttttatcatgctaattatgccgccattgtctttgcctaaacccatcccgggttcataaccgttccccaacataactcgggccatcattaccgccgcatcggacagacaaggttgcccaaagagggagtccacggaggaaatgctgaccacctcaaaagactggaaagcggtttctaacgattcttctgcggcttccacataaggcatggaggatgggcagcttaccaagatatcttcctcgcctgacacgatgaccaagtgtccctccactacgaatatcagcttttg

SEQ ID NO: 154473 - DNA, 377 bp, Glycine max
  unsure (1)..(377): unsure at all n locations
aattgaaattctctcatttttacaaagaatntcaattctttcattctctggtgaataaaattctttattaaaatgactaaattcaatttctctttaaatgatttatccaaacatgtaattntaccttgaaatatttcaattacatgattaaaatgaattacccagttaaaagtcatcatctaaacacactcttagtgattntatccggctcgtctagtggaatttacctgtagtcgagacaaaaaaaattacaaaatacccaaaatgttggtcaaacaatatgaaatcgaggagcagaaaatcaattcgtgccccaattgttacccaatcatacaaagcanatcaatcaactctatagcgtagagcatcgtacaata

SEQ ID NO: 154474 - DNA, 396 bp, Glycine max
ctttctttctcatcaatatgtctactgactaacatttctaattgcaagcttacattcttgttctttctttggttagcatacacacttgctcaaactcatgataaaacacaagcttcattccaatcatgcactcaatccataatcaccatttcaaaactataccaaaactacaatttcaaggagtcaagttaaactgttctatacgcatcaggacttgcatactactatccataatcaaaagtataaacccatatcacaacaaaaagtgtactaaaggcataattataataatcataattgtcatcaaaacaaaagcaggaatttaaaattcctgtgacaggtcttgtgactgagtatcctcatcttgagtgtcctcctcatctgtaagatgtagca

SEQ ID NO: 154475 - DNA, 494 bp, Glycine max
  unsure (1)..(494): unsure at all n locations
ctcagcttcttagttcaatgatgcagatgggtttgtagctacctcatgcactcctctaatgactatggcatcatttctggcgctaaactgctgagagttggaggccatcttctcaattaaatttctggcttcagcaagagtcatgtctccaagggctccaccactggcagcatctatcatacttctctccatattactgagtccttcataaaaatattggagaagaagctattctgaaatctgatggtgagggcaattggcacatagtttcttaaatcgctcccagtactcatacaggctctctccactaagctgtctaatacctgagatatctttcctgatggctgtggtcctggaagcanggaaaaaattttcttataatactctcttaaggtcatcccagctcgtgatggaccttggagcaaggtaatacaaccagtcctttgccactccctctaatgaatgaagaanagccttcagaaatatgtgatcct

SEQ ID NO: 154476 - DNA, 381 bp, Glycine max
  unsure (1)..(381): unsure at all n locations
gagtacgacagtcaccgttttatgagcgttntacaccagcagcgcttcgaagccatcaagagatggtcgtttctccgggagcgacgcgtccagctcagggacgacgagtatactgattttcaggaggaaatatggcgccggcggtgggcaccactggttactcctatggccaagtttgatccagaaatagtccttgaattttatgccaatgctnggccaacagaggagggcgtgcgtgacatgagatcctgggttaggggtcagtggatcccgttcgatgccgacgctatcagccagctcctgggatatccgatggtgttggaagagggccaggaatgcgagtatggccagaggaggaaccggtctgatggattcgatgag

SEQ ID NO: 154477 - DNA, 489 bp, Glycine max
  unsure (1)..(489): unsure at all n locations
tactcagcttaatggatcttacatcatgtggtatcagagcttcaattaaataaaaattaattgaatttctagaagcccaatccaattaaattttagagggggaggtgagcatttggttactacacctcattgccacattatatggtcacacgttgtgcatgtccttcatgctttacatgcctcatcccacctaagcacacttagtggagaatcttggaattgatcttggattagtgggctgaaccataactaaaattcactaatcataattggtgaaatattggctgcaaagtttggctccacaaattcaatttcaaattcaagtgaaatttgaattgaaattcaaatttccctccaattttgtgtgacacttatgctataaatagaggtcatgtgtgtgcattntttcaactttgatcatttganaattaaactttagatttcagagctctcttagagcagaaaatatcgtgctcttctctcactctt

SEQ ID NO: 154478 - DNA, 457 bp, Glycine max
  unsure (1)..(457): unsure at all n locations
atccatcacatgttgtctaggtggcggtcgggcgatggtgcacagcaagttttccacatccacaatgcgcgcataaacccaccatcccctgttgcccacctccaactgagctcacgtactcccacgtagcccatatcctcgtttctctcaataccgggtccccatcaatcctcccaagcttccacaacatccaagcaaaacaacatacaaacagcacaagctatcacagccaagcaaaacagagcaaggcagagaactctgctcaacacaccaactaaaatcatagctnttctcacttaaagacccgagtaacaattccttcgatccaattcactaaccggtggatcgactccaaaattttactggaagtctatagtggcatcagcctacatttgaccgttgggatctacaagcaaacatccagaactcactatgcactgctctttccacacccagt

SEQ ID NO: 154479 - DNA, 460 bp, Glycine max
tttgattgattatgtagtgggtttgttgattagaaaatcttgtgtttgcgaatgatttgaactgatcaattgcatggattgagtgaattgtgatggatagatcgctcgctttgaataagtatgcagtaattagaagagaaagaacatgaattatgagcatgactaaaaatgttagttggtttgacagataaattgtgaaggttatcaatagccataacccgatgagttgtgtgatctttaattgtgagaacgacttgcattgagtattgatttttgcatgaatctctgaatactgaatgaatgcgtgagtttgaagatgatgaatgccatgattgattgaaacaaccacttagccaaaaagcttacctgttcatgaatgatgaatcccttgcacacatgttgagcttgtttttgattgattgaactaaaccttgagcctgtaaagtcatatatacatcta

SEQ ID NO: 154480 - DNA, 460 bp, Glycine max
  unsure (1)..(460): unsure at all n locations
cgagctatgttgcttcctccagaagcaaccgccttctggaggaatattgtggaaggcccaagtgggcctggttgctatttgagcccccatttttactaaggacaccccctgcctttttttggtgattctntttccgtaacgttacgaaactttacgaattccggaacgatgcttgttttctttccgtaatgttacgaaaccttacggattacataatcatccctttttttgccttcgggaacgttacagaacattatggattgcacactatcacttccttctaatttccagcatgtcacggaacttcacggattgtgctacaatgctttctattgacttctggcatgtcacggaacttcacgaattgcctaacgatgggtgccaagtacctcgaagtggtcaaacgagggtcgcattccaacaacggatggtccccggacgaaattatggtatgacaata

SEQ ID NO: 154481 - DNA, 300 bp, Glycine max
tatttcaataactatcaataatttatctttcaatcttctctcaacatcatttaagatctttcaactttttctattgagttttttgattcatttgtctcttcatctttctgaaagaatttgttcaaaactttctcttccaagaaaagttctttgttcaaaaacttgagctattcattttcttcattcacttctccctttgccaaaagaatagaaggactaatcgcctgaattcttttgtgtctctgttctctctttccaaaagattcaaaagactaaccgcctgaaattcttttgattctt

SEQ ID NO: 154482 - DNA, 351 bp, Glycine max
  unsure (1)..(351): unsure at all n locations
atatgtctgtctttgatgnaagttgtctgtctctcatcaataaggatagatataacatgcctcaatttgatggctaataactaggctatcacctcgtacatacaaccaatcaaggagattggtctgtaatcatcaaaggactgagggtgttttactgtgggaattagagccagaaaggaagcattactacctctatggaagctgccatgcacatggaactcatccacaaatcttctgaagtcaggtttcaccactccccacaattctttaataaaattgaaattaaaaccatcaggcccaggacattagtccccaccacagacttcttgatctcatgatctaagaaaggag

SEQ ID NO: 154483 - DNA, 296 bp, Glycine max
cctggttgctatatgcaccctctattggctagatacaaccccgcctttcttatggttgattctgtttccgtaacagtactgcacttgactaatttccgaacgaaactaagagtacctttcgtgtttatattgaacctgacggattacgtgagcatgcctctctaggcttttggaatattgtgaaaccttacagattgagtccaaatgctctcttttgagttccggcatgtctcagaacttgacgaatcggcaacaatgctctcttttgacttctggcacgttatggaacatcacat

SEQ ID NO: 154484 - DNA, 427 bp, Glycine max
  unsure (1)..(427): unsure at all n locations
aacgaaatgaaagtgaaagtacacaaaacaagtagggaccactaagggtgcatagaatgaattgaaagattcgatttcaggaacttaccggttgaagaccgaagaacgactaaaaacgaacgaagaacaatgaagaacaatgaagaatttccacagaatcgcttacggaaacgtctcanaagcattacagaagcacctcgacttggattttcttcatgaaaacacattttttcacccaaaacagctgaaatgcatagccaaggggtctgaaatatnttgaaacagcacccctcccctatttattgngaaaaaggtaggtgctttccgcccacaggcttcttgaggaagatttctaagtgcaccccaatgactaagttcacccnccttttcgtacttcacggtaggtgcttgccttatggaagtgttt

SEQ ID NO: 154485 - DNA, 349 bp, Glycine max
  unsure (1)..(349): unsure at all n locations
tttcttctttgctcatgtggcgtggaatattgccaggcaataatgattctgagtggcaatctggctttgaagaatcattgtcctctctctttcattaattgagaagtgcttcttttcccttttgacttcttttcgaccttcgatcgggaatccttctttcctttcttcttttcttttcttgagttttattagtcttttttctttctttccattacttccttctctttctgttcactgttccttccccatccctttctttgggaaatcaggttttagcattccattcgctctcccttgaggagatttcacagacctttgcttcnggggaaaggaggaggattctcttgat

SEQ ID NO: 154486 - DNA, 449 bp, Glycine max
  unsure (1)..(449): unsure at all n locations
agctttttctatagtgggattagacacgtatagtaacacaaaatatgtatgacccatacaagaatattttcaaaacattgcatcccatctggaggaaaaacatgtatgatgaatgaaaacaacacaaagtcaaaactgaactggcatgtcaaatgaactatgcactgactgataatgaaagttataatatcaaacattgggatatcataccatcaacaactctaataattntatgaaaaatatttctaaaaaaatagagcactgagttcaattaaccaacctctgcagcatcagaaatgaatagcaacacaacatcactgcttaagatactttgacatatgtcagccagaattccattctcctcagtaaaaccagctccacgagcctcattaaaggaaggagaacctttcttgagcccaatcttcattgccaagaatgcagaatgagag

SEQ ID NO: 154487 - DNA, 467 bp, Glycine max
  unsure (1)..(467): unsure at all n locations
atacaatcaatatagaacctatatccttatgtcacattctatcatagcgttgtgttcccgagtcctctaacatgaggttcttcatagtcatccacctattcatctgctcccccgaacacaagttcaacatcatcacatgatccaaacacaacaacacacagggagtgagttatcacattcctatctaatagagaaacaagacaattaaatatacatattatataaatgagataccacttgcttaaacatagctcacgtaacttcaccacttcgtcattcaaaattcacttttcaatcatcaatcacattacacaagaatcccacacttcgatcaagatataataacacatcaattagcaagcatatgcaacagttatgctaagactaatcatatatggcatatggtaccatgttagtgaaaaaccaccctgngggcgctaggagtacataacaagacacaccacacc

SEQ ID NO: 154488 - DNA, 448 bp, Glycine max
  unsure (1)..(448): unsure at all n locations
nnagcttgaactgacaatttatatcatctgaacctttttttagcacaaggattgtgaatnggatttttttgggttaaaaatacaaaggaaaatgagatttaggttttggtattactgtcctttgattcttttcttttctgattttcccttctctcgaattttttaaactccactcccctcactaccaaaaaaactacaagcaaaagtttgcaagagttatctagtttctagcacttttgttctctccaaaatccaaagagtcccattatcttcatgaacatgagaaaaaaatgaaataaaataaaatttatataattaaaaatatatgctccaggaaagaaagctgaatacctgtctttgttcaaaacctgacaactgcagagcctttggcccaaaaactaanaccaaacagtatttaccatcttgcgtgacctaacatgtaaccaca

SEQ ID NO: 154489 - DNA, 416 bp, Glycine max
atctctatattaagaatataaaagccaatttcacctttctctttctagactatatttcatgtcgaccactctaaggctttgtagcctctaaacccatgatacaatctgatgtggagattacgatgaatagttacgtctaattgcttctaaatagatggtcttgaaggtaagatccattctattgctcatcgtagatcgggcctcatcagtcttctgtcaagcatagtgaagagttctatcactctgataggctcttcagccaacatcgtgatctttttttgctctagacgcttagttatgacccctatggagacaaattttgatgcttcatttatctcttctaagtgtctgagcctttcaatgtctattgtatcacactgagcaacatcaatgaggtgttcatttacatacgacat

SEQ ID NO: 154490 - DNA, 412 bp, Glycine max
cacgacttggtttattactggttacaaaaagaagcatttgatgaaatcagggggaaaattcaaaagacaaagaatacatttttcaaactgaacagcaaagaatacataagaaaagagaaagatttgctgtcttaagaaaatactattactgattagacactgactcaattactgattagacagtgacactgcggagcacaacagtctcaacggtgagtccagggccgaaaccaaatagcacaccccagtcaaggccttcaccggttgtgccaagtccattttctattgatttcttcctcatttgatccaagatgaatagcacacatgcacttgacatgttaccatactcgctgagcacatgtctagtagcttccattttttcaggcttcaagcctaacttagcctcaacttg

SEQ ID NO: 154491 - DNA, 436 bp, Glycine max
  unsure (1)..(436): unsure at all n locations
tcgattctcgaattgcatagctcttatatgtcgcgttatttattaatgaattggtggtatntggaaaacaatattgtttacgtttcgtgtgaagaatatcacatttatgaatgacttgaattttaagacaatgaaactgaagttaaagaaacataaattactctaaaaaaaattaaatacagtgaaattgtatagatttgataaatatttttttaatagttgatatgattttgttttgttaggagaaagctatcattttgttctcctatagttatgtttagtaagttattttaattaaatttttttattaattaaaagatttatttgactatttgataaataatttttttaagtaattnttaatgtttctctagtatcttttagtatttttttaaaatattatttaaaataacattttttaaacactaatttttaa

SEQ ID NO: 154492 - DNA, 410 bp, Glycine max
  unsure (1)..(410): unsure at all n locations
acacacttctcacttncatatacagcagcttggacacttgccatcagttntgctatttctcttccagaaaatccctccgttttagcagcagcttcctttatgatatcatcagtcaatcccttaatttctatttgttgcggttttcctttgaacaaatctttaacgaaactagattntcctgatccagcttgggctatgtacttatccaaatagagcttaagaagtttgaagcgctcctcttccccaggcaagggaaattctaggacttcatctattctgtctgtaacagctgaatcaagatcaccaggacgatttgtggcaagagcaaggactatgtctttagactggtcaccagttcgggagagaagggcatttaatgcacttctntgtgcttcactcatgtaagtctt

SEQ ID NO: 154493 - DNA, 465 bp, Glycine max
  unsure (1)..(465): unsure at all n locations
tgctctcaaaatctcctttgaatatccactattatccttcctaatgttcatgaaatcataacaaattaagaaatcattaactacatgaaaaaattatcacacactatcacaaatgtgcacaaccataaactaaaattaaatatcaaaattcctataaatcctcgtcctataatactcgaagtcacacaaatcactctctaattaactgcagctatagtacaatataacacttatcaacattaaacaaaattgcctaataaatatacataaatcacacctcaataattaaggttaatgatgtgaggttttccatcaccccctccacaaatacctaccagaccaagtaatacacgaactacaaaaatgatgaagatctccttcataaaccatagataccatattagaaaggagagatgataactcagttntacaagaaaatatttaacaatatttttagtcaaatat

SEQ ID NO: 154494 - DNA, 276 bp, Glycine max
atttctgggacctaattgttagcacttatctttcaatgcgattattttcttataaaagtcccttaaatctagttatatatattgaacatttcctgatatttttggttaaatatgatagattcatctatcatttcctacgttttaatcggttgtttgtgtgatccagaaaccacgtcaaaggaagggcaaaatgggttatcttcaagaattcaaacatcattcttccatgctagcaaccagctcgcctgggcttatcagatttcttcatgcataaat

SEQ ID NO: 154495 - DNA, 380 bp, Glycine max
tggacttaccttgaataattcctttgatattctctttgagcctattataccctttctttggtttgaagctcattacaatccttaagtgaaaaaccatgatatcactttacccttaaggaagttttgagctttggaattgtctttggaataagctgggaataagtgtgggggggggggtatgttttattggaagatttgaatttggccattcttaatgttttatcttggccatgcttgatgtatatatataatgcctagttctttctttaatctacaaatttcgactattctcatagaataagaataagattaagattataagacgtgaagctgaattaataacgtcttgatatgagaactttatttggagccttggtaga

SEQ ID NO: 154496 - DNA, 447 bp, Glycine max
  unsure (1)..(447): unsure at all n locations
ttattacctgttgatgatataacacatatatctgtatgtgaatnngttaaatatattaggaattaataattcatataatactgttaatatattaagattcaatgataaatactgttaatatatttttagtttaattatttattaactctcttaattgaaaataatatagttcgatttaatatatacatgttttgtgtcatgtaaatattaatattgtctgatgtgtatatgattcatggggcgtgataacgtgatatattgngattatgaaagtgtgatgaactgtgtgtaagagacaagttgagtatatgttaaattatgagatcacgcgtgtattgagatattgtgtggattaagttatgaagtatgaatngtacaatcacacgactgtgaggccatttaaggatgataagttaatgcgcggcgagtattttgatggaatccact

SEQ ID NO: 154497 - DNA, 428 bp, Glycine max
  unsure (1)..(428): unsure at all n locations
tgttgatcactgaccacaaatgttctctataccgtaagaatntgtattcaagaacttgattaaagagcttgatgaaatatggggtgattttaattggagtgtacaggatagaaaagcttgttgattagatgggtagcaacaatgaatgcatgatcccacaagcccaatggaagactagcttgctaaaagagtgagctctgtctctactatgtctatggtttatttcaacagaaaccatttggtggcatgtgtgtgaatgtgtgatcacataagtttttagatgagttatgattctctacgtattttgagtaaggttgaaactctcctccccaatctgcgtgaagctgtaactcaactctcgaatcgagaaaacattgtttaatattttcttttaatgaanagttcaataatacgtgtgtcaacatgtg

SEQ ID NO: 154498 - DNA, 470 bp, Glycine max
  unsure (1)..(470): unsure at all n locations
ctgcagcttgttcttgcattccaagacactgaagagcttactaataggtcgcatgtcctactngtacttttcctatctaaattgcatcttgtaaaatcagaatctaaaaaacctgctaagtttaaggaggtacctttgggataccacaaacctacattggttgtgcccttaagatacttaatgatccttttaacaacagttaagtgagattccttaggattgaattggtatcttgcacataagcaaatgcttagcatgatatccggtctacttgcaattaggtagagaagtgatccaatcatacatctatatcttgattcatccactaatttacctttctcatctaagtccaggtaggttgatgtagacataggagtagatgtttctttgcatttttccatactgaatttctttatcagttctatgcagtatttggttaanaatttagggaactaaaaccttaatggaaa

SEQ ID NO: 154499 - DNA, 478 bp, Glycine max
  unsure (1)..(478): unsure at all n locations
ctcattgactccagattgctgcanagaaggacaaagacctgtattgtgatctgcagaagaacataaaccacaaactcttgcaacaggtgcagatttctgattcatggcaagctgagttactatgtttaccaaggcatcaagttttccctcaagctttttattttcagtagatgaagatgaatccgtggccacctcatggactcctcgaaggacaataacatcatttcttacactgaattgttgggagttggaagccatcttctcaatcaaattcctagcctcagcaggagtcatatcaccaagggctccaccactggcagcatcaatcatactcctctccatgttgctaagtccctcataaaaatattgaaggaggagttgctcanaaatctggtggtgagggcagcttgcacacaatttccttgatctttcccaatactcgtacaagctctcttcactaagttggctgatgcctaaa

SEQ ID NO: 154500 - DNA, 292 bp, Glycine max
atccaaatcccttagtaaaacaccccattccttcagttccaaataataacaacaacgatgacaaaacaccccattttcaaattcatttaataaacaaaaacccaaatgcacttcttcaataaatttttctggaccaccataattggggccttcggctcctttgctgacactccgaggtataccataagtttcagtatgttgaccgactatgagactaatatttggttcaagactacaacacacttaaagctctgtacctcggcagctagcgatagcccaagatgtgcttaaa

SEQ ID NO: 154501 - DNA, 371 bp, Glycine max
  unsure (1)..(371): unsure at all n locations
cacttgttatgaggatgccatccacatacaagagaaggtagagaacaaacactttccccttttttaggatatatacataggtgtcatatctgatcaagaactcatcaaatntcagataccacattcgagagctttgcttcagtccatacaaagattttttcagcaagcacaccttgttctccccttcttcaaaaccttcaggctggttcatgtaaatggtttcctttagatttccatgaagaaaagctgttttaacatctagctgttcaagttccaaatcatactgatttaccaaaccaagtatgattcttattgaacaatgcttcacaactggtgaaaaaatctcattgtaatcaattccttcaacctgt

SEQ ID NO: 154502 - DNA, 407 bp, Glycine max
  unsure (1)..(407): unsure at all n locations
ttcacttcattatcttcccctatttttacttgtagtttctaaaccttattatcattattgaagggtggaaactcgaatctaaactccctcatntttccttctaaattttgtgcagcctacaagaggtgaggggatctctccaactcttgaaccatatgcttgttgttgaacttccttgaacatgttgatgctttgaaatttttgagcttgttgtcatgtcctgaatctgtgtgctaagtagttttccttgagtttttgatgcaaaaatgatttatttgcatgttaaaacataaagttagccttaaagttcacttaaactcgagcttcctagcaaaagttacaaataaaacaagtttaagaacctttagtaaaatgaaaaatctatcacgaatcttgaatgacaagta

SEQ ID NO: 154503 - DNA, 447 bp, Glycine max
  unsure (1)..(447): unsure at all n locations
agcttaatgaactgaattttatattgccttctattatgtgatcataaaaanactacttcaatgggtggtttcatattcaactccttttaccaactgctatttctttttcataaaaatacacgagtgttcactaaatattgcgtgctcctctaacattctttgtgcacatagtgatgttaggtagaaaccagcagccaagaaaactgtggctactggaaacacaccagtagtagagaacaacccttctctaatgttgtagcaacctgttcttggcttggaccagttctttagatggcctaattctacactaagttctgctagcaacaaaatctccataatttcgaaacaaatcctacaatatatatcaagttagattcacaatcacatgtcttctagtgtgtaaagtaaattggtacgggaggacaaatttagtgatgaattatttag

SEQ ID NO: 154504 - DNA, 432 bp, Glycine max
atactcaagctgaagcaactggtgcattggtaacttggtacccagctgttcttgaaccataaatctgtacctgtcgcaagggtctgtggtttgagctcctctgctgaccaccatacatacctttgcccttccatgcagcaacctggagcaattgagcagtccgaagcttatgctggcaacatttacaataaaacctctcaacctcagcagctaaatcaaccacaacagaacaattatgacctctccaacaacagatacaaccctggatggaggaatcaccctaatcttagatggtctagccctcagcaacaacaacaggagccttctccttccttccaaaatgtagttggcccaagcagaccatacattcctcaccaatccaacaacagcaacaagcccagaaacagccaacagttgaggctcctccaccac

SEQ ID NO: 154505 - DNA, 275 bp, Glycine max
  unsure (1)..(275): unsure at all n locations
accctataatctatgtataactntacactcaacttttagtggcctctgtttcattcatacgctgctcaatagatcacaccaccaaaagcattgaataatcctcacaaacgaatcaggttttattcaatcttttcactgtattgctcatacttcacatatactatactagtattattttatgcctactgaatcgtaaggtatctagttcgtacgccttttacccagcatctaagagttatgattatgtgtttacgttaacagattgccaaatccaa

SEQ ID NO: 154506 - DNA, 373 bp, Glycine max
  unsure (1)..(373): unsure at all n locations
cccagaaaagacacattngcaaatgcactcacgccacactnttattttgcttagaatattaagtgagcacattgaaattgaaacgcagctagattatactccctctgatccaaaaaacactgatgttttacaaattccaagtctcattaactaatttctttctacatatatccctatttaattgctatgttcaaacaaacaattactcctataaaagatactattaaatgagagaattntagaataaatatataataagccacagagatagtagaagccacgagggtttgtatggtgttatcgaatattacaaatagagataacaacagcacagaatcctcatagaatcatcgattcaaatctttggaagctg

SEQ ID NO: 154507 - DNA, 441 bp, Glycine max
  unsure (1)..(441): unsure at all n locations
actatttccctttcttttctgctatataatngcaataaaataaaaagtcttttgtgtttcaaataatctaatgtagattaaattaaagtttgaaactctgtagtataccttattcatcaatggttaataagatttgaatgagaatcattaattcaaacctaatagtaccttagtcctttttttgcagccagctatgagaaaaaaaataagtgtattctatatgcatttactatcactatatatagatgctgcttcctaactgtgtagatacttaaatgttatgaagtagttaaaaatgaaaatcaattcaccataatggtaaactgattgtgaggaagtagcatatgttggattaaaattcactgaggaagctggaatgtgagtattgtcaaagaagttttatataaaagtatgataatacatacacttaatgtcgtatac

SEQ ID NO: 154508 - DNA, 348 bp, Glycine max
  unsure (1)..(348): unsure at all n locations
actttcaacacctactatatgttgatttgaccaacactattatcggtatggtgcgacaatccttcaaaaccttatttatacaatctgagaggtggttgtcatgtggccatatcgacatccttctctatcataagccatcgtccatttttcctttgaaatgcgatcaatccatgttgctatggctggactcagttgacggaattnttctaaattntgataaaaaaaaatgtgcttgcaagcagtgtagcctgcatgannatagttagcacccaacaatntaagtatatatgaaacttannataacgtgaccatcatanatgaaatcttacccaatntcttcaacatttc

SEQ ID NO: 154509 - DNA, 466 bp, Glycine max
  unsure (1)..(466): unsure at all n locations
tctctctctgtctctcactctctctctctctctctgncttttccacccatggctcgaaacaaggaacgagttttccttcatttctcaatacccttttgcattccccaacttcacttatccggatttagggttttacttcgaatttaattattttcccgtgaaaccccatttagaatgttaccattgtcattacttctgaaagcataaatttgtgtttgttttttcgttaccacaattaaattttatggtgaaacaacaggaagcgttgcttttgctgcttgatgtgggcccgtcaatgcatcccgctctttctgaaattgagaaagtctgctccatgcttgtgcagaagaaggtactagtcattgccatactcttatctattcaaagtttcatttttttttcttctcttttggtttgaatttttggtatttcaatcttggttgtttgggttcgttagtttcgttag

SEQ ID NO: 154510 - DNA, 422 bp, Glycine max
  unsure (1)..(422): unsure at all n locations
gcttatacgacctatgatgtggttntgtgactaaattcaatttagacacaagtctttcacttgccatattggtacaactccctccatcaatgatcaccatgcaaactttgccattgatcaaacatctagtgtggaaaatgttttctctttgactttcctccatagatttcaattgatggccaagtaaccgcctaatcatcaacaattctccctccggtgttttctccacttcctcctcatcatcctcactctcttctcccttttcaacttcggactcactaatgtaatctccatctctaagaatcatggctttcttgttagggaactcatatgcataatgtcccaagccttggcaccgaaaacacttcacataccgggctctttttgaggaattgtcttggaattttggaggagtttttatg

SEQ ID NO: 154511 - DNA, 468 bp, Glycine max
  unsure (1)..(468): unsure at all n locations
ttcattgctatcatcatcaataatagcaacaaacttctcttccatatagcaagatcattatccaagacaccgaggtgaaattggacttgctcatttcagtcagaaaaattaagcccattaaattgacacaaacatacatgaaaatttagtaaatagggaactataaaatttcacataagcgntttgagacataaagcacatgctacatatataatataaacaacatttaattgatatcgatgctctcttttgggtgatacaccaacacacaacatacaacataatgatgttgataaaattttaacattatttggcaattaaatatgcaccaattagaatacttactacctttgaatatataaataaaactaatgactaacaaatatatcatatatgtaactataagaacaactatatcatatacataagttgtctacaattatattcattaattataagaacaactga

SEQ ID NO: 154512 - DNA, 468 bp, Glycine max
  unsure (1)..(468): unsure at all n locations
tggggttactcacttttcttacttcccacttattccccattgctcctctattccttggggttatatcgactatcccatactttcctttaccttgtccttggccccattacaaccttaaaagaccttttgatcctcatgtgcatgtgtatgtgatgtggntgtcaattctagagtctttccaactctatgtggcatttgttttcatgggtgctctgagagtaaatagtggcctacacacttgagagatagagtgcatatcttgtgaggctttatcacttttcattcttgagttgattgactatctttccatgtctgagatgctaggatgattttcatgacggccttgattctttaactctttacgtgtcggatgttactcattctattcattccttgagattcatcgagaaatatgtaattggttttgtgtctgaatgtacttcttaatgtctctagatattttttctt

SEQ ID NO: 154513 - DNA, 462 bp, Glycine max
  unsure (1)..(462): unsure at all n locations
tctatggaggaaatgtttccacctcgaaagactggaaagcggtttctaatgactcctctgcggcctccacataaggcatagaggatgggcagctcaccaagatgtcttcctcgcctaatacgatgaccagatgcccttccactacgaatttcaacttttggtggagtgtagagggaacaacttccactgagtggatccacggacaccccaacagacagctgtagggggggttaatgtccattattgggaaggtaacttggcatgtgtgagggcctatctgtactgngaggtcgatctctcccctaacctctcggcgggtgtcgtcgaaggcacgaaccaccattgaactcggctttaggtgggaggcagttgaatggtaattctccaaagtgctcttangcatcacgtntaaactggaaccattatcgatgagcaccttggctacgatatggtccatacact

SEQ ID NO: 154514 - DNA, 443 bp, Glycine max
  unsure (1)..(443): unsure at all n locations
gatccactccctttccaagctagtatcgaaccattgtctctgccttcaaatatgagcaccttgctggatacaattggctccctctaatgggaatgccaggactctgtgccgcntcggttccatgacctaagaaaacaaaagaggctcttttgatgagggggctgctgcacccactctcatgcagagaggacgccgtccgaaccgcgtaaatgaagaaaaaaacaagaagatcccaacgggacctcatggactctctttaagagccaattatcttgaaagcccattagatcaagagggaaggtctgtgcattaattacacattacagaggcacgaatcctggaggaggcgaacgaaccaaccacgttgcgacatttggcacccgttccatacaacgtggatgggtcttgcaggtaacccctcattcctttcctctcctctcttt

SEQ ID NO: 154515 - DNA, 461 bp, Glycine max
  unsure (1)..(461): unsure at all n locations
aatgccttaatcatttcttaatatgcatgtgaattangacgcatcaacaagaatcaagtcaaggctattgtgcaagcaatcaatggggcaaaacacaccaaatgattataatgatggatggctcaaattctcacaaaggtaaaatcatcactttcaaattgagctttcaaaactatcatgacatgtagagaagaatcaaggatttcaagtcacaaaatgtcaagaacttttattttcaaaacaattacccatttcttgaacatatcctataattcaaagaaaaacatgcaaagtcgtacgtgcacacgaaattgacccanaatattaaactgaaaatccgacgaaactaacaacattaacaaattaacacaactaataaattaacaaaaccaacaaaactagcaaaaccaaagaacactcccccccatacttaaacaacacattgtcctcaatgtagcaca

SEQ ID NO: 154516 - DNA, 404 bp, Glycine max
  unsure (1)..(404): unsure at all n locations
tcaataagaattattaacagcgagtatcaactagtgtgataaaccacaagtgtgtcatacttgaatggctttaagattccaatattccatcaattccttaatgtgcttccagtatttctcaaagacgattcttcaatcgctcatgtaagggcttatactttctgaaatgctcccttttaatcaagcatttatatcaccgccaagcatcatttataatagcaaacacaaccttctgtcctttctctgggatagtttatttttgcttgcatgaaagacaaatatttagaaagatccaattcattttaagtatgctaagatgcatgttcaaatggataaagttagtacattgacaccaatcccatatacggtctttgtctagagggcttcaatnagtgtaattgagt

SEQ ID NO: 154517 - DNA, 506 bp, Glycine max
  unsure (1)..(506): unsure at all n locations
gatcctcttagtcactctgangcatgcaagcttgattgacgtggggtggctaacattccaagaagatggctcgaatgtgaagactatattgttcaccaatcatgggagaccagcggtaaatgcgataggggcgtgcggactatagaggcctaagcaaatgaaagacatagtaacctcaagaaggtttatctttgaagctttgcaagaggcgggcatggtttcctttgatgggcctaaaggggacttctgtttgatgcatttgggtgcatcgcatgacatggagacatgttcgacggcggaggagctattacaacaactgatggaccaaggctggtttgagatcggtgaagggaacaagggagaacaacatgtgtgcatgtagttagcggacaaagaaagccccgctaaacccaagcctttggtgatacacttcaccagggatgtggcctctagaaaccccgagattctcgacctatcccgggtagcaaacctatccncttccctta

SEQ ID NO: 154518 - DNA, 459 bp, Glycine max
  unsure (1)..(459): unsure at all n locations
tcgtaaatacgaaaggggggttgtcgcatcctacccttctgctagagggcaacgcggggctcgcgggagcgtgttccaagaaaggaatacgcgcggagtcaccaccaacgtttatttgaggaaaacgttggaaaaactggaaaagacgtgatctatgaactttaagtgaaaggttcgggagttgtatttacgcacggggacggtattagcacgccacgcgtccgtcacaagagacgacagcctttaattaaatgtgcaaacatgacttcaatttttatgttcccttttacgtctttatttctttttgtactttntatactttttatctttttgcggtcgacgagggggtttcccttgctcctacgtattccttaattgcaataaggaaatcagacctacgtagttctttgtgaacaaaatggttcgttaagttgtctttatcctttttgcaagatatgt

SEQ ID NO: 154519 - DNA, 370 bp, Glycine max
tataaagtgtcatcctacaagatatgtgaaacaatactacaagatccttggtttacctttcacctgcccctatggcttacccaaattcgtgtggtattgaccatcattcaaaatgactccctatgcatcttcttgtttgcaggatctagatgataagatgcaaatgcatgtatgtttatgatcggacgtttaaatgtaacaattaaacaagtgttatcatgttcaatattacttatacgcttacggcaccccgttgatcgagccaaatggctctggattcagtgagcaagatcgagagtgtatgttcttaaagatgataaaagataagagacacaacacagaatgttgagatgcaaatcattaacccaca

SEQ ID NO: 154520 - DNA, 401 bp, Glycine max
  unsure (1)..(401): unsure at all n locations
ctttggaagatacatcgatcactgatagtcggtctggtctacgtgatntttataagttaacaggttaccataattgtatctttcattacttgggagaatctctatttgaattaaatatatgttcttagaagcttccctattgggcattatttccaaagttcctttctctgtatcacattgataaagatcaaagagtcttctaagtaaagctaatcgattttgcaaccacaaataattaactggtaagagtttcaatgatacaatcattgcctatagtaacatcttagaatgaactnttggtgctctagattttggtttgttagaaccttcttggagagtttgcagagttatatagggaagcannaattgatactagtgagctacatggaccactcactctg

SEQ ID NO: 154521 - DNA, 373 bp, Glycine max
tatgcgagacggagaccaacatgctagctatcatcgccaagtaccaagaagagttaggtctagccacggcccacgagcatatgatcgtggacgagtatgcccaagtatacgcggaaaaagaggctagaggaagggtgattgactctttacaccaagaggcaaccatgtggatggatcggtttgctcttaccttgaacgggagtcaagaacttccccgattgttagccaaggccaaggcgatggcggacacctactccgcccccgaagaaattcatgggcttctaggctattgtcagcatatgatagacttaatggcccacataattagaaatcgctaggaaacttgtatggtctctcagaccttgactagata

SEQ ID NO: 154522 - DNA, 275 bp, Glycine max
gtatacacggagatggacaagaaaatccgccgtattgtgagtagcatttagaaagacgcctctgttcctgatgctgagaaagatgttccaacatcttccatcccagatgttgttgtgcctgatgttgataaagatgttccaacatcttccgctccaaatgctgatgccctcccttcacccagtgaagaggaatctacagaagaagatgatcaagccgcagaggagactgctgcaccacaggcaccagaacctgctccaggtgacctcattgacct

SEQ ID NO: 154523 - DNA, 208 bp, Glycine max
gcaccctttaaagatattttatacggtgatttttttagaaaaacctaatgattgaagtttagaccttattaccatagcctgtttacaaaattatgatatgatgccatccattattagaatgaatgtcctgaatatatctgtccactgttctaaaaaccgttttaacgccattcatgtacatgaatacctcttcgtgccaagccatatt

SEQ ID NO: 154524 - DNA, 443 bp, Glycine max
  unsure (1)..(443): unsure at all n locations
tgtcgcatcggggaacaatttcactttaaaagtgggtcccaattggattcctaattttcaacttacctatttggaagtgacatcatggcaattaggtcccagctttccattgtggattcagtcacaaaacaaacttaaatatgttggactatctaacacggngattntcgattctattcccacacagatgtgggaagcactctctcaggttttgtatttaaacctctctcgtaatcacatccatggtgagattgggactacattaaagaatccaatatctatccgaactatngatctaagctcaaatcacttgtgtggtaaatcaccctatctttcaagtgatgtgcatcagttagatctttcaagcaattcattctctgaatccatgaatgactntntatgtaacgatcaggacaagccaatactattagaatttctgaatc

SEQ ID NO: 154525 - DNA, 283 bp, Glycine max
tttatagactctcgaaactgacgaaagacaaatcagataagctttgacggatttgacctgaaatgttgtgtactttcagatcaagggattctaacaatttcattttttccatgtcatttggtatccctccccacagaagatttctagacaagttcaaaaaccgcaaagcagatagcttggaaatttcatatggaatctctccagacagcttattacttgaaagaacaatcattctcaccaatatcagattgtctctgtactctaactcttctcctttgggaac

SEQ ID NO: 154526 - DNA, 251 bp, Glycine max
gcttagagctaattcaaacgacaataactctttactcggatgtctgagtgagccccgtaatacatcgagacgctcaaaatttaatgttgaagctcgcaccaaattcaaacgacaataactttttactcggatgtctgattgagtcccgtaaaatatccagacgctcgaaattgaatgttgaagctctcagcaaattcaaacaacaataacctttaacttcaatgtctgagtaagaccccggatacatctag

SEQ ID NO: 154527 - DNA, 341 bp, Glycine max
  unsure (1)..(341): unsure at all n locations
catccttatatatttaaataaaatcttcaagcgggagaaaaggatatacccgtttgataattaacaaattaaacatgacagaatgtaattccaacaactataagctagagtttgatttctattacatgactcattgtaaatctctaatattcgaattctatttttactcataaaagtaaaattttaagtgtaacattgtgtttcttaattaattgttcagtgatttaattaattaattaatttgtgtgattttgctgatctgagtatgtggttagagacgtttagtgtntatggcttatcaagatcgatcttagtatatgggttgacgggtgggtgtatat

SEQ ID NO: 154528 - DNA, 360 bp, Glycine max
  unsure (1)..(360): unsure at all n locations
tgtggagttcacaactatttgactgcttgtctctcctaagaatgccaaagtatttttgtaaaacttgggttgatactgaaacttgtgttttcttacaaggttaggttatgccatatatatagatgatttttaatattagtgctgcattttntaaagattgaaaatatgcatgcacatgctttctgtatgtgttgtcaactacacgaatgacatgacatgctttagcttgcatcagatctgcatttgtagtcatgttgtgcacggtcctttcacgcgctctatgttaatgcagacaacaatttatcanacacggttttccacaatgtgtagtcaagtcagacaacgatatatcatacatgc

SEQ ID NO: 154529 - DNA, 425 bp, Glycine max
  unsure (1)..(425): unsure at all n locations
ttaatcttacttaatatatttctgcaatgtaattgaagaattaaaaaacaagtctttgactctactgtatctatcctccattttactttacatgtttttaaataagaatgatgacatttaagctactatcaagcctaatcgatccttatttgtaactcttctagaatccttttaagctataaaatttagcaaactcgttggcagctttataggactgagaggaagttaaagtaaaagaagggcagataagcccaagtaaactttataatgatgagaaatgtgattctaggttgaatatatntaaaatgctgagaaatgttgatattatagtgaggatcaggtgcctaatccaagttctcatatctattagatctatacttatgattggtgaaccacattaaaacaataccaattggagaaaaaca

SEQ ID NO: 154530 - DNA, 453 bp, Glycine max
  unsure (1)..(453): unsure at all n locations
gacaacgaacaaacccattgtcttggaagtacttgtcaatgcgagtattccatgccctcggtgcttgctttaaaccatacaacgccttgttcaatttcaagacttttccttcttgaccttcgatgacaaaacccattggttgttcaacatagacatcttctttaagatagccatttagaaatgccgattttacatcaagctgaaaaattctccacttcatttgagctgccaaggaaataagaagacgaatggtctccatgcgggcaaccggtgcaaacacttcatcataatcaactccatattgttgcttgtagcctttagctacaagacttgctctgtgtctctcaacctctcattttgcattcttcttgagtttgaacacccatttaactccaatngcttcatgacctttgtgaaagccaaatactctcaagtgatcaactcttggttcac

SEQ ID NO: 154531 - DNA, 434 bp, Glycine max
  unsure (1)..(434): unsure at all n locations
agacacactccagaaaaaggtagcagtttaatgtgttatcatcatttgagcacttattgagcttatgtgttntcatctcctattctgaaagtattataaaagtgtcttttttcatggcaaaaattaggcaagtcacttcctataattntctttttagcttttaaatatttgggcaagcttacgcaaaatagagaaaggaaaacaatagatctggatcaagttaaatacattaaggattaagatgggaaagctttggttacagatcgagatatcaaagtgagatgggatatatacttttactggattctaatggtggacaaggttcaacttgttatatggaaagactctaatccatgatacaaacaaaattttgatcactgcgatagaatttgtgttggagaggtaaaagaagccctaatatgatgtatgatgat

SEQ ID NO: 154532 - DNA, 474 bp, Glycine max
  unsure (1)..(474): unsure at all n locations
taagagaagcagaagctcttagaagcgaanattatctcggntcttttcatgtgttgatttatacagctttcatctgataagagctttnttcaaagatgagattaaatctgtatggagctgcgatgaaaataaaagccccggtccggatggctttaatttccccttctttaaagcatgttgtggtgtcttgaaagatgagatatttggaattggttaagagtttcactcatcaggtattttgctgaaggctgtaacatcctcctttattgctttgatcccgaaaaaggataatcctcaatctttgtcagattatggaccaatttcgttgattgtgagtatgcacaagatcatttcacagttattatcgtttcgggtgataaatgttctcgggtctgttatttccccttgtcaaactacatatatgcccgtgcgtattatattggacgaagtggtgtcacaaatgaacttattgat

SEQ ID NO: 154533 - DNA, 437 bp, Glycine max
  unsure (1)..(437): unsure at all n locations
atccttatagtcatctgcngcatgcaagctntgagccanaatcctgactcaccatanaccttgacccggngtgagaatgtctatccttaccctcggaagcgaaaaaaaagagaaggaaaatttccaatcaaaggaaaaaaggaaagaaggaagatttccaatcaaagagaaaggaaaaaaggaaagaaggaagatttccaatcaaagagaaagcaaaaaaagaaaagaaggaaaattcacaatcaaagagtgggagaaagcaaaaagaaaagaaagaaaattcccaatcaaagaatgggagaaagtaaaaaaggaagaagaagaaggaaagaaagctcctgatcagggatcgaagganaacagaagaaatgtgcagaaaggtctttggaccggacaatatctgaacaatacagaattgtcaccaaatgaacaaaaag

SEQ ID NO: 154534 - DNA, 479 bp, Glycine max
ctcttagacactcagcttctaaggattgggcaacagaatcctttggtaccattcttgttcaatgtggtggcaaatgggctgtggactaatgagagaagcaataaaaaaggatcttttcactagcttcttggttggaaacaatagtactccaattaacctccttcaatttgcggatgatactattttcattacagaagcctattggagcaatgtgttgacaaataaaagtatcttaaggtgttttaagatggctctatagctaaaaagttaatttctttaagagtagatttggttctctttgggtggacccacacattgttatgaggtacgcaaaatttctaaattttaagttactccaatttccttttatttatcttggtcttcctgttggagttaatcttaggagagtgaccatttggaatccaattgttgtaaaatatgagaaaagatatctagatggaatgatagagtgctttcat

SEQ ID NO: 154535 - DNA, 485 bp, Glycine max
  unsure (1)..(485): unsure at all n locations
gcttgtaaaagcatatatattggtctctatacatccaagggtaatcataacaaanatttgactctagtgcaacttaatcaaaaggaaaatcataacaaaaatctccccatcttttattctcctttgtgcttcaaattcaacatgaatgtacattaatgacgaggatgaaaagcattatatataaccattttcatcaaccaaaaagattattaccaaaaaggttgtacggagagaggttaaggtaaactataaacaaaagttagttagtaagaccatatctggataattttgttcataatttttttttaaaaaagaacatactaaagtaaaatgaaatatattttttccataagtttctaacttatgcactcttattnttatatagaaactctgtagcgtaaactttctaaaaacttatgtgcataagttngattttaacttatgagataaaatngaaatcatttactattgattgtcatttatat

SEQ ID NO: 154536 - DNA, 441 bp, Glycine max
tctccccctatttgctataaatagggggaggagtgaagaagatttggttcactcttcttggcacttctttctctcttgaaattgctgaggaaaattatttccgtgaagaaaatccaagccgaggcgcttccgtaacgtttgcgtaacgtttccgtgagtaattacacaaagattctcgaccgttcttcaacattcatcgtttgttcttcgttttcttcagtcttcaacgggtaagtacctcaaaccgagcttttcaattcattctatgtacccgtggtggtccacattttgtttcatgtagttttattctcgttttcatttgctttttataccccattttgacgtgcttaagccatttatgtaagtcatttctcgcttaatctaaaaataaaataaatttccaccgatcgtttgaattgatcatctgtaatttcggtaaaa

SEQ ID NO: 154537 - DNA, 417 bp, Glycine max
gcaagttccaggttagtgtccaaactgaatttggatactcaaccccatcctaggccatacaaacttcagtggcttagtgaagatgaaaagggaaaagtgactcagcaagttgaggtgtgtctcaccattggaagatacaatgatatggtgttgtgtgatgtggttccaatggatgcgactcatatactattaggaagaccatggcagtatgacaccaaagcagtgcatgatggcttcaccaacaagaattctttccagcaccatggccagaaaattattcttaaacctatatcccctagagaagtgtgtgatgaccaatatagaattagagaaaagagactacaagagaaagaaaagagtgatacacccaatatgaataggaacaagaagagtgatacacgtgacgaaaagagtgat

SEQ ID NO: 154538 - DNA, 289 bp, Glycine max
ctcaagctgtgaaccgatatgctaagaagattttacgcgctttgatcgatgatggaatcctaaatgccgggacatcagtcaaaagcctaatggatcaatcaatctactgcattatctggactatcttttatttattttcgattctatcaagatcagcatccggattattttaaaatgcttcgcgctctttttattagatattattggagtgggtatgtgtttattgcaaataatctctgtcttatgatggcattgggtatacgaatcaacatcaagaacatgttactgt

SEQ ID NO: 154539 - DNA, 429 bp, Glycine max
  unsure (1)..(429): unsure at all n locations
gcttctcaaggattatgtcaatccttttgtataatgattacaatggcattattatttgtgcccgatctttcaccgagaattaaaatatatctaggaacacgcatctttccacctttagttgtagtatatttgtagagtgcatgggattctatctctcacatgtgtttccaagacataggctcccttttaatattttgttcgatttatttaagttctttcacttcagagattccttgtaacatttgcaagtctttttttgatcttctttcaaagctataacttgcatctcgtcacaaaggaatntcatagccaaatagattgtcgaaactacttctccgagtgtgttcaaagtaggtatgcccaatttgacgttgtatgatgatcgcagctttaccataatgaatctgatgacaatcattctagttattg

SEQ ID NO: 154540 - DNA, 450 bp, Glycine max
  unsure (1)..(450): unsure at all n locations
tncctccttggagaataatgcgccctaatatgttgtatactctatggctctcctattctactccacctgtcattgtagcggtagggagttgcattacaagataaactctggcaataaaaactgagatatgtataaaaatatatttatatgctaccatccattctggactagtttaacttggtagaaaatgacactcatatacaagatctcccatcacccacgattttgttagctactggatgttagaaaatgttttttgaagtcatggacttgcatttatgtaattaaaaaattgttggattaagtggcctcggaataattaagaagggggggtgtaattaattatgaacgtgtcttgactaattaaaaatatccttcttaagatacctgctctgataccacttgttggatcaagtggcctcggtataattaagaaagggggtcgaataa

SEQ ID NO: 154541 - DNA, 420 bp, Glycine max
tctataatcccggacatacaagaagagcgtgtcaacgcttcttaatcaatggtactattttcttgaaggtaaaaagctagcaagctcactcctagaaacagcgttcctgaagttgttaatagggataacaagttccatgcgaaccctttcccaggagagcactcccatgcctgcatcgaccataaagataaacattcacccacaccagcaaatcacgaaaatgattaacaccatgatacaataaaataagatataactgttttttaagcccaaatatctaaacaagatatagttcatgatgatattcaattatgatcccacatgtgacagctggtgcggcttagatccgaatatcgtccttttatcaataataacaagttacctactagtgtaatgtggtataggcacgccttgcgattt

SEQ ID NO: 154542 - DNA, 194 bp, Glycine max
ttttttagttgtccgaagccgatcaagatttgtacattgcagatttttaacacagtctttaacctgcacaatagccctcccatcattcaatgtggcaggaagccttagaagtataagggttcaaatggagattaccagactgtcactgctccactaaaagtccatatgagtctaagaaattctgaactccggag

SEQ ID NO: 154543 - DNA, 430 bp, Glycine max
  unsure (1)..(430): unsure at all n locations
agcttaatctttatgcccagtgacaaanacatatttgttattagttnntggtaagaataaaaaagtctcatgtattgaaaaaaatgttacattgacaaaaaggtctctcatttaaattaaaaaaattatcttaaaatttgtttgacattatttatggttgtaccgatcttgtgggggtggactgtggcgttgcactcatttantttgctttccaattcccactcttccataggtacttgatgcaattggttgtatactcactagatcaaaatgcatgatcatgcttgaaaatggacttgcttatcgatggtcaatcaacaacaatnttnntatttgcanaagaaaccttgtttatgatgcaactntgatgctcttccaaagtnattggctctttcgctttgtaagagaatataaattcaatatagttcta

SEQ ID NO: 154544 - DNA, 420 bp, Glycine max
  unsure (1)..(420): unsure at all n locations
tcttattcacatactctcttggngaagaagttgctccttccatgacttattccctagtggagggcgccttctctaaccttttctcctttatcttctgctgcaactccatggttgaaaatcaccattgaaggacctcattgaagctcaaatatccaacctccatagaagcttctcaagcaagtttccatcaagtggtaattagagcacaagagcttcaagtaggtgctctttaaacctccattaacctccattgttgtttcttcatttttctccatgtatttcctcacatatcttgtgctgaatgttgttaacatgattttttagaatttccaccaattaaacttgctatagaagctagattntgatttctattggtcaaatttcttgaaccatgaattgtgttgagtttagggtcctttg

SEQ ID NO: 154545 - DNA, 280 bp, Glycine max
agctggcttattatgaccatgcaacagtatgtatgtttaaaagggatattatatttctacattgagaaaataaaaggtcatctgattttgttgggtatattagaggtcaggtatacaacaatataaaatcgatttgttgattttatgtcaagtaaattctgggtggatagggaaagcctttttgaaacctacttgatcaccacatccatcttagaaggaaaattacctgcgctcaaattttcaagatgacattatgctttgtgattatctctttcattga

SEQ ID NO: 154546 - DNA, 330 bp, Glycine max
tgttcacaatctctagtgcactatatgaaagtttctatgaaggagaaaattaacaaactggtaaagagattacttatgagatggaagccactgctgcttgctattacatatttaagaatgttgctgtcccctgttgcacgtaagaatatatgcactatatcttctatatgcttgtgaatgtattatttgtcctcctctttattagtgatatttaccactcttgtttctcctttaaatttccgtcattatgaataagtacattgatgaggatgaacatccgaagtgtatgtattatgaagaagagcgaatggttattccctactggctgaa

SEQ ID NO: 154547 - DNA, 356 bp, Glycine max
  unsure (1)..(356): unsure at all n locations
aatcacttggccaaacctttgctaattcaattaggaattcccttcctaatattctagtgatcatcttgatgttgtgacttgtaatcttgaaatattgtcttgaattttaatcttgaaaagcccatttgcatcaattgcaacacatcatcatgatcatcatcaaaacatcaaagccaattgcatctacacatgtgtcctccaccttcgagattggagctatgtttcacgattgcctaagtgcggaccctcaaggcaatccgccattctcccttnttttttcngagacccatgaatgttattgcctagcgctattcatgtgcccttcacctttgaggttggagctatgtttcatgatt

SEQ ID NO: 154548 - DNA, 449 bp, Glycine max
accccacctgacgttctcaaagtcttctaacccccgcgacatatcttcaggtaccactctgtggtcaacaataaaagcaggaagtttcacccttcaacacttcctcatctcaagcttgtaagattatggggtacccatcacatgtggtactaagtggcggtcgggcgatggtgcacaacaagttttccacatccacaaagcgcgcataaacccaccatcccctgttgcccacctccaactgagctcacgtactcccacgtagcccatatcctcgtttctctcaacaccgggtccccatcaatcctcccaagcttccacaacatccaagcaaaacaacattcacacagcacaagctatcacagccaagcaaaacagagcaaaggcagaaaactctgccaaaacaccaaccaaaatcacagcttttctcacttaaagaccccagtaacaat

SEQ ID NO: 154549 - DNA, 438 bp, Glycine max
  unsure (1)..(438): unsure at all n locations
gtaattgagaaagggaatgtatggaaggaatgacttctaatgtttgcttctccttcttttagcctttgccttctataaggaattgtattctcttgaattttttgtgtgttntttccttcttctctctccttcttttataggtgcatatcatcttagtttttacgcaaccttcgcactgagcgcgctttctgtgcttagtgagtatggcggtaatcctcgtgctaagcgcgactttttcctgaattagcatgttttcctgaattagccttcactttcctgacttatcttcttggcactaagcgtgttgtgcccacttcgtgttgagtggctgggatgcgcacttcagattatccaattgctcttttgggctttactttactcactaaacatcataagttcatcaacttttaatantttctacacaacaacttaaatgtt

SEQ ID NO: 154550 - DNA, 430 bp, Glycine max
  unsure (1)..(430): unsure at all n locations
aaccctaggggtctctntcatagttcctctgtctactttcttactagtaaaaaaacaaatcatatattaagtatttgaatttaaataatatataaaaattaaaagataataagaatctaaaaaataaaagataaatttaataataaaacatgtgattaactttattatttaatttattattgttactatattaaaatatttaattattacaataattgattatattctaactataagttataagattgtgagaataaattgtaaatctatttttttgttattgattacctttagatgagattctttcctatcaattgtattttttttttcatgtacaagatttaaactcttgaaacttaaattgagggaattaaatttaatatcaatcatataacgagagttattgataatcatcttgtattacacacct

SEQ ID NO: 154551 - DNA, 468 bp, Glycine max
atactcacaattgttgtcttttggttgacaaacataaaaagtaaattgttcgtgttatataacctaagcttttttttaatagttccaatgaactacaggtttatccactcattctgtttgcttctagtgttgctcaatttctggacaaaatttgtttccaataccacgtccaagctaaatgttgaaacttttgaattgtttcccattagttttccttgccaaaagcactaaagttcatgacatatatcatttttttatgaataaattacatgccacaaatcacaatgtacaagaaagagaaacaaaggtttcttatgtggtgcatgttcctaagactgctacatcatgtttaacaaagagaaactccatcccttatcatggtagcttaactgaatgattgaaccaaagggaaacttcaattgagataatttataaagcctctatattattgaaagttgttatcaactg

SEQ ID NO: 154552 - DNA, 476 bp, Glycine max
  unsure (1)..(476): unsure at all n locations
ttaatatagatccggcgaattctttcaactatatactagttgtattaattaagtgtacttgtgtatgaggaacgtggggattgattgtggtttctttgtaatgaggtgatgtaatgcaagtgctaattgtttttgcatttccatattcgttgatgaagctaaagattagcaccatcttttgttttaatatagaaaaaattccatccaactacttttgaccctgaccaaggctttccataattatcaatcatgctttaattttttcctctcacccttaaaacatgcattgcatttggattgatgatgattaacatatcgcgaaaaagatatacccttntcctcgaagcatgcatatcacccactttnttaacttataatacacagngataattcttagcctatttcataattttgaatatggtgcaaccttataactaggaacaattcaatattntttaatgctcgccactcatccg

SEQ ID NO: 154553 - DNA, 370 bp, Glycine max
  unsure (1)..(370): unsure at all n locations
ttgtagaacactcgcggcgcatacgacactccatgagtgagaataaacgacgatgcgaagcgngcgtnaacagtttaccgggagtcttgacgactctgtgctggttggatttggtagcataactgtggcgtctgcggaaggtgagacgctgcaccatcttctcggatcagcttcttccaaaccctaactagggttcctctttccacagcanaaagagagaaatcttcaggggatgcgctgaggtatatatagtgagagtgtttctgtagcgccctatatctaagggcaatgagaacatcatcgccatcgccgtggatgagtatcgaacggtcacgaattccacacgtggcacttcagataaatgggcagc

SEQ ID NO: 154554 - DNA, 404 bp, Glycine max
  unsure (1)..(404): unsure at all n locations
acactacgcatttcctaggtttttctatttgacctctttaaggtaaatgatcatgacccattgtgttagttgactaacttcaatactgattattcatgggttgtgagaaaaagagttagacactaagtattagagattattgtgattctctcacaaccctangtttgctaaaattggggattttgtctaatcccttgttctattatttaaatgcttaggttctgtggaaaatacagtggttgaccttcctaacaacagtaggagtcagtgattacgttatttaggtgagtagctaatgtacttaacgaatttcttaaagttcatttatggagaagcacgtatactttcgaacatatatngttntggtgagctttgaaatttatctcgagatcttgataacatat

SEQ ID NO: 154555 - DNA, 456 bp, Glycine max
  unsure (1)..(456): unsure at all n locations
cttatcgccagcaccgncagcggcttccatgccaaacgaactctcttctcatttctttgtaaagagacccctctacgtaaatagttctaaaggtgacccctttacgtaaatttgccgcagaaaattccctgaatgttgccttaaaggtggtaatattgcttttaatttcttataatgggtttctgtaatggtacgtttgtatcacacaaattatcctttatttatagtgtgatngatttacaatatatggaaacataatattccctaataatgattgtaatccctaataatcaattgttgatattgtttaattacagcccatattccctaataatggcagtgtttgtgtntagcaacaccattttgttgtggttatgggcacatgatgtctatcgaagaatcccctgctagtttaaaagaactgaaattgagatgacaaatattcttttgtattat

SEQ ID NO: 154556 - DNA, 334 bp, Glycine max
cagctgaaagagaatgggaaggtagacttcttctttattgtgaccacttattggacctggagatatgtcgcgggggtcaggagaccttggggacgtcaggtggggtgctattgcccaaaaccaagcttgaccaatcccgacccaacccgggcatagtcactcagtgagaacctgtgatgtacctaaacaggcgagctcctggcagtcaacagataaaagaacaaagaccacaaagcacggtggcttgtatggtggctggccagctgagaatcttgtgtgatatatgggatatggcctctggtaatcgattaccaagggtgggtaatcgattaca

SEQ ID NO: 154557 - DNA, 380 bp, Glycine max
  unsure (1)..(380): unsure at all n locations
ataaccatcactcgcatgtgctttttattgcattctatatgtaacaaagacattgatccaatcatgttttatgagttggaaaatgaggccgcaattatactgtgccagatggagatgtatcttccccctgctgtctttgacatcatgattcacttgattgtgcatctgagcaaagaaatcaaatggagtggacctgtttatctacngtggatgtactcggttgagcgatacatgaagatcttaaaagggtatacagagaatctatatcgtccataagcatctattgttgagaggtacatttcacaacaagccattcgtatttgttcagaatacttacagaaggctaaacctgttgggctttctgagtctccgcatgatga

SEQ ID NO: 154558 - DNA, 390 bp, Glycine max
gcagcttatcatattgatacaaaatgcaatagagtattgatgtagttaaagagaagatagataacaagatttatattgattcgctctctatttctagagaagctaatccagttatctaattcaacctgaattagattttcactatacaatgttgagtttacaagtaatcacaagcaatttcaaattctacctagaaaatgaaacttatgcatccaacccaagggtccttagtgaatctaagcctaagagaaacctactcttagcttcaaactagaaacacttattctagcaatacaacctatcataccctaattttgtatggggacgaattgttattaatatttggattcatgctggccgagttgagctgcttaacactaatcgccatgc

SEQ ID NO: 154559 - DNA, 393 bp, Glycine max
ctgtgatgaacctaatcaggcgagctcctggcagtcaacagataaaaggaacttagaccacaaagcaaggaggcttgtgtggtggctggccagctgtgaactttgattgatatatgggatatggcctctggtaatcgattaccaagggtgggtaatcgattacaaggcttaaaaatgaagacaggaggctaagatggtctttggtaattgattaccaaagggtgtaatcgattaccaggcttgaaaacgatgtcaggaagctatgagggcttctggttatccattaccaagggggtgtaatcgattaccatgcttataaatgaatgcagcatggtgtggaggcctctagttattgattaccacgctgtgtaatcgattacacagacgaacatg

SEQ ID NO: 154560 - DNA, 415 bp, Glycine max
gcttgggctttgaaagtgcaaaacaggacacttgaagctggattctaagtaataaagtcctcgtgattcacgtccttctccaatcagacgacccgtaccatgttcctgaataacaaaagaattagcatcaaaggttactgagcaatttaacgaacgagtcaactgacttaatgcgattaagttgtagggacaatgaggaataaataatacagagttcaactttaatgaaggagacaaagaaacttgaccaattccttgagatgcaactttggacctattggctacagtaacaaagtgatgagtttttggaaaagaaatagatgaaaaagatgatttgttaccagaggcacctgagtcaagtatccaaggactagaacttttcatagattaagaaatacatactgctgaaacacat

SEQ ID NO: 154561 - DNA, 436 bp, Glycine max
tcttaaggcagctacatgagctgcctcggttaaaaagctgttcattcttcattaaccgttggatcttcccaaaatttggtctgcagcttcacaagaaaattgtacacgatctgaccgttgggatctttgagaagatatctggagtgtgctcgaagcttccgttcccgagagtatttcttatttaagcatttcagcctttgctttcatgtagcttaggaaaaacatcatttcttctcctttctttcttccaaagccatttctaacgtcccaagcactttctccatcacccacagccaccattagccaccgcaaaccattgttgttctccgttaaaattccacaacgagaggaacccatcgattggagcggaatcttccaactcggcttgcagtttcggtagagaacgaaaccctaatctgacctttcattttctttg

SEQ ID NO: 154562 - DNA, 419 bp, Glycine max
  unsure (1)..(419): unsure at all n locations
gcatatgttctgtcttaacacatttctgattattcatttcctgagtaatatatttctttcgttatacaggagaactttgcaaatttgcaacaagataatgaaaatttgaagatgcaaattgctaagatgaaaagaaaacacaagactgagattaataccatgaagcagtacattacagagagcaaattacctgagtctgcactacaaccactgtatagagaggaggattctgatgtggcacacaatgcaacttcctcctatacatatgacgatcaggcatggagagcagaatttggagcaatatatcaggagcattactaattgactgtnggtattattagcatttgataaatttccttttggatcaaactccaaacaatttgtctagcatatcctacttgggtcaaagggcatcctta

SEQ ID NO: 154563 - DNA, 320 bp, Glycine max
ataagtttgatggtaacaagcttcccattcgcagtgttgaagacgtagctaaattaataaaatcaccatctacaggcctgtggctaaatattcaggtaaatggaagagtatttgtttcttgtccttgaactggaatacacttctgttttcaaggcaggcccagaatatatccatttggggtcagataatctctattgtggactcatctcgtttttgcgtttaaaatacaatgcgagattgatcattctttcagccaccaaaattgagtgtagaaaaatttctgccatctctccctgctaaaagtgtacctgtcaattaca

SEQ ID NO: 154564 - DNA, 400 bp, Glycine max
  unsure (1)..(400): unsure at all n locations
attcaagaatcaagagatgaattaatcaagataagtatgaataagtttcttcaaaaacttagtagcacatggatttttctcaaaacatgtttaccaaagaggttttactctctggtaattgattaccagattgttgtaatcgattaccagtagcaaaatggttntcaaaaagctttcaactgaatntacaatgttccaattgatttcaaaatgttgtaatcgattacaatgttttggtaatcaattaccagtgtgcttgaacgttgaaattcaaattcaaatgtgaagagtcacatcctttcacacaaatgctntgtgtattcgattacaatgatttggtaatcgattatcagtgataagttctgaacaaaaatcaaaagatgtaactctttcaatgggt

SEQ ID NO: 154565 - DNA, 256 bp, Glycine max
aaattcccacttggacctctatttgaacaattctcactctcttgtgcatgataatgtgaaatgctctttaaatagttttggaacttttcgaaagactttcaaatcaggtgatacgcgggtttaatatttatttctttttcttatattttaatatatattgctcttgcccgtgtaaagggactttcaatttaggcctgatatattcaaactctaacgctgggctgctagtccatcaaatctccaatgttggcaatca

SEQ ID NO: 154566 - DNA, 457 bp, Glycine max
  unsure (1)..(457): unsure at all n locations
agcttgttgcgtattactcattcatggctcattatatnggtgtgatgagcgtggatcttgagttatgggttcggccatgtataatggttgagaagttcactaatcaaaatgactttggactctggaggttgaagatgagcccttctggtatatcaagggttggtggaggctcttgaatgagtggtcaagcttgagaaatcaatgtcaagtacaatcaccattatagatgacaatgggtagagtcttatagtatctgttctcatagtcgtatttaaaaaaaatgtccatacttagtctcatacccacatgggtaacaactttaatccatatcctcgtactcgttgagttcttatatactcatacttgcgctgtgatccacattttacttatgtatgaagttaataaataaataaaaatatattaattaanaaagttattacgaatagattaaaattta

SEQ ID NO: 154567 - DNA, 367 bp, Glycine max
  unsure (1)..(367): unsure at all n locations
agtcaacaactgatnttaccattagctttttttccttatttgtatctctgactttattatgtacgatgatgttattggntcttttaactactatgtcgatatgcatttcaatgtaatctacttccacaaacaatctttataaactgaacataggtccataagtgaaatattatgcattaattagctcttatctacttaaggcgtatgagacctgataatcaggaagcaccaaaattggaatgatgatgacccatctgattaatgaagaaatttgtatgttacttntatttgacacgttagagttataatttaccaaacatttttcccatttaaacttatattgcaaagtttaaagtgtttttaatat

SEQ ID NO: 154568 - DNA, 224 bp, Glycine max
acgcactttgtccaaaactcatcacttgctggttaggtatgccgaacacatgcacctgtggcaaatgcggacatttttacccagaatttcaatcgaatctgcatgtttaaactctgaatcaatatgattaacgtatttggtgagtttgtcggacaagaataacccgttgagctagcttatacaacaattaccgaatggattgacattgtgcaaatacttgattc

SEQ ID NO: 154569 - DNA, 300 bp, Glycine max
  unsure (1)..(300): unsure at all n locations
cgagatcatcacanaatccaaacaccaacaacacatagggagtgagttatcacattcataaataggaaaagataaacgaaagcacatattcataatataagtttaacaagctcaacttaacaaaattcacatcattttaccactcattgtgtaacatcacttatcccaagaaattaatcacaaaatcacattccacaccttcacattaatcccatgttcagaacaacacatctcaagtacaacacaacatctcacacttacacaactcatacccaatatcacgtacaagtcacaatgatc

SEQ ID NO: 154570 - DNA, 286 bp, Glycine max
cgaaatggagggtgagccatgttctcagtataaaaaatagtagtgaaatgctccaaatcagaatattcataatcaccctcaacataatactcagaatgctccaaatgcacagaatggccaagatgcacactatgcctaactaatctatgaaaggttctatttatttcaggatcaaaggattgtaaatcacctggattgcccctagtcatgcactatatgcaacaaataatgtgtttctcaacaacacctaacaaggggggtaaactactgctatactcaaatgata

SEQ ID NO: 154571 - DNA, 382 bp, Glycine max
acatacatcacttatatgattctaaagagcccattccttctgttctgttgactttgtttggtgacaatggttatagaaacaactcactatcaggagctggtaggacattcctgtatgacaatttgtttcctggaatgttttatttgcgtcctgttttgaaggtactatactgtagttggacataactgttattatgttctgcattctattgcttgtcatgtctttgacatgcaacttattgtcaatcagctctggttcacacgctactacacctgaagtaacaatatcacttattaagcaccaatacttccattttcttgatgtatccatatcagatatgtatgtataccaatagtcttggaatttcattgatacgatatac

SEQ ID NO: 154572 - DNA, 440 bp, Glycine max
  unsure (1)..(440): unsure at all n locations
ctatgctgtgcagaaaatncatccagctcgatggcctgcttaaacagaattatacatgtgaatacattgccaggagttcaaagtcaaaattagatctcgacatgaaaagaaccaaaaatagtagcacatattgctccaacaatgtataatttgacatataacatcaccagcagagtcacctgttttcaaaaaggtagttntgttcccctaaccaagtcgacagagcatcatatgcagagtttgctctcccataaatctgttgaccaaaaacagctacatacgattaccaaaatcacatagaatgtatgtataatgggagcatattantgagagcgtgagaggtgaggggagcaaatgcatatggatgctaattaaaacaatctcgatcgtccatcctcttacctctcatattctcacttgataagctccctcaatgtatg

SEQ ID NO: 154573 - DNA, 459 bp, Glycine max
caactcataatctaggtatcctatacccctcaatataatggtttttaaggtttgagaagtgaaaatgagaatggggtaaatttggaaccaactctcacctcacacaagtctataacatcaatctaaacttgctcaaactggttttacgcctaaaattctgccgaatcaaaatttgactcctcaacacccaattttaccctagaaatggctcttgccttcactttggtcatttgttttctctcttgacagcccaaactttctcataagttctaaatgacatttcaagctaagattaactccctttaacctccaaataccactaaattcagatgtggcctttcaactctcaaagcctcacttcttttccactcataacaccatattctcactttctaagccctaggtaaccctacccttcatctctaacaagtgtccatatgcaatttcagtacataaaca

SEQ ID NO: 154574 - DNA, 485 bp, Glycine max
  unsure (1)..(485): unsure at all n locations
tgtctcagcgtntatgcgagacggagaccaacatgctagctatcatcgccaagttctaataagagttaggtctagccgcggcccacgagcatatgattgcggacgaatatgcccaagtatacgcggaaaaagaggctagaggaagggtgatcgactctttacaccaagaggcaaccatgtggatggatcggtttgctcttaccttgaacgggagtcaagaacttccccgattgttagccaaggccaaggcgatggcagacacctactccgcccccgaagagattcatgggcttctcggctattgtcagcatatgatagacttaatggcccacataattagaaatcgttaggaaacttgtatggtctctcagaccttgactagatacgacttcctttnttgaaataaaatgagttggtcccatgtttctactccaaaaagcttgtgcaaatcaaatcactcctacattntatctctagcatgcatt

SEQ ID NO: 154575 - DNA, 447 bp, Glycine max
  unsure (1)..(447): unsure at all n locations
atctngcacagttatgtctcgtatcggtgtaatttattacagccttctcgtaatcgattgcatagctgtttctaagacaatgactgatttattcaatagtctttgctttaatcgattaccatgtgatataatcgattacttctctttctatgagtagttcaaaagtgaacaagaacactttaatcgattactttgagtatctaatcgattacattgttcttgagtccaggtgtttggaagaacactttaatcgattaaaaagataatctaatcgattacttcattgaattaatcgattaatatgtagatataatcgattgcaaatggttataactattttctctataaataatcagcttgtgttctcttcataacaatctcgaaaataacacaataagcctctatatgagctaagatcaagtgactgtattagttaaagaatgaaga

SEQ ID NO: 154576 - DNA, 489 bp, Glycine max
  unsure (1)..(489): unsure at all n locations
acattagaagatcgacagatataaagctgatgcctaatataacctatccactcttgcctatntgtgatgaaggtagaaagaaaggatccaaactatacttcagtgaagagatgcccaacaaaagacaaaaggtgtagatcactaactattcaaggtactggaggaccttattcaccaacaacaagttggtgaacgagttggacaatcatgatgcttacacttcatggaattagactgtatggtttgatataatgaatgtgtccacttccaactatgtagattggcccattgaggatgatcacaaggactcaatatagttgttgcatccaatgaaggtataccactttgatgatgtctctgcttgctttatgaagaatccaaaagatggattcatcaagcatctgctcaagcttcccattatcttcaaccacatcatcttcgatttgaactacatggatgaagatgagttctctgcgcgtatcatccata

SEQ ID NO: 154577 - DNA, 343 bp, Glycine max
gcttcacgatggaacaccttcaacagatgcaaccaagtatcacaaaatcaagccttctaatatctcactctcactcaaccagacttctgcttctctgtcaataagctctcttagttcatgcacaatcccataatactacatcttcaacacctgaaatgtgtaacagccgtaattgttaataaataaataatacagtaataagttaataaataaataaataatataattaggtcataaatctctactatataaaccaaatgttaacttagagcagcttttacaaaacacttatgtccctttgtcttttctacgcacaagaacctttacagagcaatcagaggag

SEQ ID NO: 154578 - DNA, 392 bp, Glycine max
  unsure (1)..(392): unsure at all n locations
tttgtgattgtatattgatttcaatatttccttttaaaggtacttcctttctctatctggactgacaaagaagttgcaggaagaagttgatgagttctcaaatacttactacttggaccttcatgttggagacttgaagcacgaaatagcatttgctactagctagtttctatcttgtcaaattttggactctatctatcttaagtaaatattcacattgaaatgtgaaggaaacaaagcaccatgttaatatgaagcttgtggtatggttgtgagttatagcctaaattgttacttgacaggcagtgttttactaagcatgaaccacaatcagttaatcaaacatccatattcagtactccttctcattgtccagacacagaanaacaaac

SEQ ID NO: 154579 - DNA, 444 bp, Glycine max
  unsure (1)..(444): unsure at all n locations
accttgaacaagcatcaacttctctttcagaaccatgctatgtgctctcgactgggccctttcttcccttcgcaacttgagttcattattgctaccccatagagctccgcgaaatttgttccggccatactcttccttgcgagccctcttggtctctagttcaagggcttgtgcggtaattgcattctcttcccgtaacccggcgcactccttccgaacgtgtgtagcagccaactagaactnnttctttggcgagtttgcctttcctaactcgcttttgagagcttggacttcttcgtcctcttccggtgcttcaaaactctcttcgctgacgacttttaacttggcgagccaatctaaacctcgtatatgaactctcagccattcgtggacccaccaatgatgccattacgaatgcctctaagctcttgatctttccttaac

SEQ ID NO: 154580 - DNA, 269 bp, Glycine max
tcacaagactctcatttatcaaagttacaataagtggtacacatgcttctatttatagaccaagtagcttccttgagaagctttcttgagaaaactttcttgagaagcgtctttgaggaaattttctttgagagctagagcttatctacacacacccctctcataactaagctcaccttcttgagaagctccttgagaatattcctaaagaagctagagcttagctacacacacctctcttatagctaagctcacctccttgagatgag

SEQ ID NO: 154581 - DNA, 371 bp, Glycine max
  unsure (1)..(371): unsure at all n locations
agcttctctatatattatgcgcctgaatcagactttcgtttcaaaagttatgaacatatgaatntctccactgtattccgtgtgacaagtgatgaccattttaatttctcgatagcattcgttggtcaatttcgagcgtctcgatatattatgcgcttgaatcggacttccgtgtgacaagctatgaccattngaaattctcgagggcttccgttgttcaatttcaagcttcgagatatatgatgcgcctgaatcagacttccgtttcaaaagttatggccatatgaatttctcgagagcattcgttgctcaacttcgagcggttcgatatagtctgcgctgtaatcggacttccgtgtgacatgttatga

SEQ ID NO: 154582 - DNA, 330 bp, Glycine max
ctcgattattatgcgcctgactcagaggttcgtgtgaatattatgaccattggaatctctcgagagcttccgatggtctatattgagcgtctcgatatattatgcacctgaatcggacttacgtgtgacatgttatgaccattttaatttctcgagagtttctgttgttcaatttcaagcttctccatatattatgtggctgaatcggacttccgtttgaacagttatgaccatgtgaatttctcgggagctttggttgtcaatctcgagccgctcgatatattatgcgcctgaattgactttcgtggacaagtatgaccatgtgatttt

SEQ ID NO: 154583 - DNA, 360 bp, Glycine max
  unsure (1)..(360): unsure at all n locations
cagatcanaagcaagaaattaagtgcatatatggctacaaacatcttgaaattaatacatacggacatttgtgggccatttcatacaccttcatggaatggtcaacaatactttatatcattcatagacaattactccagatatgcatacttgtttcttatacatgaaaagtcacaatctctggatgtgttcaaaacatttaaaggtgaagttgaaaatcaactcaacaaaagaataaagtgtgtcagatctgaccgtggtggtgaacactatggcaaatatgatgtgtcaagtgaacaacgtctggggccttctgccacgtacctagaagaatgtgatatcgtcccctagtacaccatg

SEQ ID NO: 154584 - DNA, 415 bp, Glycine max
  unsure (1)..(415): unsure at all n locations
tgatattcatcttgatgnaatagccaaatcaccaactacactactacgttgtgtatctctggccaagctatttgaggagaaatacttacccaagcacaagccatttcaaagtccctaccaaaaccgtaaccaaaacacaaacataaatacgagcctaccttcttcttagtcaatcaaatccacaagcctaccacccttacttccaagccccaaaaggaattacaactccaattttccaaaaccaggaaatgttagaagaatgtgatgtaagcttcattggagcttgtaggcctaggatcttcttcatcaatggattcctttgcttcttggaagatgaatggcagcggaatggagaatgaagagagagaggagacaccacttcaatgagaagatgagtctagaataagctcaccac

SEQ ID NO: 154585 - DNA, 411 bp, Glycine max
  unsure (1)..(411): unsure at all n locations
tatggagggatcttcttctanactcatcttcttcttgaagtggcatctcctctctctcttgcttctctattccgctgccattcatcttccaaggagcaaaggaatccattgatgaagaagatcctaggcctacaagctccaatggagcttacatcacctaggttgccaattgggcccttattacaacttgaactaaacctactaaagcccttttagttgattaacccaaaacatatttttggtcagccaactttacaaggattgggccattatttaaacaaactaaacactctaaaattgagacaaagtggtgtcatttagtccttctccatttgtgccatgatacaactcacaaccttggacttttctccttgaaactngngctngtattcagatagtatggacaacact

SEQ ID NO: 154586 - DNA, 407 bp, Glycine max
  unsure (1)..(407): unsure at all n locations
tatgggtattatgttgtgattattgttaataaatcttgttttatgggtaacggtgtctctacaacatctccattggatttaatgatgaaatttgtgcattttcacgtgaanaagagtctatagtttgaattgctaaatgtagccgtggggctaagctcatcagttgggctaaacgcatatccaccgctaagcgttgcttcagtgcgcttatcgcataagagaatctggcagagcatcatcatcaaagctgcgcgctaagcgcgagatcagtgggctaagcacaacattgccttcagccaggctaagctggagactggtgctaaaccccatttcaattactcgtgcttagcgcgaggatggcgctacatgcagtgtctcgaattcagagcctatttaaagcctatctt

SEQ ID NO: 154587 - DNA, 331 bp, Glycine max
  unsure (1)..(331): unsure at all n locations
catagagattcagggcttgtaaggattgatcaaatgaatgttaaaagtatgaaagaatgaatnttttttattgaaaatgcgaaacaaagccttgctattatagactcttcatgtctggtcaagaataccatttataagagttattacttttagaaaaacttaaaaccaatttgaaaaagtcaaaacctttttgaagagttacatcttttgatatatcagaaacaatcactgggtatcgattaccaaattagtgtaatcgatacacaaagcttttggtgaaaggagtgactcttacatttgaattgaattaacgtcaagacctggaatcgat

SEQ ID NO: 154588 - DNA, 452 bp, Glycine max
  unsure (1)..(452): unsure at all n locations
tataagaacaaaaatgtcttaatcatttccaaatatgcatgtgaattaggacgcatcaacaagaatcaagccaaggctattgtgcaagcaatcaatggggccaaacacaccaaatgattataatgatggatggctcaaattctcacaaagggtaaatcatcactttcaaattgagctttcaaaactatcatgacatgtagagaagaatcaaggatttcaagtcacaaaatgtcaagaacttttattttcaaaacaattacccatttcttgaacatatcctataattcaaagaaaaacatgcaaagtcgtacgtgcacacaaaattgacccaaaatattaaactgaanatccgacgaaactaacaacattaacaaattaacacaactaacaaattaacaaaaccaacaaaactagcanaaccaaagaacactttcccccccccccccccatac

SEQ ID NO: 154589 - DNA, 354 bp, Glycine max
  unsure (1)..(354): unsure at all n locations
acatgtttgtcatcatcaaaagggggagaatgtgaatgtatgtatacatgatnttgatgatgtcaaagaagaatctaacaagactgcttcaaatgataagcatttgcttcaagaataattcaagattgcttcaacaaacaaagccttgtttcaagattcactaaagaccaagccttgccttaaaacaatgtgctttcaagacatgcaaggctctggtaatcgattaccaggaagtgtaatcgattaccagaagacagggttgagaaatagctgttgaaaaagggtctgaatntgagatttcaacatgtaatcgattatcgtatgtctggtatcgattaccagccacgaaacttt

SEQ ID NO: 154590 - DNA, 450 bp, Glycine max
  unsure (1)..(450): unsure at all n locations
tattttgagaaatgaagatnactcatcttaacatatgagcacaaactcattatagcaatcaaacaagacaaacaaataaaattttgttagtcatcatataaacaagttaaataaaagagaaatttcaaccaacttaattntaaaagataatggttttgatgttacctttttcatgattcaagtgcttagatctttaaagatggaagtcagacttttgtttttcttacttaaacgtcttgagagatgttctcatcactttcatagtccttggataaaaggttgatctctttctccaaaccatcggatgagtcattgtcatcccaagcaatatatgccttcttggatcttctttctttataacttttcttctcattcttcttcggccatgactcatttgaggtgcagtttgcctttatgtgaccgggttgattacacttatagcatttaagt

SEQ ID NO: 154591 - DNA, 308 bp, Glycine max
tagctgtcaactccaaagcgagaatatgctagtgctatgtttttcccttccatttgtcaaacacaaaacttgccactccctgtatatcttctatcgctacctacattggtttggctgccactccgcaccacccactgtgacccacatttattgtttctggggcatcttatatgccgagatatagtttgctttctatatgataaagataaatccttagaaatgtgcgcatggaacttatatatatgctaaacaatgtaagttttctgttctatcacatcctatcattcatatctcttgaactaccatat

SEQ ID NO: 154592 - DNA, 327 bp, Glycine max
tacttgaccttcatggatttgaatgaataaaatctattgaataagtcatctaaaaaatacaaccagacaatacgtttagaatcaatggtgctcaatgtgtacattgtcatataataaaatgtgctcattaattagacgataggataacattgatacgatttgtattaacttataatttgctctgaaactatatagttttgtccaaattcaagtgtacaacaggcaaataaccaattcatgtctcaatatagaaggcaagtgaccacaacatcatcttcaagaccaggatttgaagattcgtttattactgtacagctacacatacta

SEQ ID NO: 154593 - DNA, 479 bp, Glycine max
  unsure (1)..(479): unsure at all n locations
agcttatccttgaaaccggatgctgtcaccactggcccatctagtgaaaacacgtctctctgcaatgagaaagattcagagatgtgtaaatgcttcggaacaaatatcgccaactacattgttacatgagttaagataaaaaaatagataaaattaaacaggtatatacttatttaccctttaaacccatggatcttttacatttgaaaagtatcttccctccagtattcagttattgaaaatgaaaaaaacatacaagataggaatgtgcaacaaacctgcaaaccaccttcagaaaagatgcgaagatagttaaaactagttaccgctgcaacccaagcagaaccaagtgcaacaaccttcacttcttctccttcaaagcgcatagaccactgccaaaattntaaacagtgagaatatggtaagatttcacatcatgcagagtgctgtaactcataagaactgagatgctgtatgtc

SEQ ID NO: 154594 - DNA, 492 bp, Glycine max
  unsure (1)..(492): unsure at all n locations
ttatactcagctatattggatattggggtttaatttatcattttttgtatgtgcagntcgttcttaaaatttgaataatcactctcatattttacatacatctagtggaagatgcgccttttatgattggtgctcctttttattntattcatttggcattgaatagagtaacgttccaaattttgatcagcctaatatttttttcgagtcatttggcattggtgctccttttcttatctgacatatcaagcgaaaaagaaaagggccttatcatagctaagaatacccccacaacccccctgggttacttgtgttatctcacttattttttggactttntttgttatcggtttcagttttgcttaagcttttgaagcaagggtgtctgtttaattntacgagtttgttaattntaacaaatcatataagatatcaaatgaacattataatatatgttacgtcacattattaagagaaaagtttaaagaatat

SEQ ID NO: 154595 - DNA, 465 bp, Glycine max
  unsure (1)..(465): unsure at all n locations
cataggtgaaatcaggtgcagccatttcccttagagtcctctcacgaggtgtgtgttgtgccatgttctcagaatgtgcaaaatcagaatgctcagaatcagaatgctcaaaattataatgctcaagatcaggatgttcaaaatcaccaataacagaatgcacagattcaccagttatggaatgctcagaatgatcaaaaggtataaaatgatgcctaactaatctatgaaatgtcctatctatctcaggatcaaagggttgtaagtcagatggattgcctctagtcatacactacattcagcatgcacacaactagttgccttgtcatgtaaataaaggtgtaggtttgaactacagctaccctcaaatgatatccaaatgacttgaaattntgtgagcaaccttataaaatgatgagaagatagcacanaanatttcagacaanaattcaaagtctaactatg

SEQ ID NO: 154596 - DNA, 460 bp, Glycine max
  unsure (1)..(460): unsure at all n locations
agagctntagaagatgntttggctnttacattctctaactcctttgagtggcatttgtattggttgttaatatgattgttacatcttagtacatttgatatttgtcttgcattatgcatcatcatagtctgtgtgaagaaaattttctaagttagagagatttcttcagaggcaaaaactttttgttttaatcgagtacatagttgtcgtaatcgattacaagaagttgtctgaagcttgtagagttaagtctcatattggtttaatcgattgtggtaatactttaatcgattacactgttgtttaagacaatgattgattttttcaagactctctactttaatcggntactagatggattaattgattacttatctcttgtttaagttgtttagaggtgaacaagaacactntaatcaattacttaggtcantctaatcgatacatcgttcttgagtag

SEQ ID NO: 154597 - DNA, 347 bp, Glycine max
  unsure (1)..(347): unsure at all n locations
gacttataggaattgatttgggcaaaattggatgagggaaagtgtgattttcgaaatctgcacttatgcagaattttgctgtcaaaataggtgcagcagggatttggctttgtgcanaanaatgcttgtgtgtggttggctgtggaaagtctagtgcagaatgagttctggatgnttgctagtatatcccaacggtcaaaatgtaggcttatgtactagagacttccagtaaaattttggagtcgatccaacggttaacgaattggaacgaaggaatngttactggggtctttaagtgagaaaagctatngatttggttggtgttttgggcagagttttctgccttt

SEQ ID NO: 154598 - DNA, 486 bp, Glycine max
  unsure (1)..(486): unsure at all n locations
atatcatgatctggaaaagtcaaacaacgtcatttatgtaaaagaatatataatcatgcttatgtcagtaattacatagcctctaatttcatataaatcatataatataatataaggtcacatgagttagaagcttacaaatatataataattaaaaggtcattttcatatatcacaaaatcgaagataacattcaatagttcatcataaaatgttgcatcacatacaaattttgaataagcaacacagctctcagtcaaaatgcattttcagaaattgtgtgttatatctaaaaaattaagattgtactactatcagactgagaaccacactcagccgcatgtcgaaagacctgtgaaagtaatgcaccataagaccaataccaaactggaagaaataacttgtcaattntaaaggtgaacattattataattggattttgctaacaaaatataaactgaatatcatgtatggctgctcaatctt

SEQ ID NO: 154599 - DNA, 453 bp, Glycine max
  unsure (1)..(453): unsure at all n locations
agcttagaatgagatgaatgattcatctntatattgtttgaacaaacatcttggtgtctctgaaatctaaagtcttcacatcctcagctaagaacanaagcttaagagagataataacatttcaaggacttgagtaacacacttgtagtgttcaaaattttagaatttgatattaattttatttaagaaaatatgtatctaaaatatttaaataaactcaacaggaagcaactacgacaaaaagttataactatctgcaaaatgttatcaaacttaaaatttgacgacctttaagactaaattataaaaaaattagtatcgatgaatagaaacaaaattagaagttgaagaccaatcaattaatttcaatagaggaattcttgaaaggaaataatctgattctccaaatacgagtagtcttgcaacaaagaccatcacanagccactttcatt

SEQ ID NO: 154600 - DNA, 472 bp, Glycine max
  unsure (1)..(472): unsure at all n locations
cgttcaaaactgctggtaatcaattaccatatatgtgttatcgattacacagtacaaactntgaattcaacatttaatagctgttgtaaatcagttttggccactggtaatcaattacatcctctggtaatcgattaccaaagagtaaatttgttgaaaaagactttttaacttaaaattcttggccaaaccttttgctacttcaattggaattcccttcctatttaatataccctttctaagactctagagactgtcttgatcatccatcttgaatatctttaatttctttgtcttgaataaagctctgagacgcatgtgaaactntggcatcatcaaaacattcagcttgatcctttgtctacaatctccccctctttgatgatgacaatccctgaaatcaagacaagctatatacaagatgatagcacgttcacacaaccccttactcccctatcttttggcatgtatg

SEQ ID NO: 154601 - DNA, 347 bp, Glycine max
ttacctcctcaatgacaatctttgtcttggatcgaatagccatgacaggtttattgttactggctttgatattcggtagttgatattgggttgcgggagggaaatcccaatggaataactcaccattcttcacttgcccatttgtatgacattgttgtgaatcacctatgatgtcttgtttccaagggtatcattatcttctgatggatagccataaaccgatcaagaaaggacattatttgactcttcgacaaatcgaagacttgtctggattggttctgttggtccttgtatgttgaaaaaccatctcttgaggtcttctcggaaataaaactttctaagggttc

SEQ ID NO: 154602 - DNA, 399 bp, Glycine max
agcttggcatgggacactgatcgaattaaagttgtgtggcttgggcaataacatcgcaacgaatatcagacttaagacccccaataaagcagtcgagcaatgcttttggcgtaatgccttgaacccggttagcaagagctgtaaatcgcacataataatcatgtacagtagtggcctatgtcaatttaaacagatgtgctctgggacattcatagggagagggtccaaattccagttcaagagctcgtgtaaaagcaacccatgaatgaaagggattggtgcgtgaaaacatttgataccagggaacaacttctttgtctaaatgaattgcaacaatagttaaacggtgttcatcaggtgtattgtaataattgaagaattgtcaactttaaagatcca

SEQ ID NO: 154603 - DNA, 270 bp, Glycine max
gccacctccaaggaacccacatactcccacgagcccatatcctcgttgtctcacactgggccctataatcctccgaacttaccaacatccaagaatcaacatccaaacgtacaaactaaaaccaagcaaacagggccagggcaaaactctgcccaaaactaaaccaaaatacaactggtttcacttaagaccccaatacattccttcgtccaatcgtaaccgttgacaactcaaattttactgaagctcaatacaaagctacagtgacgt

SEQ ID NO: 154604 - DNA, 266 bp, Glycine max
accacggagatgcagcggaagacacaggagaacacgagagaggatgcgccatccactatggaataagccatggaagaacgagcaacaccaccaacatgagccaaggatacgaagacgggagaggatactgcaatggacgaaaacaaagagggagagaaagacagaggggggagcaccaaatcgaaggaagaaaaagggagagacagcgaacatcgagtgtgggcgcacaagactctcagaccccagaggacaacaagtgaacacat

SEQ ID NO: 154605 - DNA, 315 bp, Glycine max
  unsure (1)..(315): unsure at all n locations
acatgggaccaactcatttatttcaaaaagaagtcgtatctagtcaaagtctgagagaccatacaagtntcctaacgaattctaattatgtgggccattaagtctatcatatgctgacaatagccgagaagcccatgaatctcttcggtggcggagtangtgtctgccatcgccttggccttgctaacaatcggggaagttcttgactcccgttcaaggtaagagcaaaccgatccatccacatggttgcctcttggtgtaaagagtcgatcacccttcctctacctccttttcccatatacttggcatactcat

SEQ ID NO: 154606 - DNA, 433 bp, Glycine max
  unsure (1)..(433): unsure at all n locations
actcagcttagattggatccatagactataacatgttacaattcttttacctgtctcctccaaatatcaagagcatacttcctctgtgagatcacgacatcatcttctgattgagcaacctcaataccaagaaaatacttcagatatcccaaatctttggtctggaagtgactaaacaagtgttctttaagttgggcaatcttagtagtatcatttcctgttatcactatatcatcaacatatacaattagataaacatacttctcaggagatgtatgacaataaaaaacagaatgatcagcttcacttcatttcaacccaaaaagttgaacggtatgactaaatntaccaaaccacgctcgagggattgcttcaacccatagagagatcgatgtagcttacatacgagaatactccccctgagcaacaaacc

SEQ ID NO: 154607 - DNA, 371 bp, Glycine max
  unsure (1)..(371): unsure at all n locations
tgcaagcttgattaaccccgaccatgacgtgatatatctcattacgaaacatccactttttccagctcaaggcggcgccgtctatgtaaaatgaggcgacagaatactctcttcttccggtgtgttttgatactccaacagctgagatatcttgaatatccagcctatcaggtcacggccgtcaaatcttgcgatatcnagcttgactgtgttgctctgggtgaactgcgatgtggacgacggtgggttttgagtggtctccttcagacgaaggtggtcaagaattgaatccactttatcgcgaagctctgcgtatttgtacaagagcgtggattggcaagtggataagcatgtgaacacttcttctaatc

SEQ ID NO: 154608 - DNA, 325 bp, Glycine max
actcttcctagctcttacactccttcctccctccatccataacaaatatatttgcagcactccaattctactgtgagagcccatcgacatttgtcaacgacaagaatgttctattagcttccactgcctattcgtgctccccatctttctccaaaaactttcccattcacagcttaaatatctttttctgttcacatctattaattacgtcctactccttccaatggatacttccaaaccacaatctgccaaacagctaatagaacatatacaacaccaccaacagccttttcattgcaagtacctcatcgaaagaagtacatgt

SEQ ID NO: 154609 - DNA, 375 bp, Glycine max
tatctaaactttgacacattagagacttagacttattttgaattttcaattgctaacgaatatattgtgcaaaatcttcttatgaaacacaatggattaatgcgacttacaatgcccatttttaaaacttatttgagaagacaccatcaggatatgaaacgaaagatcctttacattgttctcctccaatctaagattctaaaactttacttctacagaatactttgtctacattgaactttcaactcccaacttggactcatctggatggtgccaaggggatattaaatgcttgaacttatctttgccacttcaggtgtaatctatcttacttccttatatataaaaatcgagatccccttatttttatattca

SEQ ID NO: 154610 - DNA, 259 bp, Glycine max
  unsure (1)..(259): unsure at all n locations
ctatatatagtgaagagaggctcacccttatgcatccctgcgtgtcttaatcttaattaagactctcacccttcttaatctctctttgaaaatgaagacctcatatgcaacattgtgcatcatgcttactttgcttcttctaagtcagagtgagttgttgtgtatggcagcagtgacgtgtaacgcgttgcagctgagtgcatgtgccagcgccatcacgtnctcaactcctncttcagctctttgctgtacaaactga

SEQ ID NO: 154611 - DNA, 460 bp, Glycine max
  unsure (1)..(460): unsure at all n locations
tgcatggtgcttgacataatccgaaatttatcctggaagaacaatntcaattagtaactatttttaaagtgacaatttatggaaaaatattaacaaaatccattttgatttacttggcaaaagtagactccacctggtacatactctgctagtggttgtgcaggcgatagctgcattaggatgggcaataaatgtacagaaggacgtggacactctccctcctctggcaaaatggcataggggtgagaaacccgataaaaccaacgcagatagtcaagggtgtaatcccaaggacccttgggtggcacaacatcgcccatgttgaattagaagcctcatacctgagacactgcagtgggtggcatgggatgcattgaacatgtcanactgcctcaacaccctctttggaagataggtcacatgtctatcccgcacctaatgaagtagagaaaatgcctgt

SEQ ID NO: 154612 - DNA, 295 bp, Glycine max
  unsure (1)..(295): unsure at all n locations
attattaatctgtcgccattgaaaggtcgtataagtcggtgatggtataattcatagctcacaactcaatgcacacaacatttcaatgcactaatatattacaagtcaatacatactcaatttatcacatatattctatctcaatcacaatggtataatcccaaaatagcatgttatcacacctcatgaatcatacacactctacctatgaactatgcaatacacacaactactcaattgttttcaaaatcattttaactcgtcnggttcctacaatggatcccatcacaatact

SEQ ID NO: 154613 - DNA, 314 bp, Glycine max
  unsure (1)..(314): unsure at all n locations
ataatcaacttgcttggaccaatgagaaaactggggccaatgaagagggtgaggatgagggagaaacccatgttgtgactgccattactatacggccaaggttcccaccaacccaacaatgtcattgctcaacctttctccttacctaccacccagttattcacaaaggccattcctatatcaaccacaaaacccacctaccacacaatcaatgcttaacaccaccattatcacgaaccagaacaccaaccaaggaaggaatcttgcagcaaaagcctatagaattcaccctaattctggtgtnctatgctgac

SEQ ID NO: 154614 - DNA, 295 bp, Glycine max
acactgggatagtcatcatctacactatcgaagtgttgagattcagcccttaaggtaaccccactatattgcattgtacttttttcgtcttgtgctttaggtaaaatgaatacttgtttatattgtatccttgccaacttataacatttcttttatgcccatctactagctctcttaaacgttcagaagcattaccatccacaatgattgttttgttgaaccaatctacgagagtcttgtttactctttcaagacctgttctttcacatttttgatgactttcatcactgaacct

SEQ ID NO: 154615 - DNA, 468 bp, Glycine max
  unsure (1)..(468): unsure at all n locations
aggctgcagctaatatngtaggcttcttccttgtttcttcttgtcaaaaggtgccctcttacgaacaaagaggataggcttataggcataagtgtccctcacctgagaagtgcttcacaggcaaatgctcttccagtcattggagtcaatcttgtagaaagcataatactcctcctttgtgatctcctaaggctctgtcatccaaatggccttatccttcttnttgtagttgagaaaacaaagtcctctaaaggtttccccctcacgaaagatttttcctttcacagcaaactaatgttcaatttacgaatggtaaccggcagatctgaatgaatttccttaccttaggtgttcctatttttttgtcactaactaactctaaaactaatattctaattatccttaatttaactccccttcctaccgtcctaatggtaacctttttagacatggacttctctgtatcta

SEQ ID NO: 154616 - DNA, 438 bp, Glycine max
  unsure (1)..(438): unsure at all n locations
agcttattatgaccctctctgagaacattattcatttgttcgttggagatgaaaaaattagtgaaaatggtatgtgatgagagggagtttacatgtacaatttttccactaataaaatgttagtcgatcactccatctcattcaaaggtaaatggctattttttttttggctgttatcaatttatctatgccgctctttcgttattgttctttggtttcactgaattaatgctacttgttcgagcatcatgttaaccttccacaaaagattcaagaagaaaatggtgaactctacgctctgattgaatcttaacattntatttgatttgaattatttcagactcaatgcaagtccgtgcattgcagggatggcatggaaatcacatatagacaaaatcatatcaacatgacgttctttaatatgttgcattaaatgat

SEQ ID NO: 154617 - DNA, 470 bp, Glycine max
  unsure (1)..(470): unsure at all n locations
agcttgtgactctnggaaatntctttatttctattcacttaaaaagntgtgactnttgaacgaatcttcagaaacaagtcacttgaagaattgtgactttnggaaatgtatttttcaaaatcagtcactggtaatcgattaccattaaggtgtaatcgattacacatcaacatatatgactcttcattttgaattttgaaaattaaaacgtttagaaatactggtaatcgattacacaagttaaaaatatttaatcacaagttgtaactcttgaaatttgaaatcttaatgttttaaaacactggtaatcaattactaccttctggtaattgattagcagagagtaaaactctttggtaatgattttgtgaaaacttcttgtgcctactcaatgtttggaaaaactngnttgtacttatctnngatgagtcttccccttgttcttgaatctgagtcttgaatcttgatct

SEQ ID NO: 154618 - DNA, 416 bp, Glycine max
aggctctggccatcagaaccatctcattcttaagttcctctaccgttgaacatactatttggtcaagtaagtgcttttctgcatcaaactgatcaaatttgatcttctgatcatctatgtgcattatcagcttacccttccccatatacaccacacaattggcggttaacatgaatggacgacccaaaatcaaaggtgatttcaaatcctcttcaatgtctataacaacaaagtctgtaaggaaggcaaactgctgcaccttgactataacatacttaatcacaccttacaggcgtgttattgatctgtctgcaacaatttcctagagtattctagttgcatatatcaacattcaatttcctcacatgggagaggattaattatgttggcccaatcaatgggtcttccactgaaag

SEQ ID NO: 154619 - DNA, 251 bp, Glycine max
ttagaggatctccatgactactacaaaatcgcattcccttgtacttctttcttgatgtacttctcacttcacttcatgatctgagctctattatagaatttaggaatatttgtggggattatgccttttttttatatgactgtgctatatcttttgtaggcccatgtacatttggtggagagataaaagcaagacagtcactattgtgaagatatcactgtgttgcttctccatgggaagctgaaacataa

SEQ ID NO: 154620 - DNA, 397 bp, Glycine max
  unsure (1)..(397): unsure at all n locations
agctngccttgcccctggatatatttgattgactcatggncactatgaatgacaaatgccttgggataaagatagtgttgccatgttttcaaagctcgtactaaggcatacaactccttatcataagttgaatagttaagggtaggaccacttaacttttcactaaaataagcaattggatggccttcttgcatcaacacagccccaatcccaacatttgaagcatcacactcaatttcaaaagatttttgaaagtttggcaacgcaagtatgggggcattagttagctcttgcttaagaacattgaaagcttcttcttgtttctcttcccatttgaaaccaacatttttcttgagcacttcattgagaggtgctgccatgtgctaaaatccttcac

SEQ ID NO: 154621 - DNA, 425 bp, Glycine max
  unsure (1)..(425): unsure at all n locations
agcttagcgagacaacaactttngcatcttcaaatntttctccttcttacctagaattgaagtgaaatttacattaaattcatatggaaagcttctactgagcaaaaataaaaactaaacaagaaatatttgcaatcctaccaaaaagaaccataaatggggagaaatatatacatttttgaaaacttttctatacaaaagttagtcataaaagacgactaataggtacctctgcattgaaagcctcctaaaggactgtagtacgattagtcgttaggggtgtgtaagcgttatacttgggcctttttgggagaggctggcattnttctggcttgtgcctcttgccaactagtgtgatttggcttgaagcttcctctcgcttgcgcgcttttgtcagcttgcggacatcattctaacttgggcat

SEQ ID NO: 154622 - DNA, 458 bp, Glycine max
  unsure (1)..(458): unsure at all n locations
agcttatgcgcatatttcattactaacgttctcttgcccaagacattctattaaccgaaaaaaaaatgcacccatatacaatcaaggcagctttgttacctagattatttacacgtacttccaaggtgtatttgttacttacatcacacacatctccttggctaaattcacatacatgcatactccaagcattntggggtaccaaataatgcacatgtgcacatcttggtatttctaatacctatacatacacaaacttcatgatgaatcttgactatctacacaataaagtgctacatttcatgccttttttcaagtttttgctacctaaagccgcatgcaaattcaagcatattttcttttgtgactanaatgtatcaaatatatatatatttttgaatatgttctttacatacatcacatattatattattttgtgaacatttactacaaaatat

SEQ ID NO: 154623 - DNA, 379 bp, Glycine max
  unsure (1)..(379): unsure at all n locations
gaccgngatcttaatcactgagctgcagctttttaattaaattttatttgaaactgatgtcaatccaggagtgataacacacactactttgaaaaaacatttaaatgcctttaaatcattgatttgaaacaatatggtgcaagctatagatttatggtagtatcaacactggacatagttctcataacattcttttttggtatatcttactactaatatacttattctaaaacataactctcatgtcatcaattgtttaataccattagtccataatggagacattagctataactaattccaactgattcttcaatgattaattctttgctacatatcaagttcataatatgttattagtttggtcaataaaaaaacc

SEQ ID NO: 154624 - DNA, 318 bp, Glycine max
  unsure (1)..(318): unsure at all n locations
ttaagtcacctgacgcatgcaagctntaactcagatgtgcgaggaagctcatttgtattttgacactagatactgaattacacaagctctatagacactccaacgggcataacagcacagacggatgttatattaacgcgcatagcacgaagcgaggcctcaataacaactacggaaggtgactcgactttacaaacatctgaaagtccttcttagacgacgccaccacgcccattatttatatgaacacccagcttctttcaacaagacctgccactaggacataggagactaactatggtgtgaaaataaccacac

SEQ ID NO: 154625 - DNA, 369 bp, Glycine max
  unsure (1)..(369): unsure at all n locations
agcttgtggacatttatctacagtcacattattcttttatttagcaagattgtaacaaaaatgtgtcaaacctgttttaataaaaaaacttgcttttcaaattaactttgtaattttcgatcacctaaggttgacccaatcacactattaaacgcacactaatagaatcataatttacacacgattttatgtaacatatactagaaacggaaggaagaagaaccatgtgaatgtgtcaataatggtgaacctttaccttctcctacaacagtatttaactntgttcccatggaaaacaatagggtggaagtcaaatttagacgcatagcaataaaccaacccagttgcaaaatgcatacatgtacacat

SEQ ID NO: 154626 - DNA, 430 bp, Glycine max
  unsure (1)..(430): unsure at all n locations
gcttcatcagtggtatcggacacatgacttcttgttgtgctccttaaacctccattaattnttttttgctttaccttctcttccattgttgtttcttcatttttatccatgtatctcttcacatgtcttgtgctaaatgttgttaacatgattctttataatttccactgattgatcttgctatagaagcttgatttcattttctatggttcaaatttcttgttcatgttcttgaaccatgagttgtgttgagtttaggttcctttgagttttgtcttgctatttttttgtgctgaaccctaaaccataaaattcttacaaaataaagtagaagaaaacctanaaaatctagatngacttgttcacgtatttgtagtttgtcatagaagtcatgtctagtcatgaaacttgtcacataagaattcttatg

SEQ ID NO: 154627 - DNA, 367 bp, Glycine max
  unsure (1)..(367): unsure at all n locations
ttttacgtgtgtagagacataacatgtttaaattcttgttttctcatttacgactttaaagtcgcaagctatgttttatatgtttggtgtattttttgggtttatgactctgaagttgtaatctaatatttttttcgtctntaatgtgtaaagcataaatatttattttttgtttcaagcacaatgtttctttttgtttaaatattttaaaatagtgtaaataatattataatctttttatttagtaggacactctattttaccattctaaagacataagcgtgtattctttttttattgtttcatttacaactttaaacgcataaaatatgtntgttgctgctttattatattttgtttatgactt

SEQ ID NO: 154628 - DNA, 311 bp, Glycine max
catgcaacctctattaaagagaagttttgtttttacttggctatcatctttcattctcttttctttgccaaaagaattgtcaggactaaccgctgatctttttgttctctcttctaccttttccaaagaacgaagataactgcctaaattctttttgtctcccttccccttgtcaagaattcaaacgacaatctagaattttttgatcttccctttccataaacaaagtttaaaggacaaccgcctgaaattttttgtttcccatcacaaagttaaagactatccctgaaacttgctaaccatggaggatt

SEQ ID NO: 154629 - DNA, 405 bp, Glycine max
  unsure (1)..(405): unsure at all n locations
agcttgtaggattatggggtacccatcacttgtggtactangtggcggnccggcgatggtgcacaaccaggtttttcacatcaacaaatcgcgcataacccaaccattccctgtggccacctncaactgagctgacgtactcccacgtagcccatattctttgttctctcaacaccgggtccccatcaatccttccaagccttcccaacatccaattaattcaacatccanatcatcacaaactaacaaaccaagcanaacaaggcaaaggcagaaaactctgcccaaactcaaaccaaaatcacagctttttctcacttaaaaccccagtaacaatccttcgtccaattcgtaaccgtggacgaccgaaaattactggaggctctatacatagattcatttgac

SEQ ID NO: 154630 - DNA, 404 bp, Glycine max
  unsure (1)..(404): unsure at all n locations
ctgcagctcttgagaaagttcttttattctagagcttagctacacatacccctctaataactaagctcacctccttgagaagcttccttaagaagattcctaaagaagctagagcttagctacacatacctctctaatagctaagctcacctccttgagatgagaagctagagcttagctacacaccccctataatagctaagctcacccccatgacaaaatacatgaaaatacaaaaaaagatccctactacaaagactactcanaatgcctggaaatacaaggctaaaaccctatactactagaatggccaaatacaatgcccaaaagaagggaaaacctattctaatatctacaaagataagcgggctcatacttagcccatgggctcgaaatctacccta

SEQ ID NO: 154631 - DNA, 383 bp, Glycine max
  unsure (1)..(383): unsure at all n locations
agctngccgcccatgcgagctcattctcttctatgcgagcaaggttgcttcctccagaagcaacagccttctggaggaatcttctggagggcccaagtgggcctggttgctatttgcacccccatttttactaaatgcaccccctttctattttttttaattctttttccgtaacgttatgaaactttacaaatttcgtaacgatactcattttccttccgcaaggttacgaatccttacggattatgtatttactctcttttagctttcgaaggagttacggaaactcacagattgcgcaaaaacacctcttttatatttccgccacattacaaaatttcacggatcgcgcaagcctgctctcgttgatctctagacgtctc

SEQ ID NO: 154632 - DNA, 444 bp, Glycine max
  unsure (1)..(444): unsure at all n locations
agcttccatcacgctaaggtttgttatattaacgatctcttgnggtggtcgacaaaagtggggcttttgctcctacatatccttaattgcaatgagaaaatcaaacctacgtatttcttgcagaagtggtaaagttacatgttgattttatgcttttgaatggtccatgttaaccgataaaagcaaagaggaccgtttaaagaattggaccttaaaacggtttcaagtgatttttgcggacaaagcttgatttgtgagttgattttagccttagtttcactttggtttttagtcaattcattcaaggaaacttccaaagaaaaacgtccgattgattttttgattatttattcaaagatattttggtatnttatattattttcccctttcgattaactgagataaaacgcgaatgatcggttggatttattttatagtgataaa

SEQ ID NO: 154633 - DNA, 319 bp, Glycine max
agcttgaaccaaaatcggtgatagtgtttctcttaactgtgagtgaacgactagctgtgagtaataatctttgcatgaatctctgaattttagaatgaaatgtataactgagaacatgatgaaggccatgattgtacatatacaagctcttttgaccaaacaacttaccttgaatgataattgcatcctttgctccctttttgagctgaatgatgttgtaaaaaatttgaaccctaaactaaaataattatgtcttgataccttgtttagattttacgagagcatatggttcaaggcaaatttactctaaatttggggg

SEQ ID NO: 154634 - DNA, 363 bp, Glycine max
  unsure (1)..(363): unsure at all n locations
aaactttttagttggatctatacaattcacccaacggttgtaaagagtccaaggggctgaaagacgatgattatataatgcagaatnttgagaatattggtgtatgattgtgctaatcctaattgtattgagaatattgctacatgattgtgctgatcttaattgattctatttgtattaattctgattgtatgtattaattcttattggattttaattctattttgcatcttgatctcttgattattgggatcacttatttttaagatagatagtcgtatcatatatgacaggaaaagctataggagaaatcttagttatgtgcgtggatgaacctgtatatatatctatcgattggttcta

SEQ ID NO: 154635 - DNA, 425 bp, Glycine max
  unsure (1)..(425): unsure at all n locations
agcttgaagaactatccggaaaggccatactctaaacatggaactccattcattngaagttttactgcaattaaatcatgtaaaaggtggtatactatntttcctacctcgaccttttatccctataaaaatgtaaaaaggtttttgtcgaaaaggttttaacgaggcacacctaaacttatactatcaatgaatacatttttccaacaattatacttgtcatttttttttatagtaccctctcgaataccctttttggcagaggttgaactctacgataacaacatgtgttccctctcgaataacttatttgatcgaggatgaacttatntcgttaagcaatagttccctcttgaataatccctttggccgaggatgaaattatcacaatatatcgtaaagttccatcccgaatactctctttt

SEQ ID NO: 154636 - DNA, 476 bp, Glycine max
  unsure (1)..(476): unsure at all n locations
agcttgctgctaaatntgttcatacatctctatatattataatcgttgccccattaatcgcgttcttgtaagttagatggaaatgttgtgaatggcatgatgtantatatgttatgcggaatatcagttacagatgtatcagctgtatgtttttctgctgcattcaaacatttctgaacagaagctgcttgcttctcatttaaattgatattgttatttttgggttctagagtagtttttgatttacaatgttttcaactatgtatatcaatggtaaaatttgctgtcaattcttttcaaatgtntatgtacggaacaaaataggtattcagttaacttataccctagatnggatagaatagctaagaattttgtttggttagtttcactntaattagtaaactagtcaattacatgttaaatgtgggtccctgtcaattcaatagttgccatttacatatttcccttttggtctt

SEQ ID NO: 154637 - DNA, 364 bp, Glycine max
  unsure (1)..(364): unsure at all n locations
aactcagcttacctaggggaatatcctntcgtatattgtcatacatacatatatgtaatcgaatataacgattacatggagactaaaattatttatcaatcatatcacttgattaaatttcttcatcttagaactatatagaacaataaaagaattatatgaaatgatacaattaatagcatagagaataatcagacgagtccaatccaactctctcatgtgctaggattaagtgtgaacatttacatattcagttgagtttgacaatgtaagtccacttttaattcacatatggtgaccaactccccttgtagctagcctaagtaatcaatctcatgaaatgtgaacacttgttggagatatt

SEQ ID NO: 154638 - DNA, 323 bp, Glycine max
agctgcaaatgtattactggatgtttactttctacgcaagctttctgattgcggacttgcaagggacggaccagtcgctggtgatactcatgtctcaacagctgggagtgccacaccttattcaccatcatttgcatatctcatcggaatattctattggttgatctcacggaatattagtactggagactatcatgttggatttttctgtggatataatttcattacaaattacgaactttattgttaccactattgctggtgatacagcctcccatgtttattactacatttatattcttctgcatagattctaaacttaa

SEQ ID NO: 154639 - DNA, 418 bp, Glycine max
  unsure (1)..(418): unsure at all n locations
agctttgatctctgcaagggcggcagcttctgctgctctggcagcttccttcatttttcgggcagcaaccaacctgatttcagcagtttttatcatnagctttgtttgttcaatctcagatattgctttcatgacttctgatttagcagcttctcccattttcttgaaatgttcggcctcagaactcagccgctggagctctcttgtaatatccgaagggttatccaaatcggcatcctttgccactagcagttttagttttgtctggtttagctcttcctcaagagaacatatctttgaagaattctgagttaacctcttgcgcgttttctcaagtgatagtctttccttctctaacttcttattgagcgattcaacagaagcacgaacatcagcaatatcacttgtagttctgttc

SEQ ID NO: 154640 - DNA, 371 bp, Glycine max
  unsure (1)..(371): unsure at all n locations
atattggtcgattgtcccaattatcacaataaaatttccaaaagggtgtaaagaataattaattattgttttcccacttacgggagataaaagaaactcaatctacaacatgttgaagcattttatttttccttgcctctatgcatgtctccttacatgcatacattgagtgagacagaattctccccccgataatatagtgctgaatccatcgggagagtgattgttaaagataatgatgatgtaatgactccatcgagagagacatagagagagaggatgggagagagagagagtgattacgtccaaatgtagcnaagtttttaatgttcctgtctgttgcctggcaatgtcgtgtcgtgacgtccact

SEQ ID NO: 154641 - DNA, 441 bp, Glycine max
  unsure (1)..(441): unsure at all n locations
agctngctcaagaagcctaagtttattttaattcttatgngagncaaggaaccaagcatttaatattaatatgacgcatgggatttaaggaaaggaatgtccaaacatgccgggcgctgatgagctgtaacaatgaatataagaggtttgcatcaactgagcaacgtggagaagatgagtggatgtattggtagggcaactataataaacccaaataataaatgttccaacttccatcccctacccccaaattgngcagggaggggggaatgaaggtgagtagtgtaattggatggaatgaattttattgagttcatgtcatgccatctttatttacacccaaaccaacaatggaatatatatcgctcctttctcaatcaaacatacctactaaactacccttttgatactggaaaactatacaaaatgatataatggcta

SEQ ID NO: 154642 - DNA, 471 bp, Glycine max
  unsure (1)..(471): unsure at all n locations
agcttccgcttattagtgcacagttttctcattaatntagcatatcttggaatttgctttattgcatccaatagaggtatgtttacctctacttttctaaacgtttccaagatctctttctctgcctcttccatttttttgttggaaactgctcttggagggaatggaagagggggaatgtgctgcttctgcaaatcagaattacctgtggaagaagattcacctacacagaaattgttaggtagatttttgtcatcacctttttctggaatagagtgaagtttggcatgttcatttgcagatgaggaaggtgctacnggttgaggtccttgacactgctttcccgacctcaatgaaatggcactgacanttttggtggtttggacaacttgagaaagcagcttgtcagaattctgggattggtgtgattcattgagtactaattgtccctctgattggtaacctctaatg

SEQ ID NO: 154643 - DNA, 323 bp, Glycine max
  unsure (1)..(323): unsure at all n locations
cctaaccttctatcttctctgacatcaaaccatttagagacactcttcctccacaaaccttcctaagatctnttcaccaaacagactcaccactcttatctttcccttccaaaatatttctccatccactacatactttgacatcaaaatattactccaaagactatcattctagtgaaaaaaggttccacctccatttaacagatagaacttcattaaatagtgtaatgtctgtaacccccaaaccaccacaattcctatgactacaaaccttctcccaactcatccaacatattttctttacctcctcactcccaccccaa

SEQ ID NO: 154644 - DNA, 440 bp, Glycine max
  unsure (1)..(440): unsure at all n locations
agcttatatatatatatataaagaaaactttccattttcttggaggcacttgctgaccaaaacaatatctaggacatttgtggagcatcgactntttctgctagttaggaccaggaacagaaaaatattgtcccctttcgccaatgcatctcaagcacataggcactttgtcaaggtagttgcataatcaaccacctactttgattaattaatcaatgggtccaataagcaaaaggagtgatagaaactaacgtgtataaactgaacttataaattagaaactaacttgtagaagcaaaaggagtataaactaaatttcatttaatagcagtacatgcaccgtttacattcattgtcagcaaaatggtgtatntagataaataatttaattaaataaatatattagaaatattttgatttggagtttttcaaaataaaat

SEQ ID NO: 154645 - DNA, 462 bp, Glycine max
  unsure (1)..(462): unsure at all n locations
tcaagctttagggacccgacacgacagatttttgtttccttactttattacaagaaaattttgtgttcgtaatatgttacattggattatgaagtaagcatgtttatatgttatgttaacctacatttttatgtagtgctggatctatgagcattttctgagtgtgcatcagtgcgtcaccgatgatgcatatgagaagacgtctcctcgtgtctcttcggtgactgatgacgaaggctcatatgaacggaattacaggagcatcgtatcgggcatgttgtgatgctttgacggtcacagacgtgtgctggttgccttatagtgaccatngaggtgttagggggtttgagctgatttcattgttccatggtcagctgagatgggatcctatggtggtcataatttgaccggagagggtgttacgcccagttgggttcatctacagcatccctccgccgcctg

SEQ ID NO: 154646 - DNA, 388 bp, Glycine max
  unsure (1)..(388): unsure at all n locations
tagagcccggagaaggcctcaccttatgaccagaagtggtacaacaaaccaccaagaaagttaagttaatccaggaaaggatgaggactgctcagagtaggcagaaaagttattatgataagaggaggaaagatctggaatttgaggttggtgatcatgtattcttgagagtcactccatggaatggggttggtcaagcattgaaatcccgaaaactcacacctcgctttattggtcctttccaaattcttaagaaagttggccctgtggcataccatattgcactacccncgtctctttctaatcttcacaatatctttcatgtgtctcaactccattagtatatccgtgatccatctcatgtgactgaattggatgatgtacaagt

SEQ ID NO: 154647 - DNA, 310 bp, Glycine max
  unsure (1)..(310): unsure at all n locations
gaaaagccttataaatcgttatgttagaactataaggtgtgaccgccatggttactaccgatataagctntggttatcaacacgtcccccgggtggacgaatcaacccgtggtttccatgatcttccatgcccatgatgcatacttcaaatccaatgatgaatctgnctcctctaaatgcttctccaatgaaccatgcaggaattggttcttcaccttctatgctaagtccaccctcattccaacacgtttatgatcaacaacaccagcatcaacatcctcagtcttgtggactttctgtgcagactgag

SEQ ID NO: 154648 - DNA, 326 bp, Glycine max
tctcataccccagacaaaaacacgcagcagcactgaaggcgaatcttttatacatctggagaaaggacaaaccacaaagacgccatcaagacacaaactggtacacatatacaagaaagaaatataccttttgaagttatcgccagacatcgtagttattggtataatggaacgctactcgctatataacaaaataaaatataccaagggacgatcccgacattttttctaaaacaccaatcacctaatgcctcacgatccaaaaaaagggacccataatcgtctatatgctgtcaaccaccatgacaaagacggccagagtaatt

SEQ ID NO: 154649 - DNA, 433 bp, Glycine max
  unsure (1)..(433): unsure at all n locations
agcttcttcggataacatgattcttattatttacggatcaacttgatccggaagatgtgtatttatatattaatttatattaacagccaatcttaattttttaaaaatgctaaatattagatgaattgtgagaaaattgaaatttatttattaatttatattaacagtcaatgttaattctttaaaaatgctaaatattatataaattgtgagaaaatcgaaatttatttagtagttagaaaaaaccattaagaaaaaacattggctcattcttaaaatctaaatttaattagtagttagaaaacaaccattaagacaagcctcctgattatagacatttggtaaaaagcctcatgatgagtagttagaatgggtaagaaagccttggctcatttntgtaatgcactcacgtcctgaatatagacatttgata

SEQ ID NO: 154650 - DNA, 438 bp, Glycine max
  unsure (1)..(438): unsure at all n locations
agctnttctaatntattcttgttcctgtaagataaatgccattntaaacaaccatgcacatgcataaacaaaagcaagacagaatgttctttatggtataattaagtgaatatccatattaggtgccttctaggtagacctagataatgtgcattacaaatcccacgttattgatgataatattaatatattcaaagaaatttgcttgtgcatatttaaaataatttattttagaaattactttcttttacaacttacgagtattttatcactgtttttttttatttacataatttataagagtatgtacacaatatctatatagatctgtggcatagttgctagtatgcttatgcagatttttntatcgttaaattactgactccgaccaattcatatagctatacatttcttgagaataaaaggactgaataaata

SEQ ID NO: 154651 - DNA, 419 bp, Glycine max
  unsure (1)..(419): unsure at all n locations
agcttgtagaggctacaacaagaaagttgttctagagaatgaaaacggttaatatagataaatnggccatggtaaacaattacactatcataagtgtgttgctctattcctcattgcttttggttttcatgagtgcccaacaacatcatcatcgtattactttgcttttaacagaggccagacagctgcttctgcaaataagttgacatttgagaataaaatcatgtaatgtaattcatgcccctctattcatgtgaatacttaaatacacgcatgctttgtttgcaaatctctgggtagagggttgactgggtagttgttcaaaggctcttgataatattantttggacatcccaaaatcaataaattatttatctcgtcaagacaataatgtccctttatgtacacgtggaagtatc

SEQ ID NO: 154652 - DNA, 431 bp, Glycine max
  unsure (1)..(431): unsure at all n locations
agcttgtaccacatttcattacatagagttgacaaatagcanactacacgttagccacccatgaaaatggagaagcaacataactttcagttaaataccactatttgctagcttggctcacttcctagaatacattgacaaatactttaattataagttgatttattttatatagtaagttagcaaaaatgcttgaaatggtgtaaggttgattaaaaggagacaatgtgtcaataaaatttctaaatctagcttatctccactaaattnttggtgtttgccttggtacaatagaaagtcgtacagttgaacctgtttgaatttactaatccccaatgtttaatgcanatattagaaagtgatataacagtgtgataatatgtgatattttaccaaggctacatgattgaaataatgagtctgatatgtga

SEQ ID NO: 154653 - DNA, 448 bp, Glycine max
  unsure (1)..(448): unsure at all n locations
gcaagcttggccacaatcttatacacacagtttttattttttatgtctgnattcattaagggtttgtggatctttcaccttgggaattagggcgataaaggatgcattgcagtcctctggggaaatcccgttggcatgaaattcatcaaggaaccggatgatatatggcttgagtaacttccaaaattgttaatgaacttgaaatttatatccctccggtcctaggcttttctcacttccacaatcccatacagccgcccttatttcatcctcatgaaaactccccaccagcatatcgttgtgttgttgtccactgccatgaaatctgattcattaagatctagtctaccctgctcaggttcactgaatctattcaagaagaacctacgacttcctctttactcttatcggtctcttacccatgacccctcaaaaatactcctttgct

SEQ ID NO: 154654 - DNA, 419 bp, Glycine max
  unsure (1)..(419): unsure at all n locations
atccttaagtcacctgcngcatgcaagcttcttcctctttctttttgaaaatgagttcttctctgttcatatgagaaaggttattcttttctcactgcctaaatttcgaatttcgctgccggagataaaaaaaatcatcgatttgcaaagctcggtgtagaaaaggggggagggacatagaagaaagtaagaaactattgatgctggaatcacttgctgcaattttnttttattaagaagctatgcaacaaccaatttgcatatgtagatcccttttatcccaataagcagacactcaaaaactcatggatgatttccttcgggtttctaatattcttgattctttggtttctaaaactatgctctccatcaaagaccaatntcccctgttagaaagaacttctaattgacatgagtct

SEQ ID NO: 154655 - DNA, 429 bp, Glycine max
  unsure (1)..(429): unsure at all n locations
tttctccttnngccctcccattaattaaacattaagttaatttaattggacagctcatttgtgttcatgcacctaatttaccattaataacgatattaaccttaacgtgaatattgttacaccttcattaattgtttttcttgttgccgcattatccttcgtgtgatttgtagttacttgagcttacctattcatcctcactgaatcatagagtaagaaaatttaaaagtccactgcaagcaagtgtttgtgttgacccaataaaataaaataaaataaaagctagtgcttgtaaaatataaatagtaagggaaaatcttcaacgacatatgaagatcccaaacaaattataatcacaaaattaaattaaacatannatacctctcttatcctataagtccaacattccttaaacgtaaacaaaattct

SEQ ID NO: 154656 - DNA, 413 bp, Glycine max
actcacatgtctgttcccactgtgacagtgttacagtgaattccttttactggtgaaccaacttcttatatatggagaagggccccttttcgataaaaccttttattagattcgcattcatataacacacagtctgtgacaacttcttacgaaagtctcttctatgtgggcaagaaaactccttaaatcatgaaacaagcttcctgattgggtgtgacaaaaggattgatggaactcctggataaatcaagctctatattgatgctttcaagggacccccctgagtatgctatggaaagcatatctagtcttcttatagcaagcagatttgttaaaacctataccgaacctgcttaaggtgtggttagctgtggttaaacgccctttattttgatcctatgtgaggatactaa

SEQ ID NO: 154657 - DNA, 385 bp, Glycine max
catcaactaaaacagaagcatgtttcatatttgtgtcatttaattacaggttccttccatgctactagacccagatcacttgtcttggttcaagaaatttataaaattgaggacacacatactatctcataactgagttttcagggttttattcttaatcttttaagtagccacagaggggtgttagtcaacaagagtacataaaacaattattgaaaagtgaacaccaaactctcttcttcatgcctcctatgaacatggttacacagtgtaggccaccctactgagaccgtaaaaatcatgtacagcttaacacaatgaatggataaagctaacatacaagcattacatgcactaactaacaaatattaatactatgaaacaa

SEQ ID NO: 154658 - DNA, 336 bp, Glycine max
aaatgtcgtgaccttcaaaatgtcaacggcggtgctttcaaatacaccgccttaacttacgtgttgcgctacctacagaacgcctacccagagaacgttgttgaatgtgtcacgcgccatgcacatggcacattaaatggttacatatttacggaattaccaccgctacttctactacgacaggtttggcaagaacgatgtggatagcgcgtcctaaatggcttcttctgttgtggtattacgtaaaagcttttttcacctgatgggtcacacactcattcctatttaatgtgctatttaatcgcttaattcttcattgaggcttttttctaacag

SEQ ID NO: 154659 - DNA, 459 bp, Glycine max
  unsure (1)..(459): unsure at all n locations
agcttgttcagaaacgtgcattgtgtgtgttatacacaattcccgatacaccacaacaaaatggtgtatcagaaaggcgtaatagaactttaatggatatggttaggagtatgttaatcaattagactttacccgtatctttgtggatgtatgccttgaaaactgccatgtatttgttgaacagggttcctagtaaggcagttccaaagacatcttttgaactgtggacaaataggatacctattataaggcacctgtatgtntagggttgccaggcagaaataaggatttataatccgcaagatagaaaattggatgcaagaacaatcagtggatatttcatcggttatccagaaaagtcaaaggggtatactgtttattgcctaatcatagtataaaattgtcgaaactgaaatgtagggtcatgaaacggtgaatcatgggaacagtctacatagt

SEQ ID NO: 154660 - DNA, 423 bp, Glycine max
agctctctccgaatctgcgaatctgtctttatttaatattatatagacattaattaatttattactctcacatatataaaattcatcaaatacatgtacgtttcattagttactgaacttaatttccatatgcccagaagaagctgcattatgtaacttgccttgatggcatgaaaaaacttgcaggtgatcgactaatattgcatgcataatgagaaattatacactacgtactacaagagagacacgtctcccgaagtcctcattgactagcgcttctcaggaaataataaattagatgcattaatagctctagtatttcacatcaaatgatatatagatgtgttctaatttttacataactaagatatgttgtggtagcaagcttgatctttcacacggaactattatgaaactcttgta

SEQ ID NO: 154661 - DNA, 466 bp, Glycine max
  unsure (1)..(466): unsure at all n locations
agcttaagataaggttatggattgttgtggtttctcataggtcaagctacaaattgtgacaatgaagttggctcgagtattttcggtggaaagctccagttatctatttatggtccatggcctactcaatctttaataaatgaccaagttttacaaaaatcaaacttttgtttttctgaaggaaaaatcaacttattattcggctttgattttaacattgttactcttacgtatcttgcaacagcgcaaggggtccagctccaaaatctagttgtggataaatctaaaattcaaatggatcaagtgtcattataaaatagacagttatgattctaggaatcccttctaaattagtcaattttagactttggttatcacatcaaacttngtgttttggtttttttttttttataggcaatgtcattgtagattgtaattttcttacaaggatgtagtatttttttct

SEQ ID NO: 154662 - DNA, 299 bp, Glycine max
cgctctggagtacgacagtcaccgcttcatgagcgttgtacaccagcagcgcttcgaagccatcaagggatggtcgtttctccgggagcgacgcgtccagctcatggacgacgagtatactgatttccacgaggaaatatggcgccggcggtgggcaccactggttactcccatggccaatgttgatccagaaatagtacttgagttttacgccaatgcttggccaacagaggagggcgtgcgtgacatgagatcctgtgttatgggtcagtggatcccgttcgatgccgatgctatca

SEQ ID NO: 154663 - DNA, 453 bp, Glycine max
  unsure (1)..(453): unsure at all n locations
agctntgatgtttgtgttgaatgcattataggtaaacagaccaaaagcaagaaattaagtgcatataaggctacaaacgtcttggaattgatacatacggacatttgtgggtcatttcatacactttcatggaatggtcaacaatattttatcattcatagacggttactccagatattcatacttgtttcttatacatgaaaagtcacaatctctggatgtgttcaaaacatttaaagttgaagttgaaaatcaactcaacaaaagaataaagtgtgtcagatctgatcgtgatggtgaatactatggcagataagacggttcangtgaacaacctccggngccttttgccaggtacctagaggaatatggaatcgtcccacagtacatcatgccggngtcacctagcatgaatggtgtgngtgaaagacgaaacataacacttacngatat

SEQ ID NO: 154664 - DNA, 472 bp, Glycine max
  unsure (1)..(472): unsure at all n locations
agcttaactacgcttaaggttcattgctctttccaaaatacgtgttcaactaagcaatgcattgtagttcgggacaatcaagcaatgcgttaaagacatgttaatttatttgaataataaattctagcctttaataggaggcgtgattaatttgttttaataataaattaatggattctttgatgaccatttaaagatgtgattttacggtggatcattagttttaatcgtttatgataattgtaattaggttctttgattcttcaatgagttcctcagatttttccattagttntaattctttagaccaattatgagactaacccttagtataaagcttaactacacttaaggttcaatgccccttcgaaactatgtgttcaactaagcaatgcattaaagacatgttaatttaattgaataataaatgcgagtctttattanganggtgtgataattcattttaatatat

SEQ ID NO: 154665 - DNA, 361 bp, Glycine max
  unsure (1)..(361): unsure at all n locations
ctaaaggtggtgtttgtcattggaagtgtggtaaacagactntgtggtttatttagaggatggccttttggacaactgggcggtgggtaaggagaagggttgagtaatgacattgttgggttggtgggaaacttggccgtacaggaatggcagtcacagcatgggtttctccctcatcctcaccctctttatttgccccagtttcctcagtcgtcctagtaggatgaatcaaattgcctcttttcggacccacatcgatcctttcactggcgaagaccaaatccgcaaagcttttgagggtgcgtaccccaccattctttcatagtagagtaccgataatgtgtctaccatcatgattatc

SEQ ID NO: 154666 - DNA, 435 bp, Glycine max
  unsure (1)..(435): unsure at all n locations
ctgagctgcagctattactgtgatgatatactttttttttgtatatgaatgggtaaaataaattaggatataatacgtcaaataataattaaattgaagaaaattaatatattaagaatcaaccataaatactttcaatggattttttagtctaattatttattaaatattgttaatttaaaataacataatttgatttaatatatacatgttttgtgtcatgtaaatattaatattgtgtgatgtctatatgattcatgaggtgtgataacatgttgttttgggattataacattgtgcggtgctatctcggatgtttttgggacccatagcataaactaaaaagggacccctaaacaatggaaacgtatttcatagataattcatcaaaaaatttcatgaatntataaattcaaccatcataaaataatacac

SEQ ID NO: 154667 - DNA, 377 bp, Glycine max
caccacaattgggggacatatgagacccagaactggctaaatacttgacatacaatgacattggccctgatgcatttgatggatccggagcaacttgtgaaagccctattatgaccatcaaggaagaactaataatgaaacatatgaccattagagaaatgtcgctgaatgtatccatagtttgatcatcaaaggtcttatttgtggaatgactaataaacttgatggtttgaaatgagtggatgaactatatttatagtcaaaagactttaacgctaatggactgccggctaatatgttatgagaaaagatgagcattactatgttataacgaaacaaaactcataagaataaatatgcttttaacaaaaaaactc

SEQ ID NO: 154668 - DNA, 447 bp, Glycine max
  unsure (1)..(447): unsure at all n locations
tgacgcatgcaagctnngcttcctttgattactgagacttctttttacttcatttattgagcaacaaaggacgccaagtatctcaaagcggctaaccaaaggttgcatgttatcaagtaataatctccggacgaaattagggtatgacagttgcccctctttacttacctctcatcggagataagaggaaagcaaagataggacactgatttcgtccgtcctgccctttctgtgatgacgactctcgtctctaatccttctttttcattcaacacaaaacaaaatacaaacaacaacaagaacaacgaacataatatacatatacacatatacacatatttggcgaaggaaccgatccganaacaacagaataacgtgtttccaatcaccagaagctcgcgcctaataatggnggacacatgaacagcgctaggcaatgacattcat

SEQ ID NO: 154669 - DNA, 427 bp, Glycine max
  unsure (1)..(427): unsure at all n locations
actcagcttgtttggagtactcttaatcactccatgtagggcgactatttattattatggttcttgtccaatagtgcacccccatcgtgcattgggtgcttagcttcctatgatgattacaagttttcaacaatacaaccttgctcatgttcttttaggaggataatcaagtggcagatgtgtctactaaatcttggttttcgctacaatgtagcttttggattcttatgcatatgcatgttncctatttcttttattgattctgattgtggatgatgctatataaagggcgatcatgggtctaaatcaatccaatcaaattgggttggtctcagattcagatcttgacgacacaaaccaatctatttctccatattatatgagtgtagtggttatgtcttaacatgtaaaatatgctctgcactga

SEQ ID NO: 154670 - DNA, 185 bp, Glycine max
tcaatccaaaactggagtcttgacccatcacccaccttccatcgcaaactgcaaaagacgctgaagctgtgatgctggagaagaacagacctcaagaccttccaccatagagagaaatgagcactgtccctaccagaagatagggcataccaccctccatatttagatagcaagacaccagccca

SEQ ID NO: 154671 - DNA, 328 bp, Glycine max
  unsure (1)..(328): unsure at all n locations
cgaacgctggaggtagtttaaatctgacttgactatgaaatgggcacttgcagtcgacaaggacagtgcggacgacattgtctgtgaaaaatatggcattaacaaggagaaatggactcagttttgtcagacccgcagagacccctcatgggaggtatgtactttgtcattttanttgttttccacaacaaaatcacttcttataatttattgtaataatcattttcattaatgttatccttttgtaggatgtacggaaaaaggcacaagccttccataagcataacacttgcccccacgtatntgctcgtgggggttatgaatattt

SEQ ID NO: 154672 - DNA, 394 bp, Glycine max
agcttgcatccgctagaagagaattattatgtgattatgaattgactgaaaatgttagtcagtttgtcagattgattgcgaaggaatgcattgaccgtattccgctgagagtgtcatccttaaagtttgagagaaacgactatcatttagtactgaatttttcatgaatctttgaagtatggactgaatgcatgaaattaaggatgatgaaggccatgtttgattgtgatagccacttatccaacaaggtgaccatgtgcttgaatggtctatcccttgcacccagtttgagctgaatgaattattgattgattgattgaaccttaagcctatacaatgttatctcctgctaccttgtcttcggttggtggagagcatcatccacaacaagcct

SEQ ID NO: 154673 - DNA, 305 bp, Glycine max
  unsure (1)..(305): unsure at all n locations
acacattgtttgctagtcgatcactcacataaatttccattctcccncttagtgttgaatatatgcttgtcttaaaattaaggtgagtactcatgtgagttcttgatttaatccctatgtctctccacgctttggcatcaacaaagaagccaactgcgtaacatgtttgaagcatacagatacaagctatcatcgactcatcattcatggaanaatataaaccaaatcatgaagcaagaactatgaatagatcatatatatataaatcacatgatcaaataacatagattatatgcgttcaaaca

SEQ ID NO: 154674 - DNA, 283 bp, Glycine max
aggtttttttttattataacctaacggcaagacaaatgatgcatataagaatgagatagggaaaagaatgctaccaaacttatatggtcggaaagccggctacgtcagactacacactgctgagatctccctccttgaaagactgttacctgttaatcacaccggcaacaatcctgggatagaacctacacttagggccctctgccttatactctgtgaagaaagaaacaagaatatctctttgaaaaagatttcaatgagcctggaaaccttatggattcag

SEQ ID NO: 154675 - DNA, 131 bp, Glycine max
  unsure (1)..(131): unsure at all n locations
ttcttctgctgcagtaattgatgactgtgtctcaaggaggagtaaggaaatcacagagagctatacaaccctctagcatgttacaggattatgaatngatacatgattcagcaataggggaggaacgtgag

SEQ ID NO: 154676 - DNA, 175 bp, Glycine max
ccggatcttaagcaccgcggctgcagctggcagcccaatgatgctttggtgggagggaatgactgcgcggagcccatgaagttacttcgtgagggcggtctatgcggggaattcgtaagaccaaaccatgaacgtcaccataaagtgggcgacctgttgcgtgctgttgttcgtc

SEQ ID NO: 154677 - DNA, 444 bp, Glycine max
  unsure (1)..(444): unsure at all n locations
agctttggaaaatgatntctatacaaaatgtttgtcgnatgaaacaactaacaaactcccccaaatttacagttttgcttgtcctcaagcatggaaagaacagttcacttgtcctgaagtgacaaagacagtggccaatcaaaagaaaatagtgtttgattcatcaaggacatcaaccatatgaactgaatatcatggaatgcttaaatcaatcacttctcacaagcatgcagcttttcaaagataggagcacaagtattagagtcacagctaatataagctagtaagcatgacagaaatcaaggaaggatcatcaaccaaaacctcgcagtcattgtttcactcaaactcaagtggttaggcttattccatcatannaaaccaacacaagttccaacctttgcatttcatctcatatcatatagtaatgaacacacanaaatg

SEQ ID NO: 154678 - DNA, 300 bp, Glycine max
  unsure (1)..(300): unsure at all n locations
cagacaccactttatgagcgctgtacaccagcagcacttcgaagccatcaagggatggacgtttctccgggagcgacgcgtacatctcatggacgacgaatgtactgattttcatgatgaaatagggcgccggcggtgggcaccactggttactcctatggccaggtttgatccagaaatagtccttgagttttatgccaatgcttggccaacagaggagggcgtgcgtgacatgagatcctgngttaggggtcagtggatcccgttcgatgtctacgctatcggccaactcctgagata

SEQ ID NO: 154679 - DNA, 468 bp, Glycine max
  unsure (1)..(468): unsure at all n locations
agcttcctcggggccatttcctgcgaatgtcttctattggaaagttagttttaccaagaaatgctactcttaaaacaaaaatggcatacaacatacaaacatcaatgtaaatttagagtaaacttatgcacatacttctttacgaacgttcacttgcacaagacattcttataactaagaaaaatgcacccatgtacaaccaaggcacatccgttacctagattatttatatgtacttccaaggtgtatttgctacctacatcacatgcacttccttggctaaatttacatacatgcatactcaaagcatttggggtaccaaaattgcacacgtgcacattctggtatttctaatacctatgcatatancaaacttgtgaatgaatttggctatctacacaataaagtgatacatttcatgctttattcaagtatttntactacctanagccgcatgcaaaatcaagt

SEQ ID NO: 154680 - DNA, 400 bp, Glycine max
  unsure (1)..(400): unsure at all n locations
gtaccccacccatttttatattatacactggtaatgtgtctaccattattggggtcatctctttccccgtcattggaggtgccacttgagctgccaggtctctccatctttaggcgtattctttgaaagattcgtgcccttttttgcacatgttttgtagttgcatcctatccgaaaccatatcaaaattgtactgatactgcctaaggaaggcaaccattaggtccttccatgaatggactcangaaggttccaagctagtgtaccangtaacaactaccccagtaagactttcttggaaggaatgtatcagcaatttttcatcttttgcgtatgcccccatcttccgantatacgtctntagatggttcttggggcaagtagtccccttgtacttgtc

SEQ ID NO: 154681 - DNA, 471 bp, Glycine max
  unsure (1)..(471): unsure at all n locations
ctcagcttnttgggtnaaacatgggaccactcattgatttcaatttgtctttctagtcaaggtctaagagaccatacaagttttctagcgatttctaattatgtgggccattaagtctatcatatgctgacaatagccgagaagcccatgaatttcttctggggcggagtaagtgtccgccattgccttggccatggctaacaatcggggaagttcttgactcccgttcatggtaagagcagaccgatccatccacatggttgcctcttgtgtaaagagtcatcaccctttctctagcctcttttcgcgtatacttgggatactcgtcgcgacctatgctcggtgctgtggtanacctaactcttcttgtacttgcaatgatgctacatgttggctcctctcgataacgctgagacagctctttgaccttgcaggaactactcctttcaaacctgctatgtgctcgcttct

SEQ ID NO: 154682 - DNA, 453 bp, Glycine max
gcttatatagggattcttaattatattttatcttttttagtgcccaatgcataaactgatccttatattaattgttgatgcatatataactgtctcccagtacttaaactgaaagcgacagtggtagaaaagtttggagcttttctgtcatgagctctgattattggttgttttcagctacttgcagaaataagctttcttctttctatattcgtttgtgcttgcctcaaccacctgcagaaaataatgatgttttcatacaaaacaagactcaacatcaaaattctctataagttgaaataatatagcaattatatacgcatttaattgttaaggctttgttatctaggctcttagcattggtcttcagtctctaatagaataaactttaattgatttctagagcaatgccttctcaaagtgaacaacactagaagaaagaagaggagagtg

SEQ ID NO: 154683 - DNA, 405 bp, Glycine max
  unsure (1)..(405): unsure at all n locations
cgaaatctgaagttcaattttctaatgatcaaagtcagaaaaatgcacgtacatgacctctatgtatagcctaagtgcacacaaaattggagggaaatctgaatatctattctaatcttactagaatttgaaatataattctgtggagtcaacaattcacgtattatgattagtaaatattagctatgattcagcccactacatcaagatcaagtccatgattctncactatgtgtgcttatgtttcatgatgcatgataagcatgaaggacatgcacacagtgtgactatttatgtggcatggggtgaacaagataatctcacccccctctaaataaattgattggctctcctatcatcaattattccacaccactaatttactcagctgtaatacaaatacct

SEQ ID NO: 154684 - DNA, 325 bp, Glycine max
agttactgagtattatagaactagctttgtaggataactaagcctcttataagacctatttacatcaagctcaagcccattacacaaatgaacaaaaattaggaatttgtggaaattcacgctaaaggtgtgcgctaagccaggcagctcgcgctatgtccaatatctccttaggttggaattgggctaagctagacagctcgcgcttagcccactgaaggtgtgcgctaagcccaggcgtgttgttaacaatcttcaacgtgctccaattcggggtgctatgattgtctcgcttctttctttgatgagtagccattcctgatgc

SEQ ID NO: 154685 - DNA, 377 bp, Glycine max
gaacttagatactaagctgctatgcctgctcaaaatactcctgattgtaatatgttttatattgcttagaaccgatattacacatcatttattcagatttcctagaggaaataatgctgactactctctagtatttctaataaatcttttatattaaccggtgattggtgtaagtgatattcatgtttgattactcattatatgccaatataaaacaacacttgagatacacattcacaatgatgatgtagaataagtacttaccaactatctcattgatgattcgcttcgatgtaaaaagaaattcctttttcaatgaatgatcttgctcaatccatctatcatctccaagattatatgatgaccataaaatattg

SEQ ID NO: 154686 - DNA, 387 bp, Glycine max
agcttttcgcatagcttacggaattatctgttacctagccatggtagaagtctccacaaaggccattgcctccctcgcccagtattatgattaaccgttgaggtgctttacctttggggacttccagctatcacccatggtggaagaatttgaagagatcctacgatgtcctctagggggaaggaaaccatacctcttctcagggttctacccctcattagccagaatttctaacatagtccaaatctcggcgtaggaattagaccaccaaaagcaagtcgaacatggggtggttggaataccaagaaaatattcggaggcaaaagcaagaatcttggtaggtaaggcgagtgggccccgttcataaatattctcgcacttgtgatc

SEQ ID NO: 154687 - DNA, 368 bp, Glycine max
  unsure (1)..(368): unsure at all n locations
agcttcatgatgatgaatcaagtttttntcttttgttttgatgataacaacaatgatgacgaaaagccaaagagaatgatttcatgattgagtcaacaagttgcagatcaagattaatctcaagtttcatgagaagaaaccaagaagattctcgaatcaagagaagtttgatttcaagattcaagagaagatgaattcatgattcaagagaagaaatcaagaatacttcacaagggaagtattgaaaatatttctcaaaaaacagacatagcacagttttgtttttcaaaagagtttttttctcaaaattttctaagttaccagagtctttactctctgatgatcgattaccagcttcttggtatcga

SEQ ID NO: 154688 - DNA, 306 bp, Glycine max
acgccacacgcaccaccaccaccacaccacaccacacacaacacacacaccacatattctgaacacctatataggtagaaaaaaaaaaggattattaaaaataatagattctagataaatgagattttgaatgaaaaatacggaaaatatctataataagatcataattgaaggaaataaatagatttgtctaaaaataacagagctattatcattgaaagaggcatagagtctttataaaatagacaaaaaatggtaatataactgaatcctacttaaaatacattagtaactcacttacatgga

SEQ ID NO: 154689 - DNA, 290 bp, Glycine max
  unsure (1)..(290): unsure at all n locations
tggacactccatatggaaatgagcacgccatattcgtgataatatgagagtctaaccgtttgctgactattttatttcctaacagtcggatctcttctaacatattagtgggctgctacatgcattcatatgaatgacaatctcattccttgggaatcctttatgataataagccatagacatagcaataatttaatgtgcattattttatcttgcgttaagcgtgattgatttgaataanaaatacttacacaatctcatcttgagatacgtcagacatcaccccatga

SEQ ID NO: 154690 - DNA, 347 bp, Glycine max
  unsure (1)..(347): unsure at all n locations
agctncaagatgtctgatatacttatctcttatatacagagctcactatgaagtgnctatttgagaaactaattagataggttcgtcaataatctaagatcaactcgaacatactcatgtgataacttttgcactaactttgcggcgttggcttgtatctgttatgtaaagaagctttctatatgatatttactgttttgctgaaggtggaagataggcagtaaatcatctgccaaaacatatatgacaatatcggataaaactcgctgacttgttgaaatatgtctaagaatgtctatgctaaataaaagttttctatacttctctctttaagcattcatggaaac

SEQ ID NO: 154691 - DNA, 378 bp, Glycine max
  unsure (1)..(378): unsure at all n locations
agcttgaatcggacatccgtgtgatattttttaccatnngaannncncaagagcggccgntgggcaannncgagctnctcgatatgtgatttgcctgaatcggacatccgtgtgaaaagttataccagttgaatttctcaagagcttccgttgttcagatttgagcgtctcgatatgtgatttgcctgaatcggacatccgtgtgaaaagttatgaccatttgaatttctcaagaccttccgttgttcaatttcgagcctctcgacatattatgcgaccgaatcggacatccgtgtgaaaaggtatggccatttgaatttctcgagagttttcgatgtttaattcgagcgtatcgatatattataagcctgaatcgga

SEQ ID NO: 154692 - DNA, 434 bp, Glycine max
  unsure (1)..(434): unsure at all n locations
agcttataagaacacaattgccttaattatttccaaatatgcatgngaattaggacgcatcaacaagaatcaagccaaggctattgtgcaagcaatcaatggggcaaaacacaccaaatgattataatgatggatggctcaaattctcacaaaggtaaaatcatcactttcaaattgagctttcaaaactatcatgacttgtagagaagaatcaaggatttcaagtcacaaaatgtcaagaacttttattttcaaaacaattacccattttttgaacatatcctataattcaaagaanaacatgcaaagtcgtacgtgcacacaaaattgacccaaaatattaaactgaatatccgacgaaactaacaacattaacaaatttacacaactaacaaattaacaaaaaccacaaaactagcaaaaccaaagaacac

SEQ ID NO: 154693 - DNA, 429 bp, Glycine max
  unsure (1)..(429): unsure at all n locations
agccttgnggctgaaaatatataacagctctcaaagctctagtttgaggaccctctctctcctttttcgtttttagttttaggcttctcttattcttttagacattttttcattttggaagaataattctagttttcttcgttttctattgattaatggaaggctaagtctccagcgttgttttctcttgaggatcaagcacaactctttttgaggttctattattactattaaattatgatcagtttttcctcttcaacaattactctgtatttaatgctattaatccatgcatgcttagtgcttgattaattgtctctgcgcttaatttacgttcatgcttaatgaccgttcatgattaattgggtgtaggtgtgcttaatcacataatgaatgccttatgttaaatttcgcttagtaatttaaatt

SEQ ID NO: 154694 - DNA, 330 bp, Glycine max
tgtatcaacagtgaactcaagcttcgaatggccaaaagggacgatccgagggtggtaagtatgatattatagtacaatgttgaggcttgttaaaggtctaagatgagcatgtaccgaatagtgagtatgactgaagagaacatgtggggaatcattgaccagtataaagagaatctatatctagctgctagccatgagcaaagactggaggaagagcatgcaaaagtatcggctctgccagcggatagggaagcaagatagagagtgatagattctttacacagagaagccatgatgtggatggataggtttgctttcactctgaacggg

SEQ ID NO: 154695 - DNA, 449 bp, Glycine max
  unsure (1)..(449): unsure at all n locations
agctnttgtgtgaaaggatgtgactcttctcatttgtatttgaatntcaacgttcaaaggcactggtaatcgattaccaaaacattgtaatcgattacagctttttgaaattaattggaatgttgtaaattcaatttgaaaactttttcaaaacaattttgctactggtaatcgattacaacaatctggtaatcgattaccagagagtaaaaactctctggtaaacatgttttgagaaaaatcatgtgctattcaatttttgagaaaaacttttcatacttatcttgattgagtcttctcttgattcttgaatcttgagtcttgaatcttgatcttgattcttgagatcttgtaaccttgaatctgattcttgactctaaactntcttcttgagtcgtgaatcttcttgatttacttgagttgtctttgatagtcatcgatcacttgag

SEQ ID NO: 154696 - DNA, 380 bp, Glycine max
  unsure (1)..(380): unsure at all n locations
agcttctaatggttgaaaaanaacaatgtctttgcttccagcacccaaaacttgttgaatgctgctaggtgtacccagcatttttgttggtgcatccagcaaaaattctaaatgccaaaaatgcccctgagttttttttccttataaaagcttcttttttttcctgcgcttcacagctatcatttttgttcgttgtttttctctgtttttgtggttttcgtacgtcattatctcgggttcgttgtgaacggttaggtgtggtgaaggtgaaggtgcgttgcggtggtcggtgacggcaaacgagatacgcagaaggtggttgttgtgtcncggacgtacggatcaacttgatctgtaagagacttattcttagtatttga

SEQ ID NO: 154697 - DNA, 476 bp, Glycine max
  unsure (1)..(476): unsure at all n locations
agcttattatgccctctcccctcggtggtgatttcttcttcggcgaaggcgagatagttgttggcagtgatattattgaccagccctccgaaaccttctaccgagatatcatgggccacgtgggcctcgttcagaacttttactagcagagcccgatgaggctcggagctcatgagtaactccaacagcgagaccctggccggggttntgttgagctgctcgataaccttgaattcgctctgctgaattatacggaggaactcactggcttcctctagtgacacctcctttttaccatcctttttctccggaagaccttntgccggaatatctntattcgaagcgaggggtatttcatcatcttgttcctccaccacttttgctttccccttgacgtntgcgggttggactggtagatccaagggtgcanacacacgaccgctacnggtcacaccactcagtcccgtgatatttgt

SEQ ID NO: 154698 - DNA, 234 bp, Glycine max
ttttttctgggaaacatacctctaccaactgacggcttcttttaccttttctcctccaccttgagcccgtaacgaccactagtatgatgtttataggaagactgggtcccatttccacaaccttgtagacaccgccattgactgatgctgcggacatactttgcagcaacgatcataaactaatccgaaatgacctgctactgctaatgtaaacgtgatctagacactgcttta

SEQ ID NO: 154699 - DNA, 404 bp, Glycine max
  unsure (1)..(404): unsure at all n locations
agcttgccactggagctaacccatcaagtgccctagctcttttagggtggtgattcctaggctcttgaccttgacttgatagaacctctttntaattgaaggcttttgacttgatcccatgttttactaaagtgaaacaaaacccaacgtgaatcaaaactccgacatctatcatgggtggaatggatgaatgcatgaagaaatgcatatgatacagatgcaatttatgaacacgggagctcgggaaattgtctccttcttagatacaacgtcttgggtaacacattgcccaacgtatgtatttaagaaggtgacacagaccttctgttggattgccanagagaggggataagacgggacccacgcatgatgcatatgtgaaaggtacaacacggggatgtaca

SEQ ID NO: 154700 - DNA, 257 bp, Glycine max
  unsure (1)..(257): unsure at all n locations
acccgggctgagaggaacgaggagaacgatatatgtgtgcacgtgagctanacttaaaggggggcaattggagatggtgtgcttatgcctggcttgtgcatatgggataatttatntgtgtcatcgcccgatcgccacctattaccacatatgacgggtgccccataatccaataagcttggtgtgagatagcatggaagagtcagtcttcctactattatttgttgaccacacagttgtacctggagatatgtcac

SEQ ID NO: 154701 - DNA, 397 bp, Glycine max
  unsure (1)..(397): unsure at all n locations
agcttctgtgtcngttttttagctgaatggattannaaaatgcacgggaaaagcattagaaattgtagaggttagaagttagaagttataaccacccctttttgagaaaacattatttttttcttactaatatatgtgaacattaaaggaatcccaagttggcagtggtgaacttctgactaggcccaatgaatcattgagctttataatttcacaacttttattattaatttaaggaataaaaaaaggggtttgtagtggagttcaagtttgtaaaagatactctggagatattacactaatctttttctgagaggttgttagcaaaaatccagtttgtaagtttaaacaaaaaatttcttgggtctgggcatactcatttaatatactgggtcta

SEQ ID NO: 154702 - DNA, 254 bp, Glycine max
tcagctctagctacgccgggactcttcatttatcacccgttctgtctatagcgctcgcgcgcatccaaagggaggccccccaagctccggctccaaccacgactctgccggctagcaacgcccactttggcaccggttccaatgcgatgaggaactttcccccaatgccaactccagaattcaccccgatcccaatgacgtacgaagacctcttgctgtccctcattgccaaccagatggctgtgatatctctc

SEQ ID NO: 154703 - DNA, 437 bp, Glycine max
  unsure (1)..(437): unsure at all n locations
agctntccatgtctagtgattctatatttagaaaggtccaagttccagagagttttgagagattttgctgtgtgaagatctgtagagaccagagcttgaagaggaagttgttctgagatcatgagacgagtttgtgagtggttgtgagatcctagaggtgaaggagacatcctcatcacttgtatttttgcaatctttcatcttgttcttctctttgttgtaaaggaggcttcttggttatggaaatctaaaatcctctgttggatcttccctgtaggtacttgatgtaaatatttttctatctattcaatgatgttntatgtgttatctgtactactcagctttcattctagtatgcctttaccttgatcacgtagatgcatgctttattatggtcattcaacagtgaaaaatggtctgattttgatgaccttgat

SEQ ID NO: 154704 - DNA, 466 bp, Glycine max
  unsure (1)..(466): unsure at all n locations
agcttgttgagacacanctatttcttacttgttttattaagtgaaatttattgagacccacgaattatgagtaggagcaagattcacatttcatgagtctcaataaattccagccataagaagagtatgttaacatttttcaagattgacatataaaatggtggatgaatggtttattaattaacttgaattgcacgtgactttaattttacaggaagcagatgtactgtggcttagaagtccacttataaagttaaatccaagtaatgaactcacaatttcatgtaatgtcttaagtgatggacaaagtggaagttacctacacggtgggggaatattcttcttgaaagcaaatgccatttcccttgagttcttcaagtattggaaattgactaagtntatgtttccaaacgatcccgcagaagagtcttgtgtacacaataaaagcaggcaagatgcactgact

SEQ ID NO: 154705 - DNA, 265 bp, Glycine max
aaaagttatcggcgtttgatattgctcagagggtcaacattcaatttctagcgtctcgatatgttacgggactcaatcagacatccgagtaaaaagttatggtcgtttgtattggctcacagcgtcaacattcaatttcgagcgtctcgatatgttacgggactcaatcagacatccgagtaaaaagttatggtcgtttgtattggctcatagcttcaacattcaatttcaagcgtctcgatatgttacgggactcaatcagaca

SEQ ID NO: 154706 - DNA, 294 bp, Glycine max
tttatatctaggcaaggacggagagaccataccagttatctaacgatatctaattatgtgggccattaagtctatcatatgctgacaatatccgagaggcccatgaatctcttcaagggcggaatacgtgcttgcattgacttagcctggctacaattagggaccttaatgactcccgtgctaggtaagagcaaaccgatccattcacatggtagcctattggagtaagagtatatcacccttcctatagcctatttattccgtatacttgggcatactcatccgccactctat

SEQ ID NO: 154707 - DNA, 469 bp, Glycine max
  unsure (1)..(469): unsure at all n locations
agcctttatttatgaacactttggtctttctanaatatgtnnggcaacagacatggcaatggatggcagatgatatcatattcaatcatagaaaacaaggtgattttatatattctaaataaatattgtttactcataatcattatgtttattattttgctaatcacaggtattcgccttactgaaaaggaaacaattcatttatgcttaactgagattgagaatatgctacaagcgaacagaagaagcttgcgagattttccatccatgtcatacccaataggattagcacgaaaccaacatcataataatctgatccataatgaaatggcatatgacacagaaatgttagcagaacaatacaacacggcataccaattgctcacaagtactcacanattatgacacatntgatataggaattccttaatcacaatagtatatattactatctcgtaatatgtgaata

SEQ ID NO: 154708 - DNA, 443 bp, Glycine max
  unsure (1)..(443): unsure at all n locations
agcttagatatacaaagaactttngttgtttaaatcaaagttttagcttcaactttattttgatgaaattgggtctgcacaaatttagctaagggtatgatttttagctatgtcaaaatttgatagaatggtgtcataccctaatttcgtccggggacctttgcttgatgacatgcgaccttngtttggtccttgtaaggtgcttggcacccatcattaggcaatttgtgaaattccgggacatgccgaanaacaaaagataatattgatgcacaatccgtaaggttccgtgacacaccgaaaatcaaatggaagcatcgttgcataattagtgaggttccgtaacattccgtaagtcaaaaaggggatgattatgttatccgcanagttcccgtacattaccggaagaaacaagtattcgtacgaaattcgtaagttccgta

SEQ ID NO: 154709 - DNA, 399 bp, Glycine max
agcttccatcaggtttggcttccatccattttgagacataatcaacagcaaggagaatataaacaaaaccaaaagagacagggaaaggccccataaaatctataccccataatgcttagcatcactcttaattttatcattttgagctttagatgctaagggaggaaaaacagaagcaaccaaataattcacaatattagcaaaccaaggagtggggaaggaatcaaaaatactatacagaatgtacaaatggtcatctggaaaatcatcccgaatgggtgagtccttagaggcacgctcaatccaactcaggtggtcagccacgaagttctgtgcaccactccgatcacaaatttccaaatcaaactcttggagccaaagcatcaacctgatcaatct

SEQ ID NO: 154710 - DNA, 312 bp, Glycine max
  unsure (1)..(312): unsure at all n locations
tggagcaaactctcacctcacacaagtctataacatcaatctaaactgtctcaaactggatttacacctaaaattccaccgaatcagaatttgactcttcaacacctaattntgccctagaaatggctcttggttcactnatggtcatttgttttttttctccctagcacagtccaagctttctcataagtcctatatgacatttcaaactgngagtaactcactntaacctccatgtaccacagaatccagaattaaccttgcaactctcaaagcctcacgtcttttccactcataacaccacattctcac

SEQ ID NO: 154711 - DNA, 434 bp, Glycine max
  unsure (1)..(434): unsure at all n locations
aaccaagcctaaatagttcgattgaacacctgtacgacaagacaggatctgtggattcaagtaaaatgaccatatttcgttcacttcttcttcattgtccggatcgacagcaggaaaatagtcagtgaaccaggccgggccaacctctcgactaatgaatggagcatgttggggaagaaacttgtcaaagctcagaanaatcctcatgtactttaggaacagcttttgtgggttttgatctaaggtcttgggtgttaatcgaagtgctctctggccttcgatcgaacgattcgcaacttcttcagcataatcttgtgggattattaatcccatttcttgttcgaaagtggcattaagccacaattggagaagccacataggtccggatactaagaaggaagacccatccttcgatttcttcagatcatcacatg

SEQ ID NO: 154712 - DNA, 358 bp, Glycine max
taaagagggagagaagatttctaaagaagcttgagcttatctacacacagcctctctaataactaagctcaacttcttgaaaaaccttcttgagaagattcctagagaagctagagcttagctacccaacttctctaataactaagctcaccttcttgagatgagaagctagagcttatctacgcaccccttataatagctaagcccatccccatggccaaatacatgaaaatacaaaaaagtccctactacaaagagtactcaaaatgccctaaaatacgacgctgaaaccctatttactagaatggccagatacaaccctaaaagaatgaataacctatctaattttacaagatga

SEQ ID NO: 154713 - DNA, 437 bp, Glycine max
  unsure (1)..(437): unsure at all n locations
tacatacatgagaacgnntatgtttgcacggtataacttttatttcaattgaactatcgaattataaagggatatcaagtgtgctaatatacgagttgatgtaagtgggcaagtaaagctcgcaggttntgggttggctaaggtagcctataatagcactgaatntatctttctagaaaattgtcatacacaatcctaatgctggctgctcataattcatattatgtgtatgtatcttaccttctcaggcaacgaaatttaatgatgttaaatcaagcaaaggatctccatactaaatgtcccctaagggttgtcatgctctcgtatcatttgcttggagtaattcctacaaaggaatgaaatcattgtgttatatttaaatagaactatatctaacgaatatggaaattaaattaaacctttgaaaaaattacttt

SEQ ID NO: 154714 - DNA, 322 bp, Glycine max
caatttcgagaagatccaacggttaacgaaggctgggcagtgtgtttaccgaggcagcttcatgtagttttctctaaaagcttcattaagaggcttcctctaaaagcttcattaagaggcttctagaacactccagacatcttctcaaagatcccaacggtcagatcatggaaaagtgtcttttgaagttgtagaccaaatttcgagaagatccaacggttaacgaaggctgggaagcatttttaccgaggaagcttcatgtagctttctctagaagcttcattaagaggcttcctctagaagcttcctcgtggcttctttg

SEQ ID NO: 154715 - DNA, 415 bp, Glycine max
tcttgccagtgaaaggatctatgtgggtctgcttaatggtcaaattgatcatcctactaagacgactgagaaaactgttgcaaataaagagggtgaggatgagggagaaacccatgctgtgactgccattcctgtacggccaagtttcccaccaacccaacaatattcttactcagccaataacaaaccttctccttacccaccacccagttatccacaaaggccatccctaaatctaccacaaagtctgtctaccgcacttccaatgacgaacaccacctttagcacataccataaacaccaaccaagaagtgaattttgcaacgagaaagcctgtaaaattcaccccaattccagtgtcctatgctgacttgctcccatatctacttgataattcaatggtagccataaccct

SEQ ID NO: 154716 - DNA, 377 bp, Glycine max
ctcctctcacttcttctcctttgtcttccgctgcatctccatggtggaaaatcaccattaaaggacctcattgaagctcaaagatccagccttcatagaagctcaacaagcaagcttccatcaagtggtatcagagcacaagagcttcaagtaggtgctcctaaacctccattaatttttttgctttaccttctcttccattgttgattcttcatttttctccatgtatctcctcacatgtcttgtgataaatgttgctaacatgattctttagagttttcaccgattaaacttgctatagaagctagaaattgatttctatggttcaaatttcttgtcttgaaccatgaattgtgttgagtttaggctcctttgac

SEQ ID NO: 154717 - DNA, 465 bp, Glycine max
  unsure (1)..(465): unsure at all n locations
tctnttctagacctcgatcagtcatgtntcctggccgangncaactgtcanttttttcgatcaatatcggtgaataatatnttttttgccgagatagtctaatgttttccttgctgaataaatgggaacatgccagtttctgcccaaactaaaggtcggtcgagctcgaacaaaaaaacctagtcgacctacattgtaaattttttatgcaacaccaaaacaagaaatatcctctaccgtaaaaaaaatattatcggccaacgagcgttttaaaaaaaaattgctcaatgtcagctgaaaaatatcagtcggggctacttcacgaccgatgtcggctattgagttttcaattcaatccgtgaacgaaaattgcatgatgttggttaggaaaagctcgatccgcaacatcttgtgaagcctcttttttagacctcgatcggtcatgtttccttaccgatgtcgact

SEQ ID NO: 154718 - DNA, 449 bp, Glycine max
  unsure (1)..(449): unsure at all n locations
ctgcagcttgaatcccatcataatccttcacnatattgattcaagcttttaatgtggccttgttcgtgctcgtgcgcttagcacacttatgaaccgcttagcgcacattattgaatattggcttagtgcgtgcctttcttgcttagcgggtgaactaaaggggtgcgcttaatgagatgaagtggtgcacttancgaacctgtacagctcatcttcttccagagtcttcctcgcccttagctcatgagtgttgcgcttagcggacgctcgctaagccagcagattggcttagcgagaaagtgaaaaacaacacttttcaaagcttgcctaattaacctgaaattgagagaaaatgattattaaacacacaaaatggaagtactaagtatgtgttacctatacttaacagaaaatacttatgacactataaaataaccataatttggaag

SEQ ID NO: 154719 - DNA, 482 bp, Glycine max
  unsure (1)..(482): unsure at all n locations
agagcagagatgaatgctggtacaagnattattgatgtcttattatgtaagatatataagntcgcttaatttaaattccctttaattgatagtttgccaatccttcatgttttctgttatggctaatttcaacaatgttccaaatgagtggattaacaagcagaagtccaatcaacattggttgaaaaaggaaggggagaaattcatttttcctggtgggggtactatgttccctaatggtgttgctaaatatgtngatttaatgcaagatctgatccctgaaatgaaagatggaaccattcgaactgccatttatactagatgtggagtgaggggtnntgttttccttttntctttntattatatngggaatggcttgcaaaataaccattctcaaagttccttcattactnnagttaatacacatgctgattcantttagttgtgggttttaactgctgcangaatatantttaaaatca

SEQ ID NO: 154720 - DNA, 358 bp, Glycine max
  unsure (1)..(358): unsure at all n locations
tgtatgatattacatgatgcctgctttaatttaattttggtttggttagtttctctatttggagatttcattgatgtcacttgggaaaatatgatatgatgacatgacagagttattatcacttttgctctgtttatgagattttagaataatgaagtattcaatttatgttcttaatgtaaggtgtgaattaatctttgttccttgcaatgtttcaagtctttctttattcatcatcccttccattngggtggttttcaggatatacttgaatgcccggtctgagaatcatggatatngccttggctgttcgttttgtcttatcatcttcatagcagcctcacaacgaacggaccct

SEQ ID NO: 154721 - DNA, 182 bp, Glycine max
  unsure (1)..(182): unsure at all n locations
cccctgatgtccaaaaatatcatatctttctaaagggttnntcttcattctctanaggaagtggcaaaagattggctatactacctcgctcccaggtctattttcagctgggatgaccttaagaaggtgttcttggagaaattcttccctgcatctangatcactgccatcaaaaaagacat

SEQ ID NO: 154722 - DNA, 353 bp, Glycine max
tgatacccatgttcagagcgtatatgtgttatgaaatgcagcttcttcaagaagaaatgtaaatgctgattgtgttaggtagtttgttggacgataaaatagggattgaatcttcattctgtatcatttgtttggcgtagtatttgaacatattgatttggaggtgttagcatgtttggaagttgaatcttcaattggaggttgaatatgtttggaactaatatttaatttgaacatttatgcgagaatgaatgtaaactaaagctttgatataatgaaatggtgttgtcatggtacttattaagccaatgtgactacactatattagtaacttgttattaattgcataccta

SEQ ID NO: 154723 - DNA, 414 bp, Glycine max
  unsure (1)..(414): unsure at all n locations
agcttatcccatgcttctttggcttgccgtgcgttttatatcttctcaaatggatcttcatccaccgattgatnaatgagaaagagagctttcttggctctctttcttgactccttcaacgtctcctttacaccttggcttagcgaggcttcatcttgctcctcgaagccattctctatgatatcccacacatcttgagctcctagtagcgccttcatcttgatactccaattatcatagttgttctttgtgagcatcggcatttggaaaggaaaacctccattcgccatcttttgaggatcttgaagctctgataccaatttgttggaaaataacgctttttatgtntaggaaaagtgnttangaatattggagactntgaatagaaacttgataggaaggagaattctttat

SEQ ID NO: 154724 - DNA, 222 bp, Glycine max
  unsure (1)..(222): unsure at all n locations
gactaaatcacatacttcattcgtttcgaatttatttaattcatcatgcatagctaacaatcaatactcatcattcaatgcttcatctatgtttctaggtttaattngagaaacaaaagccatgttatagcatagatttctaagtctagagcgagtggatactcccttggatatttcacctatgatgttgtccatggagagatctctttgtggttttcattt

SEQ ID NO: 154725 - DNA, 443 bp, Glycine max
  unsure (1)..(443): unsure at all n locations
agcttgttagtggntaattcatctcccctcttatgttattgttgtcacttgttcaacagtcatatgaaagatagatatatttagacatttattgaattggtctttgctacaagggagattgatgaaatgggcaacaaaattaagtgccttttaaaaaatttatgttcctttgcatgcggntaaaagtaaggtatgagctgattttttggctgaacattgatgtgtagaaattgaggatgttgtttttgaaatgaataactatattggtttacaaccttgtgttttaatgtttaatggatctaatacaagggatgacactagagtaggaattaacgttacagatccctaaggaaaggtgtatcgattggttaactggattgcagcaattcaaccaataatcaagtcgaatatgaagcattaattaccatgggagctcaatatgt

SEQ ID NO: 154726 - DNA, 478 bp, Glycine max
  unsure (1)..(478): unsure at all n locations
ntagacaacttggtgtatcaattatgataaggttataatcgattattacagagagttttgccttctaaagaaacttttctaacttaganaattttcttctcacttactcatgatgatgcatgatgcataaaagatatgatatggactaagatgtaccattcaatataacaaccaatacaaatgccacttaagggagtcgggcatgttaaagaacaaacatcttcaagctttagtctacatattggtcatgttgctccccttatctctagcaatctcccccctccccttttgcctttgatgatgccaaacttgaatatgaaattgagtgcatttggagggtttgagtctcgagattagagaacttactttcttagtcaatccttgaaagtcttaacacttaagagaagatcaatntatatcatcatcatcatatatcttactatataattctactgatattaatgcaatataatgaagt

SEQ ID NO: 154727 - DNA, 408 bp, Glycine max
agcttgtcgtgatggctaactgctcaaggtcctattattgtatgggttggtaaattcttggatgggttggtaaattcctagataggttaaggcctttgcaagccttactgaggtaagcaactacccacactcatccattattttttataaaaccctacttcctatgtagggttaatttgaatctccccaaatggttaaatcatagagtacgactatattaaggaatgtgcttaggttaattgctcgagaggggaaatcttccagaagtaaagagtcagcatgacataacatgatagatagacatgtgcattgataattatgacttcagaatgatgtgctacttgattgttagacaaatgtggcctcagttatcttaagaaggggtgaattaatttcccattaacaaac

SEQ ID NO: 154728 - DNA, 378 bp, Glycine max
  unsure (1)..(378): unsure at all n locations
ntgggaatcgattacaagtattggggaatctattacacaagtttttattgattngagaatgtgtaaacacaagttgtaactcttgaaattcgaaatcttaacgttctaagacattggtaatcgattactacctcttggtaatcgactaccagagagtaaaactctttggtatcgatcttatgaaaacttcttgtgcaactcaatgttgtgaaaaactttgtaggacttatcttgattgagtcttctctcgattctcgaatcttgagtctcgaatcttgatcttgattattcttgaatcttgaatcttgaaacttgatcttgaaacttgattcttgaatctttttgaatatgcttaactcttgnatctttggcatcatc

SEQ ID NO: 154729 - DNA, 274 bp, Glycine max
aactaaattagacctagctgatctgtcaagctttatttcattcaagaaagtctacactaatttagtttactttttatttcgaaattttgaacttctgatccctatatcttcgttgctagtaatttctttttgtctaacatttcgctttttttatttctgagcaagttttatcttttcatcccttgagaaatagattttaaaatttctcggtattttctacatcttcaacttccggactggcaaaaagttttaagagatgagttatagaaaagaa

SEQ ID NO: 154730 - DNA, 429 bp, Glycine max
  unsure (1)..(429): unsure at all n locations
ggtatgtgttgatataacttttgttnatttattacccncaanctcaacaaaagaggacttgtgaagtaaacgatcactctaaactttattttaccatcataaaatgagattacggcataaacgatcggtcgaaactcattttttacaatgataaaatgggattactacacaaacgatcggtgaaacttgctttacacaagaaatgagattactgatggtagaagaatgagatgaagatgtgaaaagcaatataggggacctctaagggtgcatagagcgaattcaatactttaaaataaaagttaaccagttgacaaacaaagaacggtgaagaacgatgtatgaattgaacacggctgcgatttggaatcgcctcaaccctcgtttttcttcctctttctcctttntcttcttaatttcactaaatcc

SEQ ID NO: 154731 - DNA, 293 bp, Glycine max
  unsure (1)..(293): unsure at all n locations
gagtatgacagtcaccgctttaagagcgctatacaccaacagcgctttgaggccatcanaggatggtcggttctccgggagcgacgcgttcatctcanggacgacgagtataccgatttccaccaggagataagtcgccggcggtgggcatcactacttacccccatggccaagttcgatccagaaatagtcctcgaattntatgccaatgcttggccaacagaggagggcgtgcgtgacatgangtcctgtgtgaggggtcagcggatcccagttgatgcagatgctatcgg

SEQ ID NO: 154732 - DNA, 436 bp, Glycine max
  unsure (1)..(436): unsure at all n locations
gcagctgcatcatgatgacagacaaccagagtctttgcctttgacagaatggtctcgtcaggttcaacttccacctcagtggactcttcatcgtgctcaatcaccactttataggacctcacactgagtgtgagacgtggccgaggagccttcagctcaaaaagcagggagttcttctttctggggtgctgctgcctttcttgtctgaaaagactcaagggtgttcttgttaactgaaggctngccatcttcagccttccacaaagccagatagatgtggtggatcaagggataagacttgtggcctttttttttcaaggggtaaatcccccaacatatgtaacatgttagttttcataaataaaaattattatataaatattttaaatggtaatgttatcaattaanaattaactcttacgttaatatggataac

SEQ ID NO: 154733 - DNA, 464 bp, Glycine max
  unsure (1)..(464): unsure at all n locations
tagagncaccagccgcatgcaagcttcctcgggccattcctgcgaaggcaaacattatttaagntatttttaccagtgggacattactctttaaaagcaaaatggcatataacctcctcccataaatacgaccatcaatgtaaatntaaagcaagcttatgtgcatatttccttacaaacgttctcttgcacaagacattctattaaccgaanaaaatgcacccatatacaatcaaggcagcttcgttacctagattatgtacacgtacttccaaggtgtatttgttactcacatcacacacatctncttggctaaattcatatacatgcgtactcaaagcattttggggtaccaaaaattgcacatgtgcacatcttggtattcctaatacctatacatacacaaactgtatgatgaaacttgactatctacacaatagggcgctacatgtcatgctcttttc

SEQ ID NO: 154734 - DNA, 416 bp, Glycine max
gtgttgtgggggagaagtgaagaatctaaagcatactttctctatgatctcttatccaacaaagtggtggtaagcagaggtgttgtttttgaagaaaatgatggttggaattgggggatcagcattaaagaagcaaaaattgattttcttaagtgggaaaaaatcaacattgatgaaagtggagaataagttgaagaaggagtcgagcatgacggggaagaagttgaagaaggagccgagaatgaaagggtagaagagagcacaaaagttagagaaaataacacacaattaggtgctcaggggaggaatcgaagcgaaccactttggatgacagattatgtaactggagagggattgtcacaagaagaaaatgagcacaatctggttttgttacttaaaatcaaatccaacactat

SEQ ID NO: 154735 - DNA, 473 bp, Glycine max
  unsure (1)..(473): unsure at all n locations
aagtcacctgcngcatgcaagctngcatcttcatcctcatcatctcttaatttttgtttgaactgaaatcttgcttangggttcctttttatgaactcggcccccatggttgcctttgggagaaggcaaccatggtgtagtgaacctccaattcattgcatattaaaaaaataagttttaaggctttttaacaaactattttgtgaagatgtggcattttcatttgcatgcatgttttcttcccttatttttgctttgtttttgtcttggaagaaatcctaatacaaatgagacactatcaaatttttcttaaatttttaaaaaaaagctttgattntcaaaatttggggctatgagaagggagaggttggctggcagactatgttctctagagtagtctcactgattcaagtctataataaaatctacctattggattttcattaaatttgtcttggtntagtctaaataca

SEQ ID NO: 154736 - DNA, 332 bp, Glycine max
  unsure (1)..(332): unsure at all n locations
tcttcagactatcatcgaaggcaactatgcgcttattcctggccctcaatctcggatccttgatctccacaatcttcagaggcagcacatattcaaaatcgccagcttcaaatacacacagagagagattagggttggaggttcgagaaaaaagcgatatacggttcaatcggtggaataacttactacaagcgactatgtcttgggcatgtgatgaacacggcttggccattgcgcgtggaggagcggttctaggagggtttacngatagaatccaattcatcaaggaggaatggttgaagcagcggttcgaaatggcgagaagcactgaa

SEQ ID NO: 154737 - DNA, 416 bp, Glycine max
  unsure (1)..(416): unsure at all n locations
ctgcacgcatgcaagctngcctcanagaggtccaggaaggacaaggcattcgaaggaactatttcctctcctgagtatgacagtcaccgctttaggagcgctgtacaccagcagcgcttcgaggccatcaagggatggtcgtttctccgggagcgacgcgtccagctcagggacgaccagtatactgatttccaagaggaaatanggcgccggcggtgggcatcactggttactcccatggccaagtttgatccagaaatagtccttgagttttatgccaatgcttggccaacggaggagggcgtgcgtgacatgagatcctgtgtaaggggtcagtggatcccgtttgatgccgacgctatcggccaactcctatgatatncgttggtgttggaagacggccaggaatgtgagta

SEQ ID NO: 154738 - DNA, 414 bp, Glycine max
  unsure (1)..(414): unsure at all n locations
tgcagccgaatgatggctcgagttatgttcgggaacgggtacgaacctcttatgggtttangcaaagacaacggcggcataactagcctgataaatgccaaaggaaatcgtgggaagtatgggttaagctataagcccactcacgcagatataaagagaagcatcgcgggaaggaataacggtagtcaaaactcgcggttgagacaagaaggtgaaggaagcccaccctgccacataagtaggagctttataagcgtgggtctgggggacgaaggtcaagtggttgcgatatacgaagatggtgttccgagtacattgtgattggtacgaccatgccctcctgatttccagctgggaaatggcgatttgaagaacgccccggcttttacgcgacgagcataatgtaaacgttta

SEQ ID NO: 154739 - DNA, 399 bp, Glycine max
  unsure (1)..(399): unsure at all n locations
gaatgaactagttccgccccggagtacgacagtcaccgctttaggagcgttgtacaccaacagcgcttcgaagccatcaagggatggtcgtttctccgggagcgacgcgtccagctcagggacgacgagtatactgattttcaggaggaaatagggcgccggcggtgggcaccactggttactcctatggccaagtttgatccagaaatagtccttgaattntatgccaatgcttggccaacagaggagggcgtgcgtgacatgagatcctgggttaggggtcagtggatcccgttcgatgccgacgctatcagccagctcctgtgatatccgatggtgttggaagacggccacgaatgcgagtatggccagaggaggaaccggtctgatgggttcgat

SEQ ID NO: 154740 - DNA, 430 bp, Glycine max
  unsure (1)..(430): unsure at all n locations
agctttgcaaatgnaagcatttaagtctatctattgggngcatatatactctncattaattagttttatcaacaaagtgtaccataattctatttaatggatatccatgtagggagtgtttgtagcctataaggtgtctatacagggtatgtctataaaggatatgaagcataaggtgaaccttgtgtgtattcaaaaaacaaaaaaggagtctttttggtaagctcatctgccaatctatgtggggagattcctatgtgtcttcggattttgttccttcaattcaagcatcaagtggattgctgtgcttgtggaataactcacattttcacgtggagagaacggtaagggtagaaatttctaatgctggaacggaagtgggaaaatagatcagtggatcgattctaatgctatgcccttggattactgg

SEQ ID NO: 154741 - DNA, 312 bp, Glycine max
ttcctactcaaagatcttcacagtgtggtgtatatttagaatgcctcaaccttgttcttcgtaactttcaaaaatgcctctaaagctctcaagaagacattctagtgggctgcacatagctaatacacttttggagcaagtcggttcactttcaagttgtcatgatatgatagtagacataaccattctgaggctctcattctagagagcctttttaatggcattctgtaggccatcaaattgtcattctaatgttgcttagaatgaatcatactttgatgacttccttgattagctcatattgatatctca

SEQ ID NO: 154742 - DNA, 388 bp, Glycine max
atgactttcagccaaacataagagccttgggacagtcataagctactttcacatgcttaatcaaacatctttaattttttggtttaaatacttaatgataagatgagcctaaataagcctgatagaagctcttccaaatacttccttagtcagttagtctccttttaccaaagggaatttggaactcatctatggtcttgcaacctccatctactggcctcggataaccgaatgcctgctgccgcataccgtatggtttacttccacgtgcacagtaaaagataagagaaaggagttgctgtaacattttctcatgaaaatataccacataattttatgttaatacgggttaatgatatacaatcatctcaaaaataataaaatatga

SEQ ID NO: 154743 - DNA, 418 bp, Glycine max
  unsure (1)..(418): unsure at all n locations
caagcttggagtntccaagtgcctattcgncttcttctttagtctcagtcttcttctggcttcaattcatcagtgggctttccttctgtgtccagcatcttgggatgttcccagcctttgatgacagctttccaagttctgctatccagtgatttgaggaaggccaccatccttgctttccagtattcatagttggttccatctaggattggtggtctgttcactggtcctccttctttctccatgttcatcagaatttatctccctagatctcactctgtgatttcgagtgttggctctgataccaattgaaattctgataccaggggacagatgtcgtacgggatgtcacgacatcacgcttcagaacatgcagattatatgtgtcggtntgaacagattaaacaagtaaattaca

SEQ ID NO: 154744 - DNA, 278 bp, Glycine max
  unsure (1)..(278): unsure at all n locations
tacaaactcaagctgggaattaatacgatccatcacataggcctagtctngactgggttctctaccatttaacatagngaagccaacatatttccctatattcgtggtgtggacaaatacagtaataaaggagaactggggaatcttcctattagaaatattctttgacccccatgaataaagactcttgaagattgatttttcaacctgaggctagacagaattgttaaatagtatccttcaccaatcttacttgaacacaaatagctttcacaaaa

SEQ ID NO: 154745 - DNA, 439 bp, Glycine max
  unsure (1)..(439): unsure at all n locations
acccgctgnctcatgcttgaccaatccttgtgttcatgggatgattttcatcttctctggccnatacctcatcgataaaaagcgtttaaatcttctctcctaatttaagaccttaagcaatttttttcctgtttatagctatatcctttacttatgtactaaaatcgaacaccatgttaactaattcataataatttataatttatatactcaatctattaagtaagaatagtctattaatattatatatagcgaattgaaaaattagttaagactgataacaaaactctattatttaaatttgaaaaactaaattaaaatcatattaagatgattcttatttgtaactgcgaaaatattttcttgatggagtgaanatatttattcaatagtgtataaatatttgagcgagattacagtaaaagtgatcagatcatat

SEQ ID NO: 154746 - DNA, 490 bp, Glycine max
  unsure (1)..(490): unsure at all n locations
tatggcatcaagtngatagagacgaccgagtagatttcatctatgattttgtgttangcgaaattaatgtacaccatgcaatggttgacgtgaataggataaaatataataattactgagtttatggaattgcaactaccattctataccagtgtcagaaatggaccacaccgtaccagcatagttataacacttacacatgaagatgccaatttcaattgcagcagtacaatccaaccggtaatgaaattctagaaaaattgttaattggtgatcaatgaaactactccctcctttcttatttatcagacttaattacttaatttattaagaataaaaaaaataattaatttaattgataacaaaatatcctaaatttatatttttttttctttcaaaattaccatcggcattaatatatatatatatatatatatatatatattattagntagtacaattaaattataaatatttagtctaaaaatag

SEQ ID NO: 154747 - DNA, 379 bp, Glycine max
  unsure (1)..(379): unsure at all n locations
gacgttacttttaaagcatacatggcatataacctcctcccataaatacaaacatcaatgtaaattagagcaagcttatgcgcatattttcttacaaacgttctcttgcacaagacattctataaccgaaaaaaatgacccatatacaatcaaggcagcttcgctacctagaatatttacacgtacttccaaggcgtatttgttacttacatcatacacatcttcttggctaaattcacatacatgcatactcatagcattttggggaaccaaaaattgcacatgtacacctcttggatttctaatacctatacatacacaaactctatgatgaatctngactatctacacaataaggtgctacatttcatactctttt

SEQ ID NO: 154748 - DNA, 111 bp, Glycine max
  unsure (1)..(111): unsure at all n locations
ataacaagcatagattcaaaaggtactaggttgcctcctagtagcgcttctttaacgtcttgagctggacgcctgatgacttgtcngtcacggacctagtacattgcttac

SEQ ID NO: 154749 - DNA, 480 bp, Glycine max
  unsure (1)..(480): unsure at all n locations
ccccaccccataggctgataatctaaccaacaatccctcactacctttttaaattgcttggtcattaaccatccatcataaaccttaaaaggtttagggccccaatcaatgcatttagacccgtacttgagacaaatttgacaatgaaagttggcaaaatggccaccaccacctctaccagagccaccaccactgcgtccagcactgcgatcaggaaaaccgccacgaccattgccacggccatacaatcctcgagaaccaccaggatgaccagaattgtaggaatttttatgcgaatagccttgagtgtagttcaaagacggagaattaagcacccgagcttctttactgtagcgagcaagacgagtnttatgaccgtaaagcaaggcctcaatctcggcgatagacggagtacgcttattgctctcaattacagagattatcaacgcataatcggacnggagtccttcaagaagcacg

SEQ ID NO: 154750 - DNA, 454 bp, Glycine max
  unsure (1)..(454): unsure at all n locations
agctaagctntctgtgtcttctntgaataatgatcttgtggtagagacttcaaccaatggttctatgttaactttttatgtgtatttaaatggtcttgtactaccaacaaagttgtgacatcttcaaaagaagatgcttaattgtagatgattttgtctaacctagaagcagagacaaaggttcccatgggtgacctcttgcttagcacaagaaatgcgctaagtgcaattccaacccgagagggaattgtgctaagcacaagtnttcgtgcttagcgcaagaggaattgcactcagcctgaattgttgcactcagtgcaaatcccaatccgagaggaattgcactaagcatgaaaagttgcgcttatcacctgtcgcaacctacgtcacgatgggacgatgaaaggaaataaataaaagcatgtttgtctccaagggagaaaatgagtggagt

SEQ ID NO: 154751 - DNA, 502 bp, Glycine max
  unsure (1)..(502): unsure at all n locations
cgtagaatggctagacatgatacatgtcaggtgtttggttggttcatggataaaanggatgccccacattatttccatgacacaaatgcaaaaatgatgatttggaaactttatgcaaaactggtcatgcatgcacctatgtggacactcaagtgtcaaatttttatggtcatgtgatgctagggctcaagattcatttcctctattntaaatcaacccaatgtttccaaaatatgttcttttatcaatttgtgcattcatccgagtccatttcgggcgtccggtgaaatnttacagcattcacccttcaggtgtagacacattttccaaaaattggttatgatcatatgaattttttcaaagaaaagttggaaatcatctcntttcaaaagcatgtcggnttttcagctagacaacttatttttctttntcccatctngttcttacttgctatctttatccttattagctctctntgtctatactagctctcttcttttct

SEQ ID NO: 154752 - DNA, 465 bp, Glycine max
  unsure (1)..(465): unsure at all n locations
gcaagctntaatggttctttgccatcatcaatagctccaatcatataaaaaacttataattatgactgacaacaaaactttaatgaataaacataataaggaacgaaaagaatatgataaaaaatgcaacctcaaatacaacaacagttcaaaattcttcatgcaacatgtcatatggaccagggaaaaaaaacaaattcatttaacaatcaagtcacataaagagataagaagaaaattaagaaatgcagaattaaatcgtattattgttgaaagcacaggagacataaaggtagtaatgaatagttgtaccttggaaatcgcataaactaatgcaatgcgtgtntgatgattggaattntttactaagttattgtggaatttgattagtctggaatatgattgggtgatgaaatttatctgggtcttgctcatgggataaaataggttttacacaaacaattt

SEQ ID NO: 154753 - DNA, 491 bp, Glycine max
  unsure (1)..(491): unsure at all n locations
tcttccttggtcgggtacatgagcatatgcaatgctcccaaatactctcaagtgatcaactcttggcttcactccactccatgcttcttgtggtgtttgatctttgacattctttgttggggagcgattggacaaataaacggcacatgcaacagcttcggcccaaaattcctttggcatatttttagccttcaacatacatcaagtcatattaagaatagttctatttttttctctcttgctaccccatttgttgtggagatctaggaactgttagagggcgacgaatcccatatttttcacaaaattcattaaattcttttgatgtgaattcgccacctctatcggatcttagaagcttgattacataaccactctcattttccacaagaagctttaaaattttaaaaactacaaatgccttagatnnttgctttagaaaataaacccaagtctttctactataatcatcaataaaaagcaagaaatat

SEQ ID NO: 154754 - DNA, 380 bp, Glycine max
  unsure (1)..(380): unsure at all n locations
atatngaatgttgcatcttggtccatatcatatctttggtgcatcatgcatcatcatgtgtgtgagtgagaagaaaatttctaaagttagaaaatttcttcagaaggcaaaaatctctattttaatcaattacaacattatcataattgattacacaagttgccttaagcttgcagagttatgtctcgtatcagtttaatcaattacaaccttatcgtaatcaattacatagttgtttttgagacaatgactggtttattcaggagtctttgctntaatcaattaccatgtgatataatcgatgacttctctttctataagtgtntcagaagtgaacaagaacactntaatcgattactttaagtatctaatcgataaca

SEQ ID NO: 154755 - DNA, 495 bp, Glycine max
  unsure (1)..(495): unsure at all n locations
ctcagctggtcccacttgaagctattcaggttggttggcttccgattagtgcatcggatcacacaagtagtataaaatggtaagaactgagtatcgaacactcggggaagttgtgttatttggtaagctatttcggcaaataggtgtctggtgtgtaaaggtaagtgtgaatatgaacaggtgtataaactatctgtgcaaaaagaaagaaaatcacgcgagagaaatgatgtgtaaaaacaagtagagaacacgttggtcttcctaataggtgcctgatgctaaaaagatattctatatctaacaatgctcatgtgttcttatggtgtctcctgagatactaaacaccgattcctcatgatagtntagcctaatcctgatcaagcatcatccgcagattcctcttgtaagactaaactcaaccaggaccgcattaagacacacatactcaactaaattatcgcaccccgattcctcgtgaaagcatgacaactc

SEQ ID NO: 154756 - DNA, 349 bp, Glycine max
agcttataacatcacatatcctcattccttgatctatttgattcaaggattatttgtttcatgggtttccaaatgaagacccttacacacaccttgctacttatatagaaatttgcaacacagtaaaaattgcatgtgtgccggaaaatgcagtgaggcttagcttgttctcattttcgttggctggagaagccaagaggtggatgcactcgtttaagggaaacagtttaaagacttgggaagaggttgtagaaaagtttttgaagaagtactttcttgagtccaagacagctgaaggcaaggcagctatctctttattccatcaatttccagatgaatccctaagtga

SEQ ID NO: 154757 - DNA, 390 bp, Glycine max
  unsure (1)..(390): unsure at all n locations
gggttacatacagctgggtgcattngcaaccattaaccatctccactttcaggtactcattactgatcaactcgagatcactgcaatgcactattcttcatgttgattattggcttngttgaattaatgttctagcagtattcaaattgacattttgtgattttgacaaacccaggcatattacttggctcttccttttcccattgagaaggcccctactaagaaaattgccaagttaagcggtggtgtgataatatctaaactggtaaactatccagtcagaggccttgtctttgagggcggtcatacactagaagaattatgcaaatgctgttcagaagcctgcatctgccttcagcacaacaacataccttacaatgtacttatttc

SEQ ID NO: 154758 - DNA, 450 bp, Glycine max
  unsure (1)..(450): unsure at all n locations
agcttcacaaacccncnaaatttgacttctcttattatttatgaaacgttcctcaccacaccattttatcagcaatcttaagaaattttaaaatatattaattntaaaaagtgattgttggaactgagggaaacaaaggaaagattgtaagcatttcagaacatatagtgcaatgttaagggagaaggacaagatcttgggttcaactagacaaagaataaaataganaaatcttgacaagttttaaataactttagcagtcaatagatcctagaatagcatttaaaatagatgtgataaggatgccttacataattgacagttaaacaattgaatttatgatgtagcaagcatgttcataagaatctgagtganacatacantgagctacatgcattttgagttngtgactaacactaaaacctcaccaactggtgacctaaaatattc

SEQ ID NO: 154759 - DNA, 426 bp, Glycine max
  unsure (1)..(426): unsure at all n locations
agcttaaccatctttgaatcaaagtgttntaatgacaccaaacttttatgaagtaaaatttaaatcctctagacttatgctactaatagtttgcttgagtgtttaaaagacaagatttaatccataagcattgagaaggtgtgaagcattggtctatagtacttgttggatcaacagtctcaataacttaagagggataaacttagaatgcagaagaagcagcagttgctgagagagtcaccaaatcaaaatcagaatccagaattgaaattcgaaagagggagagagagaacctgttgaggagaaagaaggttgaagttgtcgtcgagggaggaagccatggaaatggaatcgctgaagaagagagtggaagctttagatcattgtaacctacacagaactataacatatgaactactaaaaaat

SEQ ID NO: 154760 - DNA, 435 bp, Glycine max
  unsure (1)..(435): unsure at all n locations
tggaatgcatgattgattacgagacatgggaagagaaattattcttgacnagtcttctaacgagcttgaagagcgtaacatgatatggtttcgtgacgatgcgcttgatgtattatcaaaagaaactgtgagtccttcatttatagattttgcatttaaaatatctcaagccaaagtaaacaacatactccattatgagttagctattaacattcatttgtatgattggtagtcacaacaactttgaaaattagcttggatgtgattttttgtgctccttgattagttcctataactactggtgggcgtttcaaggagagttgtgacaactatatatctgcaacttgtgtatattttaccctctaatttgtttctcctaccatagggaacaaaagctattgagggactagctttgaagctaccaaaagctaatac

SEQ ID NO: 154761 - DNA, 427 bp, Glycine max
  unsure (1)..(427): unsure at all n locations
agctngaaatcagattntgtgaagagagnttgggtttgggattcanagctttgcatgtngtcgcaacgtgcccttttgcgggcgagcgagggcgaggctcacgggtgcgctttccaaaggaggaaagatgcgtggagttgccaccaacgtttatttgtggaaaacgtcggaaaaaccgaaggaaaccggtcaaaatgaaaattctaagttcgggagttgtatttacgcttgaggaaggtattagcacctctcacgtttgtctcanaggacaacagcctattttttagaattgtggaaattgtgttaacttaactttatttctttttattttttaaggtcgataaaagcggggcttttgctcctacgtaccctcctttggagagaaaatcagacctacgtagttctttcttatgtgtgaatcaagtga

SEQ ID NO: 154762 - DNA, 469 bp, Glycine max
  unsure (1)..(469): unsure at all n locations
ntngatgctccgccagccactccgtaatgtactgatcgaaactctccacgatagattaggcatcgaacaaaggtaataattactantaattcaaaggatactgggctgctttacagcagcgctntccgctcgtcccgggctaggttaaggacgacgacctattggtagtgaccctagcctccttttgtgtccgtccacaagtatctgaaagtaggaaacaacgaggtgtggcaaatctctaccgcgtcgttgtcttacctcgattggtttctgctggtttagctntgtctctaccccagaaggtagctcaagatgatcctgcccctgtnttaccacaacaatatgcatgcgtatgcgtatgcatgaatgttntcaaacgccagcagatttagtngaaagtggttaggttcaattntaattaagcgctttgggcatcccatgaactgagcggaagggctcangtgatcac

SEQ ID NO: 154763 - DNA, 416 bp, Glycine max
  unsure (1)..(416): unsure at all n locations
agcttaacanaaccaaaatataatacatatatgagtatgacatttaatttttntntccaaatatagttgacacagataagcatagcagtcgaaagaaggaaaacatatggttggcaaaattcaaaatgatagtgatgacatgacacgtgaatattttctaataacaaataacgcttattagatatatgtgctctagaattttaaataaacatctacctattatcatgtagttggaatttctgataaagaatgttaacaattccatataggtcttgtccataaaacaatgacatgccgcaaattgcttctttnttttagatttagagttatttcctttcttttcttttttgagggagagattttgagttatttcattgaaaaaactagagaaactatattttggaagaaaaaaaatc

SEQ ID NO: 154764 - DNA, 387 bp, Glycine max
  unsure (1)..(387): unsure at all n locations
cttgaaactaagcttacaatattggactagcaacagagcattatttcagtagagcattatttcattatataaccaaaccctatgcttaactntaaataagccttaaattacccataatataaatgtcattgtctctttttaaccaacaatgtgaaactgtaggggaaccaattttaccgccgccacatgaattaatcactaaactagaaaatagaaatggatgatcccagttcaacattctaaactcaaaaatatttcatacacatatatttcaaagcacaagcttcacaatattgtcactaacaacagagcattatnttagtagataaccaaaccctatgcttaactttaaatgagccttaaataacccataatataaatgtcatt

SEQ ID NO: 154765 - DNA, 376 bp, Glycine max
  unsure (1)..(376): unsure at all n locations
agctggaatgctncttatggtggttacctcattttataatcccctattgattccattaaaatcattgaagacatgttctccaacccctataacatttatggggatagaacaatcatgaagaggggcatccaccaaatagagaaagatgaatctctccctgagttaagaaaatagatgcaagcttagacattgaagattgtgacactcatgagagcccaagctcaaatgcccatcaatacacctcatttcccaacctgtgagaaatgtgggattgtatataggttgggagaatgcattatgggtaatgaattagttgcaaccatggatgagatcaactnntgtggagaaagcantaattcatataatcgatacccta

SEQ ID NO: 154766 - DNA, 377 bp, Glycine max
tctcagcttctccccgcatttctatagatagggagagatgtgaagtaaaagttgtgttcaccctcctggttattcagaatcacttaatattagtgagaacaattggttccgtgaagaacatccaagccgaggcgcttccctaacgtttgcgtgggtgatttcgcaaaggttttcgaccgttcttccacgttcttcattcgttcttcggcgatccctatatcgaacttttcaattcattctatgcacccttagtggtcctcatttgtcttacgtgctttcgtttacatctcatttactttccgtacccccttttgacgtgtgtcataccctaatttcgtccggagacgctttcttggtgacatgcgacctttctttgg

SEQ ID NO: 154767 - DNA, 296 bp, Glycine max
ctaaatatcttacgaaaggttagactaatttagcctaagctttgtcctcagatcgctcttgttgaactagacttagaccaaacaacattattgtaacaacatacttaaaacaaaaacttaatccgcagatccctcttgtaagactaagtttcaattctgcttcattcaagttctaaggcaacaatacattttccaatgctatagtcacctaactaagcacataaatgggtgatcagaccaagagcatattgaaatcaagcactgaaagaagaaatgatacaagaaacacaatcaat

SEQ ID NO: 154768 - DNA, 368 bp, Glycine max
  unsure (1)..(368): unsure at all n locations
gacctatgaaactcagctgtattaaaatgtttaaaaacttaattatttgatttatccttataaatatagngagggagaggtgcacagttataaaccgctttgaccaatcattctaattattttattcattntcactttcactctgaattaatagtttcactttcaattttaattcgtgccttacttgaatttactactgtgaccaccgctgttgattccaccgtgaggtccgaagtctgacgcaaggtctatcatgcctttcgttctacttcagtctcgtcccacgtcacagctagcacacatcctagcttccatttgtttcacctgcctccgtcccacagtaagtactaatgtcgcttttctcctaa

SEQ ID NO: 154769 - DNA, 375 bp, Glycine max
  unsure (1)..(375): unsure at all n locations
ttttggcacaacagccccaacatctgtatcaacaaaactcataacagtgcactggcacaacatccccaacatctgtatcaacaaaactcataacagagagggctttcctgaaataaataatccaatatttcgtaagaagagaattgttattttgaggacattcaatgaatatataatggcatactcaatgatcaaatattacataagaatgatatcatattacaatagaatggcatgcacatacaagttntgtttttttgttttaacgagcttatatatatatatatatgcaaaaatcgtaacaaagtattgttggagtatgaactcatcaaaaaatatcacgcacatacactcttccaagaacgagagagagaa

SEQ ID NO: 154770 - DNA, 417 bp, Glycine max
gctctgccacatgtccctcatttgatggagcaaaagggcccactttctctttttgactgtgacccatactcagtcacaaaagtgagaaaaatctgacctttgaaacgctaaaatcctgcctcggtttgcgtgtcgtttctctgattccagtttctcgcgtttctctgcgttcgccggggccagttttcgaaagcaagcaatatatatatcaaaacgctcagaatgaaaccccgagcgtggtttagaggttggtttcgttaaattttaagtcgcacgcaaaacgatgattttaactaattaattaggaattaacccataacctcccagttatggatgtctctcccttaattagcctaacccgcatatcttgcccctactattcctacccttaccaagaacatatatgcatatacactg

SEQ ID NO: 154771 - DNA, 436 bp, Glycine max
  unsure (1)..(436): unsure at all n locations
tcactacatcaagaatctccgggttgagtcttctctgtggctggcttactggnttagctccatcttctaaatttattcgatgcatacatgtggatgggctaataccaagaatgtccgccagggtccagcctatagccttcttatgcttcttgagaactgacaacaacttctcctcttgctcatcagcaagggaggcagatataatcactggaaaactcttgctatcatccaagtaagccgtatttaaatttgatggcagaggcttcaattctggtgtggtcggctgaacagtggtagaaggagatggtttctcagcttttacctcataaagaaagtcagaggtatgtgtacttcctgaaacatnggtagtcctatctgactctataaaatcaatctcaagaggaaaacaccaccccaggcattgcataatatcact

SEQ ID NO: 154772 - DNA, 427 bp, Glycine max
  unsure (1)..(427): unsure at all n locations
atgtgcttgaatgcattgcaaagaatgctatgaacatatattcatttcaaaagcacgtttaaaagactatgaacatatatttattttattttaacggtaaatattaattaataatttattaatttttattaggaggaaatcaaacttcaaacctttctcaaacacgtttaaaagactatgaacatatattcatttcaaaagcacaaatggtatctgttaatgcactgaaatttctaatgtagntgctgaatattcttatgtgtatttattttttatgctctatgcagngtaaaagtgtgtgttcagtaagtgtgttgactagtacttgttggacctgtgtttaagctttctatttatgatgggtagatgggctattaagcttgttagatagaagtaactactgttctattttgtgagaatatatgta

SEQ ID NO: 154773 - DNA, 447 bp, Glycine max
  unsure (1)..(447): unsure at all n locations
gagaaaacttccttgagaagctagagcttagctacacactcttctctcataactaatctcacctccttgagaaacttccttaagaagattcctaaagaagctagagcttagctacacatacctctctaatagctaagctcacctccttgagatgagaagctagagcttagctacacacctcctataatagctaagctcacccccatgacaaaaaacatgaaaataataaacaaagtccttattacaaagacaactcanaatgccccgaaatacaaggctaaaaccctatactactggaatggccaaaatacaaggcccagacgaaggaaatacctattctaatatttacaaagataagcgggctcatacttagcccatgggctcgaaatctaccctaaggctcatgagaaccctagggccttcccttggatctctagcccaatctac

SEQ ID NO: 154774 - DNA, 443 bp, Glycine max
  unsure (1)..(443): unsure at all n locations
gcagctttactatgtggcgggcgggttccttactttctgttccattctagtctctgaccactgttcttccttcccgcgatgcttcttttcatgtccgcctgagtgggcttatatcctaaaccatacttcccacgattcccttgggtttttatcaaactagttatgccgccattgtctttgcctaaacccatcccgggttcataaccgttccccaacataactcgggccatcattaccgccgcctcggacagacaaggttgcccaaagagggagtccacggaggaaatgctgaccacctcaaaagactggaaagcggtttctaacgattcttctgcggcttccacataaggcatggaggatgggcagcttaccaagatatcttcctcgcctgacacgatgaccaagtgccnctccactacngaattcagcttttggtggagtgt

SEQ ID NO: 154775 - DNA, 438 bp, Glycine max
  unsure (1)..(438): unsure at all n locations
tataactgacatatgccaatgcatgccaattccacactacgnggtgttacaataatgtgtcatgatgccaactcaacactacatgcattgggaagaagaatgatcgatttgcaagtaattaatagtagtatatatattagggaattgtagtcttctgaaaaatttcttaactntttttatcatcttatttttaaaatattagacttaatttcacttttttcttttaaatattatgatagtataactttaatccttttatttttcattatgtcaattaacttgtataaattttttccggtaacaattggattcctaagagagtaggagttataaagtttacctgatgattgtgaaaggagattaagcattatagagagaagggagagataaataatggagttgaattctctcattaaccttctaaaaaataataattag

SEQ ID NO: 154776 - DNA, 314 bp, Glycine max
tggaaagtcaatgataggtgctttgtgattgtgttcctatggaggccaaccacttactcttggggagaccatggcaatttgataagagagcttatcatgatggtttcaccaacaagatctctttcacgtatcaaggcaaaaagatagtgctcgaaccattgagtccgcaagaagtgtgtgaggatcaaagaaaaatgagagagaaaattcttcatgaaaagagagaaaaagaaaaagagagctaaacacttgagagttcaaaaagtgaggacaataagagggaaacacacgagaggaaaaagaagagtgaaaca

SEQ ID NO: 154777 - DNA, 381 bp, Glycine max
  unsure (1)..(381): unsure at all n locations
gtcattaaagactacgcatcttttaaggcacaaagcgaggatcagaacaatgaaacctcaagcctacgttctttaaaaaactgctgtcgtaacctacccttcggcacgagggcgacgcgtgactcgcgggtgctttttccaagaaaggaatacgtgcggagtcgccaccaacgttgatttgaggaaaatgtcgcaaaaaccagaaaagacgtgggctacgaaccttaagtgaaaggttcgagagtngtatttacgcacggngaaggtattagcaccccacacgtccatcgcaagagacggtagcctntaatcaaatgtgcaaatatgacttcaatttatggtattttccctttttaggtctatgccttttatattttatct

SEQ ID NO: 154778 - DNA, 385 bp, Glycine max
cctgacgctgcagctgctaagtttctgcgtcaaacctgctctttacataaaacaaacatgtgctatatctttatattctcttctacctttgccaagaagaattccacaaggactaaccacctgaattcttattgtgtctctcttctccctttaccaaaacgactaaggactaaccgcctgaattcttttgtgtctcccatctcccttttcacagaattcaaagagacatagtctgagaattcttttgattcttccctttccttaaacaaacgatttcaaaggactaaccgcctaagatatcttttcgttccccttcacatatattacatgactaacccgctgagaactttgtcttaacacattggagggtacatcctttgtggta

SEQ ID NO: 154779 - DNA, 167 bp, Glycine max
  unsure (1)..(167): unsure at all n locations
agtaattacgcgaggattctcgnaccgtcttcaagattcatcgttcgttcttcgtttcttcagtcttcaatgggtaagtacctcanaccaagcttttcaattattatatgtacccgggtggccacnatgngttcatgtatttcattctcgtttcattacttttatac

SEQ ID NO: 154780 - DNA, 447 bp, Glycine max
  unsure (1)..(447): unsure at all n locations
agcttgtgcttggntcgactttataattcaaggatatagataatttgattctcaatacttcgacaacctatcatagagatgaatgattagggcatacttatgctatgcatgacaaatgtaattatgagattgacatgagacgcttgaagaaaccccttttcctagttaacaatgcattaggtaccatgttcatgtgatttgaaatcatttttcaagagaaatgagtgtataatctcaacatggtctatttatagctatcatcatggtacccaacacatgtaactaanaatgtggtgtaaacattcatgcttcattgtgacttacttttgttctttttttcagaggaaaaatgcaggatcatgcatgagtgaaaaaaacatgcgaatgatgaaaatagaatgtatgcagttggtagaacaaaagcgtgctgaatgaagatgtatgata

SEQ ID NO: 154781 - DNA, 435 bp, Glycine max
  unsure (1)..(435): unsure at all n locations
actcagctngatcaaacaatatctaatcattccaatttctctcaatcattctattgctcattcaaatcattctcaaacactcatttcataccaaacaatccactgcatatcatttccaatcaattcactgttcaaacacactcttggtacaagcaaataactcaaagtgctgaaatttaaataactgaaatttaaagaactgaaaatggtcatgctttgcagaaattaaactaaacacaatttaaacatcctgctcatcctgtggctgatcttcattaagatccaatgttggcactgctgatgaatcactgatangctgctctggctccgtgactggtgtagctggctgggtctnnctcggaacaggtgcacgagatggcttatgtatctaatctatggaagtcccctcctcttgatccatgtgtgcatctgcat

SEQ ID NO: 154782 - DNA, 396 bp, Glycine max
  unsure (1)..(396): unsure at all n locations
ctgcaagctgaataggaantgtgatggtgaactttctgtcttattgttgaccacagagcggtacctggagatatgtcgcgggggtctggagaccttggggacgtcaggtggggtgctattgcccaaaaccaagcttgaccaatcccgacccaacccgggcatagtcggtcagtgagaacctgtgatgtacctaaacaggcgagctcctggcagtcaacagataaaaggaacaaagaccacaaagcaaggaggcttgtggtggctggccagctatgaactatgattgatatgtgggttatggcctctggtaatcgattaccaagggtgggtaatcgattacaaggcttaaaaatgaagacaggaggctaagatggtctctggtaatcgattaccacg

SEQ ID NO: 154783 - DNA, 313 bp, Glycine max
  unsure (1)..(313): unsure at all n locations
tgcttagcggatgttcacttactctcgctcagcgagacatgcttgtttagtgattcttcatgngctgagaagaccaagagcctataaaacactgagctggccgaactcaagagacacaaccggtcaagagccctacggagagtctaactctgtaaaaaatctacagaactacggctgagaggctggtaaacacattgtccaacatcttcattccttttctttcaccccagatagctcctttctcatatattgaagctttgctctgaatggaacgctcctctttgtgggggagcaactaccgaagctcttgatg

SEQ ID NO: 154784 - DNA, 416 bp, Glycine max
  unsure (1)..(416): unsure at all n locations
agctntgtacagaaagcaatactttgggtgtatnctcngttntggttgggatcagctatttacttagtataagagtgttaaaaaaagaatgatattgaatctagttgctaataagtttcaaccagcttaatgtacaatggctgtgtggtagggaaactataattgagattctattgtggcataatcgaagtgtttcttgaggataacacaaatctatgatcattagtatatgcaagaacaattgatactgtgacttagggcataattccattacaaacttaaaatggaaaccaagtgcacttacaggaaaaaaaatgagaaaccaaaatgaattaagcttattctataagttaaaattaatttaggcataggttaatgtataaaatacaaactcttgataaaggcaatggatatgt

SEQ ID NO: 154785 - DNA, 297 bp, Glycine max
cacattacttgattagcgcacagtcgtgcttagcgaggtcatatacatctaatcattcatcataaaagatgaactcgcttagcgggacagggccggcttagcgagatcatctataaatccagatattcatcaaaaagtgatgaactcacttagcgcattcatcgccatttccaaaaaaattggtgttggatcaagtggccttggaataattaagaacgggggggggttgaatcaattattaatgaacctttactaattagaaatctatccttcgtaatgttactagatgtaattacg

SEQ ID NO: 154786 - DNA, 449 bp, Glycine max
  unsure (1)..(449): unsure at all n locations
agctggagctattccaagtttattaatcatacctttaatttatattgttccttcactccttcagctagggccatgtatcctgcttcagttgttgaaagagcaacaactgattattgatttgctatccaactgattgttgtaccaaataaagtaaacacatatcatgttaaggatttccttgtgtctatatttcctgcaaaatctgcatctacatagcctgtgattgctgcctcatgtgctgtttgcttgtaccttaatccagctttcaaagatccatntagataccttagtgtccacttcattgcttcccaatgtgcactgccaggatctcccatgaatctgcttataatacttacagcatgagccaagtcaggtctactgcanaccattccatacattatgcttccaacaccactagcatagggtgttngatccattttagaactttc

SEQ ID NO: 154787 - DNA, 360 bp, Glycine max
  unsure (1)..(360): unsure at all n locations
ctaagctctcttggttgaacaatgcagcccacttgaataggacagtgtgtttcatatcatntgcatcttgtggaactaattttaagctatgtnagctaaaataaaccattagcatgtgtgcgtatgatatcttcatagattacgtcggtgacctttattttgcatgatttggcaatgtctcactatangttgtagatcatccatctattaanaaggactgaaaggataagatgcactacgatagtatttaagtctccatgatgtgcattcatatatgtttctattttttttttaaaacaagtgttgcttttcttatcttcaataaatttagatgaagacaccatgagttataaatatttg

SEQ ID NO: 154788 - DNA, 470 bp, Glycine max
actacctggaattaattcctttgatagcccttttgagcctgggtttctttccatgcttgaagctcactacaagccttaaatgaaaaaccatgatatcaccatatctttaaggaattttggagctttggaattgttttgggaataagtgtggcgggtttttttgcttcattggataacttgtcttgttggctatgcttcgtgatgtattttgggccatacttgatgtacattgaatattggtcaaatgtcgaacatgctgaatgaaatgtatgttctcataggctataagaaataattctaactagatgagtaagaataatagcgattattctgagtgaataatattttaaatggctcaagaatgatgaaactcttggttctacatcttatgtataacttatatctttacttctttctatattcttattgtctccttaatatgcactaattcgccattgctcctctattcc

SEQ ID NO: 154789 - DNA, 354 bp, Glycine max
  unsure (1)..(354): unsure at all n locations
acaanatattggtaatcgattaccagtgtatctgaacgttgaaattcaaattcaattgtgaagagtcatatattttcattaatagcattgtgtaatcgatacatggttatggtaatcgaataccagtgacaagttttgaatacaaggtcaagagatgtaactcttccaatgcgtttctcaagattttctcaaggttataactcttccaatggttttcttggccagacatgaagagtctataaaagcaagaccttgacttgcattcatataacgttttgaacaatttcttgacaaattttgagaaatctgaaaccttgtactcatcttgctctcttctttgcaaaagcttctaat

SEQ ID NO: 154790 - DNA, 376 bp, Glycine max
gctttcacttgagtcatcaagagattataaatatgtgaccgtggcacgtatttcatcaacaaatgatgaatcatctttgaatcatctatctttcaatctttacaacatcatccctcaacatctttcaatcaatctttcaatatctttctacagaattttctgattcatttctcttcatcttctaaaagtttttgatcaacactttctcttccaagaaaagttctttgttcaaaaacttgtgctattcatctttttcattcacttctccctttgccaaaagaacgaaggactaaccgcctgaattcttttgtgtctctcttctcccttacaaaagattcaaaggactaaccgcctaagaattcttttgattcttccc

SEQ ID NO: 154791 - DNA, 461 bp, Glycine max
  unsure (1)..(461): unsure at all n locations
tggacttaccttgaattaattcctttgatagcccttttgagccttgtttccctttccttgttttgaagctcactacaagccttaaatgaaaaaccatgatatcaccatatctttaagggaatttggagctttggaattgttttgggaataagtgtggggggtttttttgtttcattggataacttgttttgttggctatgcttcgtgatgtattttgggccatacttgatgtacattgtatattggttaaatgttggacatgctgaatgaaatgttgtttctcaaaggctataaaaaaaaattcgaaaaagaagaagaagaagaaaagcaataaagttgagtgaataagatcttaaatggcacaagaatgatgaaactctnggttctactctntatgtttaatnnttatctttacttctttttattntcttatnnttttcttaatatgcacttattcccca

SEQ ID NO: 154792 - DNA, 444 bp, Glycine max
  unsure (1)..(444): unsure at all n locations
gcaagcttgagcaattcaacgacataacttngactcgatgccgattttgtcttttngatatcagccgctcgtaaggaaaacggaagctctgagaaaaatctaacgacaaataaccttaactcggatgtctgatcgagccctgtaatatatcaagacgctcgaaatngaaaacggaagctctaagaaaagtcaaacgacaataactnttgactcggatgtccgatatagtctcgtaatatatcgagacgctcataattgaaaacagaagctctgaacaaattcaaacgacaataacttttgactcgaatgtccgattgtgtcccgtaggatatcgagacgctcgtaattgaaaacggaagctctgagaaaaatctaacgacaataacctttaactcggatgtctgatcgagccctgtaatatatcaagaacgctcgaattgaaaa

SEQ ID NO: 154793 - DNA, 491 bp, Glycine max
  unsure (1)..(491): unsure at all n locations
tcggttntcaatttcgaacgtctcgatttgtacagggctcaatctgtcatccgagtcataatttattctcgtttgaatttgctcagagcttcagttttcaattacgagcgtctcgatatattacgggactcaatcggacaaccgagtcaaaagttattgttgtttgaatttgctcagagcttcaattttcaattacgagcgtctcgatatattacagggctcaataggacatccgagttaaaactcattgtcgtttgatttttcttagagcttccgttatcacttactagcatctcgatgtcctacgggactcaaccgaacatccaagtcaaaagttattgtcgtctgaatctgctcagagcttctgtnttcgattacgagcgtctcgatatattacaatactatatcggacatctgagtcaaaagttattgtcgttaggcttttcttagagcttccgttttcaatttcgagcgtctcgatatattacagg

SEQ ID NO: 154794 - DNA, 459 bp, Glycine max
  unsure (1)..(459): unsure at all n locations
gcaagcttgaagcacaaaaccaaaaatccgntcaatatttacgatgggttgacttgactatgcaactatttattcggtggaacatcccaacaaacagatggccctattaacttcttttaatcactcattaagacaccgtgactttgataacgtgtcatattctattggttatcagacagacctattaaatcagtctcatgtatcatattaacacaaattcatcccaacattgatcattcacactcaaaagacttaaaaagtttaagtagtaagaataaataatatttgaaaagttaaaatcaacatatattgtgatgatattcatttattcccattttcttatttccaattatggctattgacacttagttgccaatgttgcttgataagttattagtagttagtagaggtcacattagaaataagaaaatgatataaaagataataaaattataatta

SEQ ID NO: 154795 - DNA, 355 bp, Glycine max
  unsure (1)..(355): unsure at all n locations
tcactcctacatttcatctctagcatgcatnttctttctntacccactcctcacgtntgggtttttggggaaaaacaccataactaaacgcgccgcaagggatccctatcgcaccagatccaaatctagaacgatgggtgatcaagaggagacgcatgaacagatgaaagccgacatgtcggctcttgaagaacaaatggccttcatgatggaggccatgttaggtatgaagcagctcatggagaagaacgcggcctctgccgccgctgtcagttcggcttgcgaagcagacccgactcccttggcnactacgcaccatcctccctcaaacatagtaggacggggaagggacaca

SEQ ID NO: 154796 - DNA, 457 bp, Glycine max
  unsure (1)..(457): unsure at all n locations
tgcaagcttaagctccttcaactgcacaaggctcttaatattngaagagtatccttgttgtaccttcacccgacgaagacactgacaaaaacttatattcttcttcttggacaaagtatggcaagctgggggcaagtaaattttcttcccatcaaaccttggatgcaactgtgatcatatacccatatcagctagatcttgacagatattcaagccatccttcgtcttgccttgaatgttaaggagcgttccaatcacactgtcacaaacatttttctccacatgcataacatcaatacaatgtctaacctcaagatcacaccagttaggaagatcaaagaanatgaacctcttcttccatatgcaactctgacttttatccttctttngngtctttccaaatacaatattcangtgttgaacccgttgatatacctgctcactagtcaacagtatc

SEQ ID NO: 154797 - DNA, 491 bp, Glycine max
  unsure (1)..(491): unsure at all n locations
gttatacaacattcaaacagcacaaactatcacagccaagccaatcttggcaaaggcagaaaactctgcccaaaacaccaaccaaaatcacagcttttctcacttaaagaccccagtaacatttccttcgttccaattcgttaaccgttggatcgactcgaaaattttactggaagtctctagtacataaacctacattttgaccgttgggatctactagcaaacatccagaactcattctgcactactctttccacaaccagcaaaacatagcatttttctgcacttatgcaaaattctgctgcacaatttcacagcaaaattctgcataaagtgcagatttcgaaaaccacacnttctctcatccaatcttgcccaaatcaaatcctacaagtcctaaatcatgtatcaatcatgtctaaaccagagtcaagcttcataccacagcaacacaagatctatgtgtccaaacccctcaattaatggatttc

SEQ ID NO: 154798 - DNA, 372 bp, Glycine max
  unsure (1)..(372): unsure at all n locations
tattatatgccttgacccctncttattcattttttaaaaaatcgaatgacgtggacaatttgaccacaaatttcatgtggtaggtcatcaacatatgtacatgtgtagatttctcaatgtgctgaggatgtaatgtaccctccgttatttatgtttttaacaatgttagtcctgcaatccaaaatcacaggggtgccttatggtgacatactcaaggtcaaagagactagctgggtaagaaaggttctgggattaattatattangtattgtttggtgaccataacctaaagccaatttacattgagaatttacaagcgatgcctatctcataagttcatcgtgtagtactataccgtccatctgaatcaac

SEQ ID NO: 154799 - DNA, 284 bp, Glycine max
atcttagtatatattcctctgtctaccatattttaccatgctctctgtacacctgaaatgaatatatctacgtcccttatatgaatgaccatggtaccatcatatatataaggagatcggtgactgtagaatacatctggaaggctttgcgccctgttcattggtgtgactgacactacttgtattagaagactacgtctttgcgttatactttaagtcatataactttcacatattgtaaaagttaacattaggatatactgaatgctctgtcttattttcta

SEQ ID NO: 154800 - DNA, 362 bp, Glycine max
  unsure (1)..(362): unsure at all n locations
aaaaagagtgagagaagctgaacttttgagtgtgtcccacaagttttacattcatcaaaaatatgaacagtggtacacatgcttctatttatagcctaggtcactaactaaatgaaagcntccctgagaagcttatttgagaagctccttgagaagcttgagtttagctacataccccctcttatagctaagctcaccttcttgaaaagcttccttgagaagctagagcttatctacacacacccctctaatagctaagctcacccccatgcgcaaatacatgagaattcatagcttcacacattcctctaatagctaagatcattcccatgccacaatacatgaaaatccaaaaaagtgac

SEQ ID NO: 154801 - DNA, 381 bp, Glycine max
  unsure (1)..(381): unsure at all n locations
tatacaacactcaagcttatgtganaacttgatgtgctactcaatgttgtgtaaaacctgtttgtacttatctttgattgagccntttccttattcttgaatcatgatcttgactggtcttgattcttgagtcttgaatcttgatctcgattggtcttgattcttgattcttgaaaacgtgaaacttgaaacttttcttgaatctttctctcgattcttgaattgttcttgactcaatcttgaaatcattctcattggcctnttgtcatcatctttgttatcatcaaaacaccttgaatcaatcttggttcatcatcatgaagcaatgaagcttgcttctacagagggtcatgcctcatgggctatacacactcttaccca

SEQ ID NO: 154802 - DNA, 448 bp, Glycine max
  unsure (1)..(448): unsure at all n locations
agcttctagccaaagaaagagggagagaaagagtgtggggtgagcacganattgaaggaagaaaaagggagagaagttgaactttgagttgtgtctcacaagactctcattcatcaaagttacaacaagtgttacacatgcttctatttatagactaagtagcttccttgagaagctttcttaagaaaacttccttgagaagcttctttgagaaaacttccttgagaagatagagcttagctacacacccatctaaaaactaagctcacctccttgagaagcttccttgagaagcaagagcttagctacacacacccatctaaaaactaagctcacctccttgacaaaatacatganaaaacaaaanaaaagtccctactacaaagactactcaaaatgccctgaaatacaaggctaanatactatactactagaatggtcaaaatac

SEQ ID NO: 154803 - DNA, 466 bp, Glycine max
  unsure (1)..(466): unsure at all n locations
ggcacatcatttggatatagcttccnccgcagctctgctgaagtctttgtaattttcttttagttcccacgtttgagatgttgctcttggctgccatcatttttcgttatggtatatatggcatagtagaaacaagattcactttgataatgtgatcatccnccttaggccaattntctctttgatgtaaactgatgatcacatgacaagaaatgtttctaaaggaactatgtcttcatccatagattacttcttcatcctaaagaattattttgttcctagtcaccttagaaagcctcatgttatcaagtataagtgtgaggtgaagtcccacatcaagtaaaagtgaaaatgttgagcaccattataagtgaggagaagacccataaacctgagcctcatggtttgggttaaagatggtgtcaagttcccttatgtagttgctcatggtgcattagtgtaaatc

SEQ ID NO: 154804 - DNA, 439 bp, Glycine max
  unsure (1)..(439): unsure at all n locations
agctntctagctnttcattggtgtantttgatcttcttttggtgctctaaatngngggagtgtgctcaaatatatggggcaattttggtttgttttcttgcttgattaagttgaattaagggttggcatgggatggccctaggcctataatgcattttgaaacaatggggcatgccacattgtccccgttcccttgctattgacgcctaaacgcgcgcccaccaagtgttcggtgaaatgcctcaatggcattagcgcgtgacttttgtaaggaaacaacccatggggcattttggtttgtacatagtttctatttttggaacatgtattcattcccgaanaaggctagagtaattgccccacatatatcctagtcctagaaactgaaattttatgcaaaaagagcacaaaaagaggtgcatattgggtaaagttaccc

SEQ ID NO: 154805 - DNA, 433 bp, Glycine max
  unsure (1)..(433): unsure at all n locations
agctagtacgcacatcgttcttgtgtatgatatcttctcttcttcgttngaagtagaggagagcttcaaccctataacgcaacgtggcagacaaaagtgggcagtaaacttgaatgatcgtcattgtcaatgcggaaggtattctgcgcttcactatccatgttcacacattattgcagcttgtggttacgtgagcatgaactactaccaatatatagatgttgtttatacaaacgagcacatcttataagctcactccgcacaatggtggcctattgagaatgaagcggctattcctccttctgatgatgcatggacacttatccctgacccaactacaattcgtgcgaaaggttggccaaaatcaacaaggataagaaatgagatggattgggtcgaccatctgagcaccgaacaaaatgcagttgatgtg

SEQ ID NO: 154806 - DNA, 415 bp, Glycine max
  unsure (1)..(415): unsure at all n locations
ctccaacgataccacagacacctcanacagagaactataactcaagttgtgacgtagtctatcttggattgtcattataaaactaacagtagacttagaaaacttttaaaacattttaattataagaagttagtttaatactcttctaacaccaattataatataatagagatgaaaacaacaataacaacaacaaaaacaacaataatgataaacacaaaatgcatacgtgtataagaatacacactattacaatacaagtacatgcttaagacaaaaccaataataataacaaatattaacaaaaaatataacaaaagagtcctaataagagttttcctaatagtatattcctaggtctcacaacttggggtgttacagtctagctcttggatctactagttgtgacgacgtc

SEQ ID NO: 154807 - DNA, 389 bp, Glycine max
ttcatccgaaaccatttcattcattacaggagcacatttagcaacaactttatagttcatagaacccttaataatacattacaagtattaggtcctgaataaacacaaatatcaatttaacaacatatacgaataaaactttaccagtattttcagcactccacaaccaacttctagtgcacattataggccctaaagtagaccatttgagtcgactatgatgtgggcttaatatttgaccaccattgctaaatgtggattctgaagctacgatagataccggaatagctaatatatcattagcaattgcttggagtgttggatacttaacaccatttaactttcaccacatcaaaatatcaaagtcaacagctcttggtataccctct

SEQ ID NO: 154808 - DNA, 248 bp, Glycine max
tttaaccgatttcaccaactacagaagaagtcgactcaatgaaatggagaacaaggggaccgtggcaaaaaaatattgcccaagtgtggtaaccaaaccaaccttcatacgtaatgatgcaatacaacgttttgagctgtccttagggtatactccgaaggcaacttgattgaagctcacgagccattgacagaacagataaggaattaggatggctgaaactcatattgccgtactcatatggacct

SEQ ID NO: 154809 - DNA, 421 bp, Glycine max
  unsure (1)..(421): unsure at all n locations
tctatgtctttgggcccggttgctctggtctattctgtncttagngcgtgggcatagcgctccctactatgctgcttgacttccgcctttgttcaaaaccctttattaaaaccacattcttctttctctctaatctctgttcaaaatcttaattaatacgaataatgtactccaatattatntatggctattaggtgcttgttttctatttaattgaaaaaactctgaattcttaaatttcccactcgaagcaaaacattactattactcacatgtaacatattgaatccttgtctttctcggacggcagttcaggttaataacaagcttgaaagcttatactatttgcatattctcaagctttgtgcgcacgcattacaaacagagcaagagacaaatcaccacttgtaggtgtgtttaa

SEQ ID NO: 154810 - DNA, 263 bp, Glycine max
ttcaatttgtcctccctattttttttctcacatgatcatgattctataaatgtgggattttctggattgtttcggaaaccgaggtcagcggcactatcctgaccagcttatttatcaactgaaccataaatcacccaggattatactcctgttgaatctgcccaaacaaaatttgtttgtggttccttttctttcacagctatggatatgccgtaatgaaaagaatgctgcattcttgaaccatcttctggaaataaaccttg

SEQ ID NO: 154811 - DNA, 451 bp, Glycine max
agttagcatatctctaaaacccaggcctacctccttcttgtgaatagagatgatttagtactttgtggctatctctgcctcaccttgacttttgacaagtaattcctattgtgacaggatacgagtattgataatatctgactttttaaggcgggaaagaggacgagcatgggtatgtggctgttccacacacataattattaaaatattcttattttatttaattgttgataatttcgtttatctgaaaaaaaaactaattctaattatgtttaattttattaagtttgacttctataataagtaatgtattcaactgtgtttgatttttaaatttattttaatgattattttggaattttttaattcagaaccggtggaaatatctgaccaacggaagagggttgaaaaaattcatactgttgggactaaacccatacttccccttgct

SEQ ID NO: 154812 - DNA, 482 bp, Glycine max
gactcggactcttaagtctaccgccgcatgcagctttgaaatcaacttacactggtatcgattatgggaactggttttcgatttccagagagtaaatactctgataacttagaaaattttgaaaaaactcttttgtaaaacaaaattgtgctatgtttggtttttgaaaaatccttttcaatacttcccttgtgaagtcttcttgatttcttctcttgaatcttgaattcatcttctcttgaatcttgaaatcaacttatcttgaatcttcttgatttcttctaatgaatcttgaacttgttgactcaatcttgaagtcattcttttgggccttttgtcattatcaaaactacttgattcatacttgaatcatcattatgaagcttgcttctacaatactaagacgggttctgatcaatacccatcttagtgcataaatcatattaaaacggttggatgcacaatcgtcctagtgtgtattg

SEQ ID NO: 154813 - DNA, 469 bp, Glycine max
  unsure (1)..(469): unsure at all n locations
gtgccaattcgtcttcttctttagtccagtcttcttctggcttcaattcatcagtgggctttccttctggggccagcatcttgggatgttcccagcctttgatgacagctttccaggttctgctatccagtgatttgagaaaggccaccattcttgctttccagtattcatagttggttccatcaagaantggtggtctgttcactggtcctccttctttctccatgttcatcagaatttatctccctagatctcactcagtgatatcgagtgcctgctctgataccaattgaaattctgatactggggacagatgtcgtacaggatgtcacgacatcacgcttcagaacatgcagattatatgtgctcgtatgaacaagtaaataacacaagagaattgtaacccagtcggtgcaacccacctacatctggtggctccaagccaggatgaaatcactaaatagtgtag

SEQ ID NO: 154814 - DNA, 435 bp, Glycine max
ttaatcatttccaattatgcatgtgaattatgactcatcaacaagaatcaagccaaggctattgtgcaagcaatcaatggggcaaaacacaccaaatgattataatgatggatggctcaaattctcacaaaagtaaaatcatcactttcaaattgagctttcaaaactatcatgacatgtagagaagaatcaaggatttcaagtcacaaaatgtcaagaacttttattttcaaaacaattacccatttcttgaacatatcctataattcaaagaaaaacatgcaaagtcgtacgtgcacacaaaattgacccaaaatattaaactgaaaatccgacgaaactaacaacattaacaaattaacacaactaacaaattaacaaaaccaacaaaactagcaaaaccaaagatacactcccccctccccccccatactt

SEQ ID NO: 154815 - DNA, 494 bp, Glycine max
  unsure (1)..(494): unsure at all n locations
tctttnggaccttgaacaagcaatcaactcctctttcagaaccatgctatgtgctcgcgactggtccctttcttcccttcgcaacttgagttcattattgctaccccatagagctccgcgaaatttgttccggccatactctttcttgcgagccctcttggtctcttgntcaagggctctngcggtaattgcattctcttcccgtaacccggcgcactccttccgaacgtgtgtagcagccaacttgaacttctccttggcgagttntgcctttcctaactcgcttttgagaagctggacttcctcgtcctcttccggtgcttcannaatcccttcgctgacgacttttaacttggcgagccaatctaaacctcgtatgcgaactttcagccattcgtggtacccaccaatgatgccattacgaatgcctctaagctcttgatctttccttaacggggtttcccatgccttatggattctctgtatagtcttgg

SEQ ID NO: 154816 - DNA, 437 bp, Glycine max
  unsure (1)..(437): unsure at all n locations
acctgcggcatgcaagcttcaacattcaacttcgagcgtctcgttatattataggactcaatttgatattctagtaaaaagttatggtcgnttgaatttgctcagagcttcaacattcaatttcgagcgtctccatatattacgggactcaatcagacatccgagtaaaacgttattgttgtttgaatttgctcaaagcttcaacattcaatttcgagcgtctagatatattacaggactcaatcaaacatccgagtaaaatgttactgtcgtttaaatatgcttagctctccagctttaaatttcgagcgtctcgattatgacgggactatatcagacattcgagtaacaaggtattgtcatgtgaatttgcttaaagaatcaacattcatcttcgagtgtctccgtatattaccggactcaattatacattccag

SEQ ID NO: 154817 - DNA, 478 bp, Glycine max
  unsure (1)..(478): unsure at all n locations
acgacaagaactntntactcggatgtctgattgagtcgccgaataattctatattctcaanatngaatgttgaagctgtgagccaattcaaacgaccataactttntactcggatgattgattgagtcccgtattatatcgagaccctcgaaattgaatgttgaagctctgagccaattcaaacgacaataactttttactcggatggcctatttagtgacgtattatatcgcgacgcttgaaattgaatgttgaagctctaagcaaattcaaacaacaataactttttactgcgatgtctgattgagtcccgtaatatatcgagacgctcaaaactgaatgttgaagctgcgagccaattcacacgacaataactctttactcggatgactgattgagtcccgtattatatcgagacgctcgaaattgaatgttgaagctctgagccaattcanacgacgataagcttttactcgga

SEQ ID NO: 154818 - DNA, 330 bp, Glycine max
cttttacattgtttaatactaaacattcttaaccaataacatgaaggtgtgaaatgttgggttttctaccattcaacaattcatatggagttttcttctaaatagatcttatcaaagccctattcattatatagcatgcagtattaacggtttcagcctataaatattttggaagaggagtgtcatttaaatacgttctaacaatttcttccacagatctattttttctttcaacaactccattttgttgaggcgttctatgaacataacagttattgtccatgccttgcttataaaaaataatcagattcttattttaaattcacccca

SEQ ID NO: 154819 - DNA, 322 bp, Glycine max
tccttatcataggtatcaagcgaactaagaacaacaatcgtatatctgctctttgaccctcccacagaatgggctacaatcgagattcttttcaagctccttgacttcttaacaacgtgcagatctgatttgatgacaggccataatcattctacatgatacagtttgagagagattcttagctatcagaactgagaatgggcatgctaactttaaatatataaatttgtatatctcgggactcacttcatcagctcatcactttccagcttcatcaatcttaataaatgtcgtagtgtaacgatctgatgaacttactaca

SEQ ID NO: 154820 - DNA, 377 bp, Glycine max
  unsure (1)..(377): unsure at all n locations
actttgccaagaatccccattgaaaaacctttattcaaacctttcaaagttagtgagaaggctaaaagaaaaattagggaacttagaaaaaataaatccttaattgaaggcgtaggtgacaaccatagtgaattactaaacaagattggtagtttacttaaagtcattccagataccccccaagcctcggaaaatacttccaaaatggtaacaagaagtacctccaaattaatcaatgttattaatgaagatagtgaccaaaactcagataacacaactgagataggatcagtgtcagaaaagaatataaatccaattaattccaaacactggaaaacaccctccanattatattatcaacgtccaactgcccctga

SEQ ID NO: 154821 - DNA, 349 bp, Glycine max
  unsure (1)..(349): unsure at all n locations
tcatgatgaatcaacaatgattcanaggtggtttgatgataacgatgatgacgactaaagatgatgagcagaaagctcacgtgaatcaaagaacatctcaagagaatcaagatcaagatcaagattccagaatcaagaatgcagactcaagaagaaagcctacaaacaagtttcaagattcgagatctcaagaatcaaagatcaagattcaagaatcacgactcaagatctcaagaatcaagatcaagattcaagactcaagattcgagaatgaagaanagactcaatcaagataagtattaaaaagttttttcaaaactttgaatagcacatgagtttttgacaaaac

SEQ ID NO: 154822 - DNA, 442 bp, Glycine max
  unsure (1)..(442): unsure at all n locations
agcttgcnacctcatccataatgtnttgtgcagatttattaataagattagagtaaaagtcagagataactctntctacatcatcttcctctttataaagaacatcctgatcatttgtaattgagaagatagagtttacctagcccctctaagatgatttcctatggaagaatntggaatttttttctccaaggttcagccatgatgcgcatgatctctaagcccacactatctccttctgtttcagcaaatcgtctagttatttgtcaatggagtgggtttcctgaatgatgctcatagattgaggttgagattggaggaactcctataatgcccttaaattntgataactaanaataaatgtttgatgtatttctggtgctatttgattacttgattaatttgggtgagttgaggtattgtgtgaattacccatgtgtga

SEQ ID NO: 154823 - DNA, 412 bp, Glycine max
cttatctagccaagatcatacaaaagtgtttctacagaacctaactgtttctaattatatgggccatcaaatctatcatgtgtcgacggtcattgattagcccgtgaattttctcgggtgtcgtacacacttcatcgatggcctttgctcttactagtattcgcgggaggtcttgacttccattcaaggtcaaagcgaacctattcatccacatggtcgcttcttgatgtaatgcatcaatcaccctccctcatgcttccttctctgcgtacgcttgcacaagatactctactagcttttgttcatgggtccaagactggtttaactcttcctctgtctgccctatgatagctagcatgctttgctccatggtttccaagtgttgagcctcactactcttggatctatagca

SEQ ID NO: 154824 - DNA, 398 bp, Glycine max
  unsure (1)..(398): unsure at all n locations
agcttccattagctntggatcttatntagnncagttgaactcttttattagacaattctagagctgtcacaactgcaattctaatctctgcattaattatgctttagtgtcactgctcacaaagctgctttgtgatgcagagcaaccaacaaacaacagcaaaattataaggggattatgattatacttctatccaaaattgactaatcgttggccacttggatgattatcattatctctaaattttctttntttctcaccacgttttattctttaattggtaactggtaggattttttcccaacatataaaaatggataaaattacacaatcaggttggtctacagagatagagatacaaaactatgatggacagtttctattgctttttattttca

SEQ ID NO: 154825 - DNA, 284 bp, Glycine max
ctgatctaacaccgactctttctcttctgtattactccattgatgccctgaaaacgccccaactgaatctattttagaagcgaccgtgagattatggttgttttctataaaaaaatctccctttttccccttttatatgaaaaaacaggacagagagaccgggttacacacaaataatcttaacatgagaaagtaattgttgtttaccggagatctgaatcaactcatggtaacggaatacaaagttattttcgtgtgtgaaaaagaaacagtgtgcatatgtg

SEQ ID NO: 154826 - DNA, 372 bp, Glycine max
  unsure (1)..(372): unsure at all n locations
tcctaaatttatcatggagaactattttgatggccaaacctttgtactttgcattgttggtatatcatttctaatgagtaatatgtcatccacatatagcactaagaaaatgattacactccctctaacctttntgactcacaaggttcttcctcacattaaagtgaatgttccaacttttggaagctngtttcaatccataaatggatcgtttgcaacttgcaaactttattatgatcagaacaggatgtgaatccttcttgttgtgtcatatacatatccttttttagctcaccattaaggaaaatcgnttcacatccatttgccatatttcatgatcatagtatgttgctatagcaagaagaatctaaa

SEQ ID NO: 154827 - DNA, 285 bp, Glycine max
  unsure (1)..(285): unsure at all n locations
gntacagaacttaggagtaatcaagaacaagcttgttcgcacatctttcgcgtgtatgatatccactcgaaaggtttgaagtataggagaccttctatcctataacagcacgtggcggacaaaaatgggcagttaacttgaatggccactactgtcaatgcggaaggtattctgcgcttcactatccatgttcacacattatagcagcttgtggttacgtgagcatgaactactaccaatatatagatgttgtttacaccaatgagcacatcttataagcatact

SEQ ID NO: 154828 - DNA, 432 bp, Glycine max
  unsure (1)..(432): unsure at all n locations
gagcttcctttctttggccaagcnggttttgctttggcttgaccnccnnggcaatnngacgctcacaaacagcaatatccaccactccttcagttggtctgcccaggtacttgttgattacagcaggggagaatctaatacattttcctctgacaaacactttctgatactcatcactctttctgtttgttatgtcagagggaatgttgacaatgaattccctgactagactttcataacaatctcccaacttggtgacagttttcagcagtccagcagccttgatgaggtccatgatcttcttgcaatccaaggcatctctttccagttctctttctaaagcaagtctgcgttgatatacaaatntccacctttcaacattgccaatggagtggaatgaaatgttgtccaatggggcatcanggacatttc

SEQ ID NO: 154829 - DNA, 381 bp, Glycine max
tatgcaaatggggcctctactaattaccttaaactggtgagacttgaagtcaattttactccaactggagtgaaatatctgcatgtaaaaaccaccgaatttgatattggtatctactttgaggcaaatggccatggaactgtcttattttcagaatctttcatagagtcgttggaggctagaactaatgagatttctttatgatccaaaggtttgttctaaggtttctgactattttcacttcacttacaagattcaactaaacagaaatgtgtgattgttagtttcaggttcagaaggggaaaaagctgctctgagactattggctgtcagtaagttgatcaatcaagctgttggagatgctttgagtggattgctctt

SEQ ID NO: 154830 - DNA, 482 bp, Glycine max
  unsure (1)..(482): unsure at all n locations
gaatcatgagagtccccaaagaaatctaaattaatatacaatactagaaagaggtgtatttcttgtaactattatcccttgaacctctagagatttttttacaaagaagcgaataagtgcagaactgtacttcattctcctgtacatctctgaatatatattcacaggcaaggctgctgttccacgctcgaaatgaagcatccttttgaactgttggatttaccaaaaacttaacatccaggttcacattctaatgcttctgtttcttttctgtcacaaaccaggttcacaatgtttgttctgtcataaaccaggttcatgagcccaaaaagcatctggatccggacaaaatagagaaaaatcttcaatttctagattcgctatgtgccaattcacagaacgggcctgtattgacttgaattagaaaacgatgatgggcanaagccatcacttatcatcttctctgcaagagaatgttatgt

SEQ ID NO: 154831 - DNA, 393 bp, Glycine max
  unsure (1)..(393): unsure at all n locations
acatctaagcttctcacacatactgctttgaaacaattgacaccatatataggtcctactattctctacttgtatggcatactgtatgggttctacccataagatccaaatgcaatatactttgaatcttctgatccattgtttcaaagcagtattggagggaagcttgagattgaatttggtcttttggtgaaagaggaaagcttgaggttttccttatttgtgaaggagggaagctngacattttgttttttctggtcaatgagggaagtatatatgagataaataattnngaaatttgtatacttaaaagactttccanattgaaccaattatcattttttatatantttatgcattaatgttagaatatatttaaatatattctctaac

SEQ ID NO: 154832 - DNA, 498 bp, Glycine max
actcagctatcaccaatggcacaatgatcttctctcttgcaacttccctgtgtgccttatcaccattacacaacattatggggatttcttgccttgtcaatcatgtcactcttcacctttatcaatgattttctcccctttcaatgactttaggtatccttgcttcatcaagatggctttcatcttgatcctccataatccgaaattgttattttcgaagaacttctcaatgccgtacttgatacctattgtataaccttcttgccttttctctttcttgttttttccactcttacagacaacacaacttgttggttctattcaacaagcagccagaaattaagagacataaacttccaaggaaaaacacaacactcaaccaaataaagaaatccataatgtgcaatattcaagaaatgtataaaccaaaagcaagaatgtaagacaggtaatgagaaaacaacacattctgcgtggttcaaccaatgtggtctactt

SEQ ID NO: 154833 - DNA, 263 bp, Glycine max
  unsure (1)..(263): unsure at all n locations
acaagacaacgcatatatgctngaagacattgcaggagaggtcattcctaggacctggaatgcaactcacttaagaccatactatagttaaaaattgagtagtgtactatanttcctacttcagtattctctctcacttgtaaaaaaatatgggtctttgctaaagaggctttaacgaggcacgcccaagtacctatgtataaggatagttcacgaaccatactattaatactatccttttacccanactctatgtactatat

SEQ ID NO: 154834 - DNA, 102 bp, Glycine max
agcccaaacagcatatggcaagtctaaacgtcttaacttgggaaatgcaatctcttttcctaaaaagctcgccaaagcgcaagagacatgggcacctggtgt

SEQ ID NO: 154835 - DNA, 464 bp, Glycine max
  unsure (1)..(464): unsure at all n locations
tgcaagctntatatgtgacttatttaactaaataagtcatattgtaataacanctttattcagaccacgcggaagctttacttgcccttaatttgactcatttaaccaaatgaatcaaagtttgacaccttcatacaaactaagtcgaaactttcaagagcttaactcgacatgccttatatacaccacccgcaatatgtacatagaaataaagttgaatatatacagaattattcaagaacaaatgaaaaaacgtacaaaagtttttcatcagtagactaaaagactatgccgtcccagcatcaaacaaaatagttgaacaaactcaacggaacaccgctgatgacaaacaaatntaaatgtataaaatgcagaagctggtgcgaagatccatgtataaattgcagcttttggtgcaatccatggttatatgtattcaagacatcctactatacataccacaa

SEQ ID NO: 154836 - DNA, 335 bp, Glycine max
cctttgcataccggatgacctaagacttgatgtgttaatgtaaagaatgattattatttagcacaagaacatgcctttaaattttagtgtgccaaatttttttgaatcaatagttacacgttaaaaacaacattaatttctaaggaatagattgaggatatatgacaaaaaatacatacggaattaccagtccaagcctgggtaatagatattagatctctagaaaagattatatattagtaaaatacctttggcagcagatcgcctacgattaattgctggttcaacttttaaccacatcatatcactacttcgtgtaaaaagaagtatttgtg

SEQ ID NO: 154837 - DNA, 430 bp, Glycine max
  unsure (1)..(430): unsure at all n locations
cctgcngcatgcaagcttctaaggtggaacaacaattgaagagaaagagtgccatggngaagtgttcttctaattttcactctcctggttagaagtacaaaaataagaaggagggaaagtcatcaacaagcaatcccaatgttacagcacaaagaaatcataataagtccaatgaggcacttaagaaagcaaatgatagtgagattaagtgcttcaagtgtttgggaagaggtcacatagcttctcaatgtccaactaagaagactatgttacttaaggaggatggagaaataattaatggatcttctttagaatctgccccatctagcggtgaagaggaaagggagtcagaaggagacttgttcatgattagaacgatgttgggtagtcaagcattgaattgatgactgtcaagagaaatatttccatg

SEQ ID NO: 154838 - DNA, 442 bp, Glycine max
  unsure (1)..(442): unsure at all n locations
agctntaaactntnntgaccatgtaatnntacagggatttatggctttgagntcagcaaagtcatcataaanattgatgacgatgatgataactcaaacaagtttcttgaaggggatgttttgtgatcctggcttaattgattgtggtaacaaaaggattcatcaaaagagttaagaaaaactcctattgagttcttgtattagagatacctctaaaatgaactaagctaaaataaacatgtagtatttaacttaaacttatcatattttttatattaaattctcaaattaagtaatgccacatgatantctttttacatttacaacaacaagttgatatgagatgtatttagaacaagttgcagaatttcaagaaaacatttacaagcatatatatttgatatgagatcttactaacaagaaatanagcaactaactaaag

SEQ ID NO: 154839 - DNA, 304 bp, Glycine max
  unsure (1)..(304): unsure at all n locations
tgcaggtgctgctactggtgaatgcacttctattggcctaccacacctcactgtgatggcactcacacttttaccattctgcacacgttgtgaaggaaattgcgcagatgntctggattgaactcggcatacttgagtatacattggccccatctgatgcgtcacactctgaaaggaggctctcgcttcttgcctgaagtacatatcctggatgggcatgtacctcactatctcctctgaggaagggtgagaatgggcctcacatgctcgacgcttttggtgtggctgttgccactactgcata

SEQ ID NO: 154840 - DNA, 393 bp, Glycine max
  unsure (1)..(393): unsure at all n locations
agcttagctacacacncnctattatagttaagctctcccctattccaaaaanacatgaaaatacaaaaaaaaagtccctactacaaagactactcaaaatgccctgaaatacaaggctaaaatcctatactactagaatggccaaaatacaaggcccaaaagaaggaaaaacctattctaatatttacaaaaaaagagtggatccaaccttgacccatgggctcaaaaatctacccaaaggttcatgagaaccctagggcattctttattagctctagcccaatcctcttggagtcttctatccaatacccnttgggggtaggattgcatcatgcacttaacgcgttcatcgcgatntccagaaaaaatggggcttnttcagcccttcaactt

SEQ ID NO: 154841 - DNA, 272 bp, Glycine max
tgaaagtaactatatgccttagttcacctgttcacctaactggtcatgaatcaaatatcgggacctgtcgctagactctatggtttatgctcctctgccgaccaccgaacagacctttgtccttttgcgcaacagtttgaagcaatagaacagactggatcttatgctgtacacatttacaatagacccgccttacctcagcagcactatcagccacactagaacaactatgacctctctagaaatacgttcaatcccgggtggaggaatca

SEQ ID NO: 154842 - DNA, 438 bp, Glycine max
  unsure (1)..(438): unsure at all n locations
agcttatgaaaactccaatgtatgcttccaatcttctaagttaagacgaatcaggtaaaccaataggcgagacgatctatagaggtatgatagggacctttctgtatctgaccttaagtagacctgatattatgcatagtatatgtttgtgtgttagatttcagtttgatcctcgagaatcacatctaaaggctataaaaaggaacttacgttatctagtaggtaccactaaccaatgtttgttttataagaaaaatcaagatttcatgttagttggctacctcttggctgaccaaggagttgcacaattttccatatgtttatgtatcttaattctagttttaattaggtataatgacaccatcaatngttgttatcaattctagttntaattaggtttaatgacaccatcaattgtngttattggtgatcatttca

SEQ ID NO: 154843 - DNA, 300 bp, Glycine max
tagagcattgtcgctatcatagcctctctcccctctgtctctctgtctctctctctgttgtactctatgtatgtatgtagaaggattgataagtcatctcaaatccccaaatgctctgagtgaaatcaactctgacatctgatggctcgatgtccactctttaagagaaagatagagagatctttccagaagactattgtagataagaaggcctatatcacatgggatgataacaactcaaaatcgtctgatgattatgataaagaaatgattaatctatgtcttatggacaaaaattat

SEQ ID NO: 154844 - DNA, 446 bp, Glycine max
  unsure (1)..(446): unsure at all n locations
agctntataagcgtgggtctgggagacaaaggtcatgtggtttcgatatacgaagatgatgttccgagtacattagattcggtacgaccatgccctcctgatttccagctgggaaattggcaagtggaggaacgccccgacatttacgcaacgagcataatgtaaacctttacggttttaaaagctctatagttgggcctaggctttagagtttttccttttgttaaggctttgtgtcttttgttgttgattttataatacaaggatctttcttcatctgttcctacgtctctacccattctcattcatttgcatgtttacttctttttctgaaacggcagatccgatgacgagtcccccgaaggtacttatacctgngacccgcctatcgacttcgagcaagaaatgaatcaaacggaagatgaaggaaacgatgatgtgggact

SEQ ID NO: 154845 - DNA, 340 bp, Glycine max
ctcaagaaagcttcttatggaagctaccttgtctattcattgaagcctgtgtgacacttgttgtgactctgatgaatgagagtcctgtgagacacaactcagagatcaacttctctcctttatcttgctttaatttggtgctgcgcactttttctttctctcccttcttcttttcctccattgaagcatgctctccagcttcttattcaaggctcatcttggcggagaagctccttcttccatggcttattccctaggggatggcgccgcctcttaactcttctgctttgtccttcgatgcatctccatggtggaaaatcaccattaaaggacctcattg

SEQ ID NO: 154846 - DNA, 409 bp, Glycine max
  unsure (1)..(409): unsure at all n locations
agctttgagccaaaatcctgactcactatatactttgtacccaggtgagaatgccaatccttaccctcggaagcaaaaaaagaatagaggggaaatttccgatcaaagaaaaagagaaggaaaatttccaatgaaagcaaaaaagaaatgaaggaaaattccccaatcaaagagtgggagaaagcaaaaaaaggaaaagaaggaaaattccccaatcaaagagtgggagaaagcaaaaagaaaagaaaggaaaattcccaatcaaagaatgggagaaagtnaaaaaggaagaagaagaaggaaagaaagctcctgatcaaggatcgaaagaaaccagaagaaatgtgcagagaggtctttggaccagacaatatctgaacagtacagaattgtcaccaaatgaacgaaa

SEQ ID NO: 154847 - DNA, 431 bp, Glycine max
  unsure (1)..(431): unsure at all n locations
atatacaaaagttagtcgtatttagcgacttacaaactcccccaaatttacagttttgcttgtcctcaagcaaagaaagaacagttcacttgtcctcaagagacaaagatagtggccaatcaaaagaaaatggtgtttgaatcattaaggacatcaaccatatgaactgaatatcatggaatgcttaaatcaattacttctcacaagcatgctatntttcaaagataagagaacaagtattagagtcacaactgaaataagctagtaagcatgacaaaaatcaaggaatgatcatctaccaaaacctcacagtcattggttcactcaaactctagtgtttaggcttattccatcataaacaaccaacacaagttccaaccttngcatttcatctnctatcatacaccaatgaacactcaaatattaatctg

SEQ ID NO: 154848 - DNA, 400 bp, Glycine max
  unsure (1)..(400): unsure at all n locations
ttgtagctaagctctaacttctcaaggaagttntctcaaagaagcttctcaaggaagttntctcaagaaagcttctcaaggaagctacctagtctataaatagaaacatgtgtaacacttgttgtaaatttgatgaatgagagtcttgtgagacacaactcaaagttcaacttctctccctttttcttccttcaatttcgtgctcccccctctctctttctctccctctntcttttcctccattgaagcatcctctccaagcttcttatccaaggctcatcttggtggtgaagctccttcttccatggcttattccctagtggatggcgcctcctctcacctcttctcctttgtcttccgctgcatctccatggtggaaaatcatcattgaaggacctca

SEQ ID NO: 154849 - DNA, 427 bp, Glycine max
gacacccacattttctacttcagtatctcttctaacattatctttcttgctagacctatactgaccactcatgtcacaaccaattaacacaaatgaggttcttcctctaataccaatgattgtgtcttacctcataatcaccgtcacaaatccgttttcatgagccactgatcgagcccactacaaaacatcatcttggatagcaaacacctacaacgcaacccaaacaatgttattcttcaagggacattcattctatcaatttaataacaataataaagaatattacctaagaagtattgaacgcatccgaacaatcaacatgttgttcattcacaccacattcttattcattttcatcatgcatatcaacctttttaaacattattctgtcatacattcattgatcttcatccatcttaacaac

SEQ ID NO: 154850 - DNA, 342 bp, Glycine max
agaatgatttccagattgagtcaacaagttcaagatcaagattaatttcaagattcaagagaagttgatttcatgattcaagaaaagacatcaagaagaatcaagattcaagagaagataattcatgattcaagagaagaaatcaagaagctacaagtcaagacttcacaagggaagtattgaaaatgatttttcataaaccaaacatagcacagttttgttttacaaaagagttttctcaaatttttctaagttaccagagtatttactctctggtaatcgattaccaggttcctataatcaattatcagtgataaaatttgatttcaaaagttttaactg

SEQ ID NO: 154851 - DNA, 426 bp, Glycine max
  unsure (1)..(426): unsure at all n locations
tgctgaccacctcanaagactgganagcggtttctaacgattcttctgcggcttccacataaggcatagaggatgggcagctcaccaagatgtcttcctcgcctgacacgatgaccaaatgcccctccactacgaatttcaacttttggtggagcgtagagggcacaactcccactgagtggatccacgggcgccccaacagacagctgtagggggggttaatatccattattcggaaggtgacttgacaggtgtgagggcctatttgtactgggagatcgatctctccctaacctctcggcgagtgccgtcgaaggcacgaaccaccattgaactcggctttaagtgggaagcattgaatggtaatttctccaaagttctcttaggcatttacgttaaactggaaccattatcgatgagcacttt

SEQ ID NO: 154852 - DNA, 434 bp, Glycine max
  unsure (1)..(434): unsure at all n locations
agctntgagcaaattcaaatgacaattactttntactcggatggtcgaatgaatcctttaatatatcgagatgctcgaaattgaaaacaaaagctcgtagcaattgcaaaccataataacttttaactcggatggtcgggtaagtcccgtaatatatcgagacgctcgataattaaacagaagctttgagcaaattccaacgacaataacttttaactcgaatgtctatataaaacccgtaatatatcgagatgctcgaaattgaaaacagaagctcgtagaaaatgtaaaccacaantaactttaactccgatatccgattgactcccgtagtatatcaagacgcttgatattganaacagaagctctgagctagatcaaacgacactaacttttcactcggatgttcgattgtgtcccgtagtatatcgaga

SEQ ID NO: 154853 - DNA, 100 bp, Glycine max
aacccactaactcctcttgatcttttgcctatgcctaatgtttctgtttttaagcataaagaatgtcaagccaaggcggactatgtgaagaagcttcatg

SEQ ID NO: 154854 - DNA, 309 bp, Glycine max
  unsure (1)..(309): unsure at all n locations
gctgcagctacgtgtgtctatgagggacaaatttctttagaaatttctttcanaanccaacccatcggattaccgtaagctacctggcatcctcaaccaaaatatttcaggatttttttatcttgaactacaatggctttaattcacttgatcgtgtaacacaattaatgaaagatctcagttgcccaacacaaaaccaggatctacatcatgctggaaaacactttggccaaacgtacaatacatgagggactgaacaaccgcccaattatggcctggtgatcatattatctgcaaatatcgtgaaag

SEQ ID NO: 154855 - DNA, 431 bp, Glycine max
  unsure (1)..(431): unsure at all n locations
agcttcctcggggccatttcctgcgaatgcaaaatattggaaagttagttttaccagtgggacactactcttaaaacaaaaatggcatacaacctcctcccataaatacaaacatcaatgtaaatntagagcaagcttatgcgcatatttccttacgaacattcacttgcacaagacatcctatcaactaagaaaaatgcacccatatacaatcaaggtagcttcattacctagattattacatgtacttccaaggtgtatntgttatttacatcacacacgcctccttggctgaatttacatacatgcatactcaaagcattttggggtaccaaaaactgcacatgcgctcatcttggtatttctaatacccatacatatacaaacttcacgatgaatctngactacctacacaataaggtgctacattt

SEQ ID NO: 154856 - DNA, 376 bp, Glycine max
  unsure (1)..(376): unsure at all n locations
agctggtagacatttaaatgacaataactatttactcggatgtccgacnnaagttcgtaatatatttagacgctccaaattgaaaattgaagctcctagcaaattcaaatggcagataaattttactcggatgtccgctngagtccggtactatatcgaaatactcgaaattgaaaacggaagctcgtagcaaatgcagaccgcaataacatttaactcggatgtccgattgagtcccctaatatatcgagatgctcgaaattgagaatagaagctctgagcaatttccaactacaataactttatactcggatgtccgattgagtcccgtaatatatcgagatgctccatattganaaccgaagctctgtaaaat

SEQ ID NO: 154857 - DNA, 428 bp, Glycine max
agcttcacacttgataatgtataacacatgaacatttctatgcaatgacattcatggtactccgaacaaaggtggagtatggaggattgccttgagggtccgcacttatgcaatcatgaaactcagctccaaactcgaaagtggaggacacatgaacagccctaagcaataacattcatgtggctccagaaaaggatgagaatggaggattgccttgagggtcctctcttatgcaatcatgaaacacaactccaaactcaaaagcggaggacacatgaacagccctaagcaataacattcatgtggctccggaaaaggacaagaatggaggattgccttgagggtcttctcttatgcaatcatggaacacagctccagactctaaaatggaggacacatgaacagccctaagcaataacattcatgtg

SEQ ID NO: 154858 - DNA, 447 bp, Glycine max
  unsure (1)..(447): unsure at all n locations
tcacttatcggcattaaacagagcananattttactaagttattgttatctatcgaacagggtcactcagctcagaaaatgctacaacgaatttcgctcggcctatataagctcgacttagcgcgtgactattcaacaaaattttgactaagttacctgggcttagtgaatcagcctcacttagccataggtacttcatcaagagaatgaatattgatcctcacaagataaactcgcttatcgcggtaggcgtgcttagcgagtttttccggaaaactcatatattcaatgaatattgatgaacgtccttagcgtagcatgctcgcttagcgagttcattacgttttccaaaaaatcgcagctcgttttcttccttttttcgggcctcaaacaagcatatcanacatgcacaaccctcagtacaatgcacataatgcaaaacatgtg

SEQ ID NO: 154859 - DNA, 410 bp, Glycine max
  unsure (1)..(410): unsure at all n locations
agcttgaaggtgtgtaacctaccatttccatagtataatactggtaatgtgtctaccatcacgattatcatctccctttccatcattgggggtgccacttgggctgccagatccctccacgtttgggtgtattctttgaaagattcatgcccttntttgcacatgttctatagttgcatcctatccggagccatatcagaattgtactgatactgcctaacgaaggcaaccattaggtcctttgaagaatggactcgggaaggttccaagttagtgtactaggtagcaactaccctcgtaagactntcttggaagaaatgtatcaatagttcctcatcttttgtgtatgcccccatcttccgacaatacatcattggatcgttcttggggtaagtaatccccttgtactt

SEQ ID NO: 154860 - DNA, 347 bp, Glycine max
tgatcatcctactttgatgagtgagaaagttggggccaatgaagaggatgagaatgaggaagaaacccttgctatgactgccattcctacacggtcaaatttcccatcagcccaacaatgtcattactcagccaataacagtcactctcacccaatcatccacaaaggccatccctaaatcaaccacaaagtctatctaccgcacttccaatgacgaacaccacctttagcacaaaccaaaacaccaaccaagaaatgagttttgcagcgaaaaaagcctgtagaattcaccccaaattctggtgtcatatgctaacttgctcccatatctacttgataatgcaatg

SEQ ID NO: 154861 - DNA, 326 bp, Glycine max
gtgcaagcttgactctctaagttggtggtcatcttgaatcacaccagcagtgtcgtcgtgaagcacaccagcagtgtcatcgttgtcgtcgaccattctccatcactgtcgtgggtaagcttccaggtcatcttcctttctccctttctttcttatacatagtctctgagggaagagggctttgtggtggcccctcttgaatttgggtgtatctgcacccctattctttgcgcaaccatataacttgctgcatttcaaagaaacttgattagggttggaagtatgatggaactgtgtaaatgcaatgaggcatccattctgtctat

SEQ ID NO: 154862 - DNA, 434 bp, Glycine max
  unsure (1)..(434): unsure at all n locations
agctaacaagaatggttacggcattaccttttttctttatgtcacatccttccatctgaatcttgttgattcatgttgtaatctatatgcattccactggacatgcatagcacatttacatacactgctgaatgataaactgtttgacctcactatcaaagctgntaatgatctttaatggtttccattttttgatagggggcaagttgaatgggatgcctttgaatggatgcatgttgagtgctttcctaatttgatacagctggcttgcttgttacctcagaaagaagataatttangaagttaaatttcaaaggtcacttgtctatcttttngaagttttaatttaattattntatgacttctgatcatagtttgttcggagcttttgctggcataagtcatttaaacacangtttttgtatctgtttctg

SEQ ID NO: 154863 - DNA, 419 bp, Glycine max
  unsure (1)..(419): unsure at all n locations
actcactgtcgatataaaatatttggaaattaagcaacctaatgacatggaaaccgatagattgacctgctggttcgagtaacctccttctgatcagagtaagggccatccattggtgtctataaatacgaactccattatctttcactaccatcaaacatatatacatagagatactcatagtgataacttgctagcggggttaattaatatatcaaaagaagtcttcgtgttccctcaaaggcttacagtattcattcatacctaactagttgctngaatgctggatgtctttgtaggaatttgacagcttacttctacgctaaatcatagatattctgaaccctcacgtcacatccctttgttatcataaagatcttcagccagagacctagctagatatcttcattaacattttt

SEQ ID NO: 154864 - DNA, 391 bp, Glycine max
  unsure (1)..(391): unsure at all n locations
tgataacaaagatgatgacaaanaactcanaagtcaagaacacttcacgataacaaagatgataatctcaagaatcaaagaatgagttcaagattgaatcaagtacacttcaaagatcaagataaaagttgaattcaagaatcaagaatcaagaatcaagtttcaagattcaagttccaagaatcaagatcaagattcaagactcaagattcaagaatcaagagaagactcaatcaagataagtattaaaaagttnttttcaaaaactgagtagcacatgaattnttctcaaatccttctatcaaagagtntctactctctggtgatcgattaccagattattagaatagatcaccagnagcagaatggctttcaaaaaactctcaaactg

SEQ ID NO: 154865 - DNA, 444 bp, Glycine max
agtgggagtgatgacttccctttcttgcgagcgacgtttggtatttcccccttcttctctatgtataggtgcttgtttgaggtcttcagacttgttctcccttgatcatctcccaatatgctctgcttaagcacttgaatgtggttccttcttagtttcacccaaacagttgggcaatggtgggagcttttgaaattttgtgccccttcttcaacatccaacccaatgtgttagtctttttgtatgtcttccagatgaaattgatgggaaaaattggttgggtctccttgaacagcgtgtccaagaagtagttcgagtatgactcgaactgtttttgctgtttcaaggaccgtttcttcaggtcctcgacacgggtgtcgtggttgatggtttgccactcgatgctcaacaaggatggggagctctgcttcttattctgctagc

SEQ ID NO: 154866 - DNA, 171 bp, Glycine max
acacaacacccgcccaaggtaagcaccatactatcgccccgacacaaaaccggcgcgccaagagcaaactgacgtcgagagcccaaaccaccccccgatgcatacgacagtcagagcacacaacgcaaaagagcgacaactcctccaccccaaaaatcaccccacctatga

SEQ ID NO: 154867 - DNA, 356 bp, Glycine max
  unsure (1)..(356): unsure at all n locations
cttggaagcctaatcgagatgagttagactgtgctgtcatggncatnngnccagagatcaaaccgncgatgttcatgtccatccttatgattaagccatagaccaacctagctctgtctgagttcaaatctgaagagcgggaagtaagatctaggtttgagtacgagaaaacacttcatgtctgagccaggatgataagatcttctctgaggagcttncatggntggccctctgtgtttagaataaagcccttgcccataatgcacagnctatcctccatctctctgggatcagaccttagnctacaaaatctagaataagagggtaaagattccccctcctctaataacactgga

SEQ ID NO: 154868 - DNA, 421 bp, Glycine max
  unsure (1)..(421): unsure at all n locations
ntagatgcctttaaaggttttaaggctgaagttgagattcttgtggaaaacaaattaagatcgtgagatcagatagaggtggggagtactatggtagatacacagaggatggacaagcaccatgttcatttgcaaaatttcttcaagaacatgggattgttgcccaatacactatgcctggttctccggatcagaatggtgtggcagaacgaagaaattgaaccttattagacatggtgagatgcatgaggagtaatgtaaagcttcctcaattttttgtggattgatgctcttaagacggttgcgtatatattaaaccgagttccaaccaaggctgtctcaaagacaccttttgagttattgaagggttggaaaccaagtttgcgatatatacgcgtntggggatgcccgtctgaagtaa

SEQ ID NO: 154869 - DNA, 427 bp, Glycine max
  unsure (1)..(427): unsure at all n locations
cctgcagcgtgcagctgaccaagctaattgagttatgtgtgtatcttatctaancattaaacatgtatgtagcggcagcttgaccaacgctagaatgagtgataatgtgacattaaactcaatcattaagtaagctttttaacatcagtgtgatagatgtaacatccttgattcttgacttattgacaactcacttctgcctgcttctaagatcaatgagcgacctcacagatcaacacaagacttttcagcatgttgtgctctcactcacacgttttttaagagattgctcagaaagtcactcatctcataactactcaaagccaaacacgtttaactatgaagcttttaagagataaactaccgaaaagcatatgtagctcggtggtatatatagtacaaatnaattcctttaaggcatcattat

SEQ ID NO: 154870 - DNA, 440 bp, Glycine max
  unsure (1)..(440): unsure at all n locations
ctataacanactntatttaattgcaatgaagaaattgcttggtttatagagcctctctttttcttttctttatattgcatagttcttgtaagcgggttttattcttccttgtcatcctttcaagttttactatttcatttgtgtaattcttctgagttctgatagcttttatttatattaatgtttatttattttggttcatgaagaggttcatttattgacatgatcttggtactggtgtttttatgcatgcgtattttcagtaaactggaaaaggaaattatacttagatacactaatcgtgctaaattctatttaaaaattgaaatagaaaataatagcattgtacatcatgcaactgatagcagtgctgatgcatccagacttccatctaggaatcaaattgacaaatctcacttatcatcttctctcattatatc

SEQ ID NO: 154871 - DNA, 367 bp, Glycine max
  unsure (1)..(367): unsure at all n locations
agctagataaacctaatgatgtattggagacatctatcttcaaccttcaaatagccccatgcatagagtcacttgccaatgtcagaattcacaagcgattatcctcctcaaattttagccaacctgcatcaattagactttgcaccttatgtttcaaagttatacaatgctcaataggaatgtcccaagactcctccatgataagcacatgtngcgttcgagttgtatcctcagaaaaatggaagttgaagaaccttggatgggttatggctaccattgcattattgagtagatacaggatgaagttagcatatgactccggtatagaggtgaatnctacaagcttctttgctggaaaattccttcc

SEQ ID NO: 154872 - DNA, 472 bp, Glycine max
  unsure (1)..(472): unsure at all n locations
accttcaaactcagcttcaaattcctttgcgtgactgacagtagtttaatcaatgggtaattgttattattctttctagcttaagttctcttttaacaataatcttattttctgattaatcattatggtcttatgggtaaaagtaagcctagtgcttaagataaacaccaatactatgttagttgattcttggttgaaggatctgatgtgttctgctttgcagattggggaccaaaaattgatgtagtagggttttgctttcttgatcttgcgttaaactatgaacctccagagtcccttgtaaaatggcttgaagaaggagacaaacctatttacattggatttggtagcctggtgagtctttctttctttgattatttatatatatntttccacatattgtttctacatgctaataaacctaactgtaggaactttgactctttagcctgcccaatttaatgtgtatatt

SEQ ID NO: 154873 - DNA, 441 bp, Glycine max
  unsure (1)..(441): unsure at all n locations
ggttcttganttttcctaagttctgtgacaagcttagttctaataacttggccttctcttaattgtctttgggcttggcgaccacgatcaacaaagtactttcggcacctactatatgttgacttgaccaacgctgttattggaatgctgtgacaatctttcaacaccttattcacacattctgataggttggttgtcatgtgaccatatcttcatctagatgtatcgtaagccatgctccatttttcctttgaaatgcgatcaatccatcttgctatggctggactcagttgacgaacattttctaagttttgatcaaacacatgcttgcaaggagtgtacgctgcatcaaatttgttatcatcaacagttatacgtagacatcaaactcaaattaaattaatgtatataatagaccttacccaacttcttgaacatctc

SEQ ID NO: 154874 - DNA, 458 bp, Glycine max
  unsure (1)..(458): unsure at all n locations
acctgaagctgcagctatgagcnnctaggaataagactctactcctagaaaaccttcccctagccttccacattaacattaaatgcattttagcctacttgtcttttccctttagcacaaaaaaaaaaccttattgaccctagaactgctcccatagctattgttggagccggtgtcagagaatcaactccaagagaaggttatgcatccttctccctctgtagccttcttctccacccacctcaccttctagccattccattgcttttgatccacccccctctacagagtcgnctgacaacagctttgatgcttcctcataatccttataacaacatcttgcatcccatgtctatggntcttcttacaccatggntaccccaaaaagcctcccttcaacactgactctntgaaatgaaactacttgagtaagaggcgatagccttgcataatccata

SEQ ID NO: 154875 - DNA, 96 bp, Glycine max
  unsure (1)..(96): unsure at all n locations
tgaactctagntttttttaaacaagtcaagttcaaattcttaattatactctaaataaataaattaagcttcaaccaattagggggtgtttgcttt

SEQ ID NO: 154876 - DNA, 258 bp, Glycine max
  unsure (1)..(258): unsure at all n locations
agcttctcgatatattatgctcctgagttggtcttccgagngacaagnnatgaccatnnnaatnnctcgagagcattcggagttcaattncgagcgtctcgatattttatgcctctgaatcggacttgcgtgtgatcaggtatgaccatttgaatttctcgagagcttccggtgttcatattctagcttttcgatatattatgcgcctgatactgatgtccttgtgagaagctatgaccattttaatttctcgagagc

SEQ ID NO: 154877 - DNA, 426 bp, Glycine max
  unsure (1)..(426): unsure at all n locations
tgccgccacggagttntccgactatgctcttgtgtggtgtaacaagctacaaaaggagagagcaagaaatgaagagccaatggttgatacatggacggagatgaaaaagatcatgaggaagcggtatgtgccggctagttactcaagggacttgaaattcaagctccaaaaactaacccaaggcaacaagggggttgaggagtatttcaaggaaatggatgtgctcatgattcaagcaaatattgaagaagatgaggaggtaactatggctcgatttcttaatggtttgactaatgatatccgtgatattgttgagctgcaggagtttgttgaaatggatgaattgcttcacaaagcaatccaagtggagcaacaattaaaaaggaagggagtggccaagaggagtttaccaactctggtcttcta

SEQ ID NO: 154878 - DNA, 406 bp, Glycine max
  unsure (1)..(406): unsure at all n locations
attgaccaatccttattntatgatttaacaaaattgccaagtgaaagtgtgcctttagatggtgcattgatagatgataggaaattcgatttttctgtgcatgaagcccgccgattggttagcaccaaccaagcggatatgaccggaaagcttcttgccggttcattggcttttgaaagccgcatcctccattaccttattgttcgcattttgcttcctagatcttcaaaccttgctcaagtttctgaagaagatctcatagncatgtgggcctttcgtaaagggttacaaattgacagggcacaccttgttagatatcgcatgcattaagcattgcgtgagaatgccccantgccttatcctcatcttgntaccctcttccttcaacacttcaacatccctcttg

SEQ ID NO: 154879 - DNA, 420 bp, Glycine max
  unsure (1)..(420): unsure at all n locations
ntgtgtgtgcatttatttgaactgtgtaaaatgtaaattactgttgtgtatttcgcattctttacactgcattctaagcacccacgggtttgagtaaaaaagggggccctatacccgggttcatgggaatttaaggagtggaggtgaatctatcatcatgctaggtctccgacttgcttgataatagtgaaacctcgtctagagctttctctctttataatatgttgtcgctggtattccataccgccacaatattattatattgagtgatgatacctctagaaaacagccgtgtgagttatgaattgttggggaatagttattagggacccctagatattgtcctaggttcccacataggggcaaagagcaaacacactccgtgccattccttctcatgcattntttggtaatagcact

SEQ ID NO: 154880 - DNA, 409 bp, Glycine max
  unsure (1)..(409): unsure at all n locations
agcccggatctaagncacctgcagctgcagctagaagattatgtgagacccatctcttgtggactaggaggcggncgggcgatggagcacaacaagtttttccacatccacaaatcgcgcataaacccaccatcccctgttgcccacctccaactgagctcacgtactcccacgtagcccatatcctcgtttctctcaacaccgggtccccatcaatcctcccaagctttcccaacatccaagtaatacaacattaaaacagcacaaactatcacagccaagataataaggcaaaagcagataactctgcccaaaaaagcaaccaaaatcacaactntntctcacttagagaccccagnaacattnccttagtccaattcgtaaccggagatcgactcantactttact

SEQ ID NO: 154881 - DNA, 464 bp, Glycine max
ggcttgtggagcttctatggaggctggatctttgagcttcaatgaggtccttcaatggtgatttttcaccatggagatgcagcggaagacaaaggagaagaggtgagaggaggcgccatccattaaggaataagccatggaaaaaagagcttcaccaccaagatgagccttggataagaagcttggaaggatgcttcaatggaggaaaagaaagagggagagaaagagagaggggggagcacgaaattgaaggaagaaaaagggagagaagttgaattttgagttgtgtctcacaagactctcattcatcaaagttacaacaagtgttacacatgcttctatttatagactaggtagcttccttgagaagctttcttgagaaaacttccttgagaagcttctttgagaaaacttccttgagaagctagagcttagctacacacacccctctcataactaagctc

SEQ ID NO: 154882 - DNA, 326 bp, Glycine max
  unsure (1)..(326): unsure at all n locations
ccgagcgcaccatccaatccttagatgacctcttgagagcctgtgtgttagatcagatgggttgtagggatagtttcttacccttgatagagnttacctacaacaatagttttcactccagtataagtatggcgccttagatgcattgatggtagaagatgtaagacacctctatgttggcgagatnccagagagagcatagccttaagacctgatgtagctcatcagaccacagaaaatgtctagntaatncatgatatgatgagagcagcccaaagtaagcagaagagctactatgataagagaagatatgatcttgaatttgc

SEQ ID NO: 154883 - DNA, 449 bp, Glycine max
  unsure (1)..(449): unsure at all n locations
cttggatgagatnttgagagattatgatgtttctatatgtggaggatacatccccactacttttatttcttctatctttcatcttttcttctcattgttgtaaaggaagcttccctgctatggagagctaaatcctcagttggttcttcctatggggtacttgatgtaaatgttttcatatctacctaatgatgttttatgtgttcactgtgctatcagtactttattctaaagtgtctttgccgtgatcatgcaactgcatgcttagttagggtcactcaacattgggaaatgatttgatctaagaagatgtcttggatattacagaaggttcatatggaattatggaaatattgcagccccactaatanaattgcttataaaggagaaggcgtcaagtggactgaagcaactgtagctgcattttatagccttaacaagcgctcatg

SEQ ID NO: 154884 - DNA, 443 bp, Glycine max
  unsure (1)..(443): unsure at all n locations
agctntagctcattagatgtagagaagttgntgataatnagcatttctagatgaaataagccatgttctcttgagtcaagatgaagtctgttaagagaacacaaacctttaacatcaatcggactatacctttctcttcaaatccagcgatcaactgtgtaagcagaaatttggagaagtatcaacttggaggggtcatatttggttgcaagaatagtactttaaaagaatgtcaatcaaaacaactctttggttagtatttctttctttagctttcttttattagaacatttagaatagattaacagtaattagnatgagtttaaaagattaatgaatcaatgattagagtttaacaggcttaccaacaaaccacttttcctatgtgaagattatagatcctagtctgcctatattcttattcaactatagagacaggaagc

SEQ ID NO: 154885 - DNA, 453 bp, Glycine max
  unsure (1)..(453): unsure at all n locations
nttaacactntctgcataaaaatntaaatgatgttaagatttcaattattcacataaaaaggaagaattaagagacaaaaattaacaattcctacataatttaatcccaaaatatacatatacatagcatgcagttatcaccaggcttaaatttctagccaacctctacatcttagcatacttggagtaccaaattctgacgattcaaggaagcctcctcaaactggttctgaacaaattgctatgcatcctggacaagtataaataaataaatattgtgtctgaatggtttgaggttatatggttctctacatatttgtccattaatttttgtgggttttaatggaagaatgtgggaagcaatgcaagaattagatgctctggattgaacttgcctctaaatataacaaanaaagaatacatcttatntntntatgacatanattttgtgga

SEQ ID NO: 154886 - DNA, 335 bp, Glycine max
ttgtaggagggattctctgcaaaagctagccgtatgatttgtctatctacctccccctgctacacatttttgctatttctcgtgcaaactacgaacatttcacttgtcctcaagggacatatacagcggcttatcgcacgaacatggtgtctgacttattttcgacctcgaccttctgatctgtataccatggagcgctcatgctcattacttgctccatgcatgcctatattttatatatgtgagcacaaggagtatatgcttccctcatatcatccactaagcttgacagatatacatgcatgcatattcaccacatattgactgccattgat

SEQ ID NO: 154887 - DNA, 462 bp, Glycine max
  unsure (1)..(462): unsure at all n locations
cctgaagctgcagctagtncttagatacagaacgtcttttatatcatnnatagagcaaccaaagacgccaagtgtctcatagcggccaatccaaagtatgatatcatcaaataataatccccggacgaaattatggtatgacaggatccaccagatccaccttagatagtttagtcttttttctcttccttccttcctactncttctccttaccttcttctctttcttaccttctttagaacaccctgaaatttcatcttaaattatttcctacattgagaaagactagatagtagaagnncactctatgtaaatctactttgagaatttatgatattatattattagggggataatcctaatcctagaatcttgagtataaatagatatataaataggagcatgtgttagctagacatagattagcagagatatataaactatctgagctaaatnccatct

SEQ ID NO: 154888 - DNA, 452 bp, Glycine max
ttgaaggtgcgtagcccaccatcttttcatagtagagtatcttttatgtgtctaccatcacaatcatcgtctccctttccatcattgggggtaccacctgggccgccagatccctccaccttttgggcgtgttctttgaaagatccgtccccctttttgcaaatgttctgtagttgcatcctatccggaaccatatcaaaattgtactgatactgtctaacaaaggcaaccattatgtccttccaagaatggactcgggaagattccaagttagtgtaccacgtaacagctaccccagtaagactttcttggaaggaatgtatcagcaattcctcatcttttgcgtattcccccatcttctgacaatacatctttagatggttcttgcgacaagtagtccccttgtacttgtcaaggtccagcaccttgaacttgggaggggtgatgatatt

SEQ ID NO: 154889 - DNA, 371 bp, Glycine max
  unsure (1)..(371): unsure at all n locations
atagagcaaaaagaacttatatacagagagagaacagatccagaaactaacacaaaagcagttacaaaggtcgttacaaatctgttagagcccaaaaagaatgaggcgggaaaagacagctagactaagagcctccttaagctgggaatagaagttcatcatccccagcttgtaaatcatgaatttgaatgaagctggctgcaaagctttggtaaatgcatcggctagctgcatagaagaccagactattaacaattncagaagatcactcagacatttctcgctaacaaagtgacaatccaattcaaagtgctcagttctctcatggaatactaggtaggaagcaattcggagagccgatcatcatcata

SEQ ID NO: 154890 - DNA, 355 bp, Glycine max
  unsure (1)..(355): unsure at all n locations
ntaaatttcggaaaccaaggtcgcaggctaaaaggctatcaaacttaaattatgcatctcacaacgcgattgtcatcataatattcatctcttaaaaggtttcgactcaacatactcttccttatttatatgacgaccaaagtcttgagcatgtgtctataaaccataactaatgattgtcttaacatacatcaatatctgaaacttgtaaatgcacttgtactataaaaaacaagtgtatatatgttaacaaatccctctatatgtgagaataataaaaaagtaccatctagctattttgaaaaagacgtgaattaagttatactttttttcttgcgaagaccatagacttatt

SEQ ID NO: 154891 - DNA, 360 bp, Glycine max
  unsure (1)..(360): unsure at all n locations
ggagatgcagcggatgtctaaggtggagtggattgaggtggcgccttccactatggaataagccatggaagaaagatcttcaccaccaagatgagccttggataagatactaggaaagatgcttcaatggaggaattgtttgatggagatattgagtgaggggggtgcacataattgaaagaataaaagatggagagaagtggtactttgaagtatgtctcacaagactctcattcatcaaagttacaacaagtgttacacatgcttctatttatagactaagtagcttccttgagaagctttcttgagaaaacttncttgagaagcttctttgagataacttccttgagaagctagagc

SEQ ID NO: 154892 - DNA, 439 bp, Glycine max
  unsure (1)..(439): unsure at all n locations
tgccttaggtcgaaaagaaatntgtcccaacagttaatgtgatactgaagggaatatgtgggccatcatcgatgagtgcaaagagaagctaaatctagcggcaactcacgagcaaaggctagaggatgagtacgccaagatatcagaagaaagggaagcaagggaaagggtaattgattcattgcaccaagaggcagcaatgaggatggaccgatttgctcttactttgaaaaggagtcaagaacttccccgattgttagccaaggccaaggcattggcggacacctactccgcccccgaggagatccacagacttctcagctattgtcagcatatgatagacttaatggactatatgattagaaaccactaggaaggttgtactgtcgctcaaatcttgactagttataacttcttgaataaaatgaagttatcccac

SEQ ID NO: 154893 - DNA, 424 bp, Glycine max
  unsure (1)..(424): unsure at all n locations
cttgcgccgccagcaccacatcccctgaagtctgtgcgagaataatcgccgccggagaggcacaaatggcagcagctgcgccacgactgataccaacgtttaccatcaccggaaataaggttgccatcagcaaaacacccagaccggttgcggaagagacggccagagacttcagacaggcgacaaaataggcggcattcttcagcaggtaaagggagttaatatactgcaatggttttgacgccagcttgaccaccatatcattcgcgccgatatgggtcatgtaagcggcaaatccacacagcatcataatcatcatgccgaggtcgccgccgcggctcattagtaatatnttaacgtattcaacgatatccgaggcgctgtancctgttgatacctgnctggatcagaacactttgtgccc

SEQ ID NO: 154894 - DNA, 457 bp, Glycine max
  unsure (1)..(457): unsure at all n locations
ctagggaatttntattatttactttggggcctggagacttgaaaaattatgctgacattcattgagctccttattggggttgtggttattgtgggtgtagctcgctacatcattaaagggtattccgccactggtgtgttatttgtcggtggcctgttattgctgattatcagtgccattatggggcacaaagtgttaccgtccagccaggcttcaacaggctacagcgccacggatatcgttgaatacgttaaaatattactaatgagccgcggcggcgacctcggcatgatgattatgatgctgtgtggatttgccgcttacatgacccatatcggcgcgaatgatatggtggtcaagctggcgtcaaaaccattgcagtatattaactccccttacctgctgatgattgccgcctattttgtcgcctgtctgatgtctctggcccgctctttcg

SEQ ID NO: 154895 - DNA, 456 bp, Glycine max
  unsure (1)..(456): unsure at all n locations
tgttgttgaaatncgctgagaagagctattatttttgtattctctctgcgccnccgttcatgcttcataggaccgaccaaaacttcgctttaagggatgccaagaaaaaaatatatgtggtttagtaaaaaaaattgaatttgttgcatttatgcggttttgtataactgaaattgggccttcttttgcaaacaaaacaaatagaaactcatgccattgtgctgctacaaggagcatagaggcagcagcattgtgaataccattaaaaatcagttacaggtacttcttccttccctttcgcccttcctatgaattagtacattgaatggcactataatctaatgttgttaatgaccgatggcggttcatggcagacagccaaaaatctgccataaaaatatgacggatggcatagcgaataatgacggatgtcatggctgaaaaaaaatacatata

SEQ ID NO: 154896 - DNA, 290 bp, Glycine max
  unsure (1)..(290): unsure at all n locations
aagactggactaatacatnagctacccaagnntcatggccttgcaagagaagatcctcataagcatcttaaagagctccatatggntgtgctccaccatgaagccccctgaagtccaagaagatcatattcttctataagctcttcctcattctctggaaggactggcttaagctagagtatactacctcgctcccaggtctatttccagctgggatgaccctaagagggtgaccttggagaattcttccctgcatctaagaccactgccatctttcatatcctaatttc

SEQ ID NO: 154897 - DNA, 455 bp, Glycine max
  unsure (1)..(455): unsure at all n locations
ggacaagttcacgtgcaggtgatgctataggtggaggttcttgtatttggtcgccagaccgcaaggtgatggcactcacattttttggattctgcacagtctgtgaaggcaatttgtcataattntgagactgagattggttcaactgagtagccatctgccccatctaatttgtcacactctgaatggaggctcttgtctcttgctgaaattgcatattctggatggttatttgcctgactaactcctctaatgaaggttgaaaaggggcctcaactgcttgttgtctctgctgttgctgcattggaggaggaacataaagcttgcttggaccagcaacattctggaaagaaaggacagactgatgttgttgtggacgacttgtccatctcacatttggatgatgtctccaaccctgattgtatctgttgcttggaggtcataattattctact

SEQ ID NO: 154898 - DNA, 398 bp, Glycine max
agcttatgcgcatatatacttacgatcgttctcttgcacaagacatcctattaactaagaataatgcacccacatacaatcaaagtagcttccttacctagattatttacatgtacttccaaagagtattagttatttacatcatacacgccatcttgtcaaaatttacacacatgcatactcaaagcatttcggggtaccaaaaatagcacatgcgctcatccttggatttctaatatctatacatatacaaacttcatgatgaatcttgactatctacacaataaagagctacatttcatgccttttttttcaagtttttgctacctaaagccgcatgcaaattcaagcatattttcctttgctaactaaaataggattcaaattatatatatata

SEQ ID NO: 154899 - DNA, 468 bp, Glycine max
  unsure (1)..(468): unsure at all n locations
ggacctatgaaactcagcttatgggtcctctcgttnttattgtctctccatctctcttttttccaactgtagcagacatgttgatatgtctgttgggtttgaaatggcagcactgtccctcattgagctttgatattaatattcttgattatttaacttatagttgtatatgttatcacttaactaatattgttttgccaattttaccacacacacaatgagatataaatcctcgtcttcttcttactctacaatctcgaagccattcaacttaattcaattaatagataaaaatttctaaaaataaatcacttgtaatgtatccaagtaaaagattctaatttacagtatatgagtggatatgcaatagaatgttcacacattagtttaatttataaataaaaagtaatatgcactataaattataaaaaaaagcataaaaacatagatgaaaagtgctattaacac

SEQ ID NO: 154900 - DNA, 413 bp, Glycine max
  unsure (1)..(413): unsure at all n locations
acctgcagctgcagctataatactgattgattgtgtccttataatggggcctttaatattccttgcgaatagaattgaaaaatcgaacagacgcattctattatctattgtcattaaatattgaattcctttaattttagaaactctgttaattgagtttaattctttgaagtcgtcacactcacaattcttttttggaggatatcaagagataatattttcaaaacctcttgtaatctcttattgctaaagcgaataagtnctgcagagaaattttctcgcctttttcatgcaaatctcacccaaatttatgtaactagaatatcatattagnactattcaagatttttatgggaaataatatcaatcacaaggntgtattcagcattaatggaggaggaaagagaaataaa

SEQ ID NO: 154901 - DNA, 387 bp, Glycine max
tggactcatgagtggtaagttgaggtctaagaggtttgttcattttgctgttactaatttttttccttatggtacagttgagatcaaaagcgactccataaacaagagcttcaaggtcaatggacaccgacttaagccattcctcacaaacccttctttagtggacgtagtggtggaagagacttccttactccaccctactcttcctccaccatgacttagggagtttttcttttcctatctccttctttacttttattacatttgtccgattctatttgatggtttaattgctcttaatcttttaattgtgctacattgaggacaatgtgttgttaataatggggaggggggagagtcttttgttctggtttcaacatctgttac

SEQ ID NO: 154902 - DNA, 119 bp, Glycine max
  unsure (1)..(119): unsure at all n locations
tcaatcgtgcactatctccttgaatgattatcactctccaagaggaatctcttagagtagagacaagtcagncttctatgttcggaggcaaagctagtatgctttgcctctagaacatt

SEQ ID NO: 154903 - DNA, 375 bp, Glycine max
  unsure (1)..(375): unsure at all n locations
agtgtgccttcttccaattcattggtggctgtttatgattcanaaaancgcttatcacgaaggaagaatcaaaagtcatccaagcaatgttttccattgctaactcgccttgtggattgtagcaaacattgtggtagaggcaaaggtaatgacaatgggagtactttatcaccttcacctgtcccaaaaccacctaagtctaaccctccaaagctcgagacaccaaaagctcaaccacctccaaccccaaatgttgagccacctcctacaccaaaggttgttcattcaccaccaacctccgtgtgctcactaccaccaccaatccactccccaccaccaccaatgcaatttgcaccttcatcaaaacttgttctc

SEQ ID NO: 154904 - DNA, 393 bp, Glycine max
  unsure (1)..(393): unsure at all n locations
tcaaccncagcagcaaaatcaaccatagcagaacaattatagacctctccagcaacagatacaatctcggaagaaagaatcaccctaatctcagaagggctagccctcaacaacaacaacaatagcccgccccccccttccaaaaagccaccaggagcaagaaaccatacgtgcctcctccagagcaacaacaacaaccacaacatcaacaaagacaacaacccaccactgaagcccttcctcaaccttcattataagaatcagagaggcaaacgacaatacagaacatgcatgtccagcaagagactagaacctcaattcagagctcaacaaaccagatggggcagaaggccatccagctgaaccaagctcaatcacaaaactaagacaagc

SEQ ID NO: 154905 - DNA, 445 bp, Glycine max
  unsure (1)..(445): unsure at all n locations
taaagtatgcccgagtcattcatccctatgatatgttgttgaagtattggcgatcagaattgccattccttggattatagggttgaaccgagctcatgcttttacaaaaaggttcatcaagtcaagttgaaatatggaagtaaccgtcttgcaaaattggggcaaaagatgaatcgagtcacatcactgcttcgtctactgccaaacatatttaggattgttgatgtccttgttacttccagtttcaccttgacaaagatgtcatggatcatgttgaaaatctaaattgattcaaccccatatcctgcgtaaaaattcgcaatacttcaactgtacatcattcacatacatccatgctnttcatcggttgcatagctcattgcattctttccttgacaaatanaatataataaaatacaatgaactctatcattgttatataaaa

SEQ ID NO: 154906 - DNA, 453 bp, Glycine max
  unsure (1)..(453): unsure at all n locations
tgcagctgcagctttatccatggcctcctatggtagagagcttcttctatactcatcttctcctgaagaggcgtctcctccctctcttccttctccattccgctgccattcatcttccaagatacaaaagaatccattgatgaagaagatcctaagcctacaagctccaatggagcttacatcatttcttcttccctacgctctttacttttccgttgagcactttttatttctgctttacttttttctaagntattggtgctgttctttactttctcataacttatgtagaaagcctaattgaatctagnaacattaagaaagataaattnttaattagncaagacacgttcataattaattcaacccccccccccgagtattaattattatgaaggcacttgttccaacaagagagattagagtaagtttcttgagattagttcacaactt

SEQ ID NO: 154907 - DNA, 453 bp, Glycine max
tggctttggtttagacatgtttgatacatgatttgggttttgtatgatttgatttgggcaagattggatgagaggaagggtgattttcgaaatctgcacttatgcagaatttttgctgtgaaattgtgcagcagaattttgcacaagtgcagaaaaatgcttgtgcgtggttggctgtggaaagtctagtgcagaatgagttctggatgtttgctagtatatcccaacggtcaaaatgcaggcttatacactatagacttccagtaaaattttggagtcgatccaacggttaacgaattggatcgaaagaattgttactgtggtctttacgtgagaaaaactgtgattttggttgatgtgttgagcagagttttctgcctttgctctgttttgcttggctgtgatagctagtgctgtttgaatgtcgttctgcttggatgttgtggaagcttg

SEQ ID NO: 154908 - DNA, 369 bp, Glycine max
  unsure (1)..(369): unsure at all n locations
caatcagaagcagaaacactgtttatattaagagaaacaacagtagttgtagtagagacagacagctgggccatacttgagactaagatattgatacaacctatcaagtcctacatcaccttgaagaaagatttcattggattcttgagatttgacaaagcaacaattaacatgaaacacttagaatacatgattatcattagcaaatttgcttatacttatgagatttttagcgatttgaaggacatgaagcatatggttaaaggcaggtttaatatttagattatagggagaaaggattattgattgattagagactgaaattttcagaccttgtcatctgtaccaataaagatctggnctggaccc

SEQ ID NO: 154909 - DNA, 417 bp, Glycine max
  unsure (1)..(417): unsure at all n locations
ctaagctgagccaaattaggaactaagctagattctatttgtctcatttatgttggtnnncactttagcttagtcaaaattntaagctcaactaaaagtcactaaaaataaatattttagcttttccataaataaggcttgactgccatttataaagtgaggggggagttcttcatttggcatgaattcacagtccatcgagaggggaagcttcctttgggctccactcttcatctntttcctccctccatgtgttttgaggctacccatggaaatgggtagctaaatcctccaccattggggttagatgcaaccaaactcatattctcttctatcttttgatattttaatatatatatatatatatatatatatatatatagtattaatgttagtatttgcttctttatataatgt

SEQ ID NO: 154910 - DNA, 247 bp, Glycine max
agctagttgatctccgacagaatatgctgctgttctttcctaacccgagcgagctccttcgagtgatccaatatcgagacaatgtccggcgacgacatcgttttgatcgcgaaaacaacaaccacgacacaataccagattcttccaacgattctgctctcacctttccttccaacggtgctatcaaaatccgaaatcgaaaagcgagagcggaattggaatttcccatttttatcttaattttttc

SEQ ID NO: 154911 - DNA, 457 bp, Glycine max
  unsure (1)..(457): unsure at all n locations
tctaatatctatatttagaccaaaatccaatgatgaacatctttcttattaataagnngaccattatttgaccaaagaattttctctgaattatccttattctttctagactttagcttaaaaacttaagagtttaaccatgcctaggtatcctaaacatctcattttttaccatttcaataatctaaaaacactacccaatcacataacaaaacaataacattgtctaccacacacacatggaaaattgggatacaacaatcacctatacctaagcccaaagttagttgtatccacaataagaattagtgtagtcaaatataaggagcctcctagtgagactcatccataaactctgactctgtgaaggggtcatcctcatccatcgatgggtcctactcgaaagatgtgtgctcctccaactcctcttcctcatccttcgacacgagatccacca

SEQ ID NO: 154912 - DNA, 346 bp, Glycine max
  unsure (1)..(346): unsure at all n locations
actcaaagaataagttttgggtttaagagtatgtttctcttcatagagttaggccaacgaaattgttctgaagagtcatgtaagagattgtgcgtcgacatcccttctgatatcaagttttaatcctcccacaaagcaatccaatagagcttcttgtgtaattccttgtactcgattagctatagccgagatctgcacgtaatatgactgatctgaaccaatttgagcgagtttaaacaactgagatctaagacattcatacggagatgggcctaattctgtctctaaagctcgcgttaaagcaatccatgttntgaatgatatttcacgagtcatcatttggtag

SEQ ID NO: 154913 - DNA, 454 bp, Glycine max
ctttacatgcatgttcacaccatatttactatacttcgatcaattgatgcaatctatttgattgaaaagataatttatattactcttctaatgtagtcgacaactaaaaaaaaaatataacagaaagtaatgcttaggccaatctaatcaagtcattttgaatctcgtcattactatcatgcatctcaaagagaaggagaatcaggcatcgtaatacatagcacaacaaaacattaaaagaaaacatgccttccaaagccaaccaaggttaaaatgtattcatatttggtgaactttttcaaaataataacacatatatataaacatggtggaacaatctgaccacatgcacaacacattccacacattatttctgaaaatgagtggcaagggaatataataaagcattgttattaaaactgtacatgcactaagacaacaaggttgtcatgac

SEQ ID NO: 154914 - DNA, 168 bp, Glycine max
tgagagatcctgctctgattaagatgttcctctaggagagggggttaggcggcaagcaatggtggctcgtggtggccaccggtggtcgtgggtgatggagaaagaagagttaaggtttgggcggcgtctcggataagatgagatctgaaaatcatggttttcatgctg

SEQ ID NO: 154915 - DNA, 467 bp, Glycine max
  unsure (1)..(467): unsure at all n locations
ggatttgtgagttgattntagccttagtttcactttgtgttattattcaattgatccaagaaaacttccaaagaaaaacgtccgattgatttttttttattattttattcaaagatattttgattattttattattagttttcaagatattttgattattttattattatttttcttttttttgtttaaccgacgttacagtgtgaacgatcggttagattttattttaacagtgattaaacaagattacaacacaaatgatcggttgaaattcattttatcatttattaggtgagcaaacggcttaaacgatcagttaaagctcgttgaaaacggaagaaaatataatcgaatatgaacgaaatgaagatgcacgctaaataacatgaaatgaattgaaagtcttggatctacaacttacccgttcaagaacgaagaacggatgaagaacagtgaagaacgacgga

SEQ ID NO: 154916 - DNA, 448 bp, Glycine max
tctggtgggacatctagacttgctttccaatctgttattcaccacaaattctgccttcttctattttcagattgtgaatgcctctaacagcacctttgtcaatgattttcttcatgcctcttaagtgcagatgtcccaatctttgatgccatattctgacttcatcttctttggaggatagacatgtggaggagtaactggtttcttgaggtgtccataggtaacagttgtcctttgatctgctgcccttcattagaacttcactcttctcatttgtcaccaagcattctgactttgtgaagattacattgaatccttcatcacacagctgactgatgctgatcacgtttgcagtcagtccctttaccagcagtactttggtcagactatgaagtccatcatgaactaacttttccattctactgatcttgtctttaaagcatctcca

SEQ ID NO: 154917 - DNA, 294 bp, Glycine max
agcactcgaaaccaatcaggcataaaaggactcactgaagccaagagagaccaaagtagcccccaccctatgatttaaagcgttagaagccccagcaaactatacagcctatttgtcctagtcttcagcattcatgctttccatgaataaggccatgatgccctcatctggaaacttaagatgcatgggctgataatcattgaaggaggcggagggccagataatctgccaaagagcttcccttcatcactttcaaggagacatagacgaagtcaaattcagatagcaacacca

SEQ ID NO: 154918 - DNA, 407 bp, Glycine max
tgtagaacggctggacatgatatatgtcagagtgttggtttttctcagcggttcaagaataaaggggatgtcccacattatttccatgacacacatgcaacaatgatgattaggaaattttatgcaaaactggtcatgcatgcacccatgtggacactcaagcatcaagtttttatggtcatgtgacactagggctcacgattcatttttcctatttaagtcaacccagtgtttccaaaacatgttcttttatcaattcatgcattcatccgagtccattttggctgttcgggaaaattttcacagcattcacccttcaggtgtatacacatttcttcaacaaaaccctttgttttgatcggtgaatctctttcaaagaaaagctggaagtaattcttttaaaagca

SEQ ID NO: 154919 - DNA, 370 bp, Glycine max
  unsure (1)..(370): unsure at all n locations
tctccaaaccattcagacgtgccaagcactttctccatcacccacagncaccattatccaccacaaaaacatcggagttctccgttgaaactccactacgagaggaacccgncgattggagaggaatcctccaacttggctagcggtttcggtagtgaacgaaaccctaatctgacctttcatctttctttgaagtaaccatgaatccatgtttgctccttgctagttccagctagtctttgcatctttgctgactttggaaccaccattgtatgtgttacgctccctttgaaaacccgaaatgctctcagctctatcatgtagagacgagagtagctgacccagagcattgttgtgagctctgtctctg

SEQ ID NO: 154920 - DNA, 458 bp, Glycine max
  unsure (1)..(458): unsure at all n locations
ggacactatagaaactcagctttacttatgggcgggcgggcttcctactttttgtctgtttgcgagctatggccactgctcttccttcccgcgatgcttcttttcatatctgcctgagtgggcttatatcctaaaccatacttcccacgatttcctttggcatttatcagactagttatgccgccgttgtccttgcctaaacccattccgggttcgtaaccgttccctaacataactcgggccatcattactgctgcatcggacaggcaaggctgcccagagaaggagaccactgaggaaatgctgaccacctcaaaagactggaaagcggcttctaacgattcttctgcggctgncacattaggcatagacgatgggctgctcaccaagatgtcttcctcgcctgacacgatgaccanatgccccttcactacgaatgttaactttttgtggagtgt

SEQ ID NO: 154921 - DNA, 378 bp, Glycine max
  unsure (1)..(378): unsure at all n locations
catcancaaaaaagcagagattgtgaatgtatgtatacatgattctgatgatgccaaaagataattcaaacaaagctcatcttgtttcaagattaatacaagattgtttctacaaacaaagccttgattcaagatttcttcaagtgcaagccttgcctcacaatgataatgttctagtcattcaaagcacatgtaatcgatcaccaatacatgctatcgattacaaattggttgaaatgtgagaatcgattactcatcatatgtaatcgattaccaaagattctgaacgtctggaattcatatttttaatgaaaggttacatctgctcaagattaacaactgtgatatcgattactctaattctgctatcgattacta

SEQ ID NO: 154922 - DNA, 448 bp, Glycine max
tgagatgaggaagtgttgaagggtgaaacttccttcttttattgttgaccacagagtggtacctggagatatgtcgcgggggtcaagagaccttggggacgtcaggtggggtgctattgcccaaaaccaagcttgaccaatcccgacccaacccgggcatagtcggtcagtgagaacctatgatgtacctaagcaggcgagctcctggcagtcaacagataaaaggaacaaagaccacaaagcaaggaggcttgtggtagctggccagttgtgaaacttgactgatatgtgagatatggtctctggtaatcgattaccaagggtgggtaatcgattacaacgcttaataaatgaagacaggaggctaagatggtctctggtaatctgataccaaggggtgtaagtgattaccaggctcgaaaacgaagtcaggacacttatggagcct

SEQ ID NO: 154923 - DNA, 447 bp, Glycine max
tgccaaagcaattatgggcagaagcagtctttataacttcttacttaatcaatcaaggtccatcagttccattggatcaaaaaataccatatgaggtatggagcgaaaaagaggtaaaactctcacatcttagagtttttggttatgtagcatatctgcacattactgatcaaggtaggaataagcttgatcctaaatcaaagaagtgcactttcatcgattgtggtgaagatgagtttggctaccgcatatgagataatggaaataaatagatgatccatactagagatgtcatcttaaatgaaagagtaacgtacaaggatagggacaacatatacactagcaactcataacagagtgggctagtgtacacagaggtggatgatgttccacaaacccctatgaatgagactactatgttagaggaatcaattgataataacaatg

SEQ ID NO: 154924 - DNA, 271 bp, Glycine max
  unsure (1)..(271): unsure at all n locations
gaagctaatcaaattcagaatgagagggatcaaacgactggagggcccccaactcgtaggcctcaatccccaaagctaattataaaaccaaatcatagtcggctgctacatcttcattccttaatttcctagaattgtactcacgcagagatcagagagaacaatctaaaacatgaaactccaccatcgagcaagaactaaactttaaaacaaccaccgatgcgaaccaatntgatacaataccacttggaagattaaacagctcacatca

SEQ ID NO: 154925 - DNA, 373 bp, Glycine max
cgtcagcacaaggggggggcgccctatagaggtgagattattttatactaacagggcgcgctaagctctatacttttcatccaacgagtgtaaatagaccaatgcattgacttaagatagtcaaaagcatgaaggagttatgagtctgcttctaacaaaaaatatcgtcaactacaagatctagccttttctatggaaaaaatatctgccattgccttcgcaaaaaaagctatagaaatagccacactgcaagcacatgctcccaaaaaattaagatcatccgtgatgaagaatagccactgtcaactaaatcgaggcatactctactcgccccatctatgttacatctgacccaatgcactcacgctcgcct

SEQ ID NO: 154926 - DNA, 357 bp, Glycine max
  unsure (1)..(357): unsure at all n locations
cagaagccgagaacaacaacaacaacaatgcaagggcaagagacatggncacagcaaaacaatcagagtcctccgagcacaattctcagccgcaaaggcaattaagagaagaccaagacaaccaccaccacacagccttcacccctccaccgagagacacagaagcaacagccttctttcccacaaccaccagaaccagctgcatcaagggccaaacccaccgcccagacaaatccnaagaaccaacaactccacagagagacatggccgccccgcccagcccttccaagacccaggtgagagcatcaagagccagcccaagcaggagcaaaacaaacaccttccaaagaccaaacc

SEQ ID NO: 154927 - DNA, 448 bp, Glycine max
  unsure (1)..(448): unsure at all n locations
agcttcagccccttntaccaaggatggaataccgcgcggcgatttaatttactttcaccacccgccnggcacaggagtatattgctgtggaccatatcttatatgcacaagcacaaaagcttgtctctcttactgagatacaactcctgccctgccattcttctaatcttaggcaaataattgaaactccattgtccactttgcagttgggcattaatgatcctctgtttctagcttcatctantcaatcatgcacgatgtaatgattaaaacaaacatagggatatataatcgccataaagcatctttatcataattatcataaatattctttttattcataagtgaatctacgtatattaagattaacattctatttagcataactaaatgataagctagctcatactgataaattattaacaacatttctattaagatacttata

SEQ ID NO: 154928 - DNA, 440 bp, Glycine max
  unsure (1)..(440): unsure at all n locations
aacaaaccagctcgacttctattaaaatgatgtgcacccactttgttatgtcattatcttgntcggccgtccattcatctagcttcagtgatagaacctataatagcttcaaattatgttaggatttctttgcttagtgtgccagttattcatgcacaaataacttggtgaaatggggacaagtggttcaatactctcccctttcatcactgtagaaagcagataaagtcaacatggagtgcttccgtattaacgactaagatctagtttggataatcctcttaataaatatttataagagaagacaattaaatgaatctgggaagtgaaataaattaacgttctctcataagttaaaattaatgtatgcacctcaactctttctaaagctccctcatctaacttgtttaataagtgaggtcataagttattttaattta

SEQ ID NO: 154929 - DNA, 428 bp, Glycine max
  unsure (1)..(428): unsure at all n locations
agctnncaaatatccaagcaattctattcctttatcttgaaactacctaaaccaagataacaaggtagaagcagaaaactctgcccaaaacacattcaaataccatagctttccttactcaaataccccagtaacattctctttgttccgatttgttaaccattggatcgacttgaaaatttcactggaagttcctagtacataagtctacattttgaccgttgggatctgctagaaaatgtccagaacccaatatgtactacctttcccataaccagcaatgcacaagcattttctgcacatgtagaataattctgctgcacaattcaacaacaattttctgcataataaggcagatttcgaaatccatcttgcccacatcctattntgctcaaattggatcctacaagtcctaaatcatgtattaa

SEQ ID NO: 154930 - DNA, 452 bp, Glycine max
tctcaaggaagctatctagtctataaatagaagcatgtttatttcttgttgtaactttgatgaatgagagtcttgtgagacatacttcaaagttccacttctctccctcctttattccttcaatttcgtgctccccctctctctttctctccctctttcttttcctccattgaagcatcctctccaagcttcttatccaaggctcatcttggtggtgaagctccttcttccatggcttattccctagtggatggcaccgcctgttacctcttctcctttgtcttccactgcatctccatggtggaaaatcaccattaaaggacctcattgaagctcaaagatccaacctccatagaagctccacaagcaagcttccatcaggagagaaagagaggagcacgaaattttgtgctctataagagctttgaaatcttgagtttaatattcaaatg

SEQ ID NO: 154931 - DNA, 431 bp, Glycine max
  unsure (1)..(431): unsure at all n locations
aaagaatcaagatttagaaggtcatctttaagatgtgtaggatcgagaggcctcagaataattaagaaagggggggggatagaattaatcattcctaaaaccttaccaattaaaaattactcttttaaagcttttacttatgttgttaagagaatatggagtagaagagatacttaacagaaagtaaaagcggaaattaaatgcacagtggaaagtaaaagagtagggaagaaagaaactaacacacaaagatttttatactagttcagcacaaacccgtgcctacctccagtccccaagcgagctgcggnccttgagatttctttcaaccttagaaaaatcctttcacaagcaaagatccacaaaggatgtaccctcccttggtctctctgaacctagaggattgacnctncactagatctgatccacaa

SEQ ID NO: 154932 - DNA, 464 bp, Glycine max
  unsure (1)..(464): unsure at all n locations
tggtttgtgcanatntagggtaagcagatgattggcatatctactccagtgcccattttgggaaaagagccctaaatgcagcaaagaggaacaacttgtgcattgaagcctaggttttttcatttgagagagattattgagtagagagtgagtatgagatgctgagaagaggaggaggaatcccccttcttgtgtaagaaactatcattctctacttttaatctcatttattgttagggtttatttgtaatggctggctaaacactctagttggggatttctaacgaacagctgatgtaaatacataatatctaattgattgtgttttatgtgttcaatgcttcattcaatgcttaatgttngtatgcttttggtctgataaccaatttgtgtgtacagctaggtgactttagcattgggaaatgtactgttgcctttgaacttgattgaagcatgatcgaaac

SEQ ID NO: 154933 - DNA, 418 bp, Glycine max
tcgaacgggcatcacttcattctcgtggcgatattttttttatcaaacggggcaaagcggcttcttataccaatgtcacgaggagtgtggtggtcacattcataaagaacgaactgatttgtcgataccgactccctacgaagatcattactgacaatggcaccaatctgaacaacaaaatgatgcaggaaatgtgcggggatctcaagatccaccatcataactccaccccctatcggccaaagatgaacggggctgtataggctgcaaataaaaatattaagaaaattattcacaagatgacggtgtcatacacagatcggcatgagatgttgccttttgccctgcatggatatcaaacctcggtacgaacttttactacgggaacgcacgattccttgggttatgggatgccagc

SEQ ID NO: 154934 - DNA, 165 bp, Glycine max
  unsure (1)..(165): unsure at all n locations
gcttctagccaaatggacttacctagaattatttctctttgatagcccctttgatcctatgttccctcttctttggtntgaagctcattacaagccttaagagaaaaaccatgatctcaccttaaccttaaagaatttaggagctttggaattgctttgggaata

SEQ ID NO: 154935 - DNA, 477 bp, Glycine max
ggacacaagaaactaagcttatcgggcttcttgaaagcttctaagatgtttttttatgtccatgatgatggctataaaccaaccatgttgggattatacacttatttctcttaaaaaaatgattgaacatggtacctaatgcatggttagctagggaatgatggttcttagggcatctcataattacatttgccatgcatatcatgagtatgccctagtcattcagctttatgataggtcgcaaaagtattgccaatcaaaatttcttttcctcggattatggggttgaaccaagcacatgtcaagtatggaagtaaccggcttgcaaaaattgtggtagaagatgaatcgagttacatcgcttctttgtctactgccaacacatgagttacaaaaataaggactgttgatgtccatgttacttccagtttcactttgactttggcaagatgtaataaagaatgtcgtctgaattga

SEQ ID NO: 154936 - DNA, 366 bp, Glycine max
  unsure (1)..(366): unsure at all n locations
agctntagccntaagtagatccatgnagttcatgttgctccccttatctccaacacactntaatcgattaaaaagataattaaattgattacttcattgaattaatcaactaccttgtagatctaattgattacatgcggntataactattttctctataaataatcagctagagttctcttcaaaaaagaacgaaataagcttctgagagagccaagatcatgtgtagttattagctaaaagaaaaagagaaaaaaagtggttaaaaatatgaactcacaacttcaaatctcttgaatgagaagatcttttgagataagagagttgtataactctcttgagttcaagattaacacctcttcaatc

SEQ ID NO: 154937 - DNA, 353 bp, Glycine max
  unsure (1)..(353): unsure at all n locations
gagaccaggtccttnagaaagtttgtacacatgggcatttgntgcaaagcctcttccaaaggtatggagatttctaacttcttgaatatgtcaaagaagcgggcaaagtatcactccctcctcttatttaatggcaccaaaggataaaggatgncctttactgaagctatgagtatctccctcctatcttccttagctaactgagtgnatggcttataggataagatctttccacccatttactagctctcatttttctgttcatcaccctcttctctaatctaaggctctctttcgtcattactcacctactccaatacctcatcataggtctgatttctctctacattctc

SEQ ID NO: 154938 - DNA, 459 bp, Glycine max
  unsure (1)..(459): unsure at all n locations
ggaccataaaactcaactgagcacccttcctacctctctcgcattgtggttttagccttctctgaggangactgactggtctgtaatcttcatccatcattatcttgcgcatacaatatgcagggcttctcggatggactccctcttttcaattcttcaaaactgggcccccatacaggaatattttcttcacaatctaagtcttccaagcaagcccttagatccttctcctcttcactggttagacaatctacaacattgattaaagctttctccactgaaatttgtgtagttgaaagagcaccaatgtcttatttatcgacctccttgatgtgccatcattttcttatattttctacaccctttttgcaccattctaattattgattggtcttaattgtcaataattaagcaatttataattagggctcatatagctgatttgatgttttaatctaa

SEQ ID NO: 154939 - DNA, 394 bp, Glycine max
  unsure (1)..(394): unsure at all n locations
aaccatccaagaccaaaagaacaaggcagaagcagataactntgcccaaaacacattccaataccacagccttgcttacccaaataccacagtaacattctctctattccgagcagtcaccggaggatcgactagaacatcccactagaagaccccaggacacaaatccacatggagaccgttgggatctgctagaaaacgctcagaaccaaatatgtactactctgtccacaagcaggaatacacaaacatgttctgcacaaaagccaaattctgcagacaaaagaagacatccccgctgacaaacaagcagattagaaatcctcagccccatcaaattgccaaatggatccacagcccaacaagataatacatcaaccaaacaactcaacca

SEQ ID NO: 154940 - DNA, 411 bp, Glycine max
  unsure (1)..(411): unsure at all n locations
taacaaacttagatatcaagtgatcattaatttcttttatagggggagtaaacgcacattttatctatatacaattgtttgttgcttgctngaatcttgatttcaggtattgtattgtcatcatcaaaaagggggagattgtaaatgcaattgcctcttgtgttttgatgatgatcatgatgatatgatgcaattgatccaaatgggctcttcaagattaaattcaagacaatacttcaagattacacgtcacaacatcaagatgatcactagtatattacgaatggaattcctaattgaattagccaacaggttggccgagtaatataaattacaaagcgtttttcaaatgacttactctctggttatcgattaccagacgatgtaatcgattaccagtggccaaagatg

SEQ ID NO: 154941 - DNA, 365 bp, Glycine max
  unsure (1)..(365): unsure at all n locations
agctnnagctatttcatcttatcgatgttttctgttgnctactccttatggcatcactgagtntggaagctctatcgntggaagataaaggcgaagatataataatcccaaaagatgttagagagtatgatatcctcgatttctccctccgtctcatgggatgttttctcacaatcagatcaatccacactcatatcaagatagaatgtctgtgagacatatgagaaccaagatagaggtgttccatcaaagaagttggcaacaagattttccttttctaattcttccactagatagacatgcaatgcattttgaaaggagactcatggtcatttgatagggactatctcattctcaacatcatc

SEQ ID NO: 154942 - DNA, 445 bp, Glycine max
  unsure (1)..(445): unsure at all n locations
tgtaaatgtnctcctgtcgattgaaacanagtatgatttctctacatcaactagtagatatcttatggtggaagctcctggaaagctggccttgaccaaagatggtcatcaagtccttgtagcctctagtctctactctctcgcctgcaaatccaagaagtggaccgacatgaggatggacagtgtcaggggagacctcaagtctctagaaggttttccaatacatgatatcggtggaactgcactattcgataaggaccctaaacaccatgaagtttgcaatgataatggagacaaccacggggtccgcctagttgacaggtgtgatacccttgaagtccatatccctgaaagtgatatgagggagacttcattgcgatggggtgtcgacaaaattgatgttcatatcccgaatggcgtgtaggtggcattttcaagactggct

SEQ ID NO: 154943 - DNA, 406 bp, Glycine max
  unsure (1)..(406): unsure at all n locations
ataaaagnccgcaaaacaaatggggaccaccaaaggtacatagaatgaattgaaaagtttgatttcaggaacttaccggntgaagaccgaagatctacgaagaacgaacgtaagatggcggtaaatcttcacgatatcacccacggaaacgtctcgaacgagttacagaagcgcctcggcttggattttcttcacggaaacgatttttctcactaatttcaagtgatcctcagataccaagagggttgaatgcttttgttcttccctcctccccctatttatatggaaaagaaggaaaagcttgccacccagctcgcccaggcgagctggagcctactggaagagcttccttaaaagcccaagtgggcctggttgctatttgcaccccctgtttactaaatacacc

SEQ ID NO: 154944 - DNA, 418 bp, Glycine max
  unsure (1)..(418): unsure at all n locations
tcgcacttgataatggagaacacatgaacagcgctaggtaatgaaattcatggtgctacgaacaaaggtggagtatggaggattgccttgagggtccgcacttangcaatcatgaaactcagctccaaactcaaaagtggaggacacatgaacaaccctaagcaataacattcatgtggctccggaaaaggatgagaatggaggattgccttgagggtcctctcttangcaatcatgaaacacagctccaaactcgaaagtggaggacacatgaacagccctaagcaataacattcatgtggctccgaaaaaggatgagaatggaggattgccttgagggtcctctcttangcaatcatggaacacagctccaaactcgaaaatggaggacacatgaatgacaacgcaattcattcat

SEQ ID NO: 154945 - DNA, 372 bp, Glycine max
cagattataccgaatatcagagagagtaagggacaatgaacaaacatctaacaaattccattatctagttgtgccactactaactaactctccactcaagagtaacgacctagtggatatattcttcccagcattttggccttttggagatccttttgggcctaaaatctccctttaggttctgagagctatcattccccactgcttcaagaagcacctccgcctttaagatggaagagagatgtagctcatcccaatcttcctaagtagagtcctccgactgcaaacccagccattgaacatagtgtatcattccccactgatatgcaagtgaaagatatgctctaacacaacctcatttgacccttccac

SEQ ID NO: 154946 - DNA, 465 bp, Glycine max
  unsure (1)..(465): unsure at all n locations
tgtagaattatgataatatcttgaattttcattaaaaagtatattattctacttactgttgttaaaaaatatataattgataaatagttcatatattttactcattttcattgaatcagtactttcaaaatactcgttaaaagatatttaatatattttattagtctttaattctaaaaatattacataatgtttatttttaatataataaatgtttcaaaacattttttacgtttgcttgtttgactaatttttctaaagactccataacaatcaatgtcattctctgtatcagacaatttttaattaattaaaaataagtattaattaattntttattttttaatataataaatatgttctatatttttaataattntttggaatgttaataataaatttcattaaagaatatttaatgcaattaattaaatgtttgatatatagagacaaaatattaatatt

SEQ ID NO: 154947 - DNA, 305 bp, Glycine max
ctaaacagaccataggtctctatgagggggccatgattattctttatattgcgaggccaagtgacacaaatgaaattgagtttctttcccctttcgttatgcttttattccagcgatgccattaattgaattgcggtgctattccatcttctctccacaaaaatgcttttttggcttagcaacacgataatcgagcaaaatttattttctaaaagataaatggtatttgtcaccagttaactgtaaatcaaatttgaaattattgaaataaatgcatttctttgattaacgcactttttagagct

SEQ ID NO: 154948 - DNA, 357 bp, Glycine max
  unsure (1)..(357): unsure at all n locations
agcttccagagccatntaaaagctgcatagaggtctattgtagagctggagaaggagttagatagccacttgtaaccagaagcagctgagtaatcaccattcgaggagctactccagatccaataatcgagaatgtctggatgaatattagagtcaattgcctccagcatctccacaaaattctgaaggactcgagtgtgaaagtcgtttatgttccaatggccctcatgaatgaagttcttgagacacaaatcaatgtcttcaatgacaaaactaactttntggcacataataccagcagcagactagttattgaaccacaaagaggtctcccccgagcctagtcgaaacttgaat

SEQ ID NO: 154949 - DNA, 449 bp, Glycine max
  unsure (1)..(449): unsure at all n locations
tgcaagaggattggtagaggggatctcatccaaggcctttatgttctagacctcaaggacactcatgattgcaaatttactttttctgttatcaattcacacataaatttcactctttgtaaaaattctcatatttggcactctaggtttggtcatatatcagacaaagttttcagtcatttgaataataaaattggtttacaattctctcctaatttctcttcttctaattgttctgtttgtccacttactaaatttagaagattatcctttcctaactctaacaatttatttgatttaccttctgacttactccactgtgatatatggggtccctatgcccaccctacatatgaagggaagagatttttcattacattggttgatgaatgctcaagattcactnggctatttctacttaaacacaaatctgacgcttcaatctatgt

SEQ ID NO: 154950 - DNA, 306 bp, Glycine max
  unsure (1)..(306): unsure at all n locations
gaaattcttcactggtgatcgttttctgatttctaggaatcgattacacagntatattttgaaaggtcattttcaaattaaattttaagagttttgntggagagaatcgatcacacatcaatggtaatcgattacagcttttaaattcaaatntcaaaacccttctaaaagctgntttttttttcaaaataggcttcttggaattgtttacactgcctatgaatcgattaccagaaccttggatgtcttcgaaacactttgttttgaagcaaagctagatctttaattaatcttgaagcaatgctt

SEQ ID NO: 154951 - DNA, 345 bp, Glycine max
tctggtgggacatcttgacttgctttccaatctgacattctctttaaattctgccttcttctattatcagattgagaatgcctctaacagcacctttgtcaatgattgtcttcatgcctcttaagtgcagatgttcaaatctttgatgccatattctgacttcatcttcttcggaggatagacatgtggaggagtagctggtttcttgaggtgtccatatgtaacagatgtccttggatctgctgcccttcattagaacttcactcttctcatttgtcaccaagcattctgactatgtgaatgttacattgaatacttcatcacacaactgactgatgctgatca

SEQ ID NO: 154952 - DNA, 374 bp, Glycine max
  unsure (1)..(374): unsure at all n locations
agcttcagannaaattcctttatatcggttcttatttcctcnagagaaccctnagatttataaagtcagtttcctcaaactcactgcatactagcttcaaagcctgaacaacttctcccatgataagacgncgagagacttctggttgcacacacatggatgcaatagccgcaacttttaccacagnatcaacacttatggtatgctttacatatgtggctatgatcatttgcaagccttccttacttgtgagaagtggacgaacccatgtcacgagattttcttgacccagaggttgagacaaatccacaagctttcttccagttaggatctcaaagagtacaactccataactataaacatcactctagacc

SEQ ID NO: 154953 - DNA, 412 bp, Glycine max
  unsure (1)..(412): unsure at all n locations
gacaccnatagaaactcaagcttctatacacccagaaagctacagtgtgctgcagttctatacattttctaagcccagagngacaaattattgccactactcacgagaatttcaaagagtcaataaacagaatgtctacttatccatagacaatgctctcaaaataaccatatccatacacaatagttgtctaaaaaattggtcattgctgactgtactcagaaaaaactcccaccccacctcccaaccaaaccttgtatcactgggccttaccatgaagtgcactaactttctagattgaatctttaactccaatgtcaatgcaatgatactaagcagtgatcctgaaccgacccttggctaatcttcgaacaaatactcttctgccacccttggttgttatcctgctcat

SEQ ID NO: 154954 - DNA, 413 bp, Glycine max
  unsure (1)..(413): unsure at all n locations
atggaagatcgagagctagagagtgcaagaatgagcgcgggttgcatcgcaagggtttgtgagtgaaagtaaaggttgcatccatgagagtgagcaagtgacgatgtccacgacaagttcgattccgagaaagcaaatgggaattttagaatttcctctctttagatagaatttacaattttaagattctagntaattaataatcatatattaaaatactaggatttgaaatttctataggacatccaaacaagatataagagtgagaaatntaaatcctctcaaaatttaattnccncatttaaaatttcctttccaaacacactaatgatttgcaccaactatgtataactaaagcatcgcatatcaaccactattacctatgtttgctcatccctaataataggctgatg

SEQ ID NO: 154955 - DNA, 295 bp, Glycine max
tgaccaggaattatttgtatgggtgggatgttgtattctggttgttcctggtgcggagatgatggtacagcgggtgaaccacaagcggaagtttcttttggtgaggtagccatggaaaagcagagcgtttggaacgatttcgtaaatctcagaaaactattgggaaatgctggtgaaaacacgaatgccaagcagatataaatttgaatgaagaatgtacaggggcgtgtgaagcaacggtcgaattcgttttggcttagtaatgaacgtgcttttaatgtaagtgattcctttg

SEQ ID NO: 154956 - DNA, 360 bp, Glycine max
  unsure (1)..(360): unsure at all n locations
ctgcaagctaagataaacactatagctgcagctcttatcgngcgagggataatncctctcatgaatcttgagtgttagagaagcataagccactacctggaaaccggncaaaatgaaaattctaagttcgggagttggatttacgctagaagaaagtattagcacctctcacatttgtctcgaaggacaacagcctatttttagattagtggaaatcgagttaccttaacttttatttctttttattttttgaagtcgacaaaagcggagcttttgctcctacgtacccttctttggagaggataatagacctacgtagttctttcttacgcgtgaatcaagtgactnctttactttgaa

SEQ ID NO: 154957 - DNA, 443 bp, Glycine max
  unsure (1)..(443): unsure at all n locations
tctccaaagggcatggttatttccagattcctgtanatatctaagaatcttgccaaatggcgatccttctccttcttggaaggtaccacaggatatggtacttccgcacctttattcacaactttttctcttttcttctctctagcttgtgcacttctactcctctcttcattcttatttacttattcatctttttcattttttccatttttttcattttctttttctttttctacttctttttctttttcttgggcatttaattcttttttcttgaccattatttgattttctttttcctgattgctttcacctatcacctcatctttctttttatcagcacctttcttttcagaagcattctttttggacaagacactatcctcttcctctgtctccacgaaccttctactctttggcatcacagctttgcattcctcctt

SEQ ID NO: 154958 - DNA, 431 bp, Glycine max
  unsure (1)..(431): unsure at all n locations
actcagctntnataggctctgaattcgtgacgttgtgcttattgccaccctctcgcttagggcgagtaagtggatttgagcttagcgtcagtcgtgtgctgagcctggctgaagacaactgttgcgcttagcgcatttatctcgcgcttagcgcgcagccttgatgatgatgccctactagattcttctattgtgctaagtgtgatgaagttgcgcttagtggtggatgcgcgcttagcccactgatgagctaagcttaactgtcacttttagcacttcatgacttatcctcattttcacctgtaattgcacatatttcatcattaaattcaatggacgtattctagagacaacttctaccttaaaacggatttatttcggaaatcactcattatatccaataattgggaaccttgcttgttcggtaaatg

SEQ ID NO: 154959 - DNA, 448 bp, Glycine max
  unsure (1)..(448): unsure at all n locations
ctgcagcttnncacacctttctcccctttggtacatcaaaaagccaaagacctcggaaatcaacacagatatgacaaaagagtagaaaaatatataaatatcagagtataaaacacaagaagccaaactcacaaagaagaaataatcaaaccagaatccaaataactgaaaatgtcaacaatcacaaaacatccaagactgaaatttaaaaaccacaagataaataagcaaagtacttagcataataatgtaaattctaagaaactaaaagccaaaatacacggcttataaaagataaataatcagaaactaaaatctaagaagacagaggtggaggaggaagatcgaaactctgacgaatgtatccgacaccctcttcaagctgagtaagacgaatgtccataccagcaaagcgtgaatctaatgagtcgaagcgggcaccaacata

SEQ ID NO: 154960 - DNA, 428 bp, Glycine max
  unsure (1)..(428): unsure at all n locations
tgagaggattgatggngacccggtgtttagagaaacgatgatatgggctacgtgggagtacgtgagctcagttggaggtgggcaacaggggatggtgggtttatgcgcgcattgtggatgtggaaagcttgttgtgcaccatcgcccgaccgccacctagtaccacatgtgatgggtaccccataattctacaagcttgagatgaggaagtgttgaagggtgaaacttcctgcttttattgttgaccacagagtggtacctggagatatgtcgcgggggtcaggagaccttggggacgtcaggtggggtgctattgcccaaaaccaagcttgaccaatcccgacccaacccgggcatagtcggtcagtgagaacctgtgatgtacctaaacaggcgagctccntgcagtctacagatataaggaaaca

SEQ ID NO: 154961 - DNA, 369 bp, Glycine max
  unsure (1)..(369): unsure at all n locations
agctntnaggagtagatacatgggaccaactctattnatnncaaaaaaagaaatcatatctagtcaaagtctgagagaccatacaagtttcttaacgatttctaattatgtgggccattaagtctatcatatgctgacaatagccgagaagcccatgaatctcttcagaggcggagtaagtgtctgccatcgccttggccttggctaacaatcggagaagttcttgactcccgttcaaagtaagagcaaaccgctccatccacatggttgcctcttggagtaaagagtcgatcacccttcctctagcctctttttccgcatatacttgagcatactcatncgcgattctatgctcgagggccgaggcta

SEQ ID NO: 154962 - DNA, 445 bp, Glycine max
tcttggagtagaaacatgggaccaactcattttatttcttaaaagaagtcgtatctagtcaaggtcttagagaccatacaagtttcctaacgatttctaattatgtgggccattaagtctatcatatgctgacaatagccgagaagcccatgaatctcttcaggggcggagtaggtgtctgccattgccttggccttggctaacaatcggggaagttcttgactcccgttcaaggtaagagcaaaccgatccatccacatggttgcctcttggtgtaaagagtcgatcacccttcctctagcctctttttccgcgtatacttgggcatattcgtccgcaatcctatgctcgtgggccgcggctagacctaactcttcttggtacttggcgatgatagctaacatgttggcctccgtctcgcataaacgctgagacaagcttcttt

SEQ ID NO: 154963 - DNA, 477 bp, Glycine max
  unsure (1)..(477): unsure at all n locations
agcttcctaagagtagacataagtgatcgaatgcttctttcaatnactncagncgaatcagctgtataaatacgtagtttctccaagagtggcatctcatttattacagaacacaaagtcgtctcgagttttccccttaattctaccaccttcagttcccttaactgctttagctttcctacctctctaatgaccactccatcatcatctataaacactagaagtatctcttctaaggatgtcatgcctccaatattcctccatattgaacccatgatcatatcagaagcctgaagatgacgtagctntttaagcttactaatctcctctggcatctcaaacacatttgagcctcttgtatccaaagtctccaaattctggagcttaccaatgcattntggtagactctctatccgagtataccggaagcttaaatacttcaagtggcataaattcccaaatcttcaagaacataac

SEQ ID NO: 154964 - DNA, 467 bp, Glycine max
  unsure (1)..(467): unsure at all n locations
tcagaccaaagcaacacaaaatctaggtatccaaaacctctcattttaatggattttcaaggtttgagaagtgaaattgagaatgaggtaaatttggagcaaactctcacctcacacaagtctataacatcaatttaaacttgctcaaactggatttacgcctaaaattccaccgaatcaaaatttgacttctcaacacccaattttaccctagaaatggctcttgccttcactttgatcatttgtttttctctcttgcacaacccaagctttctcataactcctaaatgacatttcaaactaggattaattccctttaacctccaaataccattaaatccagatttggccttccaactctcaaagcctcactttttttccactcataacaccacattctcactttctaaccctaggttaaccctacccttcatctcntaacagtttccataagcaatntcagcata

SEQ ID NO: 154965 - DNA, 399 bp, Glycine max
  unsure (1)..(399): unsure at all n locations
agctagagatgaagaagagtagaaaggtcaaatctttctgctttnatncgnagaccacagagatggacctggagatatgtcgcggaggtcaagagaccttgaggacgtcaagtggggtgctattgcccaaaaccaagcttgaccaatcccgacccaacccgggcatagtcggncagagagaacctgagatgtacctaaacaggcgagctcctggcagncaacagattaaaagaacaaagatccctaagcaaggaagcttgtggtggatggccagctgagatattttgagtgatatatgggttgaggcctctgagaatcgattaccaaaggtgaggaatcgattacaaagcttaataatgataacaggaagctaagatggtctctggtaatcgattacca

SEQ ID NO: 154966 - DNA, 389 bp, Glycine max
cgtgacactataaaactaagcttcttatccaggcaattcttggtggtgaagctccttcttccttgtcttattccctagtggatggtgcctcctctctccttttctcctttgccttccgctgcatctccatggtgtaaaatcaccattgaagaacctcattgaagctcaaagatccagcctccatagaagctccacaagcaagcttccatcacaccctttgtgcatgtccttcatgttttacatgcctcatgacacctaaacacacttagtagaaaatcttgaatttgatcttggattagtgggctgaaccatagctgaaattcactaatcataattagtgaaatgttggctccacaaattcaagttcaaattcaagtgaaatttgaata

SEQ ID NO: 154967 - DNA, 358 bp, Glycine max
  unsure (1)..(358): unsure at all n locations
gttctctnncagatacaaatattcaatctctgtnttattcaccttccaactcttcctctgctcttaccatccttgatctgtcttcaaataagctgacatcctcaacatttcaactgttatcaaactttatccttaatcttcagagagctttatctttatgataataacattgtttagacatgtcctctctgcccaaaccttccttctctttagatccttgacctttcctataataatatgacatcatcagcctttcaaagtagcttcaacttcagctcataacttcaaaacctggattagcgagattgnagncgtacggatggaagttttcttatgtcatcttccttcattatgagtt

SEQ ID NO: 154968 - DNA, 339 bp, Glycine max
  unsure (1)..(339): unsure at all n locations
catacaaaannatgggaattaataagaggcatatctatattttatataaaaacacaactaacctgtatatataatttttttaaaagaaaaacatgagagggaaaccattctcgtttcattagatactgccatgttaatcaatcacgtctaataaatattttcttatatggtgagatctgactctctttctgtaattaacacaaggcttctaaaaaaatactcttacaaaatcttaccatccttcaagaaaaaaattacacatcaacaaaaaaaaatcaataattatataattgcgctataaaatgacttcgcatattaattatagcgtcatgaagatat

SEQ ID NO: 154969 - DNA, 373 bp, Glycine max
  unsure (1)..(373): unsure at all n locations
acagnagcagcccaactatccggnagtgatgacaatagattcaatgccttcacctcatcctcaaatttaatctgcacagatttcaatagggcaagaatagtattaaactcattaatatgatcagntacagagataccttctcccatcttgaagttgatcaaccggcgcatcaagnatactttgtaggctgctgacagcttctcgtacatatctgataatgccttcattaagcctgcagtagtcatctcgttcacgaagttgaacgcgacgttcttggcttatagtcatctgatcacgccaagatcctatcgatctaacaagtccattcttctagttaagtcttcagctaaccctgataggctgtacagctttt

SEQ ID NO: 154970 - DNA, 438 bp, Glycine max
  unsure (1)..(438): unsure at all n locations
ttgaaaagactncttaattctttagtatcggagggatttattggatctttcatccattgtaaaagatatttaaagtgattggatctttgttggatcatatcaatatggatatctcaagtaccaaagacagaaagaatcctcacatatatgcatatataacatttttgagtgcctatatttggttgcaattgggttgagcacaccaatggagtacataatcgagccatttatgttagttgcttagcatctcatcacaagctcaacaagtggtcaacgtcactaatcctatccatgggaaatggtctattgtgattttgactaatcaaataaatntttgttacaatcaacaaatgaagatatgaatattgaggatgatcctacatgttcgatcattgtccctagattctttatgggtacagtatgtgtgaatgatgtata

SEQ ID NO: 154971 - DNA, 370 bp, Glycine max
  unsure (1)..(370): unsure at all n locations
agctntncgattcattctatgtacccgtagtgttcttacttgagnnncgagcacttttattctcgttttgtttactttatataccccctgttgacgtgcttaagccattttacttaagtcatttctcgtttaacttaaaaataaaataaacttccaccgaacgttagaattgtattatccgttaacttcggttaaaataaattccgaccgttcagtcgtgccgtaaccacgtnggaaatcaaaaagatggaaaaaataatataataatcaaaaagacatcttttagtaaaataaagcggaaaatcaatcggacgttttctctctgggagttctcattctttatcgaattgattaataacttaagtgaaac

SEQ ID NO: 154972 - DNA, 468 bp, Glycine max
  unsure (1)..(468): unsure at all n locations
tcatccaagtgttcattgctntgtgtgtggatgttcttatgtttttttagcaagaagctacatatatagagacaaccagtcaccaacgtgtaacaacaaaatacttgcagcaataacaataacaataaacaatagaaattaaaaaccaaacaacaaacttgctaattttaaagacttgtaacgttcacagggaatttgactaagtaaaagatgacttcctaagatatataaatagaagtttttcacgtagactaattctaaaagcattttatctctaaaaaacataattgataaagaaaatgtactttaattttaaattataaattataagagaatattgtccaagaatctctcactaatttaaaaattaaaaaaatgatataatataataatatttttaatagaacattatacttcagggtgtcatccaataaattttcatgttactaagaaagggactcaatcata

SEQ ID NO: 154973 - DNA, 468 bp, Glycine max
  unsure (1)..(468): unsure at all n locations
acagatgatggcacctccagactctatctccttcagnagagcagnntaatgagatgggagcctggctcgggacccaaccttcgcttcacaaggaagacgataagcccacagcccaggtacctcaacatatggaggatgagtcatctgaagccaccatcccaaagccattngatataagagaagaggaagaggagacacaggngagacaagtagctgctaccactcctgagcgatcccttgaagctacttcaaagccttctacaccagaggtaaacctaccctcacctcagcctgcagcagacccctccactcctcttctagagatgccaaaagactcgactacaccagncctagctatagacacttctncttcaactactccagagcttcagctgacacatgaagaggacagncagacacaagatacccaggaccagccacaggtatgttagggtcctgatgacactt

SEQ ID NO: 154974 - DNA, 465 bp, Glycine max
  unsure (1)..(465): unsure at all n locations
ggaccataaaactcagcttaaagttgtaccaccattctcatgtttttttgtaacatgtctactatcattgggataatctctttcttcgtcattggaggtgccacttgagctgccaagtccctccacctttgggcataatccttgaaagattcatgcccctttttacacatgttctgtagctgcatcctatccggagccatatcaaaattataatgatactgcctaacgaaagtaaccattaaggccttccaagaataaaatcgggaaggttccaagttagcataccatgtgacggctgccccaataagactttcttggaagaaatgcattagcaacttttcatctttcgtgtatgcccccatcttctaatagtacaatntttggtgattctagnggcaagcagtccctttgtacttatcgaaattgggaaccctacattttggatggaagatgacatcaagcact

SEQ ID NO: 154975 - DNA, 430 bp, Glycine max
  unsure (1)..(430): unsure at all n locations
gctatganatatnagtataaagatatgtgcctttacattnnatgccataaagaggaggaattctcctttaatttatgtttcataccacatgagtatgtttgcaaataggaatgttcaatatcaattaaagagctctaaccaagaacatgggaaaatcaatcattataatcaccacacatccaccattacaagcatgtaagtcttcctttgcgccgaacacaattcatatgaagaactgcacacaacatctatgttgattcaatcaaattaattaacctacacaatagatgttactttgagaatatgctatttcaattaatccaaccaaaaatactagacaatntagntaaatntaaatgtacacaattnttacatatatatacaaaatccaaaaattgcatatctatatcatccctagaaatcacaacct

SEQ ID NO: 154976 - DNA, 461 bp, Glycine max
  unsure (1)..(461): unsure at all n locations
ntattcaaggcaaagaaattaaagatattcaagatggatgaccaatacagtctctagagtcttagaaagggtatattaaataggaagggaattccaattgaagtagcaaaaggtttggccaagaaatttaagttaaaaagtctttttcaacaaatttactctctagtaatcgattaccagaggatgtaatcgattaccagtggccaaaactgatttacaacagctattaaaatttgaattcaaaatttgcactgtgtaatcgattacacatatatggtaatcgattaccagcagtttctgaacattttaattcaaaatttgcactgtgtaatcgattacacatatatgtggttatngaatggctatcaaaggcttatatatatgtgacttgagaacacgaattgataagagtntttcagaacaaaaaggtcttatcctcttaaaaagcatnnaatgtttat

SEQ ID NO: 154977 - DNA, 417 bp, Glycine max
  unsure (1)..(417): unsure at all n locations
ggatcttaagcacctgcagctgcagcttagcagactgagtaagatttttttttatcacncaagatcccttctttatgtcaagactacaataccatctcacaaatagaagccattntgagcaacacttgatcagaggatgaccataaaaaaatntgcacacgtcctaaaaagttagagtagtcggntaagcaagattttgagacacttctatatgacaaatggaagaaagctgaagagcattttctattcaatgttgcccccccacgtagttgctatgtcttgaatcaataagattctccaaaactaatattnaatagagaaagataatgaccctgggtgacctgtacgacgatacaaaccttttaatgattggtatttggttagatcattcttttctcacacctgaagcctgaactg

SEQ ID NO: 154978 - DNA, 232 bp, Glycine max
acttcgaaagatgggattaattaattaattaattaattaaagccaaaaaagtatcaccttggggcggcccacgggccttcttgcacgattcttgggccttccaacggcgagcttctgaaggcggtccggcctcaccaacggcaagaccccacggtgccgtccgcagtcacgtggtgcaccaccaacggaagagagcgccggagcccccgcaccggcaacaatctttttgggc

SEQ ID NO: 154979 - DNA, 333 bp, Glycine max
  unsure (1)..(333): unsure at all n locations
agctnccatttagactgtcttagtgcgatttctttttctccctncatgaatattatctcgcaaatcccaacagtgcaagagtgcgaaattttatctcacaccacataaaattttcatgacaatccaacggttaacgagtcaatgattcgatgtttaccaagacatcattgggtttctgtgggaaaagataaaactacaatgtgaagggtatttctctcagttccgacatgattctgaaattcccaactgtgataaagcttggtattaagctgctaacctgtgcccaggcctcctgagatgtgaatctaaatcgagcatagcgggccttggatg

SEQ ID NO: 154980 - DNA, 426 bp, Glycine max
gttaatgatcgccatatcccttatgggtggagtatgattttgcaatatacaactcgatgaaatcaccgtgtattagtttcaaatggactcacttgtatgagatcctagaaagatctctaaagcactcatgaatatcacgcaacgtatggcctagtggcacaacatagtgacaacaacaagattgcgggggtgtactatgattggtagagcgctaacatgcatcaattgtttttggtcatatattttgctacaccaactatggtgtgagttgactactattagactagggctatgctttcatttaacttttgaaatatgcgagggatagttatgttttatattctgaaagatatttcaaaagacaaattcaacatttctagatatctgtggtcaatgtttattatcacttgtattggactatcaaga

SEQ ID NO: 154981 - DNA, 463 bp, Glycine max
  unsure (1)..(463): unsure at all n locations
agctagnnctagattgttgctgagttctttatctattctttaacaatatactaggccttcatttaactgtctttgggcttggcggccacgctcaacaaagtactttcgacacctactgtacgttgatttcaccaatgctgntatgggaatgtagcgacaatcctttaaaaccttattgatacattctgagaagttcgttgtcatgtggccatatcgacgtccttctctatcagaagccatcgnccatttttcttttgagatgcgatcaatccatgttgctatggctggactcagntcacgaaatttttctaaattntgatcaaaaatgtgcttacaaagactgnaagctgcataaaattagntatgaataacatattataggataaatgaaagtnaaataaacgtggccatcaatatgatattttaccaatttcttcacatttcttttagttgcatattgatt

SEQ ID NO: 154982 - DNA, 403 bp, Glycine max
  unsure (1)..(403): unsure at all n locations
agccaaaagtgacaatgacaaattcttatttctttgtgaagctagtggaacttggctgtcaaccaagaattggacgtantttcagtagtagaggcgaactagtataaatctttgtcttgcattcattttgttgatctcgtgctttaaattgaactatggtttgaatttgattttgtttgaaaacacaattgtttggcaaaatctgtttctatcgtctaaactttcttttatgaaaatttatctattttacaaatgtattttcagacaataactctgttttcacagaaaaggtttagaagatttataatatcacaattcaaccctctttcttgtgatatttccctctacagtatgttgtgaaatttactctaaacatttgaatttcaagtgtacaatggcagag

SEQ ID NO: 154983 - DNA, 441 bp, Glycine max
tgcgctgaagtaagtaagacatgtgctttgattgcattttaaccttatctcaacaggaaagctatgtgaagctagaatgataaaccatttcggtgtcggtagatgaaagctcgatagaggaagcatggttgttgctcgatgtaagaatgaaggctccttgtacatcatgcatggaaagatatgaaaaagggagatgaatgttgctcaagatgcaaccaaagaattgtggcacgagagattgggacacatgagtgagaaaggtttggagtttctatcaaaggatcactctccaaacataatggggcaaccacttgaatcctgcgatgactatcttgcaggtaaaccatgtagagtgtcattccaaagatcggatgacgccagaaagagaaagcaaattctggatcttgccactcacatgtttgcttacgtctgagaagccct

SEQ ID NO: 154984 - DNA, 404 bp, Glycine max
  unsure (1)..(404): unsure at all n locations
agctagagaatcaatatatattntattactctctcctaaaccaagcaaaagcatgaaactcccgatacaaactaactgagaatgatgctttcaacagagcatgttatctcaagcaagcacaagcagccatagagaacaattcttgatgttgaatataaaacaaaactaagaattagaaatgggttaagctctccgatgcaaaagatctagccaatgaaaaatatcacgacagtggggcatttcatcgaacaacattagtgcaccacaaaacatgttctcatgggaaccataaccccacaaacacaaaatcaaaattagacccaaatcacatgtgaacacaatctccatatcccataaactaaaacataaaatntggagaaatgttgnaaaaatgtgaaactgcg

SEQ ID NO: 154985 - DNA, 416 bp, Glycine max
gctactgttcttctctttagcgagctcttctgccatcctaatcatatccatgtcatattctcttaatttcccacacaacttaacatatgtaatggaggtaagatctttggacttagagattgtcgtgacctttggttgccatgttctattgagggactgtagtatctttacattaagctcttcttcctcaaacacttttccaaggtccttaatatgattcactatatgagtaaacttcttttgagcatctccaattatttctccttgttgcatctagaaagctcatactcttgaattagagaatatttccttgggttgcgacctgtttgaatcacgaacaagcgatacctgagcgcgagattgtgttgtgagaaaattgtgagttagtgaagcatgagtgcaatgttataacatga

SEQ ID NO: 154986 - DNA, 461 bp, Glycine max
  unsure (1)..(461): unsure at all n locations
tctatagaaggttcggncctaatgtctctacaattgcttcatttctctatgagctggtgaagaagaatgtggcatttacatggggtgaaaaacaggagctcttgttgtagtttatctttagagctcacccctacaggaattccaaggtaaagaaaagggaaattccagttgactgcagttgagagaaaaagctgcctccctacaccagccttcagatttacccagacacccgaattggctcttattgtagtttatctttagaccagaaaccaattcaaagcatttcaagatacactttaaaactctaacattatcattagtggcagccccaaagaacaaggtgtcatttgcatatttaagtatatttaactcctcttttttctctcccactcgatagctgctgaagagattttttgctacttgtgatctcataacccggtaaggcttncactactatattg

SEQ ID NO: 154987 - DNA, 436 bp, Glycine max
  unsure (1)..(436): unsure at all n locations
ttagatcgacctgaagcatgcatgctattctcaacgcggcttcttctacgtttcttctttacaatgncattntagacatgagaggcattttagtaaataaaaaatgtatttcaacgacatttacaaaggaaacaaagntgtattcgtattacaaagatggagctcaacacaccgttgttgagttcaattattcaaagaaaggttttataaacactagccttgaaagggattaaatctttttccctctggcactcactcattttgtgtcgnttgtctctggaagctttgtttctcgtcatgaaagctttccaacactggtgttcattatacagnccaggtcatcgagtggattttccatcactgtcgcgtgtgagtcctttgnatttcattntccttggnatgttcatgagtttctcactccacagacccgatgttc

SEQ ID NO: 154988 - DNA, 408 bp, Glycine max
  unsure (1)..(408): unsure at all n locations
tggttctgcaagcctggtataattcttctctgtgtgtctttgtttcaagataattngcatctgggtgtgccaaactttgcatctttttctaaacgggtattgccaaagtttttaaattgggctgtgattttgcatttgggtttgccaaagtttgcttctttttctaaatgggtatcgccaaagtcttaaactgaggtcgtggttttgtcgcaattcttgattttgcgggaaattgtggacaaatgtagctgcaattgcagtggctttgcagttttgcggctgaaatcgtggttgtggattgatattttaaaacttggcttactaatttttggtggcatacagattgcaacatcccaagacagcagaggattttctgagatcaaaaactcctccttccaggtgtttttt

SEQ ID NO: 154989 - DNA, 423 bp, Glycine max
  unsure (1)..(423): unsure at all n locations
agcttnnaagatgagctcattagagtaaacatcatctacatataggaagnaattcatgttcacgtaaccacaagcagcaataatgtgtgaacatggatagtgaagaacataatactttccgcattgaaaataatggtcattcaagttaactgcccacttttgtctgccacgttacgttctaagattgaaagtctcctctacttcaagctagttcttgatttttttgaagttctttaacaaccttagaataatatactagtccttcatttaattgtctttaagcttggcgaccacgatcaacaaagtactttcgacacctactatatgttgatttcaccaaagctgttatcgagaagttgcgacaatccttcaatacattatttacacattctgagaaggtggncatcatgtgatcatatctac

SEQ ID NO: 154990 - DNA, 446 bp, Glycine max
  unsure (1)..(446): unsure at all n locations
tatcttattcagaatttatttcatctagattttattttttccatattntatttcatccaatcttatcttatcttgtccagattttattttatttatgggcttggacttaaaacagatttttaagctttggggctgaggacctatataacaacatcggggttttagtttagggagtttttggaagaggagaataattctagggttttggaattccagtttttattactgttcatgcacattgttcacatagaataaaattcattttttgcaatttcgtttctgcttcaatctacaatttcgttntctgctgattaatggaaggctaagtctccaacgttgctttctcttgaggatcaagcacaactctctttgggttttttattactattgatactgataagttttcacttaccaattacttgatttgttgtataatccatgcatgc

SEQ ID NO: 154991 - DNA, 252 bp, Glycine max
  unsure (1)..(252): unsure at all n locations
accaataaccattagtatttaggagcattataagagnataatgagccatcagattcgaattttgaactcttttccaccaatatgatcattttatcaagactatccgagtcttaaaaaatccttattnttttttttgtgcaaaacttactagacatgcaaagaaaagcaggatcgggccgatgcagcctcggttgaatacacgatccaacacagatctacttgcctcttgctccccctcacgatgcttaacca

SEQ ID NO: 154992 - DNA, 416 bp, Glycine max
  unsure (1)..(416): unsure at all n locations
tctatgtttagggaaaagatntggagaagggaaacactttatgttatggaggtaatatatatataaataattattacattatttttaattgaatattattctttaaaaatttattgttgaattgaatttttttctcatatacattatatgtaaaattttatattaataaaaaattatttattaactgattcatatatattaaagttaatataatataaatattttaaaatatattaaaatataaatcatttaattatttttcttactgtttaattatgagaaaatttgatataaatgattttaataatatataaatataattcaatgattgaatcactaaaaattatattatatataagttataaaaataatataataatttcaatattacaccgataaagacttctctataacac

SEQ ID NO: 154993 - DNA, 404 bp, Glycine max
  unsure (1)..(404): unsure at all n locations
cctgcagctgcagcagcacccaaatccatatatgaatttgtttttctagnnagaggcaataatcacaaaaagatgttttcatcacaagcaatttgngtaattagcatcataatatatgtagntacttcccgtgagaaaaatctgaagaaaatgtatcttgattctatatttgattcaacattttaggcattggcaagattgaaaatcatttaattgaatagggttttatattgcttaatctggcaataatacatgagctgaatctattnatgtctattccttattctttttttacttggctacttagtactcncttttatattaacattaatttctataggagatatgttggttattacaccctatacaaagtcgtaggaaaaattccattctgacaactatga

SEQ ID NO: 154994 - DNA, 469 bp, Glycine max
  unsure (1)..(469): unsure at all n locations
nggatctttcaactcatgaagcatttctagggccttattctctttgtataactctctatctgaaagcttctttagcaaagttgtcacaatttaaaaaatgggattttcatgttcaggtcacattcgaggaagactttatggaaaggaataccttgtaaattagtgcaaagggagagagaaagtaaagggcaaacataaaaggttgacagccacgagcaagtattgtgcaggtctttggacaaaatcagaagaaagaattaacttgtccccatgtctttgtagcatctaaactgacacatttctcatgtctttggagcagggaacgatcccaaacacaaatcaacaatggttgacaaaagttgtattagcttgtgtctcttatataagtgaatcaaggtttcaatcttggttgacctttggatatggaataaatcatattgngagaaaaatatctaccttgtgcgctcaa

SEQ ID NO: 154995 - DNA, 326 bp, Glycine max
  unsure (1)..(326): unsure at all n locations
agctncaacctttggagcccatttccgctctcttattcanaaagaaggcatnnccggagtcgagtagtgcgtggctacgtgtgggtcttcgaaaattcaaggttgggtggacttctttctcctttgattttcgagggtctggagttttgggagatatgatgggtagtcttgctaagtttctgctgtgtgatgattatttgagaagactcttgttgaaagctagttgaatttgccatgtttggatgtgttaaacatacccattctgntttaaggntntagagatgatattcgagatgttnatatgctgaaattactcatggaaacct

SEQ ID NO: 154996 - DNA, 412 bp, Glycine max
  unsure (1)..(412): unsure at all n locations
gtagagttntcttttgttaaggctgagtgtcttttgtttctaaaattataaaataaaagatctttcttcatctgttcgtacgtctctacccattctaatccatttgcatgtttatttctttacgtttaacaccagatccgacgacgagtccctcgaaggtactaatatctgggacccgaccattgatttcgagcaagaaaccaatcaaacggatgatgaagaggacgaggatgtgggacttcccccatagttggagaagatagtcgcccatgaagaccaagaaatggggcctcatcaagaagagatagaactagtgaacttacgaaccgacagtgggaaaaaggaagtaaagataggcacgggtatgaccacatccattcctgaagaattgatagccctgctgaaagactac

SEQ ID NO: 154997 - DNA, 151 bp, Glycine max
  unsure (1)..(151): unsure at all n locations
atancattcatncctaatcctattcactgatgacaactccatctgcacattaccagaagacaaattctatcccatcaaggattgaggggatatgaataatcacccgtcttttctcagcctcaattctatcctcttctatcttcatttccct

SEQ ID NO: 154998 - DNA, 398 bp, Glycine max
caaaattccatggctaaaaagcttctaattgtccgtgtactctctccctacttatttcgtgaacatctaacgtattgcctattgcttacacataaactcttttgcttgcgtgtgtattagtgaaactccatgttagctactatagggtcaacaacagagcaaccaattcctccacaagtggaagaagaatcaagtgtttgctaacaagaagaggaaggagaagatgctaagataagggtggctatagcacaagagggaattgaagagtgcaaaacaccaactgggtcatgctacaagattcccatagttcaaaaatgcccacttgccccaagaaagataagaacgccagtgccacctttttcttacaaatgaaacatcatcatctagtgtgtgagctt

SEQ ID NO: 154999 - DNA, 424 bp, Glycine max
  unsure (1)..(424): unsure at all n locations
agcttcttataagctgatccatgttatctattttgtctagnngagntntattcagaacattagagtttatctctcttatcttagagagagagattctcctaaattcttgagtgattcaagatcaccctggttgtatcaaaagactttcacaacctttgagagtagccctcgctggaaagagtgattcttttcttcctttcatcttcacccttgttctttcaaaccacaattccagaaaattcacctctgcccagaattatctcgaggccataactcccattttacgcactcaaattaagtgattcttgagcctaaattgaatctcaaaacgagatccttcacctcgcttaggaatcacctcattaggatgcctgtagcttcagttatagccatttctatatttctgtccagccatcacttaacc

SEQ ID NO: 155000 - DNA, 426 bp, Glycine max
  unsure (1)..(426): unsure at all n locations
tctgatntagaccctcatcggtcgtctatcctgttctttccgtctgtcatntttttcgatcaatatctgtgaataatattctatttgccgaagtgggctaatgtattcctgaccgaataaatgggagcatgcctacttatggtgaaacgaaacatctgttgagttctcacgaaaaaacctagccgacctacattgaaagctttttatgctacaccgaaacaaaaaaactacccctgccgcaagaaaaaacattattcgccaacgagcgttttttttaaaaaaaattgcacaatgtctgcttaaaaatattngtcggggccatttcacgacccatgtcggctattgagttttctattcatcccccaatgaaatttgcatgatgtctattaaaaatgttgatccgcgtgatccgtgatgcttcttttt

SEQ ID NO: 155001 - DNA, 415 bp, Glycine max
  unsure (1)..(415): unsure at all n locations
aaatgccttaaacgagcctattcagctttatcggtcaacatggaccattcaaaagcataaaatcaacatgtaactttaccgctttagcaagaactaagtaagtctaatttcctcatcgcaattaaggatacataagagcaaaggaaacacccttgncgaccacaaaaagataaaaaatacaaaaagcccataaaaaacataaaaacataaaaaatggaaaataaaacaaattgaagacatgatacttgacatttgattaaaagctgccgtcccttgtgacagacgtgtggagtgctaataccttccccgtgcgtaaaaacaactcccgaacctttcacacataaagntcgtagaccacacctttccagggtttctgacacttccttgaataaatgtggtagagactcacatgcct

SEQ ID NO: 155002 - DNA, 350 bp, Glycine max
  unsure (1)..(350): unsure at all n locations
tgtagaatggctagacataatacatgacgaggttnggtttggttcaaagataaaagggatgccccacattatttccatgacacaaatgcaaaaatgatgatttggaaattttacgcaaaactggtcatgcatgcacctatgtggacgctcaagtgtcaaatttttatggtcatgtgatgctagggctcaagattcatttcctctattctaaatcaacccaatgttttcaaaatatgttcttctatcacattgtgcattcatcctagtccatttcgggcgttcggggaaatttacagcattcaccctcaagtgtagacacattttcaaaattggtatgatcatgaattttt

SEQ ID NO: 155003 - DNA, 374 bp, Glycine max
  unsure (1)..(374): unsure at all n locations
agctagagataaagaagtgttgaaaggtgtatcttcctgctnttataggagaccacagagaggtacctggagatatgtcgcggaggtcaagagaccttgaggacgtcaagtggggagctatagcccaaaaccaagctagaccaatcccgacccaacccgggcatagtcggtcagagagaacttgtgatgtacctaaacaggcgagctcctggcagncaacagataaaaggaacaaagactacaaagcaaggaagctagtggtggctggccatctgagaactttgattgatatgtgggttatggcctctgagaatcgattaccaaaggtgaggaatcgatcacaaagcttaaaaatgaagacaggaggctaagat

SEQ ID NO: 155004 - DNA, 408 bp, Glycine max
  unsure (1)..(408): unsure at all n locations
tgtaggattatggggtacccatcacatgtggtactatgtggcggncgggcgatggngcacaacaagtttttccacatccacaatgcgcgcataaacccaccatcccctgttgcccacctccaactgagctcgcgtactcccacgtagcccatatcctcgtttctctcaacaccgggtccccatcaatcctctcaagcttccacaacatccaagcaaaacaacattcaaacagcacaagctatcacagccaagcataacagagcaaaggcagaaaactctgctcaacacatcaaccaaaatcacagtttttctcacgtagagaccacagtaacaattctttcgatccaattcgttaaccgttggatcgactccaaaactttactggaagtctatagtgtataagcctgc

SEQ ID NO: 155005 - DNA, 287 bp, Glycine max
tgttggaagaaaggctcaagaacactcggtataacttggaagataaagaaaaatatggtctcctgtctctccaaaagctgcagcaaaatgggagaactgacctaagctttaggctttaaaagacaacacttattgtaagtgaaatgcttggaccaatggaattacaaggcctaatccttatcttcttaatagcagttggacagcccttgaagagctttccatgagctgaggcatgccttatatggggtcttgcaccttttcaaaactaactataaaaggataaagga

SEQ ID NO: 155006 - DNA, 436 bp, Glycine max
  unsure (1)..(436): unsure at all n locations
ctattaaatataaaaaantaatttaatgtttagaaaaaattcttcacgattaatctttattccaacctaacaaaataacttacaaaaaatgtgtgatactacataaatttcgaaaatcacctaacaaaataacttacaaaaaatatgtgatcttccaaaaccatctaacaaaataacttacaaaaaaaattgatatcccagaaattatcaaacccacgaaagcaaaaacgaaagcaactgcaacagccaaaacaactgaaaaaaaatggtgaatgagggctgtatttaaagaccctaaaacgccaacaccatttgcgcttcctccctgctcctggtctgccaaagctagtgtgcttgctgcaaacctaaaacgccatcttgactggcgcccctggtcttcatgcacaacgcgccagtgcaccttgcgcgtcccact

SEQ ID NO: 155007 - DNA, 240 bp, Glycine max
  unsure (1)..(240): unsure at all n locations
aacccacggccgacccacgcaaagacgaaaacggcggggcaagggcaccaaacggacacaagaacgaaagccaaaagggaagaccaagggaccaaagcgcaggaacaccacacngacncgagccaacgaagaacacagaccgaaagccagagacaacaaaccgcacaggagagaaacaggaaaaacagaagaaaaaggacaaaacacaccaaggcgagaacaacgcaaaggacaacccag

SEQ ID NO: 155008 - DNA, 387 bp, Glycine max
  unsure (1)..(387): unsure at all n locations
aaaagctggagntaagaaatgattcggtgngcatnatgcaatcactggcctggcatcgacattatagaccaaatatatcaacatgaaaaggaaagctgaagatatgacaatctctttacactcattgaaatactgaagaaaatttcccaatcgtctgtgtctcctcccccaccccctcccaaaaagagactccaaattccattaccattatgctgtatcacattactttagaaggtctaaatcatttgcctgtctattcacctcttctcatacctcaaaataactagcagagctctctcatatctctggttaaagcatcttttctgcaacaaacaccgcatgaatatgataaaacatgacctgtgtgatgatcatattgggaccgta

SEQ ID NO: 155009 - DNA, 435 bp, Glycine max
  unsure (1)..(435): unsure at all n locations
agcttcaccttcatggcctcctcatagntgttgtatgatanaacatgctctatnnncatctcccactccaagtaagcctccggatcattctttcctttaaatggaggaatgtagagtttaataccatcaattcagttttgtctaagaacaccatcattccctcttctcctcctttcttcttcattatgatctctattctccatttgatccaacctctcatggagcgcatcatctcgntgnttcattaacctctccatatgttgcatcaaatcttgcatttggaattgcgaaagccccactccatcattaagattactacctgacatctcanacaaacaaatcaaacgtaacaagacaatnatagtagctgnttgaatacctcacccactcaagagtatcacacaattatggctntnctctaatgaaacactcttg

SEQ ID NO: 155010 - DNA, 359 bp, Glycine max
  unsure (1)..(359): unsure at all n locations
tccttggttcaattccgagcatatcgacatattatgtttctcttatcttaccttcgtgtgaaaagttatgaccatntgaatatctcaagaccttccgctgttcaattttgagcgcgtcgatatattataagcctgaatcggacctcagagtgaaaaggtatgaccatttgaatttctcgggagcctctgttgttgattttcgagcgtctgtatatgtgatgcgccagaatcggacatttatgaccatgtgaatctctcgagagcttccgtggttcattttcgagcgcctctatatgtgaagcaccttaatttgacgtccgtgcggaaagatatgaccatttgaatctctcgatagcttc

SEQ ID NO: 155011 - DNA, 456 bp, Glycine max
  unsure (1)..(456): unsure at all n locations
acctgaagctgcagcttgaaaggccagagatatangcgtatgttttatgctgaanaggaagacaagcngaaggcttgtcagaagtccaaaaagagttagttcgagcaattgaacaagaccgaagaaacacatacgggtcatcattaaccaatacaaagagaagctaaatttatcttcaacccatgaacagaggctagaggacgagtatgcaaaggtatcagccctgcaagcagaaagagatacgagggagaaagtgatcaattcattgcctagagaagcaatgatgtggatggataggttcgttttcaccttgaatgggagtcaagagcttccaagactgctagccaaagctaaagcgatggcggacatgttctcggcctccgatgaagttcatgggctcctcgattattgncagcacatgatcgatttgatggcccacataattaagagccacta

SEQ ID NO: 155012 - DNA, 429 bp, Glycine max
  unsure (1)..(429): unsure at all n locations
tagccaaattcagatcgaattcgattagactcagcttgtccatggctagcttancagaatgaatcagcctcagatgcaagggttgggtgctaagcgcatgagattcgcggcttagcgcatgaacagagatgcgcttagtgcgaggcttacgctttgtgaaaggactattatttcagaaaaaatgttttctaagttatttttctgtcccttttccaagagattgaaacccttatgttaaacattcaaagataggctgatatagtcctatgtacagattatacagcaagttccaaatgattaaatgcatgaaaaacaaagataatagaaattaaaactgggttgcctcccaggaagctcttctttaacgtcattgcttgacgcatagcttaataccctcaacggggcatgaaagtcacatagaacacattt

SEQ ID NO: 155013 - DNA, 127 bp, Glycine max
  unsure (1)..(127): unsure at all n locations
cgcnngcnctaacctnctcgcttattctagcaaagagaagcttcatccttgcaataccacacctataagtatgtgaaaaatacctaactaaaagcctatttggaggaacactcatagagggtccatg

SEQ ID NO: 155014 - DNA, 393 bp, Glycine max
  unsure (1)..(393): unsure at all n locations
agctntattgcgaaagtgcccaaaccatttctttgtgatgctgcacagctgcatatcttttatagaggtttgaaacctcaaaccaagatgatccttgatgcctcagctagaggcactatgatgtccaagagtctggaagaagccattgtaatcattgactccatagcaaccaatgattatcaaagtcatcatgatagagctctgactcaaagaaaaggtataatggagttggacactcaaaatgcaattctagctcaaaacaaactcttagcgcaacaaattgaagccttaataaagcagataggccaacttcctcaacaatatcacaaaggtggaccactgaaaacacatcagactcaccaagnntaacatattntgagatgtgatttatat

SEQ ID NO: 155015 - DNA, 418 bp, Glycine max
tggaagaagagtggaaatggtgtctccttccctttttttcatctcatgaagaagagaaaaaatgagtattaatggtgagttttggagtctaaatgaacttataaaagaagcttagagtatggtacattggattaaggtgttggtctatcataatcactcaattttgaatgatgaacttacaaaatttcgtgctccttctctccctctctctccactcatcttctcctaccttcaagcaattattcatggcttcctatggtggtgagcttcttcttgactcatcttctccttgaagtggcatctccaatcatctatcttccttcttcattccgcttccattaaacttcaagaagcaaaggaatccattgataaagaagatccaatgcctacaagctctatatggagctgcatcatcagc

SEQ ID NO: 155016 - DNA, 383 bp, Glycine max
  unsure (1)..(383): unsure at all n locations
gcaaaggatgacttccttcgcgcctgtttcagaaagtatgaatttccaagaggaaaatatgggaccatggaagacttcctatgcgcctgcttctgaaaattcaaattttcgagagagagattctaggatgaagattatccaggggtcttcatcaagaaatagaaagatggcaactaaaggaaaatatggtgctgcttcttttccttcacatttcatgccaatgtcagttgatgaaactcaattngactcactcggtatcaattcacatgcttttgaggctgtgagatccttctcttccaacgctagaatgtaatctttcttggatcaatttcatcagatatggacttccaagacgaagatatgggacaaaagaagactctcca

SEQ ID NO: 155017 - DNA, 374 bp, Glycine max
accaagaaaagctacccttataacaaaaaagagatacaacctcctccaataaatacaaacatcaaagtaaatcgagagcaagcttatgcgcatatttccttacgaacattcactcgcacaagatattcttctaactaagaaaaatgcacccatgcacaatcaaagcactttcgttacctacattattagtatgtactcccaaagtgtactacctacaccacatgcatttccttggctaaatttacatacatgcatgctcaaagcctctaggctaccaaaagttgcacacatgcaaactttatgaagatatctagctatctatacaataaagagctacattccatgcattattcaagtagtttagctacctaaag

SEQ ID NO: 155018 - DNA, 414 bp, Glycine max
tgcattacaatagatggttgtgaagattatttttatcttttattattactatataatagcatacccgaagcgaatcatttcttgattaggtaaaatgttcactaacttttgcttagattcctaagtagaagcatccttcctaattcattatttttctctcttcttttttataattattctggtgggaagtcctactctactaggtgactatgattattaaagaatttggccatcaacattagtattattttcttaataaacgcgttcatattttaaaggatgtaaaatgctcatattcaattgcaagaacagaatgtattacaatgataagaattactcaagacagattatctataaaacttaagattgtataagtgctcattatacatatgggtactctattcctataaaatt

SEQ ID NO: 155019 - DNA, 414 bp, Glycine max
  unsure (1)..(414): unsure at all n locations
acccggatccttaagncacctgaagcatgcagctacctctagtagaaatacactatcttatttcactactacaaaaaagacaaacgatgaaatttttttaattaatnnaaaatcataaaaacattattatgaaatgacaaaaacaacattaagaattagaaagctaagaggtcatatttgttgtattaccagatcataccaccactgactaagccacgagcaaggtcgtgccacgattagtagaaatcttgtatgactaaaccaacatattttgtcagttcaagccaatgttgagatgctactaccaaaaccctcaagatccatttcaaaattaaaaaatcaagacaaatggatcataagcttataactaggaatgaaaggttggagtcttctccattttcaagatgggtagca

SEQ ID NO: 155020 - DNA, 457 bp, Glycine max
  unsure (1)..(457): unsure at all n locations
tatgaaggctaatacaatttagaaaatttattatatgatctttattgagatgtccaatggtataggaaatctcggacaaccttggacaatctacgagtaatagcttttcaagattaggcaaatctgaaaagtctggagtctgagttaaataatgagaatgactgagattaagaattttcaacttctccattaccaacaagaaaaaaataagcatacaatagagaaaattaaagctatactttgttaactcactcattaaaaaaatagaagtgtgtacatcagtcaattccacgagtacttactaacacacatctntattttttaatataaatacattagcgctcaccattatgtattttaagatattctttaattatagtgtgctaatacactcatactagtaaaacaaaagtgtgtgcattaaccacgatctaaaccaatatatatatatatatat

SEQ ID NO: 155021 - DNA, 430 bp, Glycine max
  unsure (1)..(430): unsure at all n locations
tccttatctgctcaacaatgcaatggtatctataaacccaacaaaaattcctcaacctccattttctagaggatacaactctaatgtgacatgcgctcatcatgggggagttctggggcatttcattgagcattgtatgaccctgaaacataaggtgcaaagtttgatcgatgtaggctggctgagatttgaggaggagaatcgcttgtggattctgacatggtcaagcgacactatgcatgatggttaaggcacattgaaggttgntgttagatgtttccaatgactcattatgattctcaagtttatgctatcactataagcaacaggcattatgctaataatatggatgaaattgatgttgttgtcttcattctctcatattacatctntgcttatttaacttcactggaatgtgaatgtaagtcat

SEQ ID NO: 155022 - DNA, 356 bp, Glycine max
  unsure (1)..(356): unsure at all n locations
ttgatttagtttatcatgcatagttaacaaccaatactcatcattcaatgcttcatctatgntttctaggttcaattaagaaaaaaaatcatattaatgcatagaattctaagtctagagtgagtggatactcccttatatatttcacctatgatgttgtcgaaggagagatctctctgtgttctccattcctttgagaggtctctatgaggtgtggcagtgatttccttgctttgttcagatccttaaccttggattcatcttcaagtgcagtgtgcttatttnttaaaacttggatcttcattcttcaaagtattttcttgaacaaaagagttaattacatcatanacaacatg

SEQ ID NO: 155023 - DNA, 172 bp, Glycine max
gaaagctacaggaggagtttaaattgtcggcattgatacatgcattattaaaattgttggacccattgtgtgcttctgtagcacgacgctctaaccaactaagttaatagtccaattatgttataaaataaataatgtttctatatataacactaaaaatttctaatgtata

SEQ ID NO: 155024 - DNA, 344 bp, Glycine max
ctaacgcgcggcttctccatgaatctgctcagcaaaccgactccaaagataatattttatcttgttgcaaccaaatatctcaaacttccaatcaaactcttatatagagttgcatccaccattttgccttcaacatctctggtcagcatcatcctttcttcaactagtgtggaaacaagctttaaattatccatctaaaatttctttagaaaatcacgtgcatactttctctatgagatgataaacccatcatctcgtttgattacctcaatgccgaaaaaatgacataaaccctaaatttgtcatctaaaacacttatcatagcctccttgaatttacaatca

SEQ ID NO: 155025 - DNA, 461 bp, Glycine max
  unsure (1)..(461): unsure at all n locations
atgctgaacacatatggttacaatcgttttnttgtgtttcttcctctgtatgggatagatntggaaagtaattgtggctatgggctgcaatgcataaagctatatataatttcctattctttctcttttttgttaattggaattatattttactaaataaacagtactgtttgtcgtttgttgtatggaaatgttatactttgtgaacctttgtgatacctccttattaaggaaaataataatgaagaattatgtggcataatattttcagcaataaattatgtaaggctatgacgattgtctacaaaaccaatctgggactaacttttaaatggatatatttttgtgcttttcctgttatgttatcacaatatgaatgtcatttatttttcctttaaaccttggggtatgaatntgatatccaatagtgtctgttatatatatgaaatataaatataatg

SEQ ID NO: 155026 - DNA, 441 bp, Glycine max
tcatacacaaccgtcttacctaatttatgaaaaagttaggaggttaaatgttgaaaactaattcctccccgttgaaaacctcataaaggtatagcacttattctcattttagcacatggccattattatgaccatatgaaaatcggtgttactcctaccaaacttcaccttctagcttatgtatcaaattaatctcaacttaaaagacttgaataacataactactttgtgtatataaataatttttattcagaagaataaaataaataacttagtcattgtcgaaaaactcgaatagatattctaacaccatcatgaattgttatgtatgtgcacgtaatactgactattatatttctcataaatgattgagaatactgaatttatcccggatattccaatttcaattttcatatggggtaactacttcaaactaaacta

SEQ ID NO: 155027 - DNA, 464 bp, Glycine max
gacttctatcctaagggtaaaaaatgtatattaaaaagtgaagtttatttacttactcggattgatgactattgagcagaaggaaagcatataatcagatgtagcaagtgaatatcagtgcagatgatagcagaaatgccaaatgaaaatggaggttataaaatttgcacaaaagagtaactgcctagagcaattaagtcttatttttggcagtttcgactgcctcacttatcgcggtgtgactcactaatcgagcactcagtgacgtttgaattttcagattttaaattcatgtgcttagcatgacatcttgcttatcccaattctaaaattagaaaacccgataaggattttggcttatcgcgaaaggtacgcacttagcgagatctgcaactctgattggtctgcaactttcgcttatcaagacatgtgcctgcttatcgaattaaatgcttctgatcaat

SEQ ID NO: 155028 - DNA, 414 bp, Glycine max
  unsure (1)..(414): unsure at all n locations
ttatgaaagctgtctgtctctcatcaataagactttatatcactngtctcaatctatttgctaataacttagctatcaccttgtacatacatccaatcaaggagattggtctgtagtcatcaaatgactggnggtgtttggttttgggaattacagctatgatagaaacattattgcctctagggaagctgccatgcacatggaattcatctacaaatcttctgaacgcagctttcaccatttcccacaattctttaatgaatttgaaggtgaagccatcatgtccaggacatttgtnctcatcacaactccacacttgttctttgatctccatatccaaaagaggaacaacccaacactctctctgcttctggttattgaaagaaatgcactcatcagagtgggctacaaact

SEQ ID NO: 155029 - DNA, 199 bp, Glycine max
aggaaattcccaatcatagagaatagcaaaaaggaaggaaaggaaattcccaatcaaagagtgggagaaagagaaaaaagaatagaaatgaaattcccaatcatagagtgggagaaagataaaagataagaaagaaaattcccaaccaaagaatgggagaaagtaaaaaagaatgaagctcctggtcaaataaaccata

SEQ ID NO: 155030 - DNA, 402 bp, Glycine max
  unsure (1)..(402): unsure at all n locations
gctgagggaaaacttaatgccttggtcaatctattaactcagcttgccatgaatcagaaatatgcacctgttgcaagagtctgtggtctatgttcttctgtagatcaccatacagatctctatccttctttgcagcaatctggagtcaatgagcaaccagaagcttatgttgcaaacatttaaaatagacctcctcagcagcaaaaccaacaacaacagaataattatgacctttcaagcaacagatacaatccaggttggaggaatcatccaaatctgagatggacaagtcctccacaacaacaacaacctgtcccttcttttccagaatggtgctggtcaagcaagccatatgttcctnctncaatgcagcaacaacagcagcagtcacaacaaagacaa

SEQ ID NO: 155031 - DNA, 439 bp, Glycine max
  unsure (1)..(439): unsure at all n locations
aaattttgtctaaaactttcttagacacttcctgagcatgtacgagcagttatgcaagtgggatcagcaacttccattatcagagtaatcaagcacagcggaatctgtagtctatacaagttgcaagtcgtttccaggatgtcaagacatctcacatgacatctgctttctgcttctgctccccctgtctccatgcttactgcagcatcttctatcagctactagtcttctccaggatgtcaagacgtctcctgtgacatcagctatctgctccccctgtctccatgctcttactgcagcatcttctagtagcttccatcagtcatcatcagcagcagcagtctcccnctcataatcgtatacatacaactccccctcanaatcatgaatcatgcatacatcgtatgctactggcatacatcatacatagtatcctact

SEQ ID NO: 155032 - DNA, 401 bp, Glycine max
  unsure (1)..(401): unsure at all n locations
gcttctcgaacgtgatcaatacattcattgacatatattgaaagatagaagtgtggtgcgtgatctggtttggtgtcacccacatgtaattaagttatgcaatgcatgtcatctggtgttttttataaacagtacctacaaaacaaacaggtacagacctccactacttgacttttgtggagtgacaccaacggngatgacattctctgctgggtttgcatatctggaggctgagcgtgttaataatattgtatgggctttagaacgatttcgaggcctanttttaagacacgattgccttcctcttgttattgtcactgacagagacctatcattgatgaatgcagtgaaaactgtgtntcccgagtctactaattttgtgngcaggtttcatatcgata

SEQ ID NO: 155033 - DNA, 414 bp, Glycine max
  unsure (1)..(414): unsure at all n locations
ctgatgatagagacttcccaatctatttatcttctctctagataggctctctaactntctagctttcttactctaagaagtggattcactcttgtcttggatcgactcactctacggtggctcactcaagcttgaggatagagacttcccaaactatntatctcaaaaatcctcccaactacttcaaaaatttcctttgtactattaacccactctaataatattttttctaagctatggataacactactcaatcgtcaactatttctgtccctatcttcaatggtgaaaattatgatttctggcgtgttaaaatggaaacatatttttcatctcaagatttatgggacatagtagaagaaggcttcaccattcccgcggatacttcagttcttaatgcatctcaagaaaaag

SEQ ID NO: 155034 - DNA, 445 bp, Glycine max
  unsure (1)..(445): unsure at all n locations
agcttatggaccaagtcagtgtgatgtntgtctactataaaatgctctttaataataaaagtcaatggattgatgggtatggttttgtggaacatcctatctagaacccactgctgctnttaaataaggagttctcaaatggaatctatgatgttataatggtgtggtagttctctaaagaatgtcatgcaaaagtaattggataaaaaataaagtgggttgccaaggatttcacataactcccaaactaacattcattacttggtgaaatttcaaagcattcctaacaaacttttagctaggacaatcataatcatatacttatttgatgacattaacaataaaaacagagaaaaatcattggtcatctaactatattttctaacaagcctanaatacattacaaataanaagtaacatctaattttgatggtgaaatttctat

SEQ ID NO: 155035 - DNA, 333 bp, Glycine max
  unsure (1)..(333): unsure at all n locations
ngaagagtgagatacacagattcttataatagagcgaagattcttttcttgatcttataagaagacttgtgagcttttaagtgactgtgagacttctagaggtgaatgaaacatccccactcctttgtgagcaaacacattctcttaatgcctcttcttcattggcaaaagagcttccctgctctggaaggctaaatccttagttggggattcttacttgagaatctgatgaaactgtgtccctatctaattaaggttgttgtatgtggtcattgtttctatcaatactttattattgcatgctcgtggcttgatcacccatatgtgtgtact

SEQ ID NO: 155036 - DNA, 354 bp, Glycine max
  unsure (1)..(354): unsure at all n locations
tgctctanattacatagatgtttgtatttatgggaagatgttgtatgtcatttttgttttaagagtagtgtcccactggtaaaactaactttccaaatgtttgccttcgcatgaaatggccccgaggaagcttgcctcatagaggtccatgatggacaatgcatccgaaggaactatttccgctccggagtatgatagtcaccgctttatgagtgctgtacaccatcatcgcttcgaggccatcaatggatggtcgtttctccgggagcgacgcgtccagctcatggacgacgagtatactgatttccaggatgaaatatggcgccggcggtgggcatcactggttactcccat

SEQ ID NO: 155037 - DNA, 344 bp, Glycine max
  unsure (1)..(344): unsure at all n locations
atcaacaattgatgtggcttagaaccctgtgtcacatggcatgagcaagcatatagacaccaaatgtcatttcctcaaagatcaagcgagcaaggggaagatcatacttcaacactgtataactgagaaacagctcgctgacattatgactaagtcactgaagaatgaaatgcttaacgagttgagagagtctntgaatgttgttagttgtgtaatcggtttgaatcaatgggaggcgtgagaagtgattctaaccaatagataggattagttaaatatagtcaatttgacagattaccattcctagctatcagaatgactttacgtatttgatatgctataaa

SEQ ID NO: 155038 - DNA, 415 bp, Glycine max
  unsure (1)..(415): unsure at all n locations
gctgcaagctttggagttaaacatgggaccaacttcatttattntananaaaagaaatcatatctagtcaaggtctgagagaccatacaagtttcctaacgaattctaattatgtgggtcattaagtctatcatatgctgacaatagccgagaagcccatgaatctcttcgggggcggagtaggtgtctgccatcgccttggccttggctaataatcggggaagttcttgactcccgttcaagggaagagcaaaccgatccatccacatggttgcctcttggtgtaaagagtcgatcacccttcctctagcctctttttccgcatatacttgggcatactcatncgcgattctatgctcgtgggccgtggctagacccaactcttcttggtacttggcgatgatagctaacatgt

SEQ ID NO: 155039 - DNA, 393 bp, Glycine max
  unsure (1)..(393): unsure at all n locations
acacaaagttctaggggtctaaaagagcaaatctgatcatcatgctttgatgaatgcaaaacaatactagggcaaatgaagagggtgaaaatgatggagaagcccatgttgtgactgccattcctatacagccaagtttcccaccaacccaacaatgtcattactcatccaataacaaaccttttccttaccctgcacccagttattcacaaatgccatccctatatcaaccacaaagtctgtctaccgcacatccaatgacgaacatcacctttagcacaatccacaaacaccaaccaagaaatgaattttgcagtgagaaagcctgtagaattcaccccaattctagtgtcctatgctgacttgctctcatatctaatngataattcaatg

SEQ ID NO: 155040 - DNA, 346 bp, Glycine max
  unsure (1)..(346): unsure at all n locations
tataatcccttgaacctacgtgagagttatgatccaagcatgccaaagtgaagaaggtcgtgttgaggtaagagacctactcccaaaaataggtaaatcatgtatcctcgagagtcaagtgtggattacgaatggtagagcgttgaagtctcgaaacttatacctcttttcttgaatcgtaccatgtctaanaaaggagtcagccttgtggccaatcgtgtttccatgtgtctgtttgttcgcttctgattctcataaatgtcttctatgatattacccaactncaaatagtatgtcattcacattctattatcgttctcgtgataaaatctgacttatgaaatac

SEQ ID NO: 155041 - DNA, 397 bp, Glycine max
  unsure (1)..(397): unsure at all n locations
cctagtaggagagaaactatcgagtttttcactgttccatttcaaggccaaattagaagaaatgacaccactcatagtcaaattaatagtgtgaagaggaaaccaaggttagagaggatgagccgtagaaaattcaaatccacactatcatatgttttttcaaaatcaattttgaatattagaaaaccaaccttcctttaatttttgtgcataaagtgtacaagctcttgagcaatcagcattatcagtggtgcctctataagcgactataaaggatgtgtaatacttttaattttaatgggcagggactatttaaaaaccatgtgacttatctagcatattccgtgacanaatataaaagtgctctataaggacaatnttgacatcatngattttt

SEQ ID NO: 155042 - DNA, 448 bp, Glycine max
  unsure (1)..(448): unsure at all n locations
gcctataattgaattaaaaccttcagaaactgctggtaatctttttccatatatgtgtaatcgattacacagtgcaaactttgaattcaaatattaatagctgctgtaaatcagttttggccactggtaatcgattacatcctctggtaatcgattaccagagagtaaatttgttgaaaaagactttgtaacttaaaattcttggccaaaccttttactacttcaattggaattcccttcctatttaatataccctttctaagactctagagactgtcttgatcatccatcttgaatatctgtaatttctttgtcttgaataaagctttgagacgcatgtgaaactntggcatcatcaaaacattcagcttgatcctttgtctacacattcatttntgtacctactcctcacgtgtggttgtttttggaaaaacatcataactaaatg

SEQ ID NO: 155043 - DNA, 407 bp, Glycine max
  unsure (1)..(407): unsure at all n locations
agaagaagctcactaccataggaagccatggataagatcttgaangtaggagaagatgagtggaggtagaatgagagaatgaacacacaattttgtgcctcanatgaggtatgaactttgaagtgtaattctcaaatgatcaaagttgaaaaaatgcacacacatgacctctatttatagcctaagtgtcacacaaaattgaaattgaatttctattcaaatctcagcccaataatccaagatcaagtccaagattctccactaagtgtgcttacgtgtcatgaaacatgtgaagcatgaacgaaatgcacaaagtgtgactaaatgatgtggttatggtgtggaacaagcaaatgcctcacctcccctctaaaattaattggattgggcttctctattcaattaat

SEQ ID NO: 155044 - DNA, 422 bp, Glycine max
  unsure (1)..(422): unsure at all n locations
ttctagacttgacttggattcggtggaaagtgttttcataatgaaaaggaatgatatngaagagaacgaggatttagtagaaggttgcggacggtcaaagaaaacccgtttcaagtttgtcgcgtgcatgctgcggtgagtgactgttttggttgtcggtgttttttcgcaacggtattcatctgattgatccggtganaatggtaggtgagttggtggattaataattaatttgatatatattaaaattaaaaaaatttaaaattatatatgtatataatatatataagtatataagtaatgttaatttattaatgttttccttgaatttcaatttcttttatctcacccaaaagctgttcttttccttccatcaaaaatgagaaaacaaaaacaaataatgaatgtgatacctatcattc

SEQ ID NO: 155045 - DNA, 428 bp, Glycine max
tcagtgccaaaacaggtaaatcgttaataataaaaggagagaagaatgttctttacagatccaagattggatcttcgtcctcctcaccggcggtgatagcaaccttctggagcttgacgattggagcaacgtaagctctggtgtccttgtcgtcgccaacgacaagttcctcctcttcttctttgtgcttgagatcggcgctcgacatcaatagttgcggcttcgaaccctataggggaggggagtgtgagagtgacaatattaaatataaacaaaaatcttctaagacgggtttcttataatcgtcgtagaatagttgtatttatttacgagcatgtcatcgcttcatatactaagacgattctggaggaaccgtgtttggtttagtgtcgtaaaaaatgttttctagtagagatatattttaatac

SEQ ID NO: 155046 - DNA, 127 bp, Glycine max
aataacaatcttgaccaataccgacccatccacggcatattcagtcagcgagaacctgcgatgttactatacatgcaagctcctggcagtcgtcctatttgacgaacatataccacataccattgat

SEQ ID NO: 155047 - DNA, 223 bp, Glycine max
tctttacctcaaatacctaatagagattgtaaattatacagtttaccaaagtgtatttaccgctacagtataactgactcaaagtgatgggcgttaaaaaagaaggaaattgcagaaattaagaagaacaaaagctactactgggaatacattaattatagagataaaattagatgattagctaggcaaacttgtgcaaaaagtcattttacatacattattc

SEQ ID NO: 155048 - DNA, 423 bp, Glycine max
  unsure (1)..(423): unsure at all n locations
tgtcatgttttacaaattacctattccagtccaacttagtcatgagacttgggtttggaaggcctacagcagaagaaataaaaaaaataggagtagggcaaaaagaggaatagaggaaattgttagtcttaggaagcagatccaccagctacccaatctcaacctgaacaggatattaaagcctgcatggaagagattgatcgccttangatgctgattgagtccatgagtaagccttctggattntgtaccttgtccaataagggtaagagttcatccaatacctttgtccttgtttctcaagaaatttggattcttgattatggngcaacagatcacatgacccccttccctgcactctntgcttcatattaaagagagtctgataggcaactcattacagttgccaatggagataatgtg

SEQ ID NO: 155049 - DNA, 379 bp, Glycine max
  unsure (1)..(379): unsure at all n locations
ttctattgggttctctgtcttattagtttctngactaaccaagtgagttacaagagaaacaagttgaatcgtcaattgaatttgatcacaaatctcttaaactcttttggctttctcttttcttttatgctttttagtaatctgaattgagatgaatcttctcgagtttcatcttcgactcctcattntcactctttggcagatatccctggtattcatccgctgaagaagtactccaaacatatttcttcgtagtaacaaaattctcaacttattgatgctgctgaagaccacaaacatatacaaatgattagatgaacaaaatattcaaatcaaaacatatgaaaaagggaatagacaaatggtttatttttactta

SEQ ID NO: 155050 - DNA, 429 bp, Glycine max
  unsure (1)..(429): unsure at all n locations
agcttgtagaatggctagacatgatacatgttatggcttggtttggntcaaagataaaagggatgccccacattatntccatgacacaaatgcaaaaaatgatgatttggagaatttatgcaaaactggtcatgcatgcgcctatgcggacgctcaagtgtcaaatttttatggtcatgtgatgctagggctcaagattcatttcctctaatttaaatcaacccaatatttccaaaatatgttcttttatcaatttgtgcattcctccaagtccatttcgggcgtccggngaaattttcacagcattcacccttcaggtgtagacacgttnttttcttcaaaaatcggttatgatcaaatgaatttntttcaaagaanaagtggaaatcatctcttttcaaaagcacgtctgtttttagctagacaact

SEQ ID NO: 155051 - DNA, 333 bp, Glycine max
  unsure (1)..(333): unsure at all n locations
gttttacgtgcatgttcctngtgatgaaaggtggtgcgtggntctacanggcaaaacagttggtgttaatgtagaagatgatgattcatacatggacacctatgttagtcctttgaccgctcaaatcactcgtaatgttgtcggagaagaagaagctgacgatgttcatgctaatcgaaatgatcatgatgaaggagaattgattaacatcttctaatgcaattttctgcagagatagaggtcaccaaagcaagtaagtgacagctacatttttcactgattgaggcatcggttttttgttgtagatggcatccttaggacttcatctagctg

SEQ ID NO: 155052 - DNA, 342 bp, Glycine max
tatattgaattcacagcttcatcacccactttgtatcttccaattgtggagcggtgatagctttatttgcaatgttaaagtttacataggaagcagccaaccttatacctggaagtctaggcttaacctcattatcctgacaaatgtagaatcataccaaaacaagtattaaatgggagagaaatctgtctaattcataatgtatcactcacaatttgtatatatagaaccactccaatcttaaaccatgccatcaggtatcaatattgagtaagctcatttatctatctcatatgataagttgcgcataggcattatttgaaattcaattaagtctttact

SEQ ID NO: 155053 - DNA, 252 bp, Glycine max
tcgacttttacaaattggaattatgttttctcatgctgtaacaattgactgtggtcgtcgtgggcgaacatgtaaagcctataacatcaaggctatgacttgctattcaatacacatattaacagtcattcgattaatcctttacataccttgaatctctttgaaattcttctttttctttgtaccaatagacttctgaatgattctggtttatcaaaccttgaaaacctatgctattcatctctttattct

SEQ ID NO: 155054 - DNA, 429 bp, Glycine max
  unsure (1)..(429): unsure at all n locations
gcatgcaagcttgaaagagacatagcaagtaatgtcagttaagttagaaatgaactgaggataattaatgtcgattaacggagatctagattccatagaattggacaaagggtaattaagtcataagagtttaaagcggagggcatcttcataaatgactatataactagtttaaaaatagaatattagtttaactagttggtgactaattaaagcgtctaattatatgatgtagaataattaacataagttagagttgtaacaccctcaaaaattacaattcaaactaacaaacgaaactctatgttgngttatctgttcatctatgaacttaatttcagtagttatatgtttttaatcatagaatttcgtactatctatatgtgtgtgatcgatttagtaaagctcgtaaaaaatagaaactgtctg

SEQ ID NO: 155055 - DNA, 316 bp, Glycine max
tggctgcataattcattgttgatacaggactagatatcttgttcatcaacatgttagcgagattcatgggatgtggaagcgacattcgagcggtatctattctacccatgatgcttacaaagttatgatggaagaaacaaagtgaggatccagtggatggcagctgcgtgattacgtggattcttaagataccaccttaggcatatatctttacctggagactcatagtataccgtttacgagctgtgttccaattatatatgcactgacagtacctctggtactatttcatctatctagtacatatctatttctg

SEQ ID NO: 155056 - DNA, 220 bp, Glycine max
acaactgaaattttggaattttaatcttcttccaagaggtgagaaagtaaaattcttttcttacactattcttcttcaagatacaccacgtataactagcacaccagccatatgctttttttatcctcataattttaattgtttttattcaaacacaaaattttgaaaataaaagaactttaattgaagtatctaatattcttaaagattaaaatttctc

SEQ ID NO: 155057 - DNA, 391 bp, Glycine max
  unsure (1)..(391): unsure at all n locations
taacatgtagtgatgggaacacatcatcgtttgatcccattttgaatgtgttcggtgctgtaagttaaggaggctgaagtataacttctcaatggttcttttgaaaaaatgcatttgcaggtgcaagaaagaaaaggactacctatataagcatgaagtttatccgcttcaagaagctgggacttggctttgatatgcttatgaaggatagcaacataggctagtaaactagtgtcgagcaagagtaatgttataaactattgtgcaaattatcttcatgtattcattatgaatagaaagggttcattccttagtgacaccctgatattcgaatatttgaaacgtgtaattngctaagatgaaattgnatcgtcacgatatttcatctatg

SEQ ID NO: 155058 - DNA, 426 bp, Glycine max
  unsure (1)..(426): unsure at all n locations
caagcttgtgtaatctattacactgnattggttatcgattactagtgaatgtttctgaataaatcaaaagatgtaactcttcaaatggtttttgactttttcaaattggttttaagtttttctaaaagttataactcttctaaatggttctcttgaccagacatgaagagtctataaaaagcaagactttgttttgcattttatatcaatctttctatcaatccaatcaatcttatacaatcctttacaagccttgaatctctntgaacttcttcttctttatgccaaaagctntcccaaagtttctggttntctaaaccttgaanaattgtgctattcattcttttcatctctttctcctttgccaaaaagaattcgccaaggacctaaccgcctgaatttttttgtgtctctcttctccctttt

SEQ ID NO: 155059 - DNA, 405 bp, Glycine max
  unsure (1)..(405): unsure at all n locations
taaaagagggagagaagtggaactttgaagtgtgtctcataagactttcattcatcaaagttacaacaagtgttacatatgcttctatttatagactangtagcttccttgagaagctntcttgagaaaaattccttgagaagcttctgtgagaaaacttccttgagaagctagagcttatctatacacacccctctaataactaagctcacctccttgagaagcttccttgagaagattcctaaagaagctaaagcttagctacacacacctctctaatagctaagttcacctgctttagatgagaagctagagctcagctacacacccgctataatatctaagctcacccgcatgacataatacatgataatacattaaaagtccctactacatagactactc

SEQ ID NO: 155060 - DNA, 276 bp, Glycine max
  unsure (1)..(276): unsure at all n locations
atagcttacacacttgtgctcgagtgaaatattagccgtgagattgtggtttgagctaacttccttgatatctatctttatgatntaacttcatccaaactgtataggttcacatgttgttctccttcttgtctggctgcatattctgtgaaaacaagtgataggtacacattgcttcatctttctcatcatgcaatcaataatatttgatgcatacacctttatacataaatactacatgttttaccacttgaggacaagtgagctgttctcttt

SEQ ID NO: 155061 - DNA, 368 bp, Glycine max
  unsure (1)..(368): unsure at all n locations
tcctatgctgatggcatttttgctgctaacctatggactaacaaatttgtgcccattctttgttatgacaagtttgatattaatcccttctagctagagccctctctagttccattcacagacaatgattgtacatagtatgaatcattgaaagctttcacctcaatttggctgcttaattatttgaatgctatgtttaatttgaacatattgactaatattgtacgatgtataagaataaggcttactgtattatatatattccaagtaaacaaacaagtaaaataacacacatgtcattgcaatgttcgtgatgatgaaggttttctttntaaatcctgctctgatttaatttctattagatattc

SEQ ID NO: 155062 - DNA, 262 bp, Glycine max
caagaacactccgcccggagacgacgtctttttttagagcgtttacaccagcagcgctatgaagccatcaagggatggtcgtttctccgggagcgacgcgtccttctcaaggacgacgagtatactgatattcatgaggaaatatggcgccggccgtgggcaccactggttactcctatggccaagtgcgatccaaaaatagtccttgaggtttatgctattgcttggtcaacataagaaggcgtgcgtgacatgagatcat

SEQ ID NO: 155063 - DNA, 379 bp, Glycine max
aggattaatacctgacatctcagacgaacaaatctttgtaacaagaccattatagttgttgtctgaatacctgatgtcgcaacatgcccttttgcaggcgagcgaggcgaggctcacgggtgcactttccaagggaggaaagatgcgcggagtcgccaccaactgttatttgtggaaaacgtcagaaaaatcgaaggaaacctgtcataaagaatattccaagttcgggagttgtatttacgcttgaagaaggtattagcacctctcacgtttgtctcaaaggacaacagccttatttttagaattgggaaattgggtaccttaactttattcttttatttttgaggcgacaaagcgggctcttgccctacgaccctca

SEQ ID NO: 155064 - DNA, 463 bp, Glycine max
  unsure (1)..(463): unsure at all n locations
ctcgctgcaaaattcactntctttggtggtgtntttggtttgtgctaaaggtggtgttcttcattggaagtgcagtatacagactttgtggtagatttatggatggcctttgtggataactgggtggtgggtaaggagaaagtttgttattggctgagtaaagatattgttgggttggtgggaaaattggccgtacaggaatggcagtcacaacatgggtttctccctctttctcaccctctgtatttgccccagttttctcagtcgtcctagtatgatgatcaaatttgcctttgttcggacccacattgatcctttcactggcgattaccaaatctgcaaagctctgatggtgcgcagcccaccatcttttcatagtagagtaccgattatgtgtctaccatcacgattatcgtctccctttttgcacatgttctgtagttgcattctatccggaaccata

SEQ ID NO: 155065 - DNA, 200 bp, Glycine max
gtgttaaaggaggtgttcgtcattggaagtgcggtagacagactttgtggtagatttaaggatggcctttgtggataactgggtggtgggtaaggagaaagtttgttattggctgagtaaagatattgttgggttggtgggaaatttggccgtacatgaatggcaggcacagcatgggtgtctacctcatcctcaccctc

SEQ ID NO: 155066 - DNA, 407 bp, Glycine max
  unsure (1)..(407): unsure at all n locations
ttcttcttgccctagtgccttagatacatttctcagatactacctactcttgtgtcacttgtccatcataatccctgccagaacatgactaaacatttgaatgacatttatttccaacagttagtcataaagattnttaagggaaaagaaataaaaacctttatccatgtttcagtgctgactagaatcttataaattctatatgaattgaaaagctgggacggattcatttccaggatgagtaacggccacagagttctggtactggttaatgacttaattcataagagagagaggatcccaagtaatggattcaattgtgggtatgtaagtagcgcttgtttcgtataatgtcaaaacatctaattctcagtgatatgaaagagaaatatgatgtggaaaatctt

SEQ ID NO: 155067 - DNA, 358 bp, Glycine max
  unsure (1)..(358): unsure at all n locations
attcagaatgcatacccatgcaatcaggagtttaatcataaaatactgccagagantttgttctcactgagaaggtatatcaagcagactgacaaaataagtttggtaaattgcaatctatcattctatcttacaaagcaaagatcttcaaaaataaccactgaaaaaaaaagcttcaagaatattctctggagaccaacatgacagccacaaaagagagatgacattctattattcagatgatacataaattatttgtttttggaaaaaaataactggaaacattgtgaccgtaaaatttagaactaagtaattgtaaaagttctttatattggttcactctggttcataaaatttc

SEQ ID NO: 155068 - DNA, 425 bp, Glycine max
  unsure (1)..(425): unsure at all n locations
tctcatatcggtttattctattacagctatctcataatcgaatacattgttgtttgagacaatgattgatttattcaggagtctctactctaattgattacttctctctcatttagatgttcacaggtgaacaagaacactttaatcaattacttcaggagtctctactctaattgattacttctctcttgtttagatgttcagaggtgaacaagaacactttaatcaattacttaggacatttaatcaattacattattcttaagttattttcagatgttgggatgaacactttaatngattacttagataatctaatcaattacttcatntaaataatcgattaccttacagaatttatcgattacaggcagttataactaatttttctataaataatcagcttgtgtcacatctatacatca

SEQ ID NO: 155069 - DNA, 384 bp, Glycine max
  unsure (1)..(384): unsure at all n locations
ctcttaattgtctttgggctttgttaccactatcaacanagtactttcggcacctactatatgttgacttgaccaacgctgttattggaatgctgcgacaatctttcaacaccttattcacacattctgataagttggttgtcatgtgaccatatcgtcgtccatatgtatcgtaagccatgctccatttttcctttgagattcgatcaatccatcttgctatggctggactcaattgacgaaattgttctaagttttgatcaaacacatgcttgcaaggagtgtacgctgcatcaaatntgttatcatcaaaagttgtacatagacatgaaactcanantaaattaatgtataaaataaaccttacccaatttcttgaacatc

SEQ ID NO: 155070 - DNA, 396 bp, Glycine max
  unsure (1)..(396): unsure at all n locations
ttccacaacatatggngagcatggaatgagtgaacgttctatcttggatatattccatcttggatcttgatttcaagaaattaaatcgtcatcatcaaaaagagggagattgtagaagcaaagactttgatgttttgatgaagccaaaggaccatgtgcttctcaagtttaattcaagaggatcatgcgcttctcaagtttaattcaagacaagagtccaagaaattcaagatatatgatcaagataatctctagaaacttangaagggaattccaagttgaaacaacaagaagtttgaccaaagaatatgagttaaaatggttttacaagatatttactctctggtnnatcgataccagaggatgntatcaattaccagtgaccaaaatgatttg

SEQ ID NO: 155071 - DNA, 434 bp, Glycine max
  unsure (1)..(434): unsure at all n locations
ngcagctcataatctctccatatgttgtagcaatggtngtttcatttgggaattctactctaaaaatttccatgattgctaaggtacatgcgaatattacaattaatggtaagatatcatgaagaaaaatataatcatcttcaatagatattactctcttgaactattaaatatataaggagagattcacttgcttcacttcaagagtaaatagttatttttcattgttattatttatttttttaaaaatctaatgattaagattagttacttattaaataataaaaataaaaaataactataaaagaattatctgtggaataagtggatctctcctctctttacatataattagcttaattggtaagtttggtggttctcacttttatgtctatttacataaactgtagtacctaaattgtggtatatatttc

SEQ ID NO: 155072 - DNA, 434 bp, Glycine max
  unsure (1)..(434): unsure at all n locations
ttcggctagtggtatccatggttctcatatgaaatctgcaaggtacttgggcctgtgtgtgttgcgtttaagcctatggctgcttctgctattggtaactatgaattcctcttggttaatctgtgtgtaggttgggactgcatcttctatgtgctctgttatctgtatattgctatcatacacatgatgtaatttctgtttctttcgtacaatgattgtggaaacccttgtcttatcatcaatatttnttgctgatctaaaaaaattatacgatataagcttacaaaaatgtataagaaataaaaatatgggcgggttattataaatctatgaataaaaataaatatatgtgtataagtgtatattggattggatcggataaacttttaaaatcaatttcaaaatctgatccgatagaatacaaattttcattt

SEQ ID NO: 155073 - DNA, 356 bp, Glycine max
  unsure (1)..(356): unsure at all n locations
tctcttctatcatggttntttgcctataatattgtgtaaaccacctaaccatctcataattatttctggttattaggattggtaagtagttattctatgatttttattctgtccatttgttaagtagaccttgaaanaattgataaaacacagtaacttacatggctgcagaacatgctattaagtattgtacgtgatgccacaatatttatgttactggattttgatttttgcttttggagaacttttgagaatgaattntgtagttcaatgtattctgtgttagctgacaacactgaatgcttaattanggaataaagggcttagatgttagaatctattctggaatctttaaa

SEQ ID NO: 155074 - DNA, 401 bp, Glycine max
tgagtaccttctggaggtggttacctcatcgctaattcaagctttcactgcccattctctcagatagaactctgacacatctctacttcttgagctataatgaagggattcagatgttgaggccatgaattggagatataaaataactcaacagagtggaacgtcgttggtgtaaatgctgagtcaagtcactctcactccaactcatactagtgaatgagcttttgaaagaagtgtaattttctaaaaataactaaatgaatgagcttttgaaaaaacaagaaaagttaagaacattctagctacaacattcgcagttaagagcattctggctatcatgtagcttaagcaataagcatacatgtatcagatcttttctatagtaatagagatgtccagtt

SEQ ID NO: 155075 - DNA, 410 bp, Glycine max
  unsure (1)..(410): unsure at all n locations
tataagttgcaagagctttatgtggcaaggaaaaattcttataactcgtgtgaaagttagtggaacttggtggattaccaagaactggatatagtctcagtggtaaaggcgaactagtataaaattctctgcattttatatatttattattttctattttaactgataagggttcgaatttgattttgatatttgaaaagagtatgttacaatatctactattatcgtctaatcttatctatttgtgaaaacttctttgtttgtttgataaaacattaacatacaataggctgtaaaaatgcttacaaaatttttaaaatcacaatccaacctcccttcttgtgatattngcctttatagtttggtattagagttcaatctctaagggttggcatctaatagtgtctaca

SEQ ID NO: 155076 - DNA, 431 bp, Glycine max
agcttaacaaaggcatgcgaagtgggtggaattcctatagcaattcccttatgttatcaaacataaaaagggaaaaggtaatattgtagccgatgctctttctcggtgtcatgcactactttctatgcttgaaacaaaattgattggtcttgaatgtttgaaaaacatgtatgaaagtgatgaaacttttggtaaaatttttaaaaattgtgaaaaattttcagaaaatggtttctttagacatgaaggctctcttttcaaagaaaacaaattgtgtgtgcctaaatgttctacaagaaacttgcttgtttgtgaagcacatgaaggaggtttaatggggcatttggggggtccaaaagactctagaaacattacaagaacatttttattggcctcatatgaaaaaggatgtgcagaaaatttgtgaacat

SEQ ID NO: 155077 - DNA, 330 bp, Glycine max
  unsure (1)..(330): unsure at all n locations
tcccgcatccgcacctggaaggatctgatttctgncttccttatgcagtatcaatacaactctgccatggctcccaaccgaactcaattgctaaacatgagtaaacgagaacacgggtcttttaaagaatacactcatcgttggagggacctattatcacaagtagcccctcccatggtcgagagagaaatggttactatgatggtggataccttgcctattttctactacgacaaattagtgggctacatgccctccatcttcgcagacttgctattcaccggggaaaggatcgaggtgggcttgaagagagggaagttcgattatgcc

SEQ ID NO: 155078 - DNA, 409 bp, Glycine max
  unsure (1)..(409): unsure at all n locations
catctgtaatcatcgatatgtggtgttagattnaaagaagaatgaagttaaaatacttatttatagatgagaaaagctaagaaggaaatgcacataataattttcagaggggtaaattgcttttgagttaatgtacctgtcatgtgagaaaatagatgttcaaactctgatctaagttcttcattggtgtagtttaggtcaacttatataaagctattgtctagataagctggacaatttgcatcctctggatatggcattgaaggatagtctctaagcgatctttgatttgcttgcagcaagttcttcaatttcaagcaagaccaaattttgaaaagttctatcatcaagctgttatgctaatacacaaaangggaaaaagtcnaaatatgtgtcgcatcaatattga

SEQ ID NO: 155079 - DNA, 447 bp, Glycine max
  unsure (1)..(447): unsure at all n locations
taatactatatggttcttgctccgccgcatttcatattcatgtatttctaatgtcacatccaaccacttaccaccaatctgttatttctttttgtttgattaagcttttggtactttaaagttttatgactttgtagtgtaattattatattaatattttaaataagtcactcataaaaaaaattctttattatttttcaagtttttattaaatgccatgtattcacgttttaataccatttttttaaaatttaatctgtataaatataataacgttttcacttgatctctatactgggatgccgatcgaataaaaaaataaaaaggtataatttatataaaagtaagtaaaacattacataacaaggagaaaaaagagtagcccaacgaatattggagattctatganataatattctattaaataactcattcaaaataaaataa

SEQ ID NO: 155080 - DNA, 390 bp, Glycine max
gcgtctcgatatattacgggactctttcatacatacgagtaaaatgttatcgtccgttgaattggctcagagcttcaacattcaatctcgagggtctcgatatattactggactcaatcctacatccgagaaaaaaattattgtcgtttgaattggctcacatgttcaacatttcaatttgagcgtctcgatatattactggactcaatctgacatccgagtaaaaagctatcgtcattcgaacttgctcatagattcaacattcaatttcgaggctctcgatatattaccggactcaatcatacatccgagtaaataattattgtcgtttgaatttctcaaacgttcaacattcaattcgagcgtctcgtatattacgggactcaatca

SEQ ID NO: 155081 - DNA, 423 bp, Glycine max
  unsure (1)..(423): unsure at all n locations
aaaatttattntaaccaaaatatgtaggcttttattattctttctattgcaaattatgggaatgtaatctntgttttgtagtgccataagcccacttgtttgttattcaataaaattttgcactctgtttttctcaaaattttcgtagagaaagtctaccagattttttaattcggtttaatctggtttccaaagttgaaatcctattgttcataattttaattgcagaatcattttccttcttaaaatcaagaaaatcagttttcaaaactgtgtgttcttaagttttgcacaaatttttgtagcataaactatagtgagctcttaatgtttcgtggcatatcttatgcaaactgacattctttatgatccggtnctatgtggaatngnatctcatgtccacagcatttatctggtttgaca

SEQ ID NO: 155082 - DNA, 454 bp, Glycine max
  unsure (1)..(454): unsure at all n locations
cacacacaaactaaaattgtttcttctaaaatcacttccaaataatcattaatccacatgcacaaattaaaatgcatatgcatgactagtttaatttcacaaccattcaaaaaatattgcatttgttggctcgaattataagagaccaactttttcatgaaaatacacctctaaagttagtgaaagaccaaatttaaactaacacctatctctaaggtagtaaaaatccataaaagtataaagtgactataaaatatcaaagatgttatttttgcaacactttgcttaaaatgggtaattattgttgagttgtgacatcttagatttaaacaacgtcgactaattgattcttcattntatattctaatgtgatggagagataaactaaaactcttgataatgatagtagactttgtgtctcatcacannatatggacatcttttctatcatgtt

SEQ ID NO: 155083 - DNA, 435 bp, Glycine max
  unsure (1)..(435): unsure at all n locations
gaagaaaantcaataaataggccttctatttttttggagagggttaccactactggaaaatccgaatgcaaattttcattgaggcaatagacttaaacatttgggaagccatagaagttggaccttatgtacccaccatggtggctggaaatccaacaatagagaaacttatagaagagtcgactgaagatgaaagaagattagtgcagtacaatttaaaggctaaaaacatcattacttctgccctaagaatgaatgaacattntagggtntcaaattgtaagagttctaaggatatgtgggacactctacatagtacacatgagggaacaactgatgtcaaacgatctaagataaatactttaactcatgagtatgaaatatttaggatgaagacacatgaaagtatacaagacatgttgaaaagatcacaca

SEQ ID NO: 155084 - DNA, 474 bp, Glycine max
  unsure (1)..(474): unsure at all n locations
agattcctaaagaagctagagcttagctacactcacctctctaatagctaatctcacctgcttgagatgagaagctagaacttagctacacaccccctataatatctaagctcacccccatgacaaaatacatgaaaatacaaaaaaagtccctactacaaagactactcaaaaggcctcgaaatacaaggctaataccctatactactagaatggccaaaatacaaggcctaaacgaaggaaaaaaacctatcctaatatttacaaagataagcgggctcatacttaacccatgggctcaaaactaccctaaggctcatgagaaccttatggccttcccttggatctctggcccaatcaacttggagtcttctatccaatgccctngtggggtaggatngcataanaaagtacatgatgtagatagtgatgaatttcggagttctggtttacaatctatcaaaagttggatat

SEQ ID NO: 155085 - DNA, 376 bp, Glycine max
  unsure (1)..(376): unsure at all n locations
atctttccatgtgaaagtaaatgtagttagagctcttatatttctttatactttggcaggaagtctagtaaaattgcttggtaagcttttgtgtgaatagatgccaattgcaaaaatcaaagcctctggcactccaaatttcatgaaaacaaaagaaaaaatagataccatattagaaaggcaatttttcaaagaatctttcgttccttttccaagggctagtgaaagccctgcataatgggttcaattactccatgctttggatccacaaggtgtcaacaatactttctcatgtntgaatatcatatttttggaggttcattntcaataacctttagctgataacaaataatttaatataagcatgtatttatca

SEQ ID NO: 155086 - DNA, 389 bp, Glycine max
acacgaagttacatcatattatattattcttctattggttcttgaaagtaaaaaatgttacttcatgctatctagacgttatggaatgtttctagacacctaccttgattagtaaattaattatgattaatttactatcagtttagtattgaacctacggggtcatacacaaccaagtgttccaatctttacaaaagaaaataattgatgtgataataaattatagaatttaatttaatcaaataaatattttagtgaaatattgttatattttttttgctagcgccaagaatataattaatataaaaagggagtatgtatttataaatgtgaaagttgtccatgaaataagaataatattctattattacataccaagatcagatcat

SEQ ID NO: 155087 - DNA, 109 bp, Glycine max
ccaataggctatgagagaggtccaataaatataacgacgtttcattcaaccaatttggcactctacctttaagttggttattggacaaatgaagaagcacaaattagga

SEQ ID NO: 155088 - DNA, 368 bp, Glycine max
  unsure (1)..(368): unsure at all n locations
ccatgctgtgtcgaagtaatctcactctgacctaaaatgtggaatatcttccactcccaaacctgctggagctaccagatacttgttcagctgaaatataactatgttcccgcccatccacatctctaagaaattcaggctccttagtggttaccatgaagtgcatcaagttgcggctgaaccccatatcacaatacacgctcaaggcatcctacatatgaaaatagatactactacatatagcagtggcagaacattcaaaacactgatatattgaataatatcacactcaagcacccatatatatgttcatatnctctactgtcaaatcagacaaagaactcatatgactgtgtctcattccttat

SEQ ID NO: 155089 - DNA, 112 bp, Glycine max
gctgcaatttcttggagatatctcgcgcgcatatcattgttgcacatcatactctcgtgttggaaccaatacctttggccgatttctacatgagcacatactgttgctacta

SEQ ID NO: 155090 - DNA, 437 bp, Glycine max
  unsure (1)..(437): unsure at all n locations
catggattttgaagttatattgcactttgttaactcttgccatgctgnttgcccaaatatgtgattcaatgttattacttctttactctgatntctcttgaattntgagtatgtttttttcactattgtcatgaatgtaatttggacaaataaaattcatgcaggtccttccaccactttgtgcagagcttaagaatgtggtgatacagccaatgattctaccaatggttctaaccattgccgagtctcaggtactaatatatctttcttttcctcacttccatataatacctaaattagtgctggtgttgtcagcattgtaattgaaaatcaatcttgcaccacgaaatattcttttgtagggtgaatgtttcacaaaatccaccattatattgaanatatacatcatntgtcatttaattngatagtactaattt

SEQ ID NO: 155091 - DNA, 332 bp, Glycine max
  unsure (1)..(332): unsure at all n locations
ntaacaactctttttatagttgtcttgacctttttatctaatattttttttaaaaagcttgagctcgactnttatagtaaactaactaaagccaagtctaaccttatatatgtcgagccaaagactccttgacaaacggttcgactcatttccatccctaattgtagtgaattgaatttaaacaattattttgacatgttctctatatttctagtatgtttttggtagaaaattaatataatttataacattattttatgatctttacttatgaataatatatacattgtcttataaatacaagcaataataccaattcttcttataaaact

SEQ ID NO: 155092 - DNA, 419 bp, Glycine max
  unsure (1)..(419): unsure at all n locations
tcttatacaatgcactctcttgtgtggtgaagctcctccttccatggcttattccttattggatggcgcctcctctcacctcttctcctttaccttacactgcatatccatggttgaaagtcaccattgaaggacctcattgaagctcaaagatccaacattcatagaagcttctcaagcaagcttccatcaagtggttatcagagcacaagaacttcaagtatgtgctccttaaacctccattaattttcagctgtaccttctactccattgttgtttcttcatttttctccatgtatctcctcacatgtcttgtgccaaatgtggttaacattgatttctagaatattcaccgattaaacttgctatagaagncagaattggatttctatggttcttaattcttggtcttgttcttg

SEQ ID NO: 155093 - DNA, 433 bp, Glycine max
gcaagcatcatctgcagatccgtcatgtaagactatgcctaaactaaacaacattattgttacaacataattaataccaaaacttaacctgcagatacctcatgtaagattaagttttgatcctacttcaatcaagttctaaggcagatatgcgtatcccaatgctataagtgacctaactgtgcacacaagtgggtgatcttaccgaaagcatgcaaacatcaagcattgaacacagaatacacaatctattaggtatcaggggtgtacataatcttttcattagaaatccccaactagggcgttgagccagccattacgaagaaaccctaacaataaatgagattaaaagcagagaatgataatttcttacacaagaagggcgattcctccttctcttgtcagcatgtcacactcactctctactcaataa

SEQ ID NO: 155094 - DNA, 369 bp, Glycine max
actaagcttatccaagatccttctgtttactacgcttaactaatcttcattatattctcgacatattcagaagaccacaaccccacaataaatctctggtaatgtagttatttagtcatgcttctatcaagttctaaggcaacagtatatttcccaatgcttaagtcacctaacagttcacacaattgggtgatcaaaccaagagcattcaataattaagcattgaaagaagcattgaacacacaaaacacaatcaattagatattaaagataattacatcaacttttccttataaatctccaactatgatgtttagccagccatacacataaacccgaacacaaatgagatagagaagatagaataat

SEQ ID NO: 155095 - DNA, 372 bp, Glycine max
catattcatttttttatgtgccaaagcatttttttggtctttatttctctattaaaggccttactccatagcattagaccttgcacattccttttccctttcttgttttttttaaggttgaaggtgacgatattttgggaaacaaaattcattaaaagtcacgtgcaacactagacttgtttttgttaaagaattaaacaccgataaaattgagggaggcaagtgtaatggttagtgaacaattacgggaagagaaatgctagtacacactttttaacacaggcatccataccgactttttttattgattacaatgtattgcaaaactacaaatcaggataaagagtcattgaataagatgtggaacctact

SEQ ID NO: 155096 - DNA, 309 bp, Glycine max
  unsure (1)..(309): unsure at all n locations
tagaataagccccttcgatcttttacatgcgtcaacgattcgaagaatgataggtctgtgtttggaggtggcgatgaagtggaggacaacctctgtgtcagatgtggtgttgaagatggagccgttgtcttcgaggttggttcggagggtcttatagttgacgaggttgccgttgtgggccacgccgactgatccgaatcggttaccggcgactaatggctggacgttnttgatcatggattggccggcggtggagtatcggacgtggccgattgagatgctgacggggagctggtcgagttttgattg

SEQ ID NO: 155097 - DNA, 441 bp, Glycine max
  unsure (1)..(441): unsure at all n locations
ataggagaagatcatggctcatgcaaatntaacatactgtctctgtttcctttcttataagtgttcacttttagacatgtttattttgataaaatggtcaattctatagttggttttccttcttacgtttgccacaaatagatagcaataacgagtataaacaagagttcttatgtgagggtcaaatttcaatttgctcaaatacgtatactgtacgtagcatactcccgtacatagtccgaaatctccgaaccaaatcctatgtaaaacaagtttgaagtccacctccttctgtatcgatgaacaatctttttagtataatcaggatgggtgtggtacccatcccaccgagtcggtctatttttgaattaaagtgatactgtcagttattatttcatgtttaagtcngaaatngaactgaatccaaagaatcttaatatg

SEQ ID NO: 155098 - DNA, 309 bp, Glycine max
  unsure (1)..(309): unsure at all n locations
atggtaaatctgttgctcanattctctgataaatgcaaagatccaggtacttcagcataccttgtattatagggaatagtaagtttgacaatgccatgctagatttaggagcttctgttagtgttatgcctctgtctattcttaattctttatctctagctcccttgcagncaactgatgtggtaattcatttagctaatagaagtgttgcctatcctgtgggtttcatagaagatgtcttagttagaagtggagaactggttttccctgttgatttttatattctgaatatggacgatggattttctc

SEQ ID NO: 155099 - DNA, 474 bp, Glycine max
ctcatctcaaggaggtgagcttagctattatagaggtgtgtgtagctaagctctagcttctttatgaatcttttcaaggaagcttctcaaggaggtgagcttagttattaaaggagtgtgtgtagctaagctctatcttctcaaggaagttttctcaaagaagcttatcaaggaagtgttctcaagaaagcttctcaaggaagctacctagtctataaatagaaacatgtgtaacacttgttgtaactttgatgaatgagagtcttgtgagacatacttcaaagttccacttctctccctcttttattccttcaatttcgtgctcccccctctctctttctctccctctgtcttttcctccattgaagcatccttccaagcttcttatccaaggctcatcttggtggtgaagctccttcttccatggcttattccccagtggatggagcctcttctcactcttcttctttgtct

SEQ ID NO: 155100 - DNA, 395 bp, Glycine max
  unsure (1)..(395): unsure at all n locations
gctacctagnctataaatagaagcatgtataacacttattttaactcttatgaatgagagtcttgtgagacacaactcatagttcaacttctctccctttttcttccttcaatttcgtgctccccccctctctctttctctccctctttcttttcctccattgaagcatcctctccaagcttcttatccaaggctcatcttggtggtgaagctccttcttccatggcttattccctagtggatggcgccgcctcttacctcttctcctttgtcttccgctgcatctccatggtggaaaatcaccattaaaggacctcattgaagctcacagatccagcctccatagaagcttcaaaagccaggcttcatcacgatgcccctcattgcccccatgt

SEQ ID NO: 155101 - DNA, 405 bp, Glycine max
  unsure (1)..(405): unsure at all n locations
aactgaacctctctccctaatgttgtacttgtgaaaatggaggaatgacggcttctantttttttcttcacaatgaacaagaagataaggcataggtttcaaggtgacaagacttattgacacttgaatgaccccttgcccatccatgttgaacatgccacttaatgccacaaaatgggtagttttgctttttgcaaaactataaaaaatggaaggtataggagttgccaaaaatgggtatttttgttttttttttatcaaaactagtaaatcttatcttaattgcctaggttattgtgttaatttgtctaagaatacgtgtacctagagtgaacctcacacggagttcaattacactatcactcaatgcacaatgtaatgntgctatagatgaaaattttgttt

SEQ ID NO: 155102 - DNA, 424 bp, Glycine max
gaatactaagagggaacgagggatcatttcataatgtatcttcacaaaaaaatcccaagaaaagaagatcaaacataactcgtaaaacagctggttaagtcctataataatgagccttacagaaaaatgctatgaggcgatcatttgctaattggttcaaaaagtaaaagatctaatctagagttggtgacctccttgatcatcattgaaaaacatagcctctcagcttgagccaaaagtttgaggcctgggtttaagactgtgtcttgtgacagagccacagtaggatcatcaagaaactctcacaccatgtttgaaatgaatgcagagagagaaagcacgcagaatctgagatgatctcattatcgaagaagaatagtgtggggtttatatatacctgactactagctcacgagttaattct

SEQ ID NO: 155103 - DNA, 388 bp, Glycine max
acaaatctgatgtgtgaagaaattgatcttgtctttaaagatcgtatcttactcgccaaatccactaattatcatactattcctcggtacccataatgatgtaaaaaaatattgtctgaaaaatacataatgcataaaattagaagattatcttccttcatattctaaggtaaaatatatcacactaaaatatatgaacttttataatagcattaaatactaaatattaaagtgctaatactaaaatatatcaacgctcatgatagactcgatattaaaaatgtcataatatcttaccatactgagttacatcggtaattcgcaagtagtgtataataataactttaagttttctcgtgtgtctacaaaccaaactatgagtatatcc

SEQ ID NO: 155104 - DNA, 423 bp, Glycine max
  unsure (1)..(423): unsure at all n locations
attcttggaatataaacattctgaccaagtattttgccagaaattatatcagttgcaatcacatgtttagctaagtttgtaacaattaatctagtatcattacatagtccttgnagttggtctaaatttcttaacaacatgataggtgatccaattttgattttgatgttatgattcggcagatcgggtgttgttaatgaattaagaaattctgctggtagtgattgaaaatgagaactctttattgtttctgagtttgccacataatcatcacttagatattccatctggtcacatgtgatttttatcacgttatcatcttggataaagaatagaaagagtgcaaaatttgatgatcatgttagagaaaaaatacttaatatatttgattagtaatcctgcagaatgtttgatataatgaca

SEQ ID NO: 155105 - DNA, 347 bp, Glycine max
gtgctcatgcgcttatcgcaaatctgaaccgcttaacacgcattatgtgaatttggatcatcgcggcttttcttcctcagcggtgcgcttaataggatgacccttcgctcaatgaacaccacaggtcatggctcttccataatcttactcacgcttagccgatgaatgttgcgctcagtggatggctggctaagccaacagattggcttatcgagagggtgaaaatcaacacttcaaaacgtgcctaattaacctgaaagtgagagaaaatgattattaaacacacacaatggaagtactaagtatttattaactatctttaaccaagagtaattacaacactacaa

SEQ ID NO: 155106 - DNA, 259 bp, Glycine max
tatctcggtttgtgtagtaacaagagatttgtatttcatgttctagttatgaaattacattaaatatttaaagatataattaatcacctataatgattatataaaactcgagtatggtctacaaaaacaaaatgaaacattgtctctaaagtctaagtttatattctcttgtcaactttgtatgtgtaacatttgagacatagaactgtacgtactagcaagcaccggcacgttgagtaagtctatgaatacacgtgag

SEQ ID NO: 155107 - DNA, 437 bp, Glycine max
  unsure (1)..(437): unsure at all n locations
gcttatgcttattcattgggttcaacctattatttntggagcaactagataaagaatgaccgatcaacattcaaaacagaagacaacttctcatagattatcccaataaaaaagcaaaatccctttcctctcaaagatatactagcacttcatacattaacatctactccttcttcctcttggatttgaacaacatattcaaaagtatggtctttgttaattaactagtgatattgaagatgaagattccttatctaaacaaattgataaaagcaaaaaaaaagaaaaactagcaagatcttttagcctatcataaagaagctatgtagaattgaaagaaaagatgactaagtataccaatgtctggacaaccttcaataagagagaaggaattatatgtgatgggataaagaanagtttaactatccactanaaaa

SEQ ID NO: 155108 - DNA, 470 bp, Glycine max
tgtgttcctttcccacacgtctagccttatttaacaaatcttcgtgctcttgttaaacctaaaacaatcaaataaattattcaataacaaaacacatacatatataagtcatgaaatataccttatcaatcatgaaattactagaaaaatcatattagttaggttgtggttgcatatcaatgtcatcatcacccacattgtcatcattatcatttcccgaaacaatatcattatgctcagctccaaataaaaggttgggttgataaaagaaaccttggcttcaaccattcatatttctccatcagttggtattataaccttatccaacataaaagtatttcaatccattgacctaaaaaatcaagaggtaaaaaattggttgttttgtgtaaaaaaaaaaaaattgtgtgttgacaatttgcaatcaacaaatatgatgtgcttattaaatgttgtacataaatgataaa

SEQ ID NO: 155109 - DNA, 426 bp, Glycine max
  unsure (1)..(426): unsure at all n locations
ggtgaatctctacaggaattttattctgtagacacttttaacttagaattgacaaagcatgattatccttacaaaactaacgaacatggtgtcaattgatttgcagcttctntactgttcatggcattcccaaaaatcatcaacaagtatgacaaagtctcatttggttctaaaagattaaatatggctacaagcgttttcagctgtgttctttactactaactatttataaccgntaactaatgactaaatttgaataacataactttttctcttatgatgggttctggtaatggcttacaacattatgttgccttaaagagagacaaggtaatggcctaggtcacttttctatttttcccccaattcttttgccctatgtattacaantcaagttagacaatgaatatcagttttaaatatgtt

SEQ ID NO: 155110 - DNA, 220 bp, Glycine max
tatactgatgtggcaaggcattcttccttcactttaaagactgtatcgtgagccgcgaccaccgctatttttcatcctatgcctcggtccctatactgatgaatgggtttatgcctgaacatacttaccgcatatcctttgacgattatcttccttcatataccaagcttgtatatgtctcaccacattatatgaacttttacgatacccttaattacta

SEQ ID NO: 155111 - DNA, 323 bp, Glycine max
  unsure (1)..(323): unsure at all n locations
tgcttaccattaagaagcatatcttggaataactttgtgtgtctttctatctatacaagcgaagagggctgatagataatangtgttagacaaagtgttgtgtacgtgataccctccatatggatgatatanaatgtcattctaggtgatacccttcctatggatgactttaaaaaaatcctaaagtgagaagtcgagatttatatgacagcggtgattctgtctttatgctataattctgaagagaacccatcatttgttcaagcttgactccttagttatatttgctaaattttatataaactttgtagataatgagaact

SEQ ID NO: 155112 - DNA, 310 bp, Glycine max
acttgtgatgatgttctggatgtatggatgttgtcctgaacctcattaaacaaatttgatgtcgtggatgtatgcatgatagtctgaaccacgttaacaatataaattgtgtggatgtagggatgaggacacgaaccacatttaatatagttgtgatctttttctatctaatcttatggtgttgccttttgtcttgtggtgtgttttctcatcaatatgaataaagatatgtctgtgtttttccacaacagatgagagagaggggaaaataaaatgacaattggcatgatacgagtgataaaaggattct

SEQ ID NO: 155113 - DNA, 410 bp, Glycine max
  unsure (1)..(410): unsure at all n locations
acacttatctggttatcgaataccacgagtttgtttctaaaagatctaaagatgcactcttcaaaaggctttgattttatcaaatgggttttaagtgtttctaaaagttataactcttttgaatggccttcttgaccagacatgaagagtctataaaagcaaggctttattttgcattgtaaatcaatctttctcacaacaatcttaaacaattattcatacaatcctttacaagccttgaatctctttgaacttcttcttcttctttgtaccaaaagctttctgaagttttctggttttccaaaccttgaaaacttgagctattcatcttttcattctcttctccctttgccacanagaattcgccaaggacctaaccgctgaattcttttggtatctcttctcccttt

SEQ ID NO: 155114 - DNA, 440 bp, Glycine max
  unsure (1)..(440): unsure at all n locations
ctactcatattctaagtatttggattgtaatactcaatcattataataattntcagtggtttaagatcaaccatcaattcttcctatcataagttatgctgccaaaataatatccatcaatactccatgcccaacattatttatttctctaataagctgtcaatgattgctaattcttcccgccataaatgtatgtaatctaactatcggttaattattcatagaaagctcgcaagtgatagaatcatgagcaaaggtgacaatagattcaaaaaatttataactcacttaaaaaagaacctaatgcactgtaactttctcataataatacctcaagttacctgagacttccaacattttgggagttacttccaataccaagtgagcatgatgaaacatcagtgcctccatgcaaatgtttcataagttttacacacata

SEQ ID NO: 155115 - DNA, 387 bp, Glycine max
  unsure (1)..(387): unsure at all n locations
ntgagagagtgaaacaacaaagtnagtatttatattcatattatataaatagaccaatgtaattagataatgttgaaaataatagaccttcttaaaaagagaatcatattaaatgtgaattctggtatgtacatatacacataataaatatttatttgtatttaataataaataaaaaaaattaatatatgaatgatattttatatttgtaataaaaaattaaattgtgatataaagctattgttaactattatctttcaaaactcggaaaatatcaagagcagttntcagaccatttgctcatgatcatgtatacacccatacttgttgtattaagagagaacgtgactggtgttatcacgatgaataagttttaagtaacataat

SEQ ID NO: 155116 - DNA, 419 bp, Glycine max
aatatcaagagcatacctcctctgagaaatcacaataccatctcctgtatgagccacttcaataccaatgaaatacttcaaagatcccagatctttggtctggaaatgactgaataaatgctctttcagctggacaatcttagtagtatcattccctggtatcactatatcatcaacatagaccattagatagacacattttccaggagatatatgatagtaaaatacagagtgatcagcttcacttcgtttagtccaaacatttgaacaacatgactaaatgtaccataccatgctcgaggagaatggttcaacccataaagagatcgacgaagcttacacacaatgtcatactctccctgagcaacatacacaggcggttgctccatatatatatccctctcaagatcaccgtggag

SEQ ID NO: 155117 - DNA, 484 bp, Glycine max
tacttacccgttgaagatcgaagaacgatgtttatcgaatgaagaacgtctaagaacggtcgaaaccttcgcgaaattcttcacggaaaacgttacggaaacgtttcggaagcacctcggcttatattttcttcacggaaacaatttttccaagcaaattcaaaagagagagaagtgcctaaggggctgaacccttttcttcttcacttcctcccctatttatagcaaaataggggaggtggttgccgcccagctcgcccaggcgagccaggttgcttcctccataagcaacagccttctggaggaatattctggagggcccatatgggcctgggcgctatttgcacccccatttttactaagtacacctccctctgcctttttttggtgattcttttttcgtaaagttacggaaacttacgaatttcgtaacgatacttggtttctttccgtaatggtatggaaccttgcagatacataatca

SEQ ID NO: 155118 - DNA, 470 bp, Glycine max
  unsure (1)..(470): unsure at all n locations
agttcttataatattgtacttattatttatccatataataatcttacgattaatgttatgtttctcttttctctgtccacgtgtccatagttgaattttaggtgttgtataacgagacatacttatacaatggattccttaactatgttaagatttaatttgatttctcaattattaaaaagtttaatattatcctgtttaaaataaaataattgtatttgtttcaccattaatttaattgacaaaaattcgtacttgtacattaataattaatataattgatgtaaaatattataactttttaaaatcatcaaacatttaatttaaaaaaaaaaacgaaattgacaattcttaatatgctcctttngcatttacgtccagcttcgcactaatcacgccccataatctagctgcttttgcaataccttatatttcttaaacggaaaatcattgtcttggatatgtttatt

SEQ ID NO: 155119 - DNA, 347 bp, Glycine max
  unsure (1)..(347): unsure at all n locations
ctcattcctatacttttttttcatctcttctcttctatcagggcctatacttcttttctagtgtaaggtcccttatgattatgaaagactaaacccttagttagggtctggcatgcttaaaaaattaaaagatgcattgtatacttcatatctatcaatgcaaacatgtgttntctttcctaattttctttcttacttttaatttcatgcatcattcatccttacatcatcatagagggcttgcatacatctgttttaaaaattagtcgctcgacagacggtaatctttaatagaaataaaaggaaggagtatcttaataaaatcattgctagttgacatagagaac

SEQ ID NO: 155120 - DNA, 478 bp, Glycine max
  unsure (1)..(478): unsure at all n locations
taaacttaaacctgccattggtctttcttcttgatgatttnnttgtggtaaaaacaactaggaatattaaagatgtaatgtgaagaagacttttaaataggctaccaggtcagactagacttttaaaaaggtcaggccgagccaaaataaaagtctttgatagattatatgccagactcatgtctcaaaaattaatcgtagactagactcaagcctttaaagtctggtttgccctgacctattcccacccatatccacaagcaatgcaatgacatataaaatattaataaaaaaactttaanattatatatagttaaacggggaatttataatacattttattatagtatttttatttcacttgatattagaaatgaataaatgtttgcttcaatatttataaaaattaataaatacagaaaacaagtctgatgaaatattgtactgctcagatatcgtctaatcaaaacaatcaaca

SEQ ID NO: 155121 - DNA, 401 bp, Glycine max
gagttccatctcttgttcctacaatttaccaaataaagtagcaagagacatggaagagagatctttactttcagaaatagcagttactgaaattctgatatcaatgaggacagatgtcgtaccggatgtcacgacatcacgcttcagaacatggagattatattcgactgtatgaacagattaaacaagtgaataacacaagagaattgtaacccagttcggtgcaacgtcacctacatctggtggctaccaagccagggaggaaatccactaaaatagtgttagttcgaagatctaacagccactgtttacaacctgttcacctaaccactacccgtgcaacctctacctaagagccactcttagatatgagaaccgctctcactccctctcaatcactc

SEQ ID NO: 155122 - DNA, 416 bp, Glycine max
tgtggtaattaaattatttttctggactaaaaacctctattgttattacttatcacatacaacaacgataaagttgataatcgcacatatagaagtttataataatgtagatatcgatcaccaaacataatcaatgaataataatcctactacgacaaggaaattctaaatacaatattcacattaataaactttaccaaaacacatgtgaaatgcatataactatctcttattatattgacttaataataaacacttagtaatgcataaatactgtacttttattgacaacacatttatctaaactacatgtacaaaactcatgtaaatgactagtttcaagatactagtatgcataaataagttatctattttagtagaaatgtacccaaagtttttgcatgagtaaaatatca

SEQ ID NO: 155123 - DNA, 387 bp, Glycine max
  unsure (1)..(387): unsure at all n locations
cagtgagttgtaacagcataatatagattcttttctgtgagaagtttctactgtggntcctcagttntttttactccataaaaggtaatttataataaaattttccattcatgtggtttggagctataacaaaaatcttttcttaaaatcaactgaactggagttgtccttgttctctttgtatattcccatagcttttgtttccctgatattctatagtatggggagagaacaggtaataacatggacaatttatatttgctcattcagtcatggntaactgcagatgagcaaatttgttntatccttatcctaccaatcaaaatatacatctttgtaaaaatgaatttngtagcctgaatttattgcatgctatacnatatgtgt

SEQ ID NO: 155124 - DNA, 423 bp, Glycine max
  unsure (1)..(423): unsure at all n locations
tctaaccttcccacgaatcttctgcttcaatccatgtnagatatatcccagaaattgtctgtctggaagttttggaatctgagctattaaatactcaaattctgttatgtactcatccactgttcctccttgtctcaactccgtcagctgctcatacacatcaccctctccgtgacctccataccttcctagcagtgcttctttcaacccttcccatgtcaacccttcattttcactccatanagagttgcaaaatggatcgtcgatccctccatgcacagctgagccaatctgatcttcactntcggcgtcgtttcttggatgcgaaagtagatctctgctcgcgagatccatcccgctggatccttgccgttaaacatcggaagttctactttcttcacagcgtgtcgaaattccgacaac

SEQ ID NO: 155125 - DNA, 348 bp, Glycine max
  unsure (1)..(348): unsure at all n locations
tcccaaatatgacagccaccgttttaggagcgctgagcaccagcagcgcttcgaggccatcaagggatggtcatttctccgggagcgacgcgtccagctcagggacgacgagtataccgacttccaggaggagatagttcaccggcggtgagcatccctggttacccccatggccaagttcgacctagacatagtcctcgaattttatgccaatgcttggcctacagaggagggcgtgcgagatatgcgatcctgggtgaggggtcagtggatcccgttcgatgcngatgctctcagccagttcctgggataccctttagtgctagaggaaggccaggaatgcgagta

SEQ ID NO: 155126 - DNA, 258 bp, Glycine max
gcatatccactctgctttatgaatatgacgttctttgacgcgataacctccgtgcccgatcatattcctcacgtcacgcatatctttattacggaattgattatgcaagacaaatttaagaacaattatggcattgggatcatttccaatcttgatgtcgtcatctacatccatcgatagggcagtaaatggtgtgcctatcgcacatgcatacaactaactatccagtggtgatggtataaacacaacaccttgaat

SEQ ID NO: 155127 - DNA, 431 bp, Glycine max
  unsure (1)..(431): unsure at all n locations
tataattgccctaaatttggtctaatttgctttgaaccaaaatttccttttatgaatgatgctctcctacaacctaagacaaggtagaaggagataaattgtacaggctcaaggttcaatcaaacaatcatactttcagctcaaaatgggtgcaagggataaatcaatcatgcacaaggtaatctttntagctaagtggctatcttcaataaaaacatggccttcatcatcttcaatttcacgcattcattccatactcagagattcatgcaaaaaccattacttaaagttagtcgttctctcacaattaaagatcgcactctcaccggctagcagctaatgagtaccttcacaatcaacctgacaaaccaactaacattntcagtcatgatcctaatccatgttctttctcttctaatgactgcacactt

SEQ ID NO: 155128 - DNA, 328 bp, Glycine max
  unsure (1)..(328): unsure at all n locations
cttacataatgctgctgatatttctgatcgtgcgcagcttactcttgcatatcaaactgccaatgttctttttgatgtttttgaaggctgttaacatgacgcaatctatggaagtggatcgtgagatnttggagactcaagataaagttgctgagataacagagatcttagttccttacaatattcttcctctttatcctgatagtgcaaatcacgcaataatgagatttgctgagatccaagctgctgtatatgctcttcataacacaaggtgtctatcctggcctaatgactacaagaaataaaaagatgaagacattctggattg

SEQ ID NO: 155129 - DNA, 424 bp, Glycine max
  unsure (1)..(424): unsure at all n locations
cttctaaactttatacaagaatgaagctcttataccacttgntagactagtggtatcagatatcttaagaatgggggttgaattaagatattacaaactatttccccaattaaaattatatttcactttctattcaagttacaaattcccttaacaatgaactcttaaataataattcaaatagaacaatctgaatattaatataaaacaataataaataaaagagtttaagggaagagaaagtgcaaactcagatttatactggttcggtcacacccttgtgcctacgtctagtccccaaacaacccgcttgagagttccactatcttgtaaaatccttttacaagttctgaacacataaagacaacccttcctttgtattcagaattcttttacaacaagagaccctcngtctcttaatccc

SEQ ID NO: 155130 - DNA, 470 bp, Glycine max
  unsure (1)..(470): unsure at all n locations
agatgatcaatgataatgcctacataattgttttgtcgggtgagtatggtataagtcatacttttaatatggctgatctatctctgtttgatgtangtgatgatttatttgatttgagggcaaatgttcttcaagaaggaaggaatgatgaggatatcaaagaccaggccgaatcccatattgattcccaatacctatcacattgcatatgatggcttgtgacaagagcaaaagctatatagacccaagatactttgcaacatataatggctaatctgaggacaatctaattgcatgatgggacccaatatctatatgcctatacctcaagcttaattatgtctcacttaaatactaatgcatttcagttatgcttataatgttaagaatttatttttcttttattttctacaagtgcatgagaaccgatngtatgtgtcttttattnttcagttatgcttacaatgttg

SEQ ID NO: 155131 - DNA, 313 bp, Glycine max
aaatggagtttttccttctgaagaaacttttctaacttagaaattgttcttctcacttactcatgatgatgcatgatgcacaaaagatataatatggactaagatgcaatattcaatataacaatcaatacaaattccactcaaggtagttgggcatgtaaaagacaaaacatcttcaagcttttctccaagcttcaagctttagtcttcatgttgttctccttatctctaacaattgtacataagatctatcaaacaaacctcactaaattgttgccatcacaatcccattccaatttgatatgaacatatg

SEQ ID NO: 155132 - DNA, 383 bp, Glycine max
  unsure (1)..(383): unsure at all n locations
tatcctctcaaattctctgcctatatattcaacctttccatcactggcacgtggagtgaatcttcctccatggtgcaatattaaagttatattgtcatttattctacacaatcagaaaccacaaacattgtcatatattaggaaataaaaaacctaactcaaactcaaatataggcacatcacacaacaacatgcaatgccatctataaaaaaagagcatcataaacgaaaataataaaggaccataaacctacctaatttttcaattcagtccttgccacatgggattgtngacttggactcaaacttgccacattgtgatgcttacgtggactgaggttngccaaatagacatttgactaacggaggaaattagattttaa

SEQ ID NO: 155133 - DNA, 469 bp, Glycine max
  unsure (1)..(469): unsure at all n locations
cttatcttgttttatcgtataaacaacttctgtgcatgaaatatggttattataattttgaaatcatgggaaagaaattgagaaagaagggttgtcaatagatggagttagacagcattattacagagtttgagtaggtaaggactcggagaatgtgaagttttctgtgcagtgaaattcttttctgcaccctgcaagtcatctctgtataccagtctttgtttataactctatattcctctctagtgaatgtaaatgttatattgtgctttgcgagtactaaactctggatttcttgaatctcgattctaccaaggagaatcttgattntggatatactgacaagttacaaccactattccaatgttgatagctagatataaaaccaatattaatgccccactattccaatatagaaaagttaaacatttggtttgggctagtgtttaacatatcaaatgccttatga

SEQ ID NO: 155134 - DNA, 416 bp, Glycine max
  unsure (1)..(416): unsure at all n locations
agcgacnaacataaatctaagagaaagatctatatttttgatgaagacttctcctcgcaacttgaaagagcttaaagaagttttatctttntacatgcccaactctttgagcggcatttctatatattggcgtattggttggtggggcttaatctcaatcttttcatatgtacatcatgcatcatcatgtagaagtaggaagattgtttctaaagttagaaacttcttcagcagtgcataaaactctattttaattgattacaaggaaanatttaatggattacagaagtgtttgcagcttgtaaagagattctctgatcagtttaatnggatacatagttcacgtgagacaatgattgggtttcatgagtctttgcttaatcaattactagataatcaaaaccgagtactcactc

SEQ ID NO: 155135 - DNA, 340 bp, Glycine max
tatggttattgtggagtaaaatgtgttaataaatgttgttgtatggttaacgttgtctctagaaaatttccattggatttagtgatgaaatctgttcattttcaggtgaaaaagaggctaagttttgaatttcaaaaagtagcagttcggctaagcgcataaccaccgtttagcgcaacttcagcgcacttggcgcacaggagaatctggcagagcattagcatcatgctaagcgcaacaggtgccttcatccaggctaagcgcgagactagcgcttatgccaattccacttactcactgctagcgcgagggtggcactaagtgcaatgtcgcgaattca

SEQ ID NO: 155136 - DNA, 311 bp, Glycine max
  unsure (1)..(311): unsure at all n locations
ttttaagggcattaanaggttgtgatttttataagacaccagcacacgaggtattatagggaatagtatggagagagtttacaaagagagtgcttgataaaagttaaaggagttaatggagaaaatatgaaaagggagttgggagaaatggagaaaaaaaggaaaagtgactttgagggttaaagttaattataagtaaaaaggtaaatgttttttatgctggtatactaatttcgggacttgttatagtggaattttggttggaggttggccatatagcttggaatcagaatcgaaacaaaaatgtgaat

SEQ ID NO: 155137 - DNA, 484 bp, Glycine max
  unsure (1)..(484): unsure at all n locations
cgctggcgctgacccactctctgccctcaactctttagtactgtgatccctatgctcttgaccttgacttgatagaacctctttttaagcgaatgcgtttgacttgatcccatgttttactaaagtgaaacaaaatctagcgtgaatcaaaactccgacatctatcatgggtggaatagatgaatgcatgaagaaatgcatatgacacagatgcagtttatgaatacgggagcccgagaaattgtctcctttttagattcaacgtctcgaggtagcacagtgctcgacgtatgtatttaagaaggttacgcggaccctctgttatttntccaaagagaggggatcaagacagaacccgtgcatgatgcatatgcgaaaggcacaatacgtggatgtacatattacgacaatattcacatacaaatataagcaaaagggtacatgacacttatgcttggcagtgtgaataatggcacacaacgtg

SEQ ID NO: 155138 - DNA, 310 bp, Glycine max
  unsure (1)..(310): unsure at all n locations
atatttcgaaattattactatccnctttgcgaggatgcacattaactaaatcgtacaagctgttggagattgtcttacggcaataaccatatgagattgagtntgggagcgcgcttaaaaagaaggactaaattaacacaatctatgtattcttaaaaaaattaagtttgtaaccttataattacccatataaaaagtccacataactaaacccatcgacacataaattatggattgtattagtagaagtagtatccttttagctaacatctagggagtgaaacattcaattttcttgtcggcaattctc

SEQ ID NO: 155139 - DNA, 342 bp, Glycine max
  unsure (1)..(342): unsure at all n locations
gaccaaaggatctcatacatgtcttcaattagtaccattatgtaaacgaaatgatatgagcatatcattttaaaaaatcgaaatgcaaacataaatattgttccttaaatattaactatgggtggcggccacatgcatgcagggatctcataaatgaatgagggaagtggtgatcttgcttgaggttaagtgatactacctaaatctccataactctggtgtattgatatatagtgaattantcgtacgcaaaattccgttatttctgtggattatgtttttttattacatgaaatgtaagtgtagtttaaattatggtttacaataccacaaatatattta

SEQ ID NO: 155140 - DNA, 422 bp, Glycine max
  unsure (1)..(422): unsure at all n locations
gccattgagctcatcaattagaaaaatatgtcgntaatcctgttgttcctctcaagtacctcttcgaagaagatcgtgtagcagggacaatcaatccaaaatttacgaattgggatcgtcaagatgctctaatcatgtcttggcttctttctacgctttctgattcaattctcagtcgtgttgngacttgctgtcatttgttcctagtctggaatgccattcgctcccattttcatggtcttacacgtgagagaaccaaacaattacgcttggaactgtgaaccatcaagaaaggcgacaaatcttgcagtgagtatctgcaagaattcacaattgtgcgatctctacagaactagtgatcaatctccaattgtaacaaacagaactattctggtggtcttctctgatatgaacactcatct

SEQ ID NO: 155141 - DNA, 421 bp, Glycine max
  unsure (1)..(421): unsure at all n locations
tgcatgcanagcttatacatcntccgtgcatcatagagagtctcagatgccatccgctgaaaccaataatcctttccttgatggctttgattntttattccagaaagaattgttggaaaaactcatctttgatttgctcccatgaggtcagactatggtgtggttgagaattgagccattcaactgcacttccccctaatgaaaagggaaaaagtagcatcttgatgtgactgtctttgattccgtgtattcatactaatgtgcatatttgttggaatcgagtaaggtgggtatgtggttcttcaatgttggatcccgtaaattaagtgttatggagagtattaatgatcatgctagaaagaattacttgatgctctcttngtgttggtggaagaaatagattcattatatctatgccttg

SEQ ID NO: 155142 - DNA, 371 bp, Glycine max
ttcaattcgatctgaattcggctaagcttcagcctgatttctaatcgacaccttatccttggctaatcatgactcagtgtcgccaagcgctattccttacggccataactgatgttcatgaagctaagcgccattcatggcagctaagcgagattccttgcggaaatgtgagcgctaagcgagtccttatcagctaagtgcatactcctctatacttgagatgcatcattgtagctaagctggccatagcctgtcttaacgagagttgcaacttttcggatctgcaaacctcgctaagcgatcttatcctcgcgctaagccaagcctgtgttaaaaaaaacttatattgaatgttaaacattggctaatcg

SEQ ID NO: 155143 - DNA, 374 bp, Glycine max
  unsure (1)..(374): unsure at all n locations
ccctaatttngaggggcaactcccaccttatgaagactatcccgggcaagacgatggggaaggagatacccatcttggccccctactccacctcaaagatccatccccgcatgaactaccccaaccgaacatagtccgccatatcccggcctcacccacacacgtaaaagaatctattcccttcgcggaagataagggaaagattgaggtgcttgaagagaggttaagagcagtcgaaggcctcggcaattacccattctcngatttggcagatttatgtcttgtgcccaacatcgtcatcccttccaagttcaaagtcccagactttgataagtacaaanggacgacatgtccccaaggggcatctcngatgt

SEQ ID NO: 155144 - DNA, 291 bp, Glycine max
tctggtgactgagaagcacgttattactgtgttttacagatctgttccttcgccaagtatgcgtatatgtgtatatatgtagtatattcgtttgctctggttgatgtttgtatttggttttgcgcacaagaataaaagaagaagttgatacgatagtcgtcatcatggaaatgcatggcggacgatatcagtgtcctatgtttgctttcctcttatctccgatgagaggtaagtaaagatgggcaactgtcataccctaatttcgtctggggattattacttgataacatg

SEQ ID NO: 155145 - DNA, 323 bp, Glycine max
  unsure (1)..(323): unsure at all n locations
gctgcaagcctgtaaaagatacaactgtgacgcattctaacaaacaaaaacttcaatctcccccttttgtcgccggtggaaaatgaaagagttagaaagaagctcacaaagccattaaatggccattaattaatatcgcaatttttntgtggtgcatntttaaaagaccaaagagaaaaaaaatgttatgtagctataacaaagtcaattttgagttaaagtctatttatttaattcactctagccagtatagccattacattttattntattttatttgcaacatctgctttttaaacaagataccaaaatgaaaggtgatg

SEQ ID NO: 155146 - DNA, 485 bp, Glycine max
  unsure (1)..(485): unsure at all n locations
gacacttcaaactcaagcctttatgaaggattgactctttcttatgtagttgaatttcaacgttcagatacactggttatcgattaccaatatcttgtaatcgattacaccattgtgaaatcaactggaacgttgcaaattcaggtaaaagcctttgaaattaaactttgccactggtaatcgattacaaaaaactggttatcgattaccggagaagtaaaactctggtaacctagaaaatgttgagataaattcttctgtaaaacaaaactgtgctatgtttggcttttgaaaaatcttttcaatacttcccttgtgaagtcttcttgacttcttctctcgaatcttgaaatcaaacttctcttgattctagaatcttctcgatttcgtcttgttgactaaatcttgaaatcattgcttanggcttgttgtcatcatctttgtcattatcaaaactacttgaatcaactngattcatcatcatg

SEQ ID NO: 155147 - DNA, 366 bp, Glycine max
gtgagccaattcaaacgacatttttctcttactcggatgtctgattgagtcccgtaatataacgagaccctcgaaattgtgtgttgaaactctgagcgaactcatacgtcgataatatttactcggatgtctgactctgtcccgtcatatatcgagacactcgatatcgaatgttgaaactctgagccgattgacacgacatataacttgtactcggatgtctgattgagtcccgtaatatatcgagacactcgaaattgaatgttgaacctctgagcctattgatacgacaataaccttctactcggatgtacgattgaagcccgccatatatcgagacgcctcgaattgaatgttgaatctctg

SEQ ID NO: 155148 - DNA, 393 bp, Glycine max
  unsure (1)..(393): unsure at all n locations
gatgaactctcttctatcattaaaatcattttatcgtattgcaacacaaacttattngtgattgattgagaatactatattaggaatctaaagatgatctaacacacgcattcctaaaaacaattatgatcattaattaagtttcttatacgacatatgaatgggattagaacccttagatttggaaaaagaaaaaaagaaaaaaaaaactacatggacggttagtttaattntttgtggttcatattttatgtttattaataataaatttataaatgctgcaaatatatccattgttttatgctgtaagatgtttcagagatattttctctgagttgtagaagatcgcgatctgacatcaactatattatccatgctcacttgttcattcgt

SEQ ID NO: 155149 - DNA, 361 bp, Glycine max
  unsure (1)..(361): unsure at all n locations
ngtgactcttgttnatntactttanaactagtcacttaatttgttgtgactttngaaaaaatcttcagaaacaagtcacttgaagaattgtgacttttggaaatgtatttttcgaaatcagtcactggtaatcgattaccattaaggtgtaatcgattacacatcaacagatatgactcttcattgtaaatgttgaaaatcaaaacatttagaagctttggtaatcgattacaaaagttaaaaatgtttaaacacaagttgtaactcctgaaatttgaaatcttaacattgtaaaacactggtaattgattactaccttctggtaatcgattactagagagtaaaactctttggtaatgat

SEQ ID NO: 155150 - DNA, 263 bp, Glycine max
ttgtaacccttctgagtatatgtttctgtgttacagcaatatacttctttaccatctggttcattgggattatccttttctatcttcctcacatgtaccctatcttgaatattgagactattgctttttattgtaaattgctgtgatttcctcatgcgtgctgaaatattaagttcctaatgctatagcaacatcaacttctgcaagttctgatatgtattgagcatcgggtttggatacatgtgagcaaataatggctcgca

SEQ ID NO: 155151 - DNA, 348 bp, Glycine max
tcattcctttccactcaattcatacatttgctcattcaagtcattcacaaacactcatttcatatcaaacaaaccactaaaacatgagtcaatcatttcactgttcaaacaagctttttgtacaagcaatcaacactaaaacaacaaaaaattaaaagattaaaatttaaagactaataaagcataaattaaataaatgacatgaactaaataactgataaaataaactgttcataatttgcaaaattttaaaaactatgcagaatttaaaactcctgatcattttgctactaatcttctgcatggctcgtcagatccagcaccagagcagctagtggatcctgaaca

SEQ ID NO: 155152 - DNA, 497 bp, Glycine max
taagcctctggctcgaacttataaatacaatgactatggatagattttttgattgcgggagaaattttgttaaatatttgcattataatagaaagaaagtacccaagcttataaatacaatggctatggataaatttggtcgtgtgaagacaaaagaatattagagaaaagagaaaaaaaatatctgaatctatgtagagagaaaataatgtggaatccacactatattttgaaaatttccccttaaatggtaacttctctcccacaactacccctatgagtgaatgcggtgggggcagagaagatcacgcaaaagatgagttgagttgagagggaagagagaaacaaatatgaaggagagtgtcgtgagagtcatcaagtttctgggaagagaagcagcttcggtggagctgatgtagtatatgtgctatgtttgttgatcttgcctgcgagctggtgaatcatgtgttgtcagctaaacaaatgaataattggag

SEQ ID NO: 155153 - DNA, 375 bp, Glycine max
  unsure (1)..(375): unsure at all n locations
ctcttcaacaagccttaagatatttcatcggctatcttttggtcctttgaagccaattagagtgaccattcctcagatctttctagaaaaacaaagagattattatgtaagaatcttataaaggcacatcataaatgctaatgttttcaaagtctacaagcaccttaagcaaggcagtgtggaagctatgaatgttttcaagtatgctgctttttttcctccaaaaactaacattggctctctagacattagaagttactgttntgcataatatatgaatattatatacaaatggtttttaataattattgtcatagatgacataatcatataaataaaactgaaaccatttttatgaattgatatttcctcaca

SEQ ID NO: 155154 - DNA, 474 bp, Glycine max
  unsure (1)..(474): unsure at all n locations
ttcatatcccgatgagggtgttccatgtgttctctttattggactaatacatgttctgtccaagtttcatggtcttgcaggtgaagatcctcttaagcatcttaaggagttccatattgtttgttccaccatgatagccccctaatgtccaagaagatcatatctttctaaaggatgttcctcattctttatacggagtggcaaaagattggctatactaccttgctcccatgtctatcttcatctgggatgaccttaagagagtgttcttggagaaattcgtccctgcatctatgagcactgccattataaaggacactttatgcattacgcaacttagtggagaaagcatgttgacaactgtgaatgattcaagaaattgtgtgtaagctgccctcaccaccagatntctaagcaactatgtcttcaatatttctatgacggatancaacatggagaggagtatgattgatg

SEQ ID NO: 155155 - DNA, 375 bp, Glycine max
  unsure (1)..(375): unsure at all n locations
tctcaatttattgttccttaactattctacaacatgaaacacttgtatttcgctctcttcttctctctaagacaactcattattagagagtgtgagaccttgatatcttaacacanatgacctcgttgttgagtctttgtttttgaatttggactgataggtaaaagaccttcatctttcccgtgtcatcctcattttttgtttcctttatggacacttttcaaagcttcataaaagatttctcttccaagggtttgatgattttatgttggctttcggggtttggatggtgtggatgatgtagaactattgtaagagtgacggaaagctcgcatctaggaccccaagtctcctcatttccttactttcttcatc

SEQ ID NO: 155156 - DNA, 442 bp, Glycine max
  unsure (1)..(442): unsure at all n locations
atatggattttaagcaaagaaagacagtgttaaattgtgatngtggntatggttccatcacaatccttaatgttgtgagatattccggacaaatgcggccacaattacggtcccaatgcagtcatggggggcccaaaaaccttggtgttgtggctaaacttgtggtcaccgaccttttntaaaaaccttgtaaagtattgtgtcgatggatttagagctgtgtttctccaaatgtgttggctctgtgtgggtgaaattataatcttcttttcacctgcattgttcttttctagtgtctttttttcgttgtcactctgtaatgcgctatgaattgtaagcagggtcctcattctaattttgctggaccatacttaagaggcacttgctgtgttgcaattattagaaacagcaatacttttgtatctatgccggtgattacgtt

SEQ ID NO: 155157 - DNA, 427 bp, Glycine max
  unsure (1)..(427): unsure at all n locations
acttgtaacttatgtgcttcaagtgagaagaaatgcttctttttccacttgtgaagatgttcaaagtttggctatgaagatggttcaaactgagaaacatttggtatttccattggtttataaacttattgagctagctttgatattgccggtgtcgacagcatccgttgaaagagacttttcagcaatgaagattatcaagtctaaattgcgcaataagttcaatgacttgatggtatgttacaccgagcgggagatattcaagtcgcttgatgatattgatattattcgaacatttaccgcatagaagtctcgaataggacacttgccacgtaatgttatntaacccgctattgtaagaaatatgttatctctgttattgtaactatattgtggtgacaaatganagtctctttattttgatgat

SEQ ID NO: 155158 - DNA, 378 bp, Glycine max
gttataaaatgtttttatagccaatgatgatgtgagtgggacattcatgtatgattcgagttatatggttggctataaggggggacacacaaaatcaatgataacacatatgtatgaacgtatgggagaacatggtgaacaaattaataatgatgcacatgggcagaataggatgtttctccagatggcttgaataaaaccatttatgtctgtacctcacctttaatgataacgattgtcgaatcattcaaaaacaaatctactaaggaatcttgttgcacaaaatttacctatgtcaaactcagaaatatgatttaatatgggctctacattcattcacctattaataggaagtgagatctttttcaaacaatttgt

SEQ ID NO: 155159 - DNA, 427 bp, Glycine max
  unsure (1)..(427): unsure at all n locations
cgagaagcggtcatcagtttctctataatgcgaataaattaatttacgtatatagcatcgcagtagatcttgaccacaagacctcgtatacagaaatgtaattaatgcaaaaatagaatgattgtaatggaaattcgaagagcttaccactccggagacgctgtaggaggaaacggtgagtttctgatcggagctgtagtccttagtcaaaagatctataagaaataacaacaaatcaaaacaatttagcaaactatttttgattttttgcttcaataaagtgctgtggaaacaataacggagattgtacagagtgtgttcgttcacctttggattnttgccgatatcggtgaagagacccggtcccttgctcattttcgattgcagagagacagagagacagagatcttgatgcactangattcac

SEQ ID NO: 155160 - DNA, 467 bp, Glycine max
  unsure (1)..(467): unsure at all n locations
actttagcactggagtagatgacttgataatgtatngcctaatttcattattttaaaaattaaaaaatcatttttcaattataaaatttaaggtgtctcaagttaagtagttactctaacaaatttaatattaaaatagatttgtgtataaaagtttgtaagtctatgtagtattgtagaacttacaaatttaaaatatattactcatgtaaacaatcatgaatggtaaatatttttataccacgaagtcataagactaataagtaataatcatttaaaaaaatagagtcaattaagtataaactcgtctactattactattgctgtatttatataattaagaatcgtacccttgtcatgtattntaaaacatgtaggatatattattgtttgaaaaaaaattattctcttggttggatatttttctatcccacctaatggaatgttttatattaaataattaatca

SEQ ID NO: 155161 - DNA, 444 bp, Glycine max
  unsure (1)..(444): unsure at all n locations
ctgcagctatctaccattatctccagatgtttttgacagattcaattagataaaaacatgaagntctaattcaagatgttctctttggtgcatgggcataatgcaatcactctatgtctagcaatgatnttattaagatgtccctacctttgagttctactaaaaattatcctctctcaagcgactaatccctaaaactgatgcatataaaaccttcaatgtatttctaccaaggattaccctctttcaagcgccaaacccctaaagatgatgcaaggatgaagcatataatacatttgttggcattntaggcctgccaagccctaactaaagggggttagcctttcattgtcatgagagactnttacactntanggggttgatatggatggaagaagatggatggatagaggaagaaaagaggataatggacatatatagaaa

SEQ ID NO: 155162 - DNA, 400 bp, Glycine max
  unsure (1)..(400): unsure at all n locations
tacccgcactatgtcccacattcacccaccaaacctatcattgtttagaaaatgacatcggcagaaatgcacttgagaagagaaaggggcctatgctntactcgtgatgacaagttttcccctatccatcgttgtgctaataagcaatattttgttccacagtgggaagaagaggatgaacctgcattacaaccatatccacctgacgatgttgagacagctggtgaccctagtttgcaagatcatcatttgtcttataatgctttaaaaggctcatcaagtcttggaacaatgaagtttcaaggatcaataaatggattgggagtgcagattctactagataatgggagttcagataatgtcctccagcctagactatctcaatgcctgaagttaccta

SEQ ID NO: 155163 - DNA, 426 bp, Glycine max
  unsure (1)..(426): unsure at all n locations
tcttgagacttacatgtatcaactttccatatgggagggtgtgtcataaattaaaaaatacatatgctgggatatgtcacaagaattatgtgaattcagatttctagtatgaaaataagtaaaattgaaataaagagaattatactttgatttgttttataaattccattagttagttgttgcttcaaatttacattgtactttaacatttgtcttggtgtaaaaaagtattagatagctataaggattttcatggaagcttatatcttaacatagtttgtatccttgcatcaagttctacaattgagcttattcctttcatgcttctttgtatttgtaacnntttagaatattacatgttngtctctttgggatcttttcttctcacgttatagaatataaagtaataaattncaatgactatgt

SEQ ID NO: 155164 - DNA, 375 bp, Glycine max
caaaaaccccgacacccttcggcagctaaacctgtccctttcccataccaaaacaaccacgcagtcccatggaggtacacaccttcgaacaaaaaggaagaagaagccaccgacatcagttcattgtcggccaaggtaaccaatatcacggggctgagcggtgtgacccgtagcgatcgcgtgttcgtgccccggacctaccaattcagcccatgaacgtcaaggggaaggcaaaggtagtggaagaacaagatgataaaacgcccctcaccccgaatgaggatatttcggtgaaaggtcttccggagaaaagggaatggtatggcaagaggaggtgtcgctagaggaagccagcgagtttctccgcataattca

SEQ ID NO: 155165 - DNA, 335 bp, Glycine max
aataaatctatatatgctttattccatacctcctgccagtgtttccttaattttcatgggataatttcttcatttggttttgatgaaaaccccatggatcattgcatataccataaggtcaataggagtaaaatatgttttcttggtttatatgtagatgatattttacttgctgccaatgatcaacgtttgctatataaggtgaaacaatttctctctaaatattttgacatgaaggatatggatgatgcatcttatgtcattggcattaagattcgtaaagtgatagaccttaaggtattgtatgtctatcacaagaaacctatattaacaaa

SEQ ID NO: 155166 - DNA, 327 bp, Glycine max
gcatatcattctcaggtggtggcatatggcacacaccctgaaatgtccaggaacaacttcccattacttttctatggataagtgaactttaggcaaaacaaaataagacaaaccgctctaacctttcttaaataatgaatatgatacaaggtttggagtatagaaatcatataacacgtagctccttggttcttaagcccaacataaccagtctccttctttgaatcataagtccagtaatcaacaatcctacgaacaagaacctcagcttcgactattagagtatcatgcacaagataccctctactatgatcatacaattcacca

SEQ ID NO: 155167 - DNA, 231 bp, Glycine max
gaaactttctgcttttttgctgaccacatagtggtacctggagatatgtcgcggtggtcatgagaccttgtggacatcaggtggtgtgctattacccaaaaccaatcttgaccaatcccgacccaacccgggcatagtcggtcagtgataacctgtgatgtacactaacaggcgagctgcgggcggttcacttataaaaggaacaaagaccacatatcatggaggcttgtg

SEQ ID NO: 155168 - DNA, 307 bp, Glycine max
  unsure (1)..(307): unsure at all n locations
atttctcttacattatccacacgctcccttctatatggaaaaaatatattgtgaacactaaatgttaatatacacatagtgagagagaatgaaaagaaaaaaaatatagatatgatacattaatgatatgatctgacagaaatacattaaaaaaaagctgttaatgtgatgtttaaaacaaaaaatattaaaatatcactactactcatattatatatatagtaaataaagaggagagataagctcatntaaatttctctcttaatggtccaatgaaatgaatggtgtaaatgtagcgataaaaaag

SEQ ID NO: 155169 - DNA, 425 bp, Glycine max
  unsure (1)..(425): unsure at all n locations
gtctggagnggaccacactcactaatacataagagaaactctgctcgtactagttcaattcacgctgctattaggactttcatggggtagcttttatcttgatcagtttattacacttcccaacagcctatgtcattaatattttagttgacatcccttcgttacatgatgtgtgtattatagtcacaaattcttggtagcaacagcagatttcggaagtcatctttctgttctttatatgttctcgttatgctatggaatgacgtatatgaaagaacttgtgcttcaaacccgttttactttataaatcatgagagtagaagaaactgcccttgcagcatagctcaagggtcaatttcgttagaactatagatttgctaagctacattcaaatctatcatgttttcgcaaacagaatctaaatc

SEQ ID NO: 155170 - DNA, 385 bp, Glycine max
acactgacaacttaagactgatgcttatgacacttatatctgctgatgtgagtaatttttgacataatctcagtcgctgacggtgacgttcatcctattagtatcaatactgttcctcatatctgtccatgatatgctgtatttgatacttgagtgcctcatatctgtccctcacccagcatcttagctactaagtctactagtattgccagtgagacaccatgttctatgagggatggaaaccatatactgcaacaacaagagttgaactggtagtatagcagctattggtattgtacccatagctttgtcttccaactaaccagatccctcgcacactttcagaattcttgctaatttggtgtggaccttgaggaataaacac

SEQ ID NO: 155171 - DNA, 489 bp, Glycine max
  unsure (1)..(489): unsure at all n locations
gcttacttaaatcagtaagncaaaattatgatatgcattaaacttcatgtnngcattataggaagctaattattgtcgtattaagggctaatgggcagcttgttgttgtctgtcctaggaccaatgttgttgtgtggttttgtttgttgcatangaagcctgatattcacatcaaagttgcaattaacaagttaagtattaaattataacttatttactctattgtaaactgggatacataaatagttttatcctcgtatatatgttgatgttnttttgcaatcagttcaatgaagacattaaagactactttggatggtaaaactgatcaagcggcacctcattggattgaagtaaaggctagtcatttaatcaaagcctattttcgactggtgatagttnggaactttgtaactatgagaatntaaatattttcatattgattntagagtcatgttcaaagcanacactatgagtgtgactattatg

SEQ ID NO: 155172 - DNA, 239 bp, Glycine max
  unsure (1)..(239): unsure at all n locations
cgtgaatggttctaacttagctaggggttcttagcgtttgagtcttgcatatacaattgtattagaaataagttttctgctatagtgtgattctattcaatttgaacaaaattgtctccaatgtaaaatacccataatgatcatggttcatataaaaaaacaanagtagttcccatggttttagctggttttgtggttgcaacatactatctctgtctctggagcanagtttttacaac

SEQ ID NO: 155173 - DNA, 399 bp, Glycine max
cccttacgcaatgatgcactgccatgaaattcctgaatgccttcacaaatatcagctcccatcgtgctccaacaagctgtgaaaaaatcgaagttgaagctgtattggccaaggcttctgtctccagcacagcttcaaacaattgctttgatctcttcacaagaaaatggagcatttaaccaattactatcctcattgcttatctgttagaaatccaccctttccatctggggtcgcgaaacatacttctcctaaagcatgatagaaaagaagcgttaacttctccttatcccctacacatcttaatataactgcatcagaataacgcactttagttattcttctgacatttgtcaaaggcatgagtggacaaattggtattataatccccagtttcac

SEQ ID NO: 155174 - DNA, 75 bp, Glycine max
taaaaaaatgacaaaaaaatacgtggttttttcttatgaaaatcgatgttggcaggcaacagataaaaaatcgac

SEQ ID NO: 155175 - DNA, 408 bp, Glycine max
  unsure (1)..(408): unsure at all n locations
taataccaattttgctagctgtcatgacacttgtctcatattgtaaacctattccgtgtcatccagaattaaaacaaacttctcttactttatttcaaaatcattcttctatttaccttacaactcactcaactctatcattaccctttttcaatatgcagaattaccaacatgcaaacatatctaatccagcaaatggcagcatcaataggcaagctatgatccagaagcagcgagatgcctcatctcccatttctctcatcttctaaattcattgtaccttctgcagatttaaaataagcatttggtccttgatttcaacatgaatctactgtgtagcctatgattcactcaattttgcctttagccattntcaacatgcagaactatcaacatgcaaagagatct

SEQ ID NO: 155176 - DNA, 444 bp, Glycine max
  unsure (1)..(444): unsure at all n locations
tatggcagggtatgaaatcttcatattcatcatagccttgtaatattgaacctatatgcacacaaacaatgtgcaaatgctttttatatgtagtactatccgggtctacgacctagtatcaaaatttttcttagttgtcacttgtcaatatgcatcacaaattgtattaacatatatatgccaacctaccacaaaaggctagttaaattattgagaactagttgtctagttaatcgaaggttccatcaagtggaaaacgaanaagaacctttatttgatcaggtctgcctccaagagtggatcataaaatagcaatttatgtagagtaaattactatgacatcccatcataaggtggctgacaagctntgctttatncataaccacctaataagtttcccactcaaattcaaatatataaataaggcacccacaagtatgaata

SEQ ID NO: 155177 - DNA, 269 bp, Glycine max
aaaactttccagatttgtttttctcaatcttaatctgggagggacttcgctctaagaaggggaggatcaatataatcacagctgtgctagggggattgaatataaatatgggcacattatggaaatgggggagaattattttaaacgattaactctgtgaaactagttttcacacacacaccattgaaaacttatttgatagagagctgatcaacaacttgtgcacaaaccctgaaattttacataatatctaagaggaaatactataa

SEQ ID NO: 155178 - DNA, 395 bp, Glycine max
  unsure (1)..(395): unsure at all n locations
atgcaagcttgatggaccccgcnccatattggnngcttttactacttcaccaaatggcttgaagcggcttcttacgccagtgtgactaggagcgtggtggttaggttcataaagaaacatataatctaccggtatggtgtgcctaagaagattatcaccgaaaattccaccaatctgaacaataatatgatgaaggaaatgtgtgaggatatcaagatccaactccataattctacgccttatangccaaagatgaatggggcagttgaggctgcttataagaacatcaagaaaatagttcaaaagatgaccatgtcatacaaggattggcatgagatgcttccttttgcgctgcatggttatcgaacctcggtacgcacatcgactggtgcaac

SEQ ID NO: 155179 - DNA, 417 bp, Glycine max
  unsure (1)..(417): unsure at all n locations
ctcaagcttctaacaaatttcattctgtggaccttncagtaattctgacttatctcagcctcttctncctcttgcattcccacctagagcaattccaaacaaaaaaatggaagaagcggaataggagatcttggagaccttcatgaaagtagaagtgaacatacctctgctagatgccatcaagcagattccaagatatgccaagtttctaaaggagtngtgcacccacaaaaggaagctcaaagacaatgaaaggattagcatacgcagaaatgtgtcagcattgataggtaaatatgttcctcacattcctgagaatgccatgctagatctatgagcatcagttagtgtcttgcctttgtccattttcaattctttatctcttggacctttgcaatctacatatgtggtgactca

SEQ ID NO: 155180 - DNA, 300 bp, Glycine max
  unsure (1)..(300): unsure at all n locations
agcnctgaggagggcagacgacattttctnttactcggatgnccgacagaggcccctaatatatggacacgctctacatcgaatggcgaagctctgaccaaattcacacgacgataactttttactcggacgtctgagtgagccccgtaacacaccgagacgctcgaaatcgaatgttgaagctctaagcaaagtcaaacgacaataacttcttactcggatgccagaacgaggcccgcaatatatcgagacgctcgaaatcgaatggtgaagctctcagaaaatgcaaacgacaataac

SEQ ID NO: 155181 - DNA, 486 bp, Glycine max
  unsure (1)..(486): unsure at all n locations
agcttanacactggtgtaatcgattatgatattcctgtcatcgattaaaatagagagtttgaaccactgaagaaatttctaactttagaaactttccttcttactcctacatgataatgcatcatgcagatatgaaatgattgagagtatgatgcaacacataattgaacaatcaatacaaatgccactcaagagagttggacatgtaaaagacaaaacttcttcaagctcttcttcaagcttcaaggctaagtcttcatgttgttccccctatctctaacacctagcctttaccatatggatttgcatagaaaattgcaaactctaactcaaggttccataaatgaggaggagtactacaaggagatagaaatagccatgattagagccaatgttgaagaagaccgtgaaacaactatggccaaattcatgggaggtctaaagaaggagataaccgatgttgtagaaatacaacattatatggag

SEQ ID NO: 155182 - DNA, 401 bp, Glycine max
  unsure (1)..(401): unsure at all n locations
tagcttcacatggagctacactgatattgtgtggtgtctgnggntatgacagcaacaatggtagcaacgacactgtgatggtgatgatgatagtgtggtggggatggtagtggcactaacaatggtggaatgatggtgatggttggagtggaacagtggctgtggaggcagccatgacgacattgcgtggatggtggcaatgtgaggatggtgatgagaatgttgtttttaaaacccaaactaaattcataaaactgtttttattggttttgatcatgaatgtaatactgatttgaaaatgagctagaaattattacatcttcatcttctttttccgaacccaattattttgaaagatgagttaaaactaacaaccactccgaacggatctatattaatca

SEQ ID NO: 155183 - DNA, 459 bp, Glycine max
  unsure (1)..(459): unsure at all n locations
gggtcttcttctatagctatcttcttccactagcttccgctctttgttcttcctcgtgcacccagcaatctccatttgtgcttcttcttccccgatattggccttcttccttcgcgccctcatttccttcntccatttgaaattggagaagaagctgttgttcgtgtcctccattgaagttgacatcctccattgaagttgttgttcgtgtcctccgccatcaaggttagtcttctaacctcctcgtaactgtttgtatggcgtaaatggctgtaggaaacttaggatagacgacattagtgacctgtggtgctggaggttgaagacgaatgttcttccgcgagaagaaccttcttccgcgcgtangaaaatgggctttgggaactcccgcagaagaagtgtgagaggttcttctgcggattcctgtggaagaagctnttgcagggatcttcgcgtgat

SEQ ID NO: 155184 - DNA, 476 bp, Glycine max
  unsure (1)..(476): unsure at all n locations
agctnggaataaagcttgagttaatgagacagtaccaaatccttataacttgttgaagttagtaaaacttgatttgtcaagaaatgaacatagtctcgatggttgagacgaactaatataaattttctgtgtgatattcttatttattgtttcttctgccatttgaagtaacttaggatttgaaattaatatttgcttttgaaaaacattatttgttttacaaaaatttaaaactatggtctaatccattttgcaaaagtcatatctatttttttaagtcctactttatcttacgataactttggtgtttatgaaaaggatttaaatttagtaaaaatcacaattcaatctcattcttgtaatatttatctttacaaaatatattatattntaaaaaataactcanaatcttaataaattaataataaattggaaagaaattattcatccaccattntactcttctttttaaagtg

SEQ ID NO: 155185 - DNA, 441 bp, Glycine max
  unsure (1)..(441): unsure at all n locations
actatatatggggaatcgaatacacagtgcaaactttgaattcaaattttaatagctgttgtaaatcagttttggccactggtaatcgattaccagagagtaaatttgttgaanaatactttttaacttaaaattcttggccaaacctcttgctacttcaattggaattcccttcctatttaatataccctttctaagactctagagactgtcttgatcattcatcttgaatatctctaatttctttgtattgaataaagctttgagactctgagacgcatgtgaaactttggcatcatcaaaacattcagcttgatcctttgtctacaatctctcccttcttgatgatgacnatccctganatcaagacangctgtatacaagatgatagcacattcacacaacccttactctccctatcttttggcatgtatgcctaac

SEQ ID NO: 155186 - DNA, 484 bp, Glycine max
  unsure (1)..(484): unsure at all n locations
ctcaaagcttctctgtnttnntgaaagttgacactatgcttatttagggagtatctgttaatcgaaattctggcaagactattgttagcttcattgtagtgttgagttttggattctgttactaaattaagggagtatctattaattgaaatctctgttaattgaaagtttgaaacgatacttagtgttaaattctggcaacgctaaggtggtccctcgaacatggacaaattatctgttaattgaaattctggcttcatcaaaggtgggtagtgggttttgttgctgccttttgagtagtgggttctattactagtacactattacccttngcagcttcatcaagggagggtagtggtgggttaactaggttgttatcatcagagctccaaatgctagaaaggaatgcatccatgttcatggatcataagctcttttcattcttgcaatagaactcatcacaggtgagtgagattaataattg

SEQ ID NO: 155187 - DNA, 430 bp, Glycine max
  unsure (1)..(430): unsure at all n locations
acactcgantcaggggatggcctgcttgctacctagtttgatcaaatctttgcagcatcaaggccaatattatggttagagaatagcgatggtgttctacagactacaatggtattctcccaaaataaataattaaaatatatgaattattaccttccaggaataatttccaaaataacaatacatattaacttgtgaacatattctatgaagtgtaaatttggatattagaaactcaggctctatcaatatttgttgtgacaatcataatagtggtgtgaaatatgcatggttttacacctttaccaatgaaaaatcgtcgccaaaatctgactcacttttagtgagagaagaaaaaaacagctcacgcattcatataaatttggcctgtctatatgtgtaacaatacccatcaactcatcaccgattc

SEQ ID NO: 155188 - DNA, 383 bp, Glycine max
  unsure (1)..(383): unsure at all n locations
acattctgngtagtgttgaccgacataatgaattatatacagtagcgaancaattttaattattctaaaccacatttgagtcatttgtttaaagaacaaaaaaaaatcaaaaattcagttcttttaaaataatttagtgttaacaccattctttctcgattcagtatcaaaaactagtttatgtgtatgtagattgtcaaaagatggcctctgtattgctctcactttgacataaactatgttcaatttcttatgttcataactcttaaaacagctatatgattgccaccttggaacgaaatatnggatacttgaattgttgctcgtttaggtagacctttcagtatatgttttagacctgttcgtcaaactgtgtctgtgtg

SEQ ID NO: 155189 - DNA, 485 bp, Glycine max
  unsure (1)..(485): unsure at all n locations
agcttcataaaaacataagtagaattagttttatctcactcgaagngnggnacctcatggctaggaccctaacactttgattggggaaaggatgttagaaaaaaggaagagaataaattattatgacgaaaagtagctttcctactccaggagcaatattgtgggaattntctgtttttagttaatttaatttaatgtgtaaatatatttttatactactatataacatataaaatgaaaaaaagaagtaatgtcaaatatgatagaaataaactgaatatatgtcttgattctagatatttcttttatcctatatatctattcattcaactctaatatatacaactattaattttcttcagtaggtaacacgtgagcatgtaacacaagcacataaaaatcattgaataaagaagtgttaatgagaaaagaaacaaagaatatnttatattctgatcatttattanngttgattaacttgctca

SEQ ID NO: 155190 - DNA, 342 bp, Glycine max
tttctcccatatgggcattttcatgattaataagtgatttccaacatgtgttttgtaatatctttcagggttatgcatggcccaaatcactcctcaaagaggttgaatgtaggggccataatttccttttgagttgcgacattgctattatgaaattgggcaccgcgaagtgaaacataatcttatgcctacttgatgaacgtgggcttgacatttcctctatctcttccattaatagaggggtgtctttgaaactttgttgaaactattgccactcaaaagatctttaaattccttaaaatcaatgacttaatctcttagctatttgtaacaaatttcagc

SEQ ID NO: 155191 - DNA, 491 bp, Glycine max
  unsure (1)..(491): unsure at all n locations
gctataagaacaaaaatgcctcaatcatttctaaatatgtatgtgaattangaagcatcaacaagaatcaagccaaggctattgtgcaagcaatcaatggggcaaaacacaccaaatgattatgatgatggatggctcaaattctcacaaaggtaaactcatcactttcaaattgagctttcaaaaatatcatgacatgtagagaagaatcaagaatttcaagtcacaaaatgtcaagaacttttattttcaaaacaattacccatttcttgaacatatcctataattcaaagaaaaacatgcaaagtcgtacatgcacacaaaattaacccaaaatattaaactaacaaaccgacgaaactaccaacattaacaaattaacaaaaccaacaaaactagcaaaaccaaagaacactcccccccatacttaaacaacacattgtcctcaatgtagtgcaattaanagactaaaaacaattaaatcatcaaat

SEQ ID NO: 155192 - DNA, 449 bp, Glycine max
agcttcatcaagagttttactctctggtaatcgattaccagtggcaagttttgttttcaaaaagctctcaactgaatttacaatgttccaatcaatttcaaaatggtgtaatcaattacaatatattggtaatcgattaccagtgtgtttgaacgttgaaattcaaattcaaatgtgaagagtcacatcctttcacaaaaatgctttgtgtaatcgattacaatgatttggtaatcaattaccagtgataaattttgaataaaaatcaaaagatgtaactcttccaatggttctcaagtttttctaaagggtataactcttctaatgggtttcttgaccagatatgaagagtctataaaagcaagaccttgacttgcactttaagaattcattcataacaattattacaatcctttataacctttgaatctctttgaacatcttcttct

SEQ ID NO: 155193 - DNA, 429 bp, Glycine max
  unsure (1)..(429): unsure at all n locations
ggatcgcccagcgcgcataagtggattgtggcttatcacgcttctcttgcttagaggatgagctaaagcagtgcgcttgatgacctggagcggtgcgctcaatgaacctgacagctcatctttttctggattctttctcgcacttagccactgagtgtcgcacttatcgaatgctcgcttagccagccgattggcttagcgagaaggtgaaaatagaaattttgccactttgcctaattaacctgaaattgagagaaattgattattaaacacacaaaacanatgcatatattatctattacctatatctaacatagagcacctatcatattattaaacaactattaattggagaagtttgataccatatacaccaagtnttatacacaaaaagttagtcggtttcactgactaaccactatgaagttc

SEQ ID NO: 155194 - DNA, 420 bp, Glycine max
  unsure (1)..(420): unsure at all n locations
agcttacacaaacattcattagtcctactcactctctacagatagncatcatccgtccatagttccaatcaatcatgctcagtatgatgcatgcacctaacctcaactctcaaatgcaatgtggtaccatccccaaggaaatagcctaagcgtgtccacacgacactctcatttaggaaaactaggcagtaagtgtcaagtcaccctatcgtgcacaggcaactccccccccccccctcccatggtgatcagtctaagtctcaagggagttccaaaccgagtgacatgcccccaagtacaagtatttntcctcatgaaaaattacgagtacttactgacaaagtttgtactattttcattcaatatgaagtatgaaacatgggcaccatcagtgcactgatcgtggataattaaagattc

SEQ ID NO: 155195 - DNA, 433 bp, Glycine max
  unsure (1)..(433): unsure at all n locations
agaagngaaaatgaaaatggggtaaatttggagcaaactctcacctcaaacaagtttatatcatcaatctaaactcgctcaaactggttgtatgacgaaaactctaccaaatcaaaatttgactcctcaacacccaattntaccctataaatggctcttgttttcactttggtcactcatattcctcatttgcacaggctacactttctcataagtcctaaatgacatttcaaactaggattaactccctttaaccttcaaataccactaaatccagattnggcctttcaacactcaaagcctcactcttnttccactcataacactacattttcaccttctaaccctagggtaactctacccttcatctctagcaggtntccataagcaattgcagcacataaacatcacaagcatcatcattaaaacccta

SEQ ID NO: 155196 - DNA, 400 bp, Glycine max
  unsure (1)..(400): unsure at all n locations
agcttgaaggtgtgtagcccaccttcttttcatatttaatactggtaatgtgtctactatcattgtcatcatnttttttcgtcattgaggtgccacttaagctgccaggtctctccacctttgggcgtattctttgaaagatctgtgcccctttttgcacatgttctgttgttgcatcctatccggaaccatatccaaattgtgctaatactgcctaacgaaggcaaacattatgtccttccaagagtggactcgagaaggttccaggttggtgtaccaggtaatagctaccccagtaagattttcttggaaggaatgtatcagcaattcctcatcttttgcgtatgccctcatcttccgataatacatctttagatggttcttggggcaagtagtcccc

SEQ ID NO: 155197 - DNA, 409 bp, Glycine max
gtgagagaaggtttttgtgttttaaaagttttcactgctgtttttagagaagttaaattggaagcatctctattaattataattgaagtatataagttggttttaacatataggagataaggtttaataagcatttttgaaggagctgaaacctgagtttctaaggtttattgcaaaattttatgtgaatgcttcatttcctaaggaactcaattcctcattcattgaaaccagtatgcaacattttaaatgaaacaccagtatataacattttaaagcaaacaccagtatataatattttaaatgaaacaacagcatatacatactagttcctacgtacgtacctggacttgcttaacccgaatgaccttcaagaacaatgtcaattaaaagtagtatatgataacct

SEQ ID NO: 155198 - DNA, 470 bp, Glycine max
  unsure (1)..(470): unsure at all n locations
agctngaagtgaggaagtgtggaaaggtgagtctttctacttttattcattgaccacagagtggtacctggagatatgtcgcgggggtcaggagaccttggggacgacaggtggggtgctattgcccaaaaccaagcttgaccaatcccgacccaacccgggcatagtcagtcagtgagaacctgtgatgtacctaaacaggcgagctcctggcagtcaaccgataaaagaacaaagaccacaaagcaaggaggtttgtgtggtggctggccagctatggatctcgagtgatatttgggatatggcctctggtaatcgattaccaagggtgggtaatcgattacaaggcttaaaagtgaagacaggaagttaagatggtctttggtaatcgattacatangatgtgtaatcgattaccaggcctaanaaggggaccaggaagtcaagatggcttctggtaatcgattact

SEQ ID NO: 155199 - DNA, 427 bp, Glycine max
  unsure (1)..(427): unsure at all n locations
catgttcctatttgattggagcaaaaagggcccactttctctttttgactgtgacccatactcagtcacaaaagtgagaaaaatctgacctttgaaacgctacaatcctgcctcggtttgcgtgccgtttctctgattccagtttctctgcgtccgtcggggccagttttcgaaagcaagcaatttatatatcaaaacgctcagaataaaaccccgagcatggttcaaagggtggtttcgttaaattctaagttgcacgcanaacgatgatttttaaactaattaattaagaattaacccatacctctcagttatggatttctcttccttaattagtctaacccgcgtatctttgccccactatttctacttctaccaagaacatatatgcatagacacttgataatacttatatatataatcattc

SEQ ID NO: 155200 - DNA, 471 bp, Glycine max
  unsure (1)..(471): unsure at all n locations
agctngtgtattaatataggagattgtttatttctgtcttattntaactgctcgcaaagcagttaattgtttttattantatagaacaagcttaactcacttccaaaagctagcttaagagaggaggattgtttcccgagtcttataaggagtaggcatgttaacagtttttttgggcttgagtgtcatactgacaatcctgatggggttgaagtgtgttttaacaacccctccaaataaaaaagcaaccaccagtaagcctcttatacaatcctatcgcttgttaatctttaacctttaacacagacatctgtgagaatggtaaaatttcattccatcttaatcttgaaacttttaatnttgcaattgagaagacctatactaaagaactggacccaatggttttacagttaacaatgaacgattcttacaatttaattcggctctgtattctcacagacactagtactg

SEQ ID NO: 155201 - DNA, 453 bp, Glycine max
  unsure (1)..(453): unsure at all n locations
ctcagcttaagcttagtgcagtgtttgaagctaatnacgaattcacaaattcagggctcatcacaagcaacctggtcacccccttgataaatatacttgagatatatttagaagcaaagaatacttttccagcatatttgtttaacttctttaatttcctgaatttctgattgagggttagtgtctttctgttcaagtggtgcatatataatatagacttgagaaaactacattcaaacaaaaactgaaacctaagcttgtttcataatatgtaaacctaaaatgaggttcagagatgtgaaacttaaaaggtgatgaattgcaggatgtgaacattgcctctgattgtgtntgggtttntgcttctttgttttntctctatcctgannaaataaactagcacacagttccccgtggtctaatttctttatttaatttactntnttatgaata

SEQ ID NO: 155202 - DNA, 462 bp, Glycine max
agcttccatacatggtgtaaaatattgttctgtttatattaaaggcatatcttgtaatcacaaaggttatatagttcatgtatgctattttacaaactagttaagcttgccaagaaaaacttcttatatatgcattctgatgtatgaaattttaatgctcttaacattctgatgcataggtaatatgtataatagttaatagtaaaatgcataaggagagaaaaggaatattcaacacgtgagttttaaaccggttcaccctaaacctagggttacatcctgtcttcaatcttccaatgagattttcactaaccaacacaacaaccaaccaccactatcttacaacaacaacctcgataggttcacaactacatagagcttcactcaaactcttgtggcaacaagaacacctccctcactataacacctcaacccaatcttgatgtggagatagactgtctc

SEQ ID NO: 155203 - DNA, 466 bp, Glycine max
  unsure (1)..(466): unsure at all n locations
ngaaggtgtgtagcccaccatcttttcatagtataatactgttgatgtgtctactatcattgtcatcattgttctctccatcattgaagtgccacttgagctgccaggtctctccacctttgggcgtattcttttgaaagattcgtgccccctttatgcacatgttctgtagttgcatcctatccgaagacattatactgacactgcctaacgaaggcaaccactangtccttccaagaatggactcgggaaggttccaagttagtgtaccaggtaacagctaccccagtaagactttcttgtaaggaatgtatcagcaattcctcatcttttgcatatgcccccatcttccgataatacatctttagatgggtcttggggcaagtagtccccttgtacttgtcanagtccagcacctttgactttgggaggggttatgatattgtgtactangaacaactcttct

SEQ ID NO: 155204 - DNA, 408 bp, Glycine max
  unsure (1)..(408): unsure at all n locations
agcttgaatcggacatctgtgtgaatagttatgaccatttgaatttatcaagagcttccgttgttctatttcgagcgtctctatatgtgatgcgccataatttaacatccgtgtgaaaagttgtgaccatttgaatttctcaagagcttccgttgttcaatttcgagcctctcgacatcttatgcgcccgaatcgaacatccgtgtgaaaagttatgaaccattgaatttctcgagagcttccgatgtttaatttcgagcgtatcgatatattataagccttaatcggacctcaatgtgaaaagttatgaccattttaatttcccgagagcttctcgttgtcattntcgagcgtctctatatgtgatgtgccttaatctaacatccgtgtgaagagtatgaccatttg

SEQ ID NO: 155205 - DNA, 480 bp, Glycine max
  unsure (1)..(480): unsure at all n locations
ntanagcacagcaacacagaatctatgtgtccaacacccctcaattcaatgggttttctaggtttgaaaagtgaaatttataatgaggtaaatttgaagcaaactctcacctcacaatggtccataacatcaatctaaacttgctcaaactgaatttacacctaanattccaccgaatcaaaatttgactcttcaacacccaaattttgccctagaaatggctctttgttcactttgatcatttgttcttctctctagcacagtccaagctttctcccacgtcctaaatgacatttcaagctagtattaactcactntaacctccatttaccacagaattcagacttaaccttccaactctcanagcctcactttnnttttccactcataacatcacattctcactttctaaccctangttagttctacccttcatctctaacagttttccatcagcaatttcagcatataaacatcaca

SEQ ID NO: 155206 - DNA, 321 bp, Glycine max
aagttctattacctatacttaataaaaaatacttagaacattacagaatagccataagtggggagagtttgatacaattcatacaagttttatacacaaaagttagtcattttcaccgactaacaactcccccaaatttacagttctgtttgtccctcagcataactagaacaactcacttgtcctcaagtgacaatgacatgcaatgactatgtacaaaggtgtgtgctacaaagtgactgattgcatgataagaagatggagataaatgccctcatcacttgtctttacaaggtatgatagtatccatagagaagaata

SEQ ID NO: 155207 - DNA, 306 bp, Glycine max
acgaacccagattgggtttattctaagagaacggcggcctaactagcctgataaatgccaaaggaaatcgtgggaagtatggtttaggctataagcccactcaggcggatatgaagagaagcatcccgggaaggaagagcggtggtcaaagctcgcgttggagacaagaaagtgaacgaagcccgccctgccacataagtagaagctttataagagcgggtctgggagacaaaggtcaagtggtcgcaatatgcgaagatgatgttccgagtacattggatttggtacgaccatgccctcctgatt

SEQ ID NO: 155208 - DNA, 424 bp, Glycine max
  unsure (1)..(424): unsure at all n locations
gatgcncgagtcattcatccgtattatatgttgttgttatatnggcgatcagaattgccattccttggattacggngttgaaccaagctcatgcttttacaaaaaggttcatcaagtcaagttgaaatatggaagtaaccgtcttgcaaaattggggcaaaagatgaatcgagtcacatcactgcttcgtctactgtcaaacatatttaggattattgatgtccttgttacttccagtttcaccttgacaaagatgtcatggaccatgttgaaaatctaaattgattcaaccccatatcctgcgtaaaaattcgcaatacttcgactgtacatcattcgcatgcatccatgctnnttcatggttgcattgctcattgcattctttccttgaanaataaaatanaatanaataaaatgaacttat

SEQ ID NO: 155209 - DNA, 337 bp, Glycine max
cggacctcaagggtcaaagctatgaccagatgaatatctcgagagcgttcgtgggtcattttcgagcgtctagacatataatgtgcccgaatctgaccttcgtgtgaaaagttatgaccatttgaatatctcgagagctttcgatggttaatttcgagcgtctcaatatattgtacgcctgaatcggagctcctagtgaaaagttatgaccatatggatttgtccgatgctatcttgggtcaatttcgagcgtctcgacatattatgtgcccgaatctaaccttcgtgtgaaaagctctgaccatttgaatttctcgagagctttcgttgtcaattt

SEQ ID NO: 155210 - DNA, 136 bp, Glycine max
tgcagcatcagctgagcttatcctgcccagtatataagatggcatgttctaaggcctctgctacaataaactaactgtgcgtgagtgcaaatctgaaagagaaagttcctatgtttcacactacttctctcctcta

SEQ ID NO: 155211 - DNA, 460 bp, Glycine max
  unsure (1)..(460): unsure at all n locations
tatatatgggattagcatgtgaactatctcattatcaaattaaatgaagctcacaactgttagtggttagcctggttatagaaacatagcattcctggacgtttagccaccctagcacatgtaaaagttgcttcatgaatatatagtaaaaggcatattaggtatacacatatttcacaaaacctcaatattaaaaagtagtttatctagctaactaataaagctatagaaaaattgacaattaatgcatgttacaaataaaatacctgcattttaaatggattntaatgccgcccttcaattctaatagttgatcctttgtgaaataagattaaccatatgtacatacatattgtacaggacgatcagagttcaagctgacatctataatattgattatatttctaagtntgactatccactattcttgataaaatgaaataactntaatcttgataag

SEQ ID NO: 155212 - DNA, 410 bp, Glycine max
  unsure (1)..(410): unsure at all n locations
aaaaaaaaagccggggtttcgatacgaagtatgaatatgatcattaacatacgactattcattctctccttacaataaaggcatgccttgcacggtacacaagctaacactagtaagttgaatatgccacaattaatatataaggaaaatcaattattatataggcgttgcactnttgtctttttatcatgtctcatatatctttgttgaagtgaatcataatattcttatatcatccaattgaatgttgaattgcgggaggtattatatggtcacgggtaatggcaaaactgatctaatcgggtcgatatgtgtatatatatacatctacatacaagtaaaacttgattttttggaaaaacaaaaaaatgactgtaactattttaatgttacaaataaatatttttaat

SEQ ID NO: 155213 - DNA, 320 bp, Glycine max
ataaacattaggatctttctcataatattttataaggatagtgtaacttttcaacataacaaaaatgtgagttgttcatatattatttatcatttatcttcattaatatctattgattaatttgttatcttatataaaaaaacctagtgcgactcttatttagggacaaacgaagtatttttatgccaaaccgtgatgaattaaaaatggtacctatgtctctcttgaataacccactaaaatataatacatgtagttgaactttcaccttacgattatatggatagataatctacctttggtctaaataaatattttta

SEQ ID NO: 155214 - DNA, 462 bp, Glycine max
  unsure (1)..(462): unsure at all n locations
agctttcttcaaatcatgcggctttactcntttcctttgaaggaccaagcncaaggagntttgggggctgcaccttcaaaaccaaaggaagataagggtaagaccatagagaaatccaaccctaagactagttcccaagaaaggactagcatcattaaatgcttcaaatgtcctgngaaaggtctcattgcctctcaatgccccacaaagaaaaccatgattatgaggggtcaagacatttatagtagtcaagaggagactacttcttccccttcctctagtggaagtgaagatgaagtaaggggttaagagtctagtaaggaagtctacccctatgaagaaggtgacatcctaatggttagaacgctccttggaggtcaattttatgatctatctcaatcccaaagagagaacatctntcatacaagatgcataatgttagataaaacttggtctctcatt

SEQ ID NO: 155215 - DNA, 379 bp, Glycine max
  unsure (1)..(379): unsure at all n locations
tgtttgcaacttatgaaattctatttcgttggcttcttatgttttactttggatcggaatcaattaattatgagttgctttcggaaatgtctttgtaccatttttctggtctgtttgaagtgattctcaacttttatgagaattaagtttggttattgattaaggctatgtttggtttttggtttctaaattccctttcatgaatgttagntactttgccagtatgttgtatattaattnttattttctgaaactcaactttataaaatcaaaacttgatctatttttacaatttctatttacaacttaagttaatcaactatgaactattagaaaaaattaatattttgtgagaaaatagcttaatatttctgaaaaa

SEQ ID NO: 155216 - DNA, 433 bp, Glycine max
agcttcttgaaattattcatacagttatttgttgtctatttcctacaccttggttaaatgatcaaaaatattttatttcatttattgatgaccactcaaaatttatgtatctctatcttctatatgaaaaatctaaagcacttgatgcttttaaagttttaaaagtcaaagtagagaaacaaaaggaaaagaaaataaagattataagatcttataaaggtgggaaatattatggtaggtacacagaagagggataacaacccgatccatttgcaaagtttcttctaaaggaaggtatttgtgccgaatataccatggtaggtacaccataacaaaatggtgttgtcgaaagaagaaaccacacacttatggaaatggttagaggcatgattagcaatcctaaggtatacctacaccttatggagtgaagctt

SEQ ID NO: 155217 - DNA, 479 bp, Glycine max
  unsure (1)..(479): unsure at all n locations
actcagcttgggttaatctcaaactacaagacatgaccttggagaatttacctagaatgtcatacaaagatgatttactatgtaaagtgtgtcagaaagagaaacatattaaaacctctttttcaagtaaaaactttattntcaccttaagaacactngaattgttgcatattaatttgtttggtccaactagaacaacctctatcagtgtaaagaaatatgatctggcagtagtgggtgactactcaagatagacatgtgttatgttccttgctcacaatacaaagcaatgattggatccttactgtatctaactgtgttcagacctgacatattgttcaatggtggactatgtgccagattccaacaagacctaagggaagtcacttaactttatcaaagaatannttattattaaatggactctaatcttggattacttagctaacaggattcangtgacagtacactatgaactg

SEQ ID NO: 155218 - DNA, 470 bp, Glycine max
  unsure (1)..(470): unsure at all n locations
agctngaaggtgtgtagcccaccatctcttcatagtagaatactggtaatgtgtctactatcattgtcatcatttnttttcgtcattgaggtgccacttaagctgccaggtctctccacctttgggcgtattctatgaaagatctgtgcccctttttgcacatgttctgttgttgcatcctatccggaaccatatccaaattgtgctaatactgcctaacgaaggcaaacattatgtccttccaagagtggactcgagaaggttccaggttggtgtaccaggtaatagctaccccagtaagattttcttggaaggaatgtatcagcaattcctcatcttttgcgtatgcccccatcttccgataatacatctttagatgggtcttggggcaagtagtccccttgtacttgtcaacagtcagtttcttgaacttgggagggatgacgatattgggttctagggacaactct

SEQ ID NO: 155219 - DNA, 452 bp, Glycine max
  unsure (1)..(452): unsure at all n locations
ntgagagaaggttnnttggttttttaaaagttttcactgcttcttttagagaagttaaattggaagcatctttattaattataattgaagtatataagttggttttaacatataggagataaggtttaataagcatttttgaaggagctgaaacctgagtttctaaggtttattgcaaaattttatgtgaatgcttcatttcctaaggaactcaattcctcattcattgaaaccagtatgcaacattttaaatgaaacaccagtatataacattttaaagcaaacaccagtatataatattttaaatgaaacaacagtatatacatactagttcctacgtacgtacctggacttgctataacccgaatgaccttcaagaacaatgtcaattaanagtagtatatgataacctgannnaaaaacatagtcatgtatacgtacactgaattatt

SEQ ID NO: 155220 - DNA, 374 bp, Glycine max
  unsure (1)..(374): unsure at all n locations
agctntaagagaatgcaacaagagattccagtctatagtgtcaaaggctttgataatgtgtgtcttaagggctagattaccactgaagctgcttctgtctaataaattgattgcttctgaagataagcacaagcagtcttgaatatgtttaaccttgatgaaacctctttgctgctgagagacaatttggggagcaactagccatattatccccccaaaacttttgttattactttgaactgaaaattggcaagtgttatggggcataacagctcaactctatcagcttgagggactttatgaatcaacaccaaaacactggagtttaagttaggagccatccttgctaaaaaaattgagggttgttcaaaaca

SEQ ID NO: 155221 - DNA, 416 bp, Glycine max
  unsure (1)..(416): unsure at all n locations
cttgcttgaaagcttctatggagggtggatctctgagcttctatgatgtccttcaatggtgattntcaaccatggatatgcagcgaaagataaaggagaagaggtaagaggaggcgctatccacgaggaaataagccatggaaggaggagcttcactaccaagagagtgccttggataagaagcttagagaggaagcttcaatggaagaaaagaangacagaggagggggggaggaggaggagaactaaattgaaggagaaaaaggcggagagaagttgaactttgaagtgtttctctcaattctctcattcatcaaagtgacaagtgttacacatgtntctatcctcactaactntcatttcatgtgaatctaagagaaatatttcaaggatatgccanaggaatcttaacatat

SEQ ID NO: 155222 - DNA, 409 bp, Glycine max
ataagaaatctagatttgaaaagccaatggatgataaagaaacctgatgcactccacattgattgaggtctaagaagatattcaaattgcgctgtactttataaagctgatgggcatgggggcttacataattctttgatgtggcttggttggttggtgtataaaataatataactcttgagacctaagtgatctctaaaaaatttatgatcttattagcaaagctgtgaatgtatgaaaagcaaaatgaaacattgcgctgtgattgtatgcacttttcattcttatcataataagcctgctgtcattggtaattaagatgcatttgtaaagtattttttttaaagccaaatgagaatactcctatgtcccttatataagactctttcacttattgatggcctttaat

SEQ ID NO: 155223 - DNA, 454 bp, Glycine max
  unsure (1)..(454): unsure at all n locations
tcattgccaataaaataatgtacatggtctataagcttcattgaaaatgcttaccctggantttaatgctacaggacgtgtggttggagtaccaagccgactcataacagtctttcgactttccatttccaaagaaggaaaaaggggagtaccaggaggagttagaagcctgaaaacacattaaccatgctaagcaccaatttgaactataatcacttgttctggttttactttgtatttagagtcagctaggataaacttctcaataaacacataggagaagaaaatgaaaagaattaaggaggtaaaatgttagataggggaacttatgaaaaagtagagagaaaatttatttttttacctctttgattcattatatnttttccctctcttaagtactaattgagaaagttatccaatggctctaagaacattaaaggcattgggtacataa

SEQ ID NO: 155224 - DNA, 285 bp, Glycine max
  unsure (1)..(285): unsure at all n locations
agcnnttggaaatgttgtttttcaccttcttgataagccaatctgctggcttagcgagcgtccactgatcaaggccgtacccgaatcaaataaacatgaaaatgcagtaactaggaagtgatcctaggtcgtttcccaacgagcagtgacaaaccaaatgttcataatatacttgcagtaacagtaacgaattggggggggggggtgtgtgtgtcgttnttaatattctcaaaatctaactggatttctaaactacagatattaaatacggtttgatgtctttga

SEQ ID NO: 155225 - DNA, 374 bp, Glycine max
  unsure (1)..(374): unsure at all n locations
ngtgcttgttntattcaaattcctaagatcatgagcaactatgtgtgtcctactataacttgtgaaacaaaaggtgatcaaataacaagcagaaatttaaaagttactaggttgcctcctagtatcgcttctttaacgtcttgagcangacgcatgatgacttgtcggtcacggaccctagaacttgcttacctttggctttggacttggttgcatattggtcggccatgtgtcgtangcaataactctaaccttttgtggatgagctganggggtctggaggtggcggctgtgcatttgttgtctgttgttggccatcccaaagttgtatggtgtctcaccctctgcctgcatgggggcacaatacttcttga

SEQ ID NO: 155226 - DNA, 377 bp, Glycine max
agaagtgcaacactcattatattaattttaagtcatctaagtcaatcatcaagggaagccttcgaacaaacaagctataatctttcatactaaatgcgtaagacattgatggctcataatatactgctaactagaaaaggtagtaataattcgctaccacaacataacaacctttgcacaattatagaatcaacatgacttacctaaacaaaatccagtacatacaatattttctaacaaaacttaaaatagcctccagacaaaaactgcatatctctcatgaactaagaaaataattctgcatcatatagacctacataaacctatatgcaatatttattagttgcgatgatgaaagaattcatgatctgtacaat

SEQ ID NO: 155227 - DNA, 210 bp, Glycine max
atttaataaaaggtggtgcagtgggaagccaaaatttattgacaacaccgagtgactcaattgcttcaatggtgggcactggtccctcttatgttttaaaaagtctgtctgttgagaaatggttggttctgtttgttaaatgggcattcaaagaaggtgaagaaaaaaaatacccaaatcttatggatatatgaaaagaaatggtgaaaa

SEQ ID NO: 155228 - DNA, 492 bp, Glycine max
  unsure (1)..(492): unsure at all n locations
gcttatattacatagctccatgcaggtatattttgttgtatgtttcaacgagtaaataaatagtcaattgagtcagtgtagtggtcatattaacccacatggacagatttctcttttcccactaaccagacaattcaagctctaatggacttggggaataacttctatcaatgttgatatacttttctccatatacatgtgatttagtagataattatgttagtaatactgattgtggggcaatgtacaacatgcatacatgtgagtaatatgcaatatgcagtctttctttgattttagtttcttcgatttatgtcagatctatttcatttcctccattaagtaaaaaaatgtgatgatattgggattatcaatgtttgcttatcaaccaaaccatcataccatatgtgatctgttcattccttttgactttggtatatgtagntttgtgtttctctctgtgccctggtacctgctggaatagctctgtat

SEQ ID NO: 155229 - DNA, 400 bp, Glycine max
  unsure (1)..(400): unsure at all n locations
tatcgagtaatctcacataaagtcattaacctatgantttgatatacaattcttgtggcgaatagaaagacacagagagagagaaagaaagaaagatgggatgagagaagaatattgaaagggggattttctaactaagaatctagctgtctgctcgctatctgtatcttgcgtaagggcctaaggatacaagttactataacagagaggagagagagaaaagaaacacgtagcagagaaaccgtgcactgcacttcttgattatcagttcagtctctatctacaatacatcagccgttcactatntattggcagcaacccaatggtttacagttataaaatcctaaatgataatagctgcccaactaaccaactaacattcttttcttatttacatatc

SEQ ID NO: 155230 - DNA, 495 bp, Glycine max
  unsure (1)..(495): unsure at all n locations
agctttgaataaaggaaatggcatcatgcagtaaacgtgatactaaccacataatacccatattacctttcacttgtccttgttccaattttggtgtgatattgatcactactcaaaatgaatctttatttatcatccgatccgcaggatgacaagatgaaaatgcatgcatgcttatgattaggaagtttaagtgcaacaactaaaaaaatgttattatgttcaattttacttaaacgcttacggcaccccttttgatggagccaaatgactctggattcagtgggcaaaattgcaagtgtaggttctcaagaagtaaaaacacaacacaggaaattaaaacgcacatcatcaatccaatggttattaatgttgcaatcattgtntacaaaggtntagaagactttggagatcccaatgagtctttggagaacaatcatgtattgaaccctntatgtgccccaagtattaagcataatatcatttgacgacatc

SEQ ID NO: 155231 - DNA, 363 bp, Glycine max
gagtgatgctaacaggaaagctttctccattctgattcaagcttgtttgttctgctagcttaaattctcaacattagatccaccatctaactgtaggaacaaaatcatacaaagaaattatttgaggctactatgaaaatagaaacataaaatatacaagatgattcaaatctttagttaggaaagaaaagagagattccacacaaagaaactacacaattattttactagtctaaaagttctagtacttgtcatttatggttgagagaattgtcaagttcatgcttcatttaccttataccatggtcggtttcctggtagtggttggaacaatgacaaaaaagcagacacaactacatcaat

SEQ ID NO: 155232 - DNA, 410 bp, Glycine max
  unsure (1)..(410): unsure at all n locations
atcttaagcaccgagctgcactgaaactgcgaaaacatgttgatttgtataaaataaccaatctcatncgccagttggtgcttgaggttgcattgagcaatctttgattcaagctggctagttgttcttcctcccaagaaaacaatgctctcctccaatcctagttccaattccaaactctattntgatttcatctagaccataaagtatctttatctgttgagatactgaataatctagcaaacatatccttcaatatcgctttatctatccatntctgttcccagaatattgttgacaaaactacctagtcttgggcaccacaaccttaaatccacagcttctaaccttaatcaaaatccactccctcaggtttctcctatttctgattacatgatggccatgctcat

SEQ ID NO: 155233 - DNA, 428 bp, Glycine max
ttagatactcagcgtgcttgtacaatctcctctttttgatgatgataactctgtaatcaagaaacacacacacacacacacactttttcctagtcgatcactcacataaatttccattctccccttttgttgttgagtttatgcttcatttgaaattaagttaattacttgtgtgagttcttgatttattccttatttctctccccctttggcatcaacaaagagccaaagtgtgtaacaagtataagacaaacctatactattcatcattcacaagacatacattgaagaatataaaccaattcatgaagcaagaaacatgaatagatcaaatatataaaaaccacatagtcttataatataattcataattggtcattcaaacaatgcacataaagaaatactaaatcatccacatgtcataatat

SEQ ID NO: 155234 - DNA, 438 bp, Glycine max
  unsure (1)..(438): unsure at all n locations
agctgccaagagggtgctcgagcattgcccaatctgtttttggaagtgatcaacaacaacaacgaggagaatgcaggtgatgaagaggagaatgcaggtgatgaagttgagacattgtacatgtatcggtctcttgatggaccacgggatgatgctccaagatttgtaccatcctgcaatagatttttctttttaattcaagaagatnttagctctttctaacggtggctggtcgatgaaacaggatggaacaggggattttaaatataaacctgctagaagatttctctgctatccatggcaaacaaagttaagcttgcaactcctgttcttggtatgggctgcagtgatggcaggccacaaagctactattggggagggagggtgggaaaatttctccatttgcccttgtttatgttagaggactaaggattgaaa

SEQ ID NO: 155235 - DNA, 371 bp, Glycine max
  unsure (1)..(371): unsure at all n locations
ntgatccgnctctatattttctacaatcccatcctncctccatataatgagcttctggtgaagggtggatggcacagccccaactncatgaatccactcccttcctaatagcaagttaaaattagccttagactgtatcaccaggaaaagagttggtcgaactatactgcctacagcaacatctacttgaatggctcccanagaatagccagttttaccctcataattcgacagcacaatgttgtgggcagatagatcagtgtcatgtttcccgatcttgtagagcatggatcggngcattaagttgacagccgctcctccatcaatgagcactttgttgattcaacattctcaactttgctctgatgaaa

SEQ ID NO: 155236 - DNA, 320 bp, Glycine max
  unsure (1)..(320): unsure at all n locations
gacattggcatgttcccatgcactcggccaagaaaacattatcccacatcgaagagaaaaaaaaaacattaatcaccgagtttgaacggataaaatgctgggtgacgtccgccacaaaagatgaccgatcgaggtctaaatataaaagaatcaccggatgacgccgatcgagcatntcctaattgacatcatccatatattatccagggattggatagagaaaacaatagctgataccagtcgttatgtaggcccgactgacatnnttcagccgacattgcacacgtatttgtttaaacgctggccgataattatcttta

SEQ ID NO: 155237 - DNA, 281 bp, Glycine max
  unsure (1)..(281): unsure at all n locations
aattgggcggtgaagagtcaaatcttgattctgtggaattttatgtgtatattcagtttgagcaagtttagattgatgttatggaccattgtgaggtgagaagttgcttcataattacctcattctaaattcacttttacacctagagaacccttgaattgggggtgttggacacctagatttgtgttgtgtgcttaagcttgacttggttanacatgattgtacatgattgggacttgtggattgattgggcagattgatgaaggaagggatttcgaatc

SEQ ID NO: 155238 - DNA, 365 bp, Glycine max
  unsure (1)..(365): unsure at all n locations
gcttgagaagtgtactgcatctcacagccttttgtttatcgtgttcattngcatcttcctttccttcatctatctttacaagtgcctcatcgttcatggcattatcaattcacttctttcttctctcctcagttatccttctgtatcttttattaccagtataattctctctctctctctctctcttatttgtcaatcaagcgactcactttgatgtctaagaagcatcctaagcgccaagagattgaagataaggctacatcgaatgaatgagaagcacacacttgnattcctcactcttcgcgtttaaataaatgactttgtcttttcaatgtgtcgcttccccccacgttgttaggattact

SEQ ID NO: 155239 - DNA, 392 bp, Glycine max
  unsure (1)..(392): unsure at all n locations
aaaagactactggattcgtattcttcatgggtgattgtggttntacatggagttctaagaagcaaggcattgtgacactttctactngtgaagccgagtatgtagctgctacttcttggacatgtcatgccatatggctaagaagattggtggaggaactttagttgttgctaaaggaaagcacaaagatctatgttgataatagatctgcacaagagcttgccaagaatacggtgttccatgaacgaagtaagcatatagatacaaggtatcatttcattagagagggcattaccacaaaagaagttgaattgactcatgtgaaaactcaagatcaatttgtggatatcttcaccaagcctctcatatttgtagattttatagattgcgag

SEQ ID NO: 155240 - DNA, 416 bp, Glycine max
  unsure (1)..(416): unsure at all n locations
ttagtcanacagaataattctaacatgtcaaagaattgggttttgaaaaagcataacaagactttntgtgattggtttaaagatacaatctttgcagatgagaatgcttcagaaacattaagaaagctagcagatgggcctaaaagaaatgttataacctggcaaggatacgacataaacaggtattcattttacacaaaagcacaagatgacaaaagtacaatgcagaatagcggggtcaccctaagggctgaatctcaacactttgaaagtgtcaatgactccaatccctgtgtagcttccatcccttactttgggttcattgatgaaatttgggagcataactatgtgaaatttacggtatgtgttttcaaatgtaaatgggttgatagaaacaccggtgtacgcaccgatga

SEQ ID NO: 155241 - DNA, 482 bp, Glycine max
  unsure (1)..(482): unsure at all n locations
agcttgtagaattcaccccaattctggtgtcgtatgctaacttactcccatatctactcaataatgcaatggtagccataaccctagccaaggttcctcaacctccatttttccggggatacaactcaaatgcaacatgtgcttatcatggaggagttttggggcattccattgagcattgtatgaccctgaaacataaggtgcaaattctaattgatgcgggcaggctaaaatttgaggaggataatcacttgtgaattctggcgttggcaagcgacactatgcatggggcaatttgaaggtttttgttagatgtctccaatgacttattaggaattttaagtttatgccattattgtaaacaacagtcacaatggctaataatactgataaattgatgtccttatctcattctctcataattacatctttgcttatntaactttcactggaatgtngaatgtaagtcgttgtttctttac

SEQ ID NO: 155242 - DNA, 468 bp, Glycine max
  unsure (1)..(468): unsure at all n locations
ngatcaaaacaattatctaatcattccaatccactcaaatcatacagttgctcattcaaatcattcgcagacactcgttgcatacaaaacaaaccactgcatatcaaattcaactaattcactgttcaaacaagctttctgtacaatcaatcaactcanagtactaaaatttaaataactaaaatttaaagaactgaaacataaacattgaaatttaaatgactgaacataaatcataaaataactgaaataaactaaattgttcaaaatgcacaaatttaaatgtcttgctcctgtgcatgctcattgagatccaacacctgagcagctagtgaatcctgagggataggctgctttagctcagatgctggtgcagatggcatggaatcatcangtatgggtgctggagatggctctggaatctggtctgtggcagtctccttctcttgagccatgtgtacacctgca

SEQ ID NO: 155243 - DNA, 394 bp, Glycine max
  unsure (1)..(394): unsure at all n locations
gcttgtaatcgcgngcgcttgaaacctcatatgatcctcagaggactgaaccctataagaagaggcagggtaaggagaaggagggtaagtcctcggaggagggtgggcatgggcatgggcatggggatagccagatgaagatgaagatgaagatgataaattagagggagaatttccgtaattgggaggaggatggggattgnggttggggttagggttaggtctgcgttgggaataaagaggagggtcgcggccgaagtggaggctgagattgagaatgagatcgacgaggttggaactagggtaagtccaattctgcaaataaggcacggaaaccaaaccagaggggttaacgtgagggtgagggcgcttgatgatcatgtcgcgcgtggga

SEQ ID NO: 155244 - DNA, 469 bp, Glycine max
  unsure (1)..(469): unsure at all n locations
tacttctaaggaaactaatacaattatatacccttatgacttaagcacgattatgtagttacttgagccctctaagtttctcagaaagtaagacaaaaaaattgtatccgtaattgggttgaaaacgatgactaggaactccaattattggaaggaattcagaatgtttgatgatgaaaaaaatggaagatggagaaactaagatcagagattttaccttgatatctatggtcgatgatctccaattttgccaattcccattgggatcatctactgtttcccactttccctgtaatctcttttcgtcaaattntaggaatcaattcccaatgacaaatgaaggtcacttgacattcgactattcctaatggagtaatgggttgtgtgagaaattttnngtgtgtanataaaagttgatctacgatttgtacaaatattaaaccctgctatagcagatcgagtaagttat

SEQ ID NO: 155245 - DNA, 412 bp, Glycine max
  unsure (1)..(412): unsure at all n locations
tagcccaccatctttctcatatcagaactctgtttatgtgtcttacgacaagtagccctcttgtgcttgtcaaagtatgacaccttgaacttgggaaggatgacaacattgggtactaggaacaactcttctaggttagcaaaggcataatcttctcctccttcaacgaccctgagcctttcttctaggtgaatccaattctccctttgcgccatggcagaagggactcttcccgccgcaaaatgcaagggttgtggttgtgagcaaanttgagggccctctagagtgtttggtaggggtacgccaccaactgcttacccctcagtggcatatctgaagcaaggctcgaagttggctagattatggtagggtacctcatgtgtctcccccatggttaagagacatgtgcatg

SEQ ID NO: 155246 - DNA, 299 bp, Glycine max
tctatccttcctaagatggagccacaccatgtcaccctcattgagaactagctcctttcttcctctattgccttcactggaatacaccttcgttgggatctctatccggttcttaaccctctcatgcaacttatttacaaactctaacatagattccccttctttatgtataaaataagtgtcgagtgggatgggattgaacccatagacaacctcaaaaagggatcgcttggaggctctatgaacccccctattgtatgaaaattctacatgaggaagatactcatcccaagacttat

SEQ ID NO: 155247 - DNA, 455 bp, Glycine max
  unsure (1)..(455): unsure at all n locations
caatgactgtgaggttgtggttgatgattcttccatgatnncaatcatgcttactagcttatttcagctatgactctaatgtgtatgctcctatctttgaaaagctgcatgcttgtgagaagtgattgatttaagcattccatgatattcagttcatatggttgaattcctttatgaatcagacaccatcttcttttgattgaccactgtctttgtcacttgatgacaagtgaactgttctttctttgcttcaggacaagcaaaactgtaaatntgggggagtttggtagtcgccttatacgactaacatttgtatagaaaacattttccaaaacttgtatagttccccaatttacggttattttgtagtgagttttgtaaataaatttgttttatggataaagttgtctctagaatatgtccattggatttaatgatcaaatatgtgcaatttt

SEQ ID NO: 155248 - DNA, 348 bp, Glycine max
  unsure (1)..(348): unsure at all n locations
cagctcgtagggagctttatggaggctggatcttagagcttattgttgtgctgtaatggcggtttttcaccatggagatgcagcggaagacanaggagaagaggggagaggatgcgccatccactatggaataagccatggtataacgagcttctccaccatgatgagccttggataagaagcttgtaaagatgcttcaatggaggaaaataagacggagagaacactgagggtggagcacgaaatgaatgaagaaaaaagggagagaagtgaactttgagtgtgtcttcaagactctattcatctaagttcaacaagtgtacacatgcttctataatagactaagta

SEQ ID NO: 155249 - DNA, 493 bp, Glycine max
  unsure (1)..(493): unsure at all n locations
agcttgaatgaccttccacagatggatacctattcctgtatttattctaggtgggaggtacagaatacctaagggcgcgagacaactctctttaagaaactcgataaaatagtttcgtaacttcaggagaaggggtgccttctcacaaaggggatcatagtgaccaaagctggatgaatgtttgtctgagcttaaggggattgtgtatcattgacttgtatgttgattgatccggtctaaatatgatgttactgtatgaatcattctagacctaaaaggtaagacaaattatacactctcttgttttaaatagagaatctcanatcttagaaaacttattggaacaaaacatataaggattttttaaacaatttacttatataaaaaacaatgtaaatgttcaccatttagaaattatntacttgtataaatcatctttttaatgtagaaaattaactatatataagataactgacatagagaagaatctatg

SEQ ID NO: 155250 - DNA, 434 bp, Glycine max
tcatggaaagaaatagacgaaaattctccaacttttccgttatttccctttatccaccgcaacttgtttatgtttcatcttttgtctaacttctcaaaaagatgagtgcataagttatctttaatttttacgagaagttcgggctcttattctaaatgattgtttgaatatatatgttgtgctcgaggctcaatggacattgtttgattaatatagctgtcctaattaacttaccaaccccctaattaaccaactaattaatataattgtcttaactcctaacaacatatagtattaatatggggaaaattttaagcaataactttcttcaattatgtatttatgatcgggaatgctaatatctaatatgttatattttatcctatcatatgaattctgcattcagagcatgtgacttgacagttctatatatg

SEQ ID NO: 155251 - DNA, 483 bp, Glycine max
  unsure (1)..(483): unsure at all n locations
agctttaaacttaatatttgtgaggatgagttctatacattttgattggctatgaattaaaaggaatagaactaataattgtattaactagaacgaattttattgatttagcttggattgttgagttttgtagatagatcaattcagatgattacccctataaaagaatatatataacgtttcttgagtttctttatatcaagaatttgaatcagacaaatgctacttatttgaaaaattatttgtacatgttcttctaaataatcaaatgtcataaaaaattgagagagaagatttaatatacgaataacacacacgataaaggttcaaatgaaggaaaattgtcgctctgatgatcacgaaacctacactaatttaatatttgcatgagacaaaatatgctagtcttggagtggttgtatatgtngaatcaattcatacttttacttaagtaatcatttatatatgaaagctatgattttt

SEQ ID NO: 155252 - DNA, 392 bp, Glycine max
  unsure (1)..(392): unsure at all n locations
ctacacctcctaactagtttctcatagtctgctctggaaattgtttcctaactgntcattcctcttcttctctctgaaacggaatgcagcagagatcttctagctcaagcttgcgctgtttctgcgactagcacagagccatcaacgttggtgcagagatgcagcagcagcaacacacaaagcgtagaaagaacctcgacgaagattcgcttccaatttaccaccggagcctcatcggaaggagggacacntttcggtcacgctcgccggcgacggagaaaggcattcacgcgatccctggcgctgttctgctggcctcttactctctggtggttctcttttcaggtacgtacgtaactcttatgtttccgtaaatcacttaatcttatgta

SEQ ID NO: 155253 - DNA, 461 bp, Glycine max
  unsure (1)..(461): unsure at all n locations
caccgcgcgcactgggacctcacgatgaccagancttctttaccgcaacctcaatgggatcactaaccctttctcgaagttgatccaaaaaggccgaaaattcctggatactccttagtcagaagacgagctgccaactaaaatcaacattgccaacctcaacatcaatgaatcgaaagacaccaacaatataacttcatcataaccctgaatctgtgacatatacccgggtgaacccttcgatgcaccctttgtcgaaaccattattctctgtatacaacgtgtacctaaaagaagaaagcttaaagcattactctactaagagagagagagatcaganaaggtgtgagatcaatggcgattcaacgatcccnctttatgagggttgggcctccaataagctcaattcaataataaattcccattgtcagatngaataatatcaacaatgaagaggaagt

SEQ ID NO: 155254 - DNA, 441 bp, Glycine max
  unsure (1)..(441): unsure at all n locations
agcttaatattcagatgatcaaagttacaaattatgcacccacatgacctctatntatagcctaagtgtcacacaaatgatgcaatcctaccccgcaagggcattggatagaaaactccaagttgattgggccagagatgcaagagaaggccctatggttcttatgagccttagggtagatttcgggcccatgggctaagtacgagcccacttatctttgtaaatattagattaagggtttcattattttgggccttgtatttagggctccataatgtaggtagggtaccccataaatatgggaattttcagcccttatattttagggcacctagactagtttttgtatgaggggtagttttgaaatttcacatgcactaagtgaatatttaatgtgtgttgggaaataaatctaattgaatcggtagaatctcaatccaa

SEQ ID NO: 155255 - DNA, 352 bp, Glycine max
atgaggtaaatatggagccgactctcaccttacacatagctataacacgatagtgaaaccttgtcatactggatttacaccctaagattgcaccagatcaaaatttgacctctcaacacccatatttacactaaaaatggctctatggtcactttggtcattagattttctctctagcacaggccaaggcttctcataagtcctaaatgacatttcaaactaggagtaactcactttaaccttcaaataccactagatccagagttgggctatcaactctcaaaaactcactctttttccactcataacaccataatctcactctctaaccctaagttaactcgtaccttca

SEQ ID NO: 155256 - DNA, 463 bp, Glycine max
  unsure (1)..(463): unsure at all n locations
agctngcaagtgatagagtgatgtgttttactgttgcttctgngatnatggtctggccttactaattccgtagccttgagcttacatggttaaatatttcttatcaagttattgtttaaagcttcaataaaataatatagttacggggaaagagtgtcaatgacttagattataaaatatctggtttttgagtgagaaaaaatagcaactttttaataaaagtgttaaaaaaaacattattttttatacaagataaataaaatgatagtttgtagctcctttcaacattaatatcatctaacaacccagtcattttggcattagaatctgcacataaatctggtattaaattcttttaacattggccatgttattcttaattttacttgtttttttataactaaaatcaacttgattacacaaagagtattgtcaaatcagccgcttaaggcctataatattc

SEQ ID NO: 155257 - DNA, 447 bp, Glycine max
  unsure (1)..(447): unsure at all n locations
tatggaggggtggctatgtgttatctcaagcataagaattcttctattttgttgaagttagggtgggttctcacaaatgatgtgaacaacttatggtgtcaggttcctaaagggaaatatgcgagacaagatttctctgcaaatgttttggtagccaagccacatgattctcccatttggaaagttgtagctgagaattggcctcatcttgtggaaggtgagctatgggccattggagatggtaggctggtggatgtttgggaagacagatggctcaacaatggggtgagattggctagtactgatttgaatactgcttagcaattctcgaatatcaaagtcaatgagctggtgggagatgaatgggtttggaactcannattattgcagcagatgttctctcaagagaatatngagcttatcacatcgatcttacccccttctaat

SEQ ID NO: 155258 - DNA, 430 bp, Glycine max
aattaattatacctttagctttataaagatgaacattacttttttaaaatattaaataaatataaatttgtaatataaaagtagttaaatcaaatatacattaaatcttcccttaaaaatatataataaaaaaatgcatccaaatgttcttaaataaaatgtataactcaattgatttaatagaatacatgaataattggaaaccttttgatattatttccgattcttacaaataaaaaaaagaattattagttaaatgggattaaatccactttgagaatgaattacagatctcaaccatctcaattatgagtaagttgccacttgaattgggctggcttgtataaatataaaactaaagttataaaagggcgatctatgacacccaataagtttataataaaaataataatataaagatgaagatata

SEQ ID NO: 155259 - DNA, 392 bp, Glycine max
tttttatgtttcctttttgactaacttctcaaaaagatgagtgcataagttacttttaatttttaccagaagtccgggctcttattctaaatgatttcttgaatatctagcttgtgctcgaggctcaatggacattgtttgattaatatagctgtcctaattaacttaccaaccccctaattaaccaactaattaatataattgtcttaactcctaacaacatatagcattaatatggggaaaattttaagcaataactttcttcaattatgtatttatgatcgcgaatgctaatatctaatatgttatattttatcctatcatattaattctgcattcagagcatgtgacttgacagttctatatatgaaaatattacatctttcatatgt

SEQ ID NO: 155260 - DNA, 484 bp, Glycine max
  unsure (1)..(484): unsure at all n locations
agcttgtgctctctcttcatcttagaagcattttttattatntangnattnnagntnttaaaacacttgtttgggaaacagttttcaaaacataatagatttcagacgataaattgattgattaattaataaagtagaattgttttagaaaatatgttttatataaaaaaaaacaaagttcatatttctacacctaaggctgttaaaaaagaaactaaattgaattggtgtctatgccaaaaaaaaaaattgaactgttttgaataaaaagctgaatagaatttttccatagctcagtttttacattttaaaaactgaattgatctaaaatcaaactgcttgaacggaacggtaacatatgagattaaaaaatgtgagatatttactctaaaataagatatntattgagaataattcacataattgggaacagctcaggatatttcagaatcatttggaacagtgtgatttattccgaactata

SEQ ID NO: 155261 - DNA, 477 bp, Glycine max
  unsure (1)..(477): unsure at all n locations
atcctctaagcacctgcggcatgcaagcttctacggagttggaataatcgattatcatatgctatatcggatatttcgttacacatagcgcttctaaaggttgcaaacacaatgtaatagattacggaatatggtagtcgaatatctttagctacagagacttccttctgctgaaactgccttaggtaattgattaaatcaacaaaacttgccaatatttcaagagaatagagttttaatgtttattctaacactttgtaattgattactaaacttgataatcgattatacagtgttgaactcattgcttctaagaaactctgagatcaatacatatatcttctcatgttngattaccactaagcatcgataataaaactaagtctaaatactcaacatgcctaatctaanaacgtacaatacaaatgtcacatcttcatgacttcaatctcattgagtcacacaaattataactat

SEQ ID NO: 155262 - DNA, 275 bp, Glycine max
aggaccaaacatgtccggatcacttgaccaaaatgctcggatacctgtccgaaacactcaacattcttacaatcagggatccgaaatagtaaagcttatttacaaaatgatcctcttcaggatgaattgattgttagccgattatgatatattcatgatcctctttcggaatatcaaatattatatgttacgcgatataatatttgaatgtgacatttcttatttaaaattccaaatcctaagctgtcgaatatcaaattcaacctatatgtcta

SEQ ID NO: 155263 - DNA, 184 bp, Glycine max
agcttgtccaaacgtatctgttgcccttaatatcactcttccagtccaaattaacataattgagcttcaatacaatgtataattgatagttgatgctctttaatttgaattggtttggcccaaatcttcttctacaactccatctttagcccaagttagttcaaaaacatgatgggtgatgcta

SEQ ID NO: 155264 - DNA, 483 bp, Glycine max
  unsure (1)..(483): unsure at all n locations
agctntatacaagggagcanaagatacatgtattattcaaggtaagctaagtggtcaaaagagcttgcgtctatacaattcatggccttcatcatgttctgattaattcaaagatttatgcaaagatcattattcacagttagtcatttactcacagagtaaggtcacactctcatcggtttttggttcatgcttttctttcacaaccagtctatgtagtgactaaccattatattataagttcacactcttgttctttctttgttcaacatgcacatttgctcaaattcatgaaaggaaacacacatctcatcttaagcatgcattcaatttaaaacaatgcataccaccattttcacaaaacaaataaactacttcactgccataccatcaaaagttaagttaaactgttcacgatgcttcgagatgagaaactatactactcatgcacaagactaacanaaagtaactaatgtactaaca

SEQ ID NO: 155265 - DNA, 352 bp, Glycine max
  unsure (1)..(352): unsure at all n locations
tactcaagcttacaagcaagctacacgcattatatgttgttgctgtatacattggtcaaagaatggtgagtagcgcaagataaatgattctttgagagcaaggaaattacttaattataacctacgatagcattttcttagagaaactctaagtttattttatgaaaaacaatgaaccattataacttatagattntgagattgggtaaaattgtctccgtaattgctcaaaataatatgaagcatatattaatgaatcaaganattttagtatggtcaagcctaattggttctcttgttagatcactctctacataaaagaaataggtgataggtgatattatgactcatg

SEQ ID NO: 155266 - DNA, 483 bp, Glycine max
  unsure (1)..(483): unsure at all n locations
gctttnttggaatttttcactagtaatcgattacttgtttctggtaattgggagtcggggaaaatgactaactcttgtgtataaaacttgtataaattgtatcaaactctcccaatttatggttattttgtagtgttataagtattttctgttaagtataggtaataaatacttagtattttcattttgtgtgtttaataatcattttctctcaatatcaggttaattaggcaagcttttgaaagtgttgtttttcaccttctcgctaagcctatatgctggcttagcgagtgcccgctaagcacaacactcctaggctaggcgcgaggaagactctagaagaagatgagttgtacaggttcgctaagtgcaccgctttagttcatccgcttagcgagaaaggcgtgctaagccaaaaatcactaacgtgcgctaagcggtccatacgtgtgctaagcgcacgagcacgaacaaggtcaccta

SEQ ID NO: 155267 - DNA, 512 bp, Glycine max
  unsure (1)..(512): unsure at all n locations
agatgttttatctnttacatatccaactcctttgaatgttatttgtattggctggtatattgaatgttgcatcttagtccatatcatatcttttgtgcatcatgcatcatcatgagtgagtgagaagaaattttctaaagttagaaaatttcttcagaagaaaaaactctttgttttaattgattacaaccttatcataatcgattacacaagttgtcataagcttgtagagttatgtctcgtatcggtttaatcaattacaactttatcataatcaattgcatagttgttcttaagacaatgactgatttattcaggagtctctgttntaatcgattaccatttgatataatcgattacttctctttctataagtggtttagaagtgaacaagaatactntaatcgattactttgagtatctaatcaattacattattcttgagttggttctagactttggaaagaacactctcaattgataaaaagataattcaatcgattacttcattg

SEQ ID NO: 155268 - DNA, 393 bp, Glycine max
tatgcacaatcatggccttcattatgtgctcatttataaatattattctaaaatttagagatcgatgcaaagattattactcacagctgactgtcgttcactcacaggttaagttcacactctcaccggttttggttcaagcttttatttcacaatccatctgtctactgactaacaattctaaatgcaagttctcattcttgttcattctttgtctaacatatatacttgctcaaactcatgaaaagaaacataaactccatcacaatcatgcattcaattcaaaaccaaatcatacactcaatttcacaaaaaaataaaagtgttttactgccatgtcaatcaaatcaagacaaactgttccatatgcttcagaataagccaaccaactac

SEQ ID NO: 155269 - DNA, 428 bp, Glycine max
  unsure (1)..(428): unsure at all n locations
gttgatggctcattgacattctattttcttacatatagatacaataattagctcaaagtctaaaatctcagtatatacaaatgggttttgggagctagaattctaacttatggattttttacaaagaatttgaatgctaggaatggtttttcgtgtgttggtttctttgactttagcacttcaaatatttagctatttatagctttcaatagaagataaccattgagactaaatgattctcatctttatttgttggtaatggtgtttattggagcatttaatgcaacatttaatgtacgtcaccaacttgtcaaattgatgtgataaattgactntcttatctttcatttcccacatcccatatcttgtgtcagtagtcaaatatacttttgtgtactcaagtgcattgtaacatgctgtagcatatc

SEQ ID NO: 155270 - DNA, 410 bp, Glycine max
  unsure (1)..(410): unsure at all n locations
gcttgtaagaagtatagcaatataggagattgattgtgttttgttgattgataaagacttanatattaatcatgggttaaggagttgtacaacagatggatatatattatacttagtgagggatgctttggaaaatgagaattagataaacgtttattttcatcatgaagtagatccaattttagaacaagtcccacaaatgttgtacttggaatgtcatccaattccacaagttgttgagaatgaggatgatttaaatgatgtacctgttgctggccatgaggaagggaagttttaattcatctgtacttggtccaacatggttaccataattttgaataattntggaatttaatgtntataattaattaatataatttatttgtacttgatcatcattgatgcagatg

SEQ ID NO: 155271 - DNA, 232 bp, Glycine max
  unsure (1)..(232): unsure at all n locations
tatctggggcaaactatgatgagccaacgggtgatccatggagtgtttaagctgggagtgaacgaacctctttataaaaaaatgcttacgtaaaggttaataaatatactttagtttaggcttccaagaatccatangtacaagattatatgttagacttagaaccttctattcatgtctgtgttatagaaagaattctctcttgttcatatccatatactcaaaatgtgac

SEQ ID NO: 155272 - DNA, 438 bp, Glycine max
  unsure (1)..(438): unsure at all n locations
tctataaatgagacaataacaatgatttttctgtctcgatctcaacctatagagtggcgtgaaacacaaaacacattcttgcatcattatttatattatatactaaattacgagtacagtacactgaaaacatagttttcttttataaaaaaaagtattgtgtacatcagtcctgccaccaccaaccatgtagcacatcatataaatgaattaagcattaccatcactgatacattgcagtgaagtccattcattttaacagtccagccaacactttaaagcaaaaaccatcgcctttacttccttcttctagcaacatattaccactttttcaagctctatgaatgtcatatttcacacaaataatattcatggcttattgcttcatcaacccaactgaatctatcaccaccatggacctannaccatccactctat

SEQ ID NO: 155273 - DNA, 435 bp, Glycine max
  unsure (1)..(435): unsure at all n locations
agcttctggtgggacatcttgacttgctntccattctgtcattcaccacanattctgccttcttctattttcagattgggaatgcctctaacagcacttttgtcaaggattttcttcatgcctcttaagtgcagatgtccaaacctttgatgccatattctgacttcatcttctttggaggatagacatgtggaggagtagctggtttcttggggtgtccataggtaacaattgtcctttgatctgctgcccttcattagaacttcactcttctcatttgtcaccaagcattctgactttgtgaagtttacattgaatccttcatcacacagctgactgatgctaatcaagtttgcagtcagtccctttaccagcagtactttgttcagactaggaagtccattatgaactagctntcccattccaatgatcttt

SEQ ID NO: 155274 - DNA, 447 bp, Glycine max
  unsure (1)..(447): unsure at all n locations
tctnttctgganagttccttccctggttggtgttntgattgttattangaggtggtgttggtcttggatgtgcatcgattggattttgtggccgatntggcgatggcctctgtggatgattgggcgttcatggctggtagggtggtgggtaatgagaaggactgatattggccgagtattgatattgttgggctaatggaaaatttggccatgtaagaatggtaggcacaacatgagtttctccctccttcttattctctctattttccccaggcttcctattcatcaaagcaggataatcaaatgtgcctcttcttagacccactttgatccttttgtcggcaaaaactaaatcaacaaagcttgaaggcatngtacccaccatcttctcatagtagaacactagtaacatgtctactatcatnggtatcatctctatcttcatca

SEQ ID NO: 155275 - DNA, 457 bp, Glycine max
  unsure (1)..(457): unsure at all n locations
gcttgatagttcccaattatggtatttttatgtaattntgaaataaatcttggtttatggttaacactgtctctagaatatttccattggatttaatgatgaaatctgtgtattttcaagtgaaaaagaggctaagttttgaaatgcaaaatgtagcagttgggctaagcgcatatccaccgctaagcacaacttcagcgtgcttagcgcaaaggagaatntggcagagcatcaacatcaaagccgcgtgctaagcacgagattagtgcgctaagcgcagcaggtgccttcagccaggctcagtgcaagactggcgctaagcccaattccacttactcacgctaagcgcgagagtggcgctaagcgcaaggttgcatattctgagcctatttaaagcctgctttgtgcagaattatggtacacacanccttttgagacttgtgcacatcattccaca

SEQ ID NO: 155276 - DNA, 460 bp, Glycine max
  unsure (1)..(460): unsure at all n locations
tcaacatcagaccacttctattgtgctggaactacttcacatggacttgatggggcctatgcaagttgaaagccttggatgaaagatgtatgcctatgttgttgtggatgatttctccagatttacctgngtcaactttatcagagagataacagacacctctgaagtattcaaagagttgagtctaagacttcaaagagataaagactgtgtcatcaagagaattacgagtgaccatggcagagagtttgaaaacagcaagtttactgaattctgcacatctgaaggcatcactcatgagttctctgcagccatcacaccacaacataatggcatagttgaaaggaaaaacaggactctgcaagaagcttgctgggttcatgcttatgccaaagaacttccctataatctctgggctgaagccatgaacacagcatgctatatccatcacagagtcaca

SEQ ID NO: 155277 - DNA, 432 bp, Glycine max
  unsure (1)..(432): unsure at all n locations
gcagcttcactcagtccattcgagtacctatttgtgtgatnttcaaacgtttaataccagaatacacaatacccttaagctaaccgacaagcatattttggatgaaatttactaccggcaacctttcacgtatgcaggtaatcaatttcggtttcagtgtatgcaactgaaagttgatgctgatgttaacacaatgttaatgngtaataatgaattttctgttgctggtccgattgaagtattatgtatcattgctagaaccccagatggtattttaaacttactcgaaactactatgacccttactcatgatgccctgctatattactatgggaggtggaacatgtcacgccaacatgagtttgatgggtactcgntcacaggatataatcccaaaaactttgacatcacaccggatgtccatggatgaac

SEQ ID NO: 155278 - DNA, 455 bp, Glycine max
  unsure (1)..(455): unsure at all n locations
agcttctggtgactgggaagcatgttattctgttgttttccatatcgggtccttcgccaaggatgtgtatatgtgtatatatgtattatattcgtttgttttggttgttgtttgtattttgttttgtggagaagaaaaaagaagaagtagagatgagagtcgtcatcacggaaatggcaggacggacgaaatcagtgtcctatctttgcttgcctcttatctccgatgagaggtaagtaaagaggggcaactgtcataccctaatttcgtccggggattattacttgatgacatgcaacctttggttagccgctttgagatacttggcgccctttgttgcacaataaatgaagtcccgagacgtctcataaatcaaaaggaagcacgcttgcgtgatccctganattcgtaatgtggcggaagtcganaagaggtggttttgcgtaatccgtgag

SEQ ID NO: 155279 - DNA, 464 bp, Glycine max
  unsure (1)..(464): unsure at all n locations
ataactagacctgaataaatactnttaattgatgatccaatggaattaccatcgagcactcaagtttcaagcgcggatggctttngcacggcttcaggcaactcatccacacttaaaccaaattatgtcacgaaggaaattggcagaatcaaaccaaatattaacataaacaactagtaaataacatttagacagatcattcttacggaatacagaatctgcacacgaacaaggcataataagtgagatttatcaatttacaaaagtcagctggctctactctactgttggtacttcccattctgtcattttactactacaacaaaaattagatgagtgaccatgaatctaaaagaaaatagttccttttatacacactctntgaacaagattagcctttcaagttccaagacacatgccctttgcatatcaagttagcatagtatctagtaggggaaaatatc

SEQ ID NO: 155280 - DNA, 420 bp, Glycine max
tagtggaacatggtggttaaccaagaactagacgtagtctgagtggtagaacaaacttgtgtaaatcactgggtcttatgtgttttcatttcttctatgctttaaattgacctaagggttgaattggcttttgatttgaaaactttgtatgttagcaaaatttgttttcatcgtttgaaaatatattcttgcaaaaatatgttatatgtcttacaaagtttctttttaaactgtaactttgttcttcacaaataaggcttaaaaaaaattctaaaatcacaattcaactgtacttcttttgatatctgcctttacatagaatatactaagaaacaaatttcttaatagttaaaacaactatgtaagtctaatgaaaactagtctctatacaaaactatgagccttgaatatttataatgt

SEQ ID NO: 155281 - DNA, 324 bp, Glycine max
  unsure (1)..(324): unsure at all n locations
tgagacatctcagcanaccgctagaggtgccggaatacacatgagcccgcttagaggtaagggatgagtatatcgcaattggagttagaatgaacatgtgtacggatctttataggattaaagtgtgggttatattgggatatttattgaattacgattntcctttacgattatagatgcaatcctaccccgcaagggcatcggatagataactcctaatagattgtgccagagatgcaagagaaggccctagggttcttatgagccttatggtagatttcgggcccatgggctangtacgagcccacttatctttgtaaatat

SEQ ID NO: 155282 - DNA, 358 bp, Glycine max
  unsure (1)..(358): unsure at all n locations
tcttataagctgaaccattttatcaataaatacaagttgttttttattcagaanattagagtttatctctgttatcttagtgagagtgattctcctaaattcttgagtgatttaagaacaccctggctgtatcaaaggactggcacaacctttgtgtgttgccctcgctggagagagcgattctttccttcctttcatcttcacccttgttcttcaaaccacaattccagaaaatccacctctgcccagaattatctcgtggccataactcccattttacgcactcaaattaagtgattcttgagcctaaattgaatttcataacgagacctttcacctcgctttggaatcacttcat

SEQ ID NO: 155283 - DNA, 493 bp, Glycine max
  unsure (1)..(493): unsure at all n locations
agctgaattannagtttgcatgtctgaagattattgtgctatcactctaactaagccattgaagtctatcaagttcaatgaattgagagacaagttatgagtgacatccttgacaaatctgaattaaggagggatgttgatgtatgctgtaattcagttagttagttagtagttaggagggagttagtttgacagctatgaaggttgttaaagctatatgtgcagtgtataaatatagtagtgatcatgaatgaaaatgatgagtatgaatgagaatgagtgcagaagttttaattcagaattctaagttccctctactgtctaaatcaattctttcatcttctcttattctctaacatagagtgagtgagtgcatagtgtgagtgtgtgtgaagagcttctttgtccaacagaaccaccatccatctctctatgcatcttatcattttggacttaccattcnncaatttttaattcgcgtttaagatatttc

SEQ ID NO: 155284 - DNA, 364 bp, Glycine max
  unsure (1)..(364): unsure at all n locations
tgacgcgagcatttgatgatgcgcaaagctcttgtgattgagcaagaggctagatcagcttccgcattcaggcagggtcgagattagaatgaattagagcccctgtcagacttctatggataagcgtaggagaattgtgaaaaacacagatagcacaagttttgttttacataagaantttctcatattctctaaggtccagagtgattactctctggtaatcggttaccagatagcaggaatcaagtactcgtgacccnattgggttttaaaatgttttcaaaagattggtaacgttccaaaatgatttccaaatagtgtaatcgaatacactatattagttatcgagtacaactgaatctga

SEQ ID NO: 155285 - DNA, 437 bp, Glycine max
  unsure (1)..(437): unsure at all n locations
tctttnatcaaggccatacaaaaacatctgaactcatctagtttttgggaaagtccttcattgttttcattctcgatgttttaaaaaaaacccttttgttgtgttttgattcaaaaatattggttgttgattctttctaaaacatgctattttcaagaaaattcttctatttaagtcccaaaaagagttataatctataactatactaacaaaatatcaaagcacgcataaattagtcaaaataaatttgcgtaagtttttcaaaaaattcaaaacaataaataaagtaataaagtactaaaattcaatacaaagcgataaataaacataaagacaagttcacaaatgtntntaagatcatggctaaggagctcagtcttcttgagatcagtggtgaggagcttagtctcctctaatanaataatcaacatgatcta

SEQ ID NO: 155286 - DNA, 329 bp, Glycine max
tgactctccactgtatatggaatttctcgttagagacctgatattgattcctaacattttatcaatacagccttttaaaaagttggaacgagttatgcctttgacacatttctaactcatttgctactgtgatcgattgcgcaatatgtcatcgactaccatataaaaaaactctgtcgtaaggactgtctaaactatgtgctattcaagatttgaaaaactttaaacgtatttgatgagcctgctttatcagaatttgagtttgatccgacatgatctgaacttgatttgatcttattatgagaagatgcctgagcttgactctgctt

SEQ ID NO: 155287 - DNA, 476 bp, Glycine max
  unsure (1)..(476): unsure at all n locations
tgcagcatgcaagctgttatcaagagaatattacttatgaatctcaattctttntattacaccttcaagcttatcaaagtaagtttggaaattgcaatgtatcattttattatcacgtcatcttatgctattattgtcttactgatagatatcccgtcatttagcttgctgtaatggcatttattaccatgaccattttcctccggaccgagatgcacagagactcattgactgatggcggcatatatgtgggtgcaatggttaatggcattgttacagttatgttcaacggactggctgaaatttccgtgatcgtttcaaggcttcctgttttctacaagccaagggataatatatttgttccttctggggcatatgcactttcagagtggatcctaaanatccccatgatgtttgcggaagtgggagttcgggtgtccctcatctactatgtcattggatctgaatcatatatt

SEQ ID NO: 155288 - DNA, 323 bp, Glycine max
  unsure (1)..(323): unsure at all n locations
accaaccaaatggcagtggtgaaccctgggaagatctaccaatctccctttcctcgatggtacaaccccaacacaacctgtgcttatcatggaggtgtcccaaggcattcaatagaacaatgcgtggctttcaaacacaaggtccgaagtttgattgatgcaaggtggttgacattccaagaggacaacctaaatgtgaggatgaatcctcttgccagtcatgggggatcggcggttaatgcagtggaggaatgtggacctcangggctgaagcggatggaagatgtgttaacctctangaggttcatattggaggcgttgtg

SEQ ID NO: 155289 - DNA, 473 bp, Glycine max
  unsure (1)..(473): unsure at all n locations
cttctacttatgtggcagggcgggcttccttcactttcttgtcttaacgcgagctctgaccactgttcttccttcccgcgatgcttcttttcatatccgcctgagtgggcttatagcctaaaccatacttcccacgatttccttgggtttttatcaggctagttatgccgccattttctttgcctaaacccatcccgggttcataaccgttccccaacataactcgggccatcattaccgccgcatcggacagacaaggttgcccaaagagggagtccacggaggaaatgctgaccacctcaaaagactggaaagcggtttctaacgattcttctgcggcttccacataaggcatggaggatgggcagcttaccaagatatcttcctcgcctgacacgatgaccaagtgcccctccactacanaattcaacttttggtggagtgtagaaggcacaactcccactgagtggatc

SEQ ID NO: 155290 - DNA, 351 bp, Glycine max
  unsure (1)..(351): unsure at all n locations
gctctgaatactgggctgttacttatactagatctgaaacatctgcttaaatgtctgcncttatgaaaaatacgcagagtgcttattacaaggattaagcactatataacctaagtgcaaagttctaaagccagaatattattttgaaacaataactgttttctcacgactgccttntaaataatgtactaccttatacctatgtgagttttcattgataactttttcattcgttcaagcttccttactctagaatgactatagaaatactggtctactctacagatactacatcccaatatgncgttttaatgtatgttcttatgaaaaattgttaaggtgctaattaca

SEQ ID NO: 155291 - DNA, 490 bp, Glycine max
  unsure (1)..(490): unsure at all n locations
agctngcaaaatgggtcggacaatcttcgagtatctaccagatngaagaacaggtggtcatgagctgacctaaggtacataacccctcaatctcgaaggcaaagcttggagagactaaaaggtgtaaatgactcagtatttatataatcgaaggatacacaatccctcagtctcaaaggcaaagcctatagagacgaaaaggtgcaaatgacttggtatttagacaaccggagggtatatagcccctcagtcatgaaggcaaagtctgaagagattaaagtgtaaagaattggtatttagacaactggaaggtacacagcccatcagtcttgaaggggaagtttgaagagattaaagtgtaaatgacttggtatttagacaactganaggtacatagccccttgattttgaaggtgaagcctaaagagattaanaggtgcaaatagctctagtatttagatgaccggtacacagcctctcaattttgaag

SEQ ID NO: 155292 - DNA, 425 bp, Glycine max
  unsure (1)..(425): unsure at all n locations
tcttaagaggtgaacctatatctgtcatatgtaacttgggtatgtgtagaagtaacctatcttttcttatgaaagatcaaaccacagggttagaacagaagtattgacaaatacaccgaaaaagcaaactataagcttaactgggcgcttagcgcatcaagctcgcgcttagcgcaccttataaaattactcatggcctaagggcagcggactcgctcttatccttaagacacaaaatattnttctgcagattaagcttagtgcaacaagctgggcttagcctaagtcttaacaattttgacacagaagaggacttgagcttagcagagcatggcgtgcttatgtcagcctcaccaaaatgacactcangcttagcgcatatgtcgcgccttagcctaactacaaaactcaaaatataaatgaga

SEQ ID NO: 155293 - DNA, 444 bp, Glycine max
  unsure (1)..(444): unsure at all n locations
gcccactattntccatagtttaatactgggaatgggtctactatcattgtcatcgttttttcgtcattgaggtgccacttgagctgccaggttctccacctttgggcgtattctttgaaagatctgtgcccccttttttgcacatgttntgtagttgcatcttatccgaagccattataccgaccctgcctaacgaaggcaaccattaggtcctcccaggaatggactcgggaaggttccaagttagtgtaccaagtaacaactaccccagtaagactttcttggaaggaatgtatcaacaattcctcatcttttgcgtatgcccccatcttccgacaatacatctttagatggttcttggggcaagtaatccccttgtacttgtcaaagtccagcaccttgaacttgagaggggtgatgatattgggtactangaacaactct

SEQ ID NO: 155294 - DNA, 468 bp, Glycine max
  unsure (1)..(468): unsure at all n locations
ctcagcttaacatcagaccacttccagggtgctggaactacttcacatggactngatggggcctatgcaagttgaaagccttggaggaaagaggtatgcctatgttgttgtggatgaattctccagaattacctgngtcaactttatcagagaaaaatcagacacctttgaagtattcaaggagttgagtctaagacttcaaagagaaaaagactgtgtcatcaagagaatcaggagtgaccatggcagagagtttgaaaacagcaggtttactgaattctgcacatctgaaggcatcactcatgagttctctgcagcaattacaccacaacagaatggcatagttgagaggaaaaacaggactttgcaagaggctgctagggtcatgcttcatgccanagaacttccctataatctctgggctgaagccatgaacacagcatgctacattcacaacagagtcacact

SEQ ID NO: 155295 - DNA, 505 bp, Glycine max
  unsure (1)..(505): unsure at all n locations
atccttagagtcacctgangctgcagctgcacaaaagaactaaattatttttgttaaaatgaagtaactaactaacttcaactaatatatatggntactactcagaaggaagggatgggccttgattagacccatctaatcaacctaattaaactaactacacaaagcaaaccctaaatttgcagcccaattactcaagtgcaaaggttctgacttccaagcctaatttgaacctcgaaatggcagaactgacccaagcttatttgttacaaaattgaagatcattntcttaactttacagggactactcacatagttccattggagttctatagtatcctatagtccctgcacaaggtagataggtcaagtaagcaaaaaaaatccaaaaataagccacaattatcaattaagctaaaaataagagtcaaagaggtttcaattgagctaanaataatagaaaatactaaactacaaatactcaatcacattctccacactttat

SEQ ID NO: 155296 - DNA, 454 bp, Glycine max
  unsure (1)..(454): unsure at all n locations
tttaagggtctaatgcactttcccttagactcttcaatntttctcatcanatttatgtctatgctaccacattctaccatcaataatggtaggaaaatgcacattgntgatttagttgcttctggttctgcacttgaaattgaatatcattgttttaagctgatgacaaccacaagcacgaaccaaatacaatattttcattttttttgcatattgttggatgttttcaatgattntatctctaaggcatgattttctaggattccaagcactggtttgagtatcagtactcatatggtacattatactagcatatgaacaagtgcactgttaaatcatataaacatccttttccacattntatatgtgtaaatgattgcatattattatnggtatcatccttttgttatggttgtgtgaagtatcatttctattctacacaatattgatcact

SEQ ID NO: 155297 - DNA, 426 bp, Glycine max
  unsure (1)..(426): unsure at all n locations
atccttaagtcaccgcggctgcagctacanactactagaccggttagggtacgtactctgctnttactgctccaacatcatccatagatgacccccacttgtttcgtgtcatcccgttaattttaattcatatatactttcttttttatcatgatcatattgatatttaattgtctgttcttgggttagtataagaatttatctttatttcatacttcttgttgaattattttgtttggtggtgtttatgtctaaatatcattgaaggatgatataaaaatagtgattgcttttgctctaatcatttatggctaatgataggatggagatgggtttagtaaagtttatttgtggaattcactaaacccatatgttataagataaaggactggcanagtattgaaatattgttttaatgccattaaa

SEQ ID NO: 155298 - DNA, 445 bp, Glycine max
  unsure (1)..(445): unsure at all n locations
atgagacatctcttactatcatagctacattatctaaagcttcttcttcttcttcttcttcttctaagcatcatagagtagagtcacatgaactatcatttgctcttcactcatcttcttaagattgtcagtcatgtcatatcgaatactacgaagttggagaagacactaaataaacaagtagttgtcggcatcctttgtaaagcaaacacaagcatcattgaagtgatacttcctaattggatgtaacacttgaatgaaattgcggtgcacaaatntgtcacttccatcataaccagaggtggaggctcttagagtgcccgtccacacaatctgagtctataagtcttgcatagaagcatangagccataaagcttctaccactgatagggactcaactgagacggcagtgctacttcacctcatctgcttgagaatctctca

SEQ ID NO: 155299 - DNA, 390 bp, Glycine max
  unsure (1)..(390): unsure at all n locations
agctntgcaangggggaggtttgcttantatctatgtgtagctcaaacacatagagataatggaagaggtcatccaaggatggtgacaaagatggcaagaagagcggcaaaggcggttgattattgtcttggacatatattattattattattattattattattattattattattattattattattattattattattattattattattattattattattattgagaaagacaaattctgattaaggaacaagaaaatatataatcgtaacacatgagaacaggagtatcgttgttattgaagatcaagacaatgagattacagtgtgtgggtttagcattctcgtcgcacttaacctctttaactaactcccttatataagagt

SEQ ID NO: 155300 - DNA, 476 bp, Glycine max
  unsure (1)..(476): unsure at all n locations
gggatggtggcaagtgtgcattatagatactaatatntatctagcacatatatctatatatctatatactatctaataaaagagatgtacctggaaattcctattgtgcccatacctaaaagcttgacacgtgtacgcctgtagttgacaaagttggaatgttaaaaaattagagacaacttttttagattgacatgtgttttgctatctgtccccatcgttttatattgacatttctctctctacttctcccatggagtctggaaagttcccgagccttctcgctctctcataccgcanacatgtccaactgaacgagaaattagagctagtgctttgggaggagtatcgattcgacggttgaagatgcaaaggaaggcaccacactaagtaagggtgcgagaatgggaagcgttttacctcacatggacagagaggttcgctagatacgacaactctgcatggctctgtgatct

SEQ ID NO: 155301 - DNA, 414 bp, Glycine max
  unsure (1)..(414): unsure at all n locations
agcttgatcaagggtaactttgatgcatccatttatgaanggagaggtacaagctttggagttatcttcaaaaacaacaatggagaagtccttgcagcagctgcaaagatcctgccttattttccagcctcatattagggaggctatggcttttcgctaggccattgaaactgctcattcactacttctccccttaaccatctttgaaactgattgccggagattattccttgcttggaaagatagatcctcagctgattatagctacttcgatggaatcattcatgctatgcccatgtgctacactaggattcttcagaccttntaatagagctgtgaattctctagctagattagncttttttattaatgattatgtttggattgaagaggttgctcctcacattttgaata

SEQ ID NO: 155302 - DNA, 434 bp, Glycine max
  unsure (1)..(434): unsure at all n locations
gtggaccctttatgcnagngctttccatatgcatacgacttctatatcagagactagctcttcctgttgtggatctatatcacgccttgttgttgcactcattgttgtctatagaaacatgcttggtgtgtgtgtggcaatcgtgccacaagcttttttgttatattctttaggcatatcatttgtatgtgtagatgcacattccactaccatgttgtagtagttgatataaatggctactatgcttgtctagtctaattcctaacaatagattatcttttaaaaaatgcttatttcaacttgctcataaagctttctcacaagatctctgataactaatcacctctgaacttggcttctataaattactgtaacatctgtaccaatatgtttaaggttgttttatttgcgagacaaacttctttctctatgat

SEQ ID NO: 155303 - DNA, 403 bp, Glycine max
  unsure (1)..(403): unsure at all n locations
agagtccaggttgaaggagtcataacagaggatgtccancgagaacgaggccaacaaggagcttgaagagaagccgctgatgtacaaaaagaaggcgattgagtagcatgaaaagggttttcataagggcggtaggcaggccgggttcttccctagtaaataaggaccttggacaccatgaagttggtggttatgatggagacaaccatggggtcgtcttggttgatacccttgaagtttctgtcggtgaaagtgacaggacagagactntgtagggatgataggtcaacacagttgatgtccatgtccctgatggcatggaggtgacactttggggactgactggatngccctcgatagtaaaattcattngtaatagtgttgatgacctctctgatattgt

SEQ ID NO: 155304 - DNA, 401 bp, Glycine max
catggacactagcagccatgttctttattaattccatagcttcttctggggtcttcaatttgatctttctccctgcagaagcatcaagaagctgcttggactgcggtctcaacccatcaataaaaatgttgagttgtatcagttctgaaaatccatgagtaggtgtctttctcaataagcctctaaatctttccaatgcctcacttaaagattcatctggaaattcatggaaggatgaaatggcagctttcccttcagctgtcttagactctgggaagtacttcttcaagaatttctcaactacttcatcccaagtcttgaggcttattcctttaaacgaatgaaacccacctttagcgtctccaaacaaagaatactaaaacaagctcaatctaacagca

SEQ ID NO: 155305 - DNA, 488 bp, Glycine max
tgatgctctaatggaggaaaagaaagacggaaggcgttagcacgaagattaaagaatattacacggatatatatggaacttcgaagtgtgtctgatgagactataacgcatcaaagttacaacaagtgttacacatgcttctatttatagactaggtagcttacttgagaagctatcttgagaaaactttcttgagaaacttctttgagaaaacttccttgagaagctagagcttagctacacacaccactctaaaagcgtagctcacctgcttaagatacttccttgaggagctagagcttatctacacacacctctctaatagcaaagctcacctccttgagatgagaagctcgagcttatccacacacccctataatagctgagttcacccccatgacctagtacctgaaaataccacagagtctctactacaaagactactcaaaatgccctggatacaatgcttaaccctatactactagaat

SEQ ID NO: 155306 - DNA, 461 bp, Glycine max
  unsure (1)..(461): unsure at all n locations
catgcaagctaacaaaaggcatgcgaagngggaggaatttctanagctanntctttatgngaacaaacataanaagggaaatggttatattgtagccgatgctctctctcggcgtcaagcattactttctatgcttgaaacacaatngattggtcttgaatgtctgaaaagcatgtatgaatatgatgaaactttnggagaaatttctataattgtgaataatttcagacaatggctactttagacatgaaggctttcttttcaaagaaaacaaagtgtgtgtgcctaaatgctctactatacatttgcttgtttgtgaagcacatgacgaggtttaatggggcattgtggggtccatacgactctatacacatcacatgaacatttctatttgcctcatatgaacaaagatgtgcacacaattctgtgatcattgcattgcatgtaaaaaggcatagtct

SEQ ID NO: 155307 - DNA, 315 bp, Glycine max
ggcagctggatactatgtgtataggagcgaccaccgagattgacaacagtgatgctattaacaccaattacaatgacagctgctgcaccattggcaatgtatgcacaaatgctgacaatgattcttttatgacccaaattcggaggcaatgaaccctgaccagagtcagtagaggaggcgggattaataacaataggctttgagaggacagccaagcatgatttgtctactgcaccgccacataagagatggattgtcatatacataggattgcgaaatggtgttgaaaaaaccatcagtcgacagctcttcttg

SEQ ID NO: 155308 - DNA, 445 bp, Glycine max
gcttgtttacaacacctgtgttcaactaaattcgagtttcttattcgctctactggtagtattaaactatgttgagtttatctcatcttttgtgagccatcttgaatggaattactgccatatttggtttgtatttccttgttgctgatggttttgttggcatttgataattgcttgatgagaaatataagacccgatcagacagcttaccaccggttgctcatcctccttgctaattaacacgataatgatcattgatgtggtgacccagcacgttataaaaaacaaataagtgtgtctggataaacgaagatgaaattcgggttctattccacatcacgaatcatctaacaatgccacaatggtagttattatgataaaactcaatgcatctattggtgtgtataatacacagtggtatgaaacggatacaaatcatgaaata

SEQ ID NO: 155309 - DNA, 491 bp, Glycine max
  unsure (1)..(491): unsure at all n locations
agcttgcggtttttgctctcccaagccacttttggtcgcaatttgttttcatttttcgtattcctactcactccaacaagtaagtattcaatccttgagtttttagctttccattggtgcattatgttcatcttttggtgctttaaattgtgagaatgtgctcatatttgtggggcagttttggggttttttatgcttgatttgttaaagttgaggggttgtaggggatggccttangcctatgttgtattctgaaacaatggggcatgccacattgcccccattctcttgctatttatgcctaaacatgcgcccaccaagtgctcggtgaaatgccccaatgacatatgaatatgantttgtaagattgggattgtgggaactgtttacatatatatggacagcatatgggattcgaaatgggtgcccacatgcaattctaagcgtaggaacccaagcttttagttcaatgcaaggaaacatggcttatg

SEQ ID NO: 155310 - DNA, 440 bp, Glycine max
  unsure (1)..(440): unsure at all n locations
tcacagcatgccccacctcggatcagccacaagtgtgtgattcagaaatgccctctcataccaatacaacaggcccatctgattatccaaagaatgtctagactaatctgtctgtccctcctcacagaaaacatgttctggttacaaatcatgttcctgtccttcaaaattcttatgacctcaaagaaacagggaacactgagttggatgatcctatagaagaggggtttgttcaggtgaaaacaaaacaccagataaaaggtaaaaaagtgcaactcataaagacaacctgtattgtggatatgaaagctgatgtccaaagaggaagaaatcataaagctgtaactagggtcgaggaggcttcctcctgtccgaatccatgatcattgcctcttggaacattagaggctttaattngcctctgaagcatcatgcgatgc

SEQ ID NO: 155311 - DNA, 67 bp, Glycine max
ctgagacgcatttgtagaattgagaaacaccgctatacttagtggcaaaacttaaagttactttaaa

SEQ ID NO: 155312 - DNA, 369 bp, Glycine max
tcttcttctaaatcatattataatcatgttggtaatattcattctttaaaaatcgatgatgtgagctcttaaacaccattaatttttatataacggattaaaatcattcagctcatatcacttcttttaatattaatattaataataaaatcttatttcacaaataccacatcgtatgataaccaatataagagttaaaacctattttctcagcagtgtttgaccactttacctgatttggttgcatgaacccctactcgtgaagttaattgtagttcctgtgttagcgttatgtctcctcggtatcaaaaagcaccaccctcctctcatataacttgtgtccgttctatgaaagaagtctggataatc

SEQ ID NO: 155313 - DNA, 414 bp, Glycine max
ctgcagcttgcggattggtcttgccatgaaatgttcttgtgggtctgaaaaaaaggcaaatttagtcatcctgcttggacgaatgagaaaactggggcaaatgaagagggtgaggatgaaggagaagcccgtgctgtgactgccattccaatacagccatgtttcccaccaacccaacaatgtcattactcagccaataacaaaccttctcctaacccaccgcccagttatccacaaaggccatccctaaaatcaaccacaaaggctacctactgcacttccaatgacaaacaccacctttagcgtaaaccaaaacaccaaccaagaaatgaattttgcagcgagaaagccttagaattcaccccaattccagtgtcctatgcttgataattcaatggtagccataaccctaac

SEQ ID NO: 155314 - DNA, 390 bp, Glycine max
gctctctctctctctcttggttgggaaacaacaacaatcgttggtgtttcttctttattctttgtgaaagcggtgtagcagacacaaatatgaagggggattacaaactacaatggagaatagagtttcgagtccatacattttttgttcttcctacgtgtaatcctactcagtcaatgagtacacgtggcaacatacgtcgtgtgccaatgtgttctgttaacgaccatgtaagcagataacggatcttgactaacaacatggacctcatacaaatacttttgaatcttatggacccaattcgaatgagaaattattatggaccagatgccaaacatgtgtatgtatcagggaccacaaatatatttatgcctacactaaattacatta

SEQ ID NO: 155315 - DNA, 408 bp, Glycine max
  unsure (1)..(408): unsure at all n locations
agctntagtcttctcagaatagagggaaattattattagttttgtgnattgntaattaaagtattggatcaatgtatcatcgtttaccaacaagaaaatttcagctctgtattactatatgttcttgtaatctagagtgatttgtactactgtaatgcatacttaagtaacgtaatattaaagactgtttaaacgttatagctataagtcaccatacttaatctcaaaataaaatgttagtagatattttttttataatttaaaatttataaaaatatattatttatattaattttatttntataaaataaaatatttgttttagaatctgtcatgtaaaattagaatttgtgtcttcttaaaantttaactttagttggtcaatgtagtttattacgtgtttgttat

SEQ ID NO: 155316 - DNA, 431 bp, Glycine max
  unsure (1)..(431): unsure at all n locations
tacgtgaccttagaaactaagctatcaattaaagtgtatatactctagaataaaccaaacttattaacaatttataccaccaagagtacatataaacaaaaatttacagataatagtataatataatgtaatttaattacaaacaaatccaaaataaaaaagttagaagttgtatctgagaactcatataccagcttggcaaatttatgattgtgcaaaagtgcttcatctatttccaatttttgtagtcttcctccaattattataaacaatcttgcactctgtaatcccatccaaattcagataggtgaaacatacggctntcataaatgagtacatggtactcgacacattctaaaattaacattaaattcatcttagatatgtatatgattttaaaatntgacatacagatgagtgnttaatactca

SEQ ID NO: 155317 - DNA, 462 bp, Glycine max
  unsure (1)..(462): unsure at all n locations
ttagagacacctgcggcatgcaagctttgagcaaattcaaacgacaattactnttttacttgatgtcngaangaatcccgtaatatatcgagatgctcgaaattgaaaacagaagctcatagcaattgcaaacgacaataacttttaactcggatgtccgattaagtcccgtaatatatcgagacgctcgaaattgaatacaaaagctctgagcaaattccaacgacaataactcttaactcggatgtctaaataaaacccgtaatatatcgagattctcgaaattgaaaacagaacctcgtagcaattgcaaaccacaataacttttaactcggatgtacgattaagtcccgtaatatatcgagacgctcgaaattgaaaacagaacctctgagcaaattcaaacgacaattactttttacttggatgtccgaatgagtccctgaatatatcgagatgctc

SEQ ID NO: 155318 - DNA, 334 bp, Glycine max
  unsure (1)..(334): unsure at all n locations
accttagaaactcagctgagcaattcaacgactttttctttaactcggatgccttttgatacccgtaatatatcgagatgctcgaaattgacaacagaagctcgtagcanatgcaaaccaccataactttttacttcgatatccgaatgagtcctgtaatatatcgagacgcttgaaattgaaaacagaagctctgatcaaatgcaaacgacaataacttttaactcggatgtctgattgtgtcccgtagtatatcgagacgctcgtaattgagaacggaagctcgtagcaaattccaacaacaattactgtttacacggatgtccgattgagt

SEQ ID NO: 155319 - DNA, 426 bp, Glycine max
  unsure (1)..(426): unsure at all n locations
agctngtagagttaagtctcatatcgggttaatctattattgatatctcataatcaattacactggtgtttgaggcaatgactaatttagtcaggagtctctgctttaatcgattaccaagtggattaatcgattacttttctcttgttcaagtgtttagaggtgaacaagaacactttaatcaattacttaggtcatctaatcgattacatagttcttgagttgttttctagatgttggatgtacactttagtcgattacttagataatctaataaattactttgttaatataatcgattaccttatagatttaatcgattacagacggttataactgttttctctataaataaccaacttgagttcacatctatacatcatgagattattagagaatatttagtacatcttgaaaataacatct

SEQ ID NO: 155320 - DNA, 465 bp, Glycine max
  unsure (1)..(465): unsure at all n locations
cgctctagactacattgatgttngtatgtattggacgaggttgtatgctctctctttgtttaagggtagcatttctgggtaaaactaactttccaaatgttagactttgcacgagatggccccgacgaagcttgcctcaaagatgttcaggaaggacaaggctgtcgaaggaactagttccgctcctgagtatgacagtcaccgttctaggagcgctgtacaccatcagcgcttcgaggccatcaatggatggtcagttctccgggagcgacgcgtccagctcatggacgacgaatatactgatttccaggaggaaatanggcgccagcggtggacatcactggttactcccatggccaagttcgatccagaaatagaccttgagtatatgccaatgcctggccaacagatgagggtgtgcgtgacatgagatcctgtgtancgtgtcagtggatcccgttgatg

SEQ ID NO: 155321 - DNA, 480 bp, Glycine max
  unsure (1)..(480): unsure at all n locations
gcttcctaatttcccaataaacgaatatcttcttagtctcccaattgggaccaaanaaatagaaatagaaagaaacatatctgcttactgcttagacattgtacaagagccaaattgcatgagcaccaagagaaatgcaagcaccagagtatgaagaggagacaccaaaaggatggagaagcatctaggaaggtgaggctaatgagagaataaatagtaggggttggttagtgggagagtcctggtgtctgggaccccattgttattgtgtttctatttcaatttttacatattgcatttcttgttttctttctgtaaattcagactattattcttcaccttcttaggagctagtctccagtatctgttaccagtccttaacacagaatcggtcaagagttaccactcctttcttttaccaaccactagtgcccttgtcttaatataatagataataaactgtgcacaatcacacttacg

SEQ ID NO: 155322 - DNA, 471 bp, Glycine max
  unsure (1)..(471): unsure at all n locations
ntagatacttctccttccaacttcaggttccatagaattgatcatttcctactttctatactgcttttttttttttcagcaagaaaacaataaaagaaagttccagaccaataacttcacaatctattgacttgtcaaacaatatactattatttattttattaagctgaaatctttattttcttagaaaggccatattaagttttaaaattataatatatgaatatagccatggaattttcaatgctgcaggtggggcagtaagattntaagaccaagcaaggttatattagatagcttcattacatacttcttgatgaaaatgttgaacaaatgccatagcacttcagctatcctcagcttctgctaaaatgtttctattcaaacccttangtctatatatcctcaaatttaaaaataaanaataagggatatcttcaatatattgggaataaaatacatgcaaatgat

SEQ ID NO: 155323 - DNA, 485 bp, Glycine max
  unsure (1)..(485): unsure at all n locations
agtcacccgcggcatgcaagcttctaatcctctcaaacttttatctnttgttgtgtaagcaatgatcatgttagtccacaacaaactttagagctataaccatatctcctaacctttgaaccagcagaatatcaatctccaatacttgtctacaattttactcaccccttgcacttttcattcaaaagtactcttcaaaatattatcatcatctacactagccattccattttaaatctctccctctaaattcaacaatcttgattttgcactccaaattttaacaattataaatatgagaaaatggttggtgttaatacacacacacacacatatgctttaaaaagcttatttggtgttgattataataaatactggtgggttacataaatcatccatagttaatgagattntatgaacaagacatgtacactgtgaacttganatcaaatgaattntattgatctataaaatatttttcattc

SEQ ID NO: 155324 - DNA, 493 bp, Glycine max
  unsure (1)..(493): unsure at all n locations
tacggacactatgaaactcagctataagacaaaattcctgatcatttcaaaatgcatgtatttaggaagcatcaacaagaataagccaaggctattgtgcaagcaatcaatgggggcaaaacacaccaaaagattatgatgatggatggctcaaattctcacaaaggtacacttatcactttcaaattgagctctcaaaactatcatgacatgtagaggaataacaaggatttcaaatcacaaaatgtcaagagacttatattttcagaacaattacccattacttgaacatatcctataattcaaagaaaaacatgcaaatttaacacaacaaaactaacaaaattaaactaatntaacacaactatgataaccaaaaccaaagaaaactccnctcatacttaaacaacacattgtcctcaatgtagcacaattaagagattaaaaagcattaaaccatcaaatagaatcggacaaatgtaataatagtaaa

SEQ ID NO: 155325 - DNA, 318 bp, Glycine max
taagaaaatcacaatccaacagaagactatctcatattactctgcacagctgtagagcctaatatccgtggctatatagtgaggttatacataaactgcatcttgatactatgagtcagaatatgctgaggcgatattgtctgtcattccttgctgactctttgtgttcaaaggcgatatatatgggcgtatccctcttcaatatgagataaggaagaccaattccattcttgcggcgattataacctcgtgttgtctttaaataggtatactctgatttactgagtaccaaaaagcgggtcgtagactgcacatgaa

SEQ ID NO: 155326 - DNA, 202 bp, Glycine max
aaataaaacattagtgcaacatactaaacaatatgtttcctgtataatttctaatatatagtgataataccatagaacatatatttgatcaattttcatacatatagattgcaacttggggaaattgctaagaatatttaatctgcactaagacaaaagctatatattgttatggaaagactaggaatcctaactgtttaat

SEQ ID NO: 155327 - DNA, 380 bp, Glycine max
  unsure (1)..(380): unsure at all n locations
cttttcttgcagcaataggattttcttcggtgacctattagagcaaaatgcacaggccttgaatcaaatctccacaaatctttctgctttccaggtgaattgacaacaatgttaactaattttaatttttacctattgtgtggagacaagaccgcttgaccatagattgaacttatgaattagacgtcttatataagtatttgtatcaactatgtggctcagtgttaggcaatttatttttccttgttctctgttgcctatattctcttccgttcttctttatattcatttgttcagtttggttacaattacatgcttttattgcgtgactagtangtgaatttgagtgaaaatatctcttgcgttcatctggttatgtt

SEQ ID NO: 155328 - DNA, 354 bp, Glycine max
  unsure (1)..(354): unsure at all n locations
ctatacgtgtttcctttgatgaatctaatgccattcttccaaggaaggattttttaaatgatatttcatattccttagaagatacacatattcatggaaatgactctaaagaaaaagatgaaggaagcaatgaagattctcaagataatggagttagagcaaataatgaacttccaagagaatggaaagcctcaagagatcatcccctcgacaacattattggtgatatctcaaaaggggtaacaactagacattctcttaaagattnttgtaataacatggctgttgtgtctataattgaacctaaaaatttaaatgaagccataatagatgataattggataatttctatgc

SEQ ID NO: 155329 - DNA, 412 bp, Glycine max
  unsure (1)..(412): unsure at all n locations
caacaaagataactgctacccccataaaatggaaatggaaagagggcaaggtaaggctatgcattcactttttctcccctgtcatcatctacaacttttattttgcctttttttttaaattttgaaacataatccttaaatgtacatggattacccaatgaacttgatcatgacaagaatgggaacaagtgggctcgtattgatattangttgatgcctaaatttttattttcaatgttttagcacattaatattataaacaaagaaagccatggtcatgcatacnatttatgtttgtaaatgaagtcacttgagcactttcttttgaaaaaaagaaacataatatactgctgctggaggctgtgagtttcttngacctacaatttgccgtgatacaacttcatgattacat

SEQ ID NO: 155330 - DNA, 361 bp, Glycine max
ctttaatggtgagtttccaccatggagatgccgcggaagacaaaggagaagatgtgagaggatgcgccatccactatggaataaaccatggaagaaggagctttaccaccaaaatgaacctttgataaagaagcttggagaggatgcttcaatggaggaaaagaaagagggagagaaagagagaggggggagcacaaattgaaggaagaaaaagggagaaagtgaactttagttgggctcacaaacttcattatataattacaacaaggtacactgctttattataacatgaacttcttgcagcttctgaaaacttcttaaacttttgaaaacttctggagctaagctacttcccaccctt

SEQ ID NO: 155331 - DNA, 324 bp, Glycine max
attcatgctcctatggatatttgttatgcgagaagaaagtaatgatctgacctgactagtaaactttgtagattctcccttgaccttgcttcctaaagattctgtgttgattgcatccaacaaatcttctgcgtcatagacaacatctttcaattcatcaacccatgctttcacagttatatgcttctcctcagcatcattgagtacaacattaagtgctaacagctttatctttacctcatccaactcagaaacattcagctctgtgatgaagaagaaatctcgaaattctgttgaagctatcctgtttaataagatctccac

SEQ ID NO: 155332 - DNA, 354 bp, Glycine max
  unsure (1)..(354): unsure at all n locations
actaaaaactaagctggcagccaatctttcgccactccctccaaagaatgatttattgcctttagaaagatatgatcttcctggacatcagggggcttcatggtggaacagacaatatggaactccttaagatgcttatgaggatcttcacctgcaagaccatgaaacttgggcagcaaatgtattagtccagtcttgagaacatatggaacatcctcatcaggatattgaatgcacaagctntcataagtgaagtcaggtgcagccatctccctaagagtcctctcacgaggtggagattgagtcatgttctcagtattgaaaatagcagcagaatgctcaanatcagaatgg

SEQ ID NO: 155333 - DNA, 391 bp, Glycine max
  unsure (1)..(391): unsure at all n locations
ngcttgaagacatgcatcgaatgtaattaagcatggattataaggtgtttgtgtgctgcggtagcaccctgcctcaagacatttccaaccttattatagaaggccattatgcttgtttcctgatacaaaaaattgaaaccagttattgtatggatcaatagaataaaaacacatcatcgtgatagccatgaccgaatgacaaattctaaaaggtcacgagcttcacatctcataaaaactaaaacaactttctaggcaatatagtcaccatttggcaaacataaaanaaacacaaagtaaggaaatcataaatcaaggcaagcacttggtcgttgctcttcnttcaccttttcaatttccttagaaaatacctaattgaaagtaaaacaaa

SEQ ID NO: 155334 - DNA, 256 bp, Glycine max
ttgagtgacactttattttgcttctgatatacattatgtgagtgtgtgaattcatggtggataatccaaagttaaattcaaataccaatgaacattgatttaaaaaaatgttcacatgtttgctcttaaatatgattatgattttacttcatatgttaatttaaccaaattcacagtatgttctctcaatacattatgttcaagttttgaagtttctattaagaattgcaatgaactaattgcattggtacattct

SEQ ID NO: 155335 - DNA, 449 bp, Glycine max
  unsure (1)..(449): unsure at all n locations
tactcaagctgtttatgcataattagggtaggcagatgattttatataattcaagagcacaccacaatgcctatctctagaaaagagctctagaggcagcaagaggagcaacttttgcaaagatacctangttgtgtaatctcatcattgntagggtttttctgtaatggctggctaaacaccctttgtggggatttctaaagaaaatctaatgtaattactttaatatctaattgattgtgtttcttgtgttcaatgcttaatatcagtcttaaattttgtatgctcttggtatgatcaaccacttgtgtgcctagttaggtgactttagcattgtgaaatgtactgttgccncanaacttgaatgaagcagaaattgaaacttagtcttaataaggatctgccngatatagtttggttgaatatgttgtacaatatgtgtttgtcta

SEQ ID NO: 155336 - DNA, 220 bp, Glycine max
acttgtctaatagtccatctaaaacctatcttaagtcttttcttgagacccttgcctctgctggaaatcctgctttcatcattcctgaatgatctttatacttccctggcatcatcaaaataattcttgaagctttgcttctacacttactactctcaaaacatagaaccacgacctcacacgagaactcaaaatacagaggaagaagggaaactcactc

SEQ ID NO: 155337 - DNA, 126 bp, Glycine max
acaattaaaattatactcataaacatattaaatagcatttaacaatgaggaaaaaaatgtcctattccaaaaaatgaaaaaagccaccagaaaatcaaaattaaattgtatttattttctaaatct

SEQ ID NO: 155338 - DNA, 286 bp, Glycine max
tctttcgcacctgtaccgccctgcaaaacatcctcactgtggcgcctcggagttcgggaaagctgcaaaaaacaggggtcttatggatagaaaatgtatcccacaccgaccttctgctcgacgcgaatggtgctcaaatcccgcaggataccaagaaccacaaccacatgattatctctaatgcatctggcgagccgccacagaaagactttaggtgaataacaaggacactatggggcatacctcgagaggcctataaccccgacccaaaagctttctgctaatc

SEQ ID NO: 155339 - DNA, 378 bp, Glycine max
  unsure (1)..(378): unsure at all n locations
agctcgcaaaacagcaaaaacatatatgctctatattatatgtcattagaaactataagcatacattgattatgcatctatttataaaagccatcctaagtacaaaactgtctgttccaaggaaagaatggatccatgaattatgcttatcttatactgagcatattactgttgttccttcttgtaacacattcacagaaaaataagtgctatgaatataagataggaaaatagtgctcatatactcataagtgcaatacaataccaatcagttcaatggtgctagtgaatataaggtaggccaataatgctttacatggaagatattgactagatacatgctgactacctgatatanaataaatataaataaagaac

SEQ ID NO: 155340 - DNA, 358 bp, Glycine max
  unsure (1)..(358): unsure at all n locations
ttctncgaagctcagtgaactagcggaacttagggttttgcctttccttaatggcctcgagggagagattcccgaagaaatatggggaatggagaagttggaggtgcttgatctctgaaggaatttgataagtggggttctacctattaagtttaatggattgaacaacttgagggttcttaatctacggcttaatacgtttgttggggagattccgagttcgttgtctaatgttaagagtttggagggtttgaatttggcatggaatgggattaacgggtctgtttctctttttgtgggaggttgagaggggtgtatttgtctataactttcttggaggacaactcccgaagatatt

SEQ ID NO: 155341 - DNA, 250 bp, Glycine max
tgcaacctgggagagggtgaagatatggaatgttttcttcatccacaatggatatgggaaaggagaagctaacttacatggaaccagtcaaaactgcaaaaaatatactaatgacttgtccccctgtataacacttctataataccatcttccctccaaaccacactggcaaagcataggtacaggtaataaatagacgaactaaaccaaagccaaaccctccagccacaccctcttgcactccaactct

SEQ ID NO: 155342 - DNA, 430 bp, Glycine max
  unsure (1)..(430): unsure at all n locations
cctgtnngtcatatacaacagaagatctgagttctaatctctatcaagcnccccncnatagnctccaacgtgaataggagccattctatggaatatcatgctggttaataataaaaatccagtgtcatgttagggaagtctaacgtagaatatttatattatatagttggccctttgccctctgttctcgaaggaatacatacatattatgtaaattcgttgcgtaatggatttcaaaacgacattgaactcgtgactcatggtcataattaagctgtgacataatacctaagaatactagccaatattttattaccgactagtggcttatgtgctacctaatgtggggggcactgtgccaataatataaataacaagtgctatttgggcacgagattatcattaaagagaattatatcaacttgttctt

SEQ ID NO: 155343 - DNA, 194 bp, Glycine max
  unsure (1)..(194): unsure at all n locations
attaacagggaattggaaagggattgggagatttttgggaaatttgtaaaatcatgtangaggggcaagaaccctgtgataattctctttaattatttccttcttgaagactcattgttccaaaaagattttcatgcaataaatgttattttcattctatcttctggtaagtggtaacagaattgtaacataca

SEQ ID NO: 155344 - DNA, 423 bp, Glycine max
  unsure (1)..(423): unsure at all n locations
ctttgctataaatgtgtggcangaatcgaccctacacattcgagttcttctatgnngcnctttgatttcctcttgtctaacttcatataaagaatgttatagtcctttggaattccatagaaaatccagtcctcactgttgtttgtatatatattacacgaggagaataaaaaaaatgacgaaattacaagcagattacggagagttatgtatcttagtacttcaaggatgggacccaaccattcacattaggtgtaagcacaagggccatctaaaaagaggcaagtaaatccttcctcattttctggcttactttgctgatatgtattctataagatctcattngtttgtttcctaatcacacttgtttctcgtacttacatcattgatagtgacaaggttcttacacgttatgaatatttt

SEQ ID NO: 155345 - DNA, 332 bp, Glycine max
  unsure (1)..(332): unsure at all n locations
aaatattttgttagtatttgctcattctatgtcacaaaagtcaaagctaattaatcatgtttcatttatatgccaaaaataatcacagtagattaaaagaaatagaaaagccaccttctatttctgaaaaagagtgactatttccagtatttccattggtgttgctatcaatttaacttgaagtttcactactataaaaagcctttctacatcggtcaattaacatcagttattgcataaactgatgtaacaaaagcgtggtggcattnttgtaaataaatggagttactaacatcggtttataaaagcgatgtaactacttatgtaacatc

SEQ ID NO: 155346 - DNA, 303 bp, Glycine max
caattctcgcaaactagcaacctctaagcttttgattttgacttgataaaaccttttcttaagtagaggtgtttgatttgatcccatgtttactagaatgaaaagttttgtttgaattaatacttcgatatcctatcatggaggaaaacaagatgcattcatgaagggatgcttacgctatgcatgacacaaatgcattttacggacaatagagcccgaaagatcatcctttcttacttgcaacatttggcaacacggtgcccccatgtatgcatttaagaatgtgatacggaccttctgact

SEQ ID NO: 155347 - DNA, 466 bp, Glycine max
  unsure (1)..(466): unsure at all n locations
acacaaagctaatgaattactttctaggcagtggaggcttatcaacagagggtggtgcataaatcacaggactacttgatgctgatctaattgaagttctctcaaactcttttagtctcattntcagtttcaggtcttgcttttctctttgcaagatggagagaaaacactcaagttttatcccgtaatttaaccccacatatgacctaaactatgcactgtaccgtgtacggttacatggaccaagacccataataaaatgttcctaactataaatggcactcttgctcttaattacataaagcatctggttcttggttgaaatatgctactatattctcatgtgtcactctatcagaaattcttgtggtcgaaaacacatgtcacaatacagnggtgatgacacacttgaatttgtataatatcaatctatgtccaagctgtacccaagtacattttatctact

SEQ ID NO: 155348 - DNA, 202 bp, Glycine max
tactctttgtcaatgatctttccctccaacttatccctttgagttattaactcatgcaaatctttacaatataaatggtcttccatcatcgacttccaataggagtaattttcagtagttaccttaaacatatctccatcatgagtgacaacaccttccatcttgaatcatgcatgatgataggtcccccgatcaaactggc

SEQ ID NO: 155349 - DNA, 277 bp, Glycine max
ctgtaagcccatagtgcatcatccagcttgctagaccaatccttctaagtggaggccacagttttctccagaatcttctttagttccctattggaaacttcagcttgaccatatgtttgtggctgatacagtgaggctactttgtgtgtgacatgataatggcctagcaccttctgcagttggctgttgcaaaagtgagagcccccatcactgattaggaccctatgcattccaaagtgagcaaaaatattcttcttcaagaacttcactatagttt

SEQ ID NO: 155350 - DNA, 334 bp, Glycine max
tcctaaagaaagggctataaaaagttctccctcatattctttatcagcatgcgggtcgattagcaaaaacactattacttggaaatcaggtgtgcatacctagaaacccccgatgctggaacaggatatggatcacataaatgtgtgccctcccaacaaaaaggaacaaaatattggggagaccaaatgccatggcactaggcgaatgaatttagagaaagattagatgatataaagtacggagggaatcgaacaataatggcctaaggtatcaagcaacgcataaaatgcggaacgcccgaaaaacttgggccaaggttcgctgaaagggctt

SEQ ID NO: 155351 - DNA, 307 bp, Glycine max
gatcctttagtcaccgcggctgcagcttaacctattgtctctcacagtctttagaattgggagccaatccaatccttgtgtccggactctcatccacttatgatagtcaccgatgatcccattactgcttcccctaagctctctgtcctttcttcatgccgcatcccatgccttgcaaactccttggagtaccctcgaattgtggtcactgaaaccccgtgcgatgaaaggcgtgatgctttcgtctgatggaactcctctcatggggtagccaagctgtcttatggcgaagacgggattatattta

SEQ ID NO: 155352 - DNA, 394 bp, Glycine max
  unsure (1)..(394): unsure at all n locations
cctgacgcgtgcgagcttcgaaggaagtttctcaaaagcttcttctgaagcttctctttcnataaagagaagcatgtgtagcactcgttgtaactttgatgaatgagagtcttgcgagacatacttcaaagctccactactctgcctcttttattccttcaatttcgtgctcccccctctctctttctctgcctctgtcttttgctccattgaagcatccttccaagctttttatccaaggctcatcttggtggtgaagctccttcttccatggcttattccctagtggatggcgcctgctctcacctcttgtgctttgtcatgcgctgcatctccgtggtggaaaatcaccattaaaggacctcattgacgctcaaagatccagcctccatag

SEQ ID NO: 155353 - DNA, 324 bp, Glycine max
atctgcagaagaacatagaccacagactcttgcaacaggggcagatgcaaatttctgattcatggcaagctgggttacaaggttgaccaaggcattaagttttccttcaagctttttattttaagtagatgaagatgaatccatggccacctcatggactccactaagaacaatagcatcatttcttgcactgaattgttgggagttggaagtcatcttctctatcaaattcctagcctcagtaagggtcatatcaccaagagctccaccactggcagcatcaatcatactcctatccatgttgctaaagtcctcatagaaata

SEQ ID NO: 155354 - DNA, 329 bp, Glycine max
  unsure (1)..(329): unsure at all n locations
gcagcttttttgttctctcccacangttccttctttttcttagcacttcattgagaggtgctgccaatgtgctaaaatccttcacaaattgtctataaaaacttgctaagccatgaaaactcctcacctcggtcacggacttatgtgtatgccattcttgaatagccctaaccttctcctcatcaacttgcactccttttgaactcacaacaaaaccaagaaacacaacatggttagtacaaaagatgcatttttcaagattggcatacaattgttcttctctaagcacagtcaagacagaatttaaatgatcaatatgcacatcaagt

SEQ ID NO: 155355 - DNA, 394 bp, Glycine max
  unsure (1)..(394): unsure at all n locations
atcctgactcaccatataccttgacccttgtgttgattgtcaatccttaccctcggaagcaaanaatgaatagaggggaaatttccaatctgagaaaaagagaaggaaaatttccaatgaaagcaaaaaaagaaaagaatgaaaattccccaatcaaagagtgggagaaagcaaaaaaagaaaagaatgaaaattccccaatcaaagagtgggagaaagcaaaaagaaaagaaaggagaattcccaatcaaagaatgagagaaaggtcattacgaacatgaagaatgaaagaaagctcctgatcanggatctaatgagaaacagaagacatgttcagagaggtctttggactcgacaatatatgaacaatacagaattgtcaccatatgaacaa

SEQ ID NO: 155356 - DNA, 340 bp, Glycine max
tctctctgtttctctcaattggtcttcattcttcttcctcttgttactttcattcttccattttcttacacaaatttcattgctcttccactggtgatgataatggaaggctaagcactcaatcaatccaaggatctactccaaccaaggctaaatttcagttatggtttagtatttctattatttgtgattgtttatctttttcttgaatcctattttttattttcatgattatgaatatgcttaagattgaaaatgaattacgttatggattcatttccttatttcaaaaattaatcacaaattggttggatgatactctaacctaatttgtgatctc

SEQ ID NO: 155357 - DNA, 498 bp, Glycine max
ggacctataaaactcagctgtagaatatggggtacccatcacatgtggtactatgttgctgtcgggcgatggtgcacaacaagcttttcacatgcacaatgcgcgcataaacccaccatcccctgttgcccacctccaactgagctcacgtactcccacgtagcccatatcctcgtttctctcaacaccgggtccccatcaatcctctcaagcttccacaacatccaagcaaaacaacattcaaacagcacatgctatcacagccaagcaaaacatatccaaggcagataactctgctcaacacatcaaccaaaatcacagcttttctcacgtaaagaccacagttacaattccttcgatccaattcgttaaccgttggatcgactccaatattttactggaagtctatagtgtatagcctgcttttgaccgctggatatactgcaaacatcagaactattctgcactagactttcacagccaccaccacagcatttt

SEQ ID NO: 155358 - DNA, 374 bp, Glycine max
  unsure (1)..(374): unsure at all n locations
ctataaatctcagctggttttnttagagggaatctatcttctatttggttcttacctagncccccttattaagaactagctcctttctttctctattacctttagttgaatacacctttattttgttctctatgtggttcttaaccctctcatgcaacttctttacaaactctgacctatatttccctctacacctctttgggttctaggaagcccaaggacaaagtccatactaatgtctacccaaggtgcagatgggatgggtaagggtgtatatagcccatgaggcatcaccctagacttggtttgtaaacaagccacacacctagtgcaatgcttatggacatcntttttcatatggggccaataaaact

SEQ ID NO: 155359 - DNA, 396 bp, Glycine max
  unsure (1)..(396): unsure at all n locations
tttatcaccgctgctgcagcttaagctcaggaatagttggaagatttttttcaattatttttggcttttacatgcccaactcctttgattgacatttgtattgattattatcttaattgttgcatcttagtatatttgatatctcttttgcattatgcatcattattgttagtatgaagaaaattttctggttagaaaaagttctttagaggcaaaaactctgtgttttaatcgattacaacaagttgtctaaaacttaaagagttaagtctcgtatcggtttaatcgattacagtagatatttaatcgattagactggtgtttgagacaatgatngatttttcaagagtctttgctttaatcgattaccangtggattaatcgattacttctctc

SEQ ID NO: 155360 - DNA, 339 bp, Glycine max
gaatgatctttttataaatgtgcaacaagttgatgctctctgtagttacattccagacatggttcaagaaggtgctaatgctacctcctcacatcaaggcaactcaattgcttgcaaaacatctctcatagccaacccatacttaaagctttaaagccacttaatgttaagaatgaggtggtaggttctagtaatagagtttatgtgccactagatacaactaatcaacttggtggtatgtaaagtttagtcaagaattatttctgtcaagaatcgaacgtgggaactactcaaaccatgtaatcttaactttaacacattaatcacttgtactcaatc

SEQ ID NO: 155361 - DNA, 335 bp, Glycine max
  unsure (1)..(335): unsure at all n locations
ctcgcgactgagccctttcttcccttcgcaacttgagttcactattgctaccccatagagctccgcgaaatttgtttggccatactcttccttgcgagccctcttggtctcttgttcaagggctcttgccgtaattgcattctcttcccgtaacccggcacactccttccgaacgtgtgtagcggccaacttgaacttctccttgngcaagtttgccttttctaactcgcttntgagaagttggacttcttcgttctctttccgtgcttcaaaactctcttcgctgacgaactttatacttgcgagcccatctaaacctcgtatatgaactttca

SEQ ID NO: 155362 - DNA, 190 bp, Glycine max
ttggctggcgccctacaatacttgacacctagactgattgacagcgtatgaaggggaatcttaactatgacttgaagtggtgtagggcataaagcctttttatacatatcttttttgaaggaaatcatggttgtgctatgaaaatttaattgacaaagctgagagagcgtaatatatgaaatttagttta

SEQ ID NO: 155363 - DNA, 421 bp, Glycine max
  unsure (1)..(421): unsure at all n locations
cgnctnttgcttacatactacagttatagatctgcctcttatctcgaaagttttatcaattcgattaagttgttcttttccggtgaggctctatggaggttctttaccctattgtcctattggacagagtatgtggggatcataaccttgggcccctgataaaggccagggaactaaacacatacgacttttactatgatgtccgacatatccattaaaattaaactcgaatggngaagttaatactgcccaatgactattcacaagagatacaagttgatagatgcacttttggagagactggatatgcatttttttaccgagtatttatgcaacacacgtgcgatgggcaataatatttgaagtgaccttttcattttgtagtattcaatatcaatgcttgctttcctgattattcttc

SEQ ID NO: 155364 - DNA, 278 bp, Glycine max
tttttctatttactttaaaagtgggtcccaattggattcctaattctcaacttacctatttggaagtgacatcatggcagttaagtcccagctttccattgtggattcagtcacaaaaccaactttattatgttggactatctaacacggggattttcgattctattcccacacagatgtgggaagcactctctcaagttttgtatttaaacctctctcgtaatcatatcatggtgagattggactacattaaaatccatatctatccaacttgatct

SEQ ID NO: 155365 - DNA, 95 bp, Glycine max
  unsure (1)..(95): unsure at all n locations
aagaaaaacaggcnacggacgaagaaaagagggcattttttttaacaacctcactcgatcccccatcagaacctcgtggatacaaatttgcttga

SEQ ID NO: 155366 - DNA, 398 bp, Glycine max
  unsure (1)..(398): unsure at all n locations
tatttaaaatcatctattcattcatctatagatgggatgagctagnttcgtgttatgattntgtggaagaggtattttaacaagacatgaagatgtttcatcaaacttttcaacacagatttaacattcaaagtgacattgctaggaaccaagaatatcctaacacaatgtaaggatgagaaacatctctctctctctctatatatatattatcttttgtatattctgttttctcttctgatctcaccatacaagtagaaaatctatgacgcgatcacaagtattattcggtgccaanagaattaaaaaatcataagaactattaaatccttttcagatcataaatgactggcttatccttcgtatgtagggccgcattgtattccaaccctataata

SEQ ID NO: 155367 - DNA, 160 bp, Glycine max
  unsure (1)..(160): unsure at all n locations
acataaaaatgatccatggttattcttcagagtcccaaaagcatgaaattgtaatagaaaatgacttgaaaaaattgaaaagtgatgggacaaaggtgttggtggtgtgtatttgttaccttcattcgagttcgattntggaaccaaaactttactcgtc

SEQ ID NO: 155368 - DNA, 286 bp, Glycine max
gcttatgtcattctatcgtgaaaggaattgatacatggagtacatctgtaaaacccaaatcacctcatctatggcagacgaatagcaacgtgaaatgcgagtctattgataaaatgtttttttttttattcatttcaaaattgttggttgctatggtaataagatattgtcttttggaaaaaaatttatagggaggatattaacactgttcattcggattcgtgggctatatccattgaaattttttattaaaggaaaataatacgtatttaatggtttgattaat

SEQ ID NO: 155369 - DNA, 199 bp, Glycine max
gagaatgtcaatccttacccttggaagcggaaagaatagaagggaaatttccaatcaaagaataggaaagaaggaagatttccaatcaaagagaaagcaaaaaaagaaaagaaggaaaattccccaatcaaagagtgggagaaagcaaaaagaaaagaaagaaaattcccaatcaaagaatgggagaaagtaaaaaatg

SEQ ID NO: 155370 - DNA, 269 bp, Glycine max
agagcttctgctgtgcgaagactggcacagaagtgagcttgaaaggagccatcctaagagcatgagatgagtctatgagtgattgcgaggttctagaggtggaggagacaatcccactacttgtatgtcttcaatccttcattatactcttctcttcgttgaaaggaagcttcccagatatggagagctaaatcctctattggttcttccttgtaggtactggatgtaaatacccttctatggatttattgacggtatgagtgtgctct

SEQ ID NO: 155371 - DNA, 325 bp, Glycine max
ttgggagcttttccaatccttgggcccggactctcagccacttatgatagccgccgatgatcccattactgcttaccctatgctctctgtccatttttcacgccgcattccatgccttgcgaactccttggagtacactcgcattgtgtgcactgaaaccccgtgtgatgaaaggcgtgatgcttttgtctaatggcgctcctctcatggggtagccaagctgtcttatggcgaggacgggattatatataatacaaccccatgttctcatcataggaacatttggacatcctccgcatgaatatacaatcccgattcttccttc

SEQ ID NO: 155372 - DNA, 383 bp, Glycine max
  unsure (1)..(383): unsure at all n locations
gtgatttgaaacgnnaaaaaccagaatacacaatacccttaagctagccgacaaacaattgttggatgaaatttactaccggcagcctttcacatatgcaggtaatcaatttcggttcaatgtatgcaaatgaaagatgatgctgatgttaacacaatgttaatgtgtaatcatgaattttcgtttgttggtccgattgagttattatgtagcattgctagaaccccagatgatattttaaacttacttcaagctattatgacccctactcatgatgccctgctatattacaatgggaggtgaaacatgtcatgccaaaatgattttgtggtactcgttacaggaaatatccaaaaatttgacttccactggtgtccatggtg

SEQ ID NO: 155373 - DNA, 332 bp, Glycine max
  unsure (1)..(332): unsure at all n locations
gattcaagacttcaagatcaagcatcaagaatccaatccacgattccagagaagaaatcaagaagcaacatgtcaagacttcatataggataagtattaaaaataattttcacaaaccaaatagcactgttntgttttacaaaataattttctcaaattttctaagttaccagagtgattactctttggtaattgattaccagttatcagtaatcaattaacagtgatcaatttggttttcaaaatgttttcaaatgatttataacattccaaaatgaatttcaaatagtgtaatcgattatactatatttagtattgatacaagtgaatct

SEQ ID NO: 155374 - DNA, 453 bp, Glycine max
  unsure (1)..(453): unsure at all n locations
ctaagctttccaataaattacattccatgccacggtattttttttatatattgnnagggatnttcctctccttatactgtattcataggatatctccttgtataagattaagctattcttaatatatatcctggtataagatgaggctctactagcatcctggaagcagcaactggatcgagaagttgagactcacaattaaaggaaatttacatcactcgcacatagtgagtgcctcgcgtttgcttgttaatttaatttgctggcataattgaaaggcatgtttattgcaacatctgcatattttcatgcaaaaacagagatggaggcctatagaacttccttaatatgttatttcattgtggtactaagtattcacaagtatgatttatatatgaatggatgggatccaattacacaatcaatggcactgatgctttactatcggaagtt

SEQ ID NO: 155375 - DNA, 479 bp, Glycine max
  unsure (1)..(479): unsure at all n locations
tactcacgcttcactcttctgactcatgacgtagatccatgtcatttttatgtttttctcaattatggacagaanataccttccaccacctagtgaaggtactcttgcaggtccccaacagtcagcatgaatgtaatcaagagttcctttggtggtgtgaatngctttaggaaatttaatcctatgttgcttgccgaaaacacaatgctcacagaatttaagttcatccagtttctgatttcccaacagcttgttgttttggagtattatcttaccttcttcacttatatgaccaagcctcatgtgccacacattaagttaattaagtatgcttaatgaaatttgatgccacagctactataccatcatcaatacatgttgtaccctgaagtttatagagatacccctctttatacccttctcaccatgtgaagccttctgaatttatgacccatttcatgctgattgaacccttcata

SEQ ID NO: 155376 - DNA, 401 bp, Glycine max
  unsure (1)..(401): unsure at all n locations
gctttatgtttagacactgttngaataatactaatatatattctttttgagataaganaaatagagaaagagaaatagtgatttttttaattatctagatcccactcttcatttaatgaatcttaagattaaattgataaaattttcaagaatgtatgtatagtgttgtaggtaggcgggtaccatatttggagactctccccgcatgccatagttgacataagaatataccccccttttcatgaacagcgctcacaatatgtttccaatcttccagctgttctcttgtccaaatgccaagtgtattatggtatctttgccaacgtacataccgtccacctttatgaaacaaatactaagcttattcaagatatctttggtgacaaatcagatcaattcta

SEQ ID NO: 155377 - DNA, 292 bp, Glycine max
  unsure (1)..(292): unsure at all n locations
ggatacattttctaccatcttcttccaccccgacagagtgtccttcttgaantttgaaatttggcttgttatggaaggctaagcctctctgttggggagctcatctgaacaatcttgaagtgacgctcctactatccatttaatgttattgtcatggtgtcattgcttctatctatgcctatattacgtgcccttggcttctttacccattatgatgcgtagattggatttctagtattgggataagctttataaccttctatcttgatagagcaagctagacatttgtatg

SEQ ID NO: 155378 - DNA, 275 bp, Glycine max
  unsure (1)..(275): unsure at all n locations
aggaaagaagnnnaaccagcgggacattactcttaaagcaaatatggcatataacctcctcccataaatacaaacatcaatgtaaatttagagcaagcttatgcgcatatttccttacaaacgttctcttgcacaaaacattctattaaccgaaaaaaatgcacccatatacaatcaaggcagcttcgttacctaaattatttacacgtacttccaaggtgtatttgttacttacatcacacacatcttcttggcttaattcacatacatgcata

SEQ ID NO: 155379 - DNA, 358 bp, Glycine max
tcatagccaagcaaaacagagcaaaggcagaaaactctgctcaacacatcaaccaaaatcacagcttttctcatttaaagaccacagtaacaattccttcgatccaattcgttaaccgttggatcgactccaataatttactggaagtctatagtgcataagcctacattgtgatcgttgggatctactagcaaacatccaaaactcattctgtactactctttccacaaccaaccacacacaaagcattttctgcacaaagccaaaatcctgctgcacctattttgacagcaaaattctgcataagtgcagatttcgaaaatcacacttcccctcatccaatcttgctcaataaaat

SEQ ID NO: 155380 - DNA, 245 bp, Glycine max
gtaagaaccaaaacataagatcacccagtgaggtaaaagcgtcaagctaatgatgttaaagaatcacttccttggaggcaacacaagtattaattgttgttatctttgtttttcatgcatttaatcatatggaacttgttgtctgatctgtacataggagtatatcaacctatctttgaatgtttaacataaggggttcaatttcttggataaaggactgaaaaataatattgaaaacatttttc

SEQ ID NO: 155381 - DNA, 298 bp, Glycine max
cttaagaagagacctacagaagctagagcttaactacacatacctctctaatagctaagctcgccttcgtgagatgaaaagctagagcttagcttctcacgccctattatagctgagctgacccccatgacacaatacattgaaatactaaaaagaattccgactacaaaaactacgtcaaatgtctctcaatacaaggcttataccctagactactataatggccaagatacaaggcctagacgaagaacaaacctagtctaatattattaagataacgggctcatacttagcccat

SEQ ID NO: 155382 - DNA, 359 bp, Glycine max
  unsure (1)..(359): unsure at all n locations
taaatcacaagactacctgacgccgatctaattgaagntctctcaaactcttttaatctcatcttcaagttcaaggcttgcttttctctttccagaaggagagaaaacactcaagttttatccgtaattttaaccccacatatgacctaaactatgcactgtaccgcgtacggtacatggaccaagacccataaaaaatgtcctaacaataatggactcttgctttattactaaacatctggtcttgggaaatatgcactatattctatgtgcacttatcaaaatcttgggtcaagaaccattcacatacgatgtgataccactgatatggttaaatcatttatgtcaaaccgtaccaa

SEQ ID NO: 155383 - DNA, 307 bp, Glycine max
  unsure (1)..(307): unsure at all n locations
cataangaaggatgtctatagatattctattacttagatttcaatgagacttatctctagaaaattgcttttgatcattaagattttatgaaattgtggattcatggtaggtgcatccacagtcaagcatagttaggattttgcaagacatagtgaagctggttgggctctacactatgcaacataatggtgattgtaagttgtgccatgctatataagagtaaccttatcacgtgtcacaaccatgctggggcatgtaccccactcccatatatgatgctagatatcaccactcatcatatgccat

SEQ ID NO: 155384 - DNA, 372 bp, Glycine max
  unsure (1)..(372): unsure at all n locations
tagacttanatatnttattacatgttattcttttatattgtttgacataatgaaggatgtctatagatattctattacttagatttcaatgagacttatctctagaaaattgctgttgatcattaagattntatgaaattgtggattcatggtaggtgcatccacagtcaagcatatttatgattttgcaagacatagtgaagctggttgggctctacactatgcaacataatggtgaatgtaagttgcgccatgctaattaagagtaaccttagcacgtgtcacaaccaggctggggcaggtaccccactcccatatatgatgctagatatcaccactcatcatatnccattaactttctaaaggatcatg

SEQ ID NO: 155385 - DNA, 350 bp, Glycine max
ccttcgatggtgattttccaccatggagatgcagcggaagacaaatgagaagaggtgagaggaggcgtcatccactgaggaataagccatggaagaaggagcttcaccaccaagatgagccttggataataagcttggagaggatgcttcaatggatgagaagaaagagggagagaaagagagaggggggagcacgaacatgaaggaaaaaaaaaggagaaaagttgaactttgagttgtgtctcacaagactctcattcattcagagttcaacaagcgttacgcatgcttctatttatagactaagtagctttcttgagaagcattcttgagaaaactttcttgagaag

SEQ ID NO: 155386 - DNA, 316 bp, Glycine max
cagaattatagtataataaaacattaattttattattaaaatctcattcctaaataaataatcaatgtgattattttgtgctactggtgttaattttaaaccactataataagagtaatttattaatttttctacgaattaataattgttattatttctctcaatcccttgaaaattcatttgttgtggacaatagttgcactgaaattagaatatatgaactcaacaaattactcaaagttatacaaatgtattctaataaattattaattattaataacctttattgaatacattttttataatctgcattgga

SEQ ID NO: 155387 - DNA, 206 bp, Glycine max
taatcaacaaggataagaaatgagatgaatggtgtcgaacacatctgagcactgaacaaaatgctatatatgtgtagcccgaatggcataacagacgtcgctgtccaatgcaatctgagcgtgggagtcgtcaaatcctcgaattatgatgttagtcgagcgacctgtatttgtctccttctgccaatgtattgaattccggggtc

SEQ ID NO: 155388 - DNA, 339 bp, Glycine max
  unsure (1)..(339): unsure at all n locations
gaggaaacatccgcactacttgtatttcttctatctttcatcttctcttatcattgatgtaaaggaagcttccctgctatggagagctaaaccctcagctggttcttcctatggagtactcgatgtaaatatttgtatatctatctaatgatgctctatgtgttcactgtgctatcaatacttaattctaatgtgcccttgcctcgatcacgcacgtgcatgcttaattaaggtcactcaacattgtggaatggtttgatccttataacctgacaagataacggtagcttattatactttcatgaaacatcanggtttggtaacatagttttggaatgt

SEQ ID NO: 155389 - DNA, 294 bp, Glycine max
  unsure (1)..(294): unsure at all n locations
tgatttacataagnntgtactattccatcttatggaaaaccttccatttgatctaccaaataccatttacatcaacattctttgcaattcaaggaacttgggaggaatggacaacatctactatgctactctcatgaataagctcttatgagatcaaggtgtataccacttatatgataagatggacgataactcaaagcccaacatcatgctgaaaggatctattattgccaagcaacaaagatttaacaaaacaaatcttatagcaacgaaactagcaatgaaagaacaaaa

SEQ ID NO: 155390 - DNA, 369 bp, Glycine max
  unsure (1)..(369): unsure at all n locations
tgtgtgtttatcaagatataccttttgtcttgttccatcagattcgagtgaagtctgacgatattccgaagactactgttatgacccgttatggtcactacgagtatctagtcatgcactttggtgtgactaatgctccatgtgtgtttatggactacatgaataaagtctgtcacccttactntgatagttgtgtggtagtattcatagatgatattgtggtatattcaaagactagagaggaacatgaagagcacttgatggatatgctgcttacccttatgaatcgacaactttatgctaagttgtccaagtgtgaagtttttggtagagaaagatagtttcctatggcatgtgatatctcaaggg

SEQ ID NO: 155391 - DNA, 390 bp, Glycine max
gagagagatcgatcacgagcacatagtttggtcttaaaagaagagttagcagcttgcttaaggtccaaaaggaacttgactcatcgtttgtgcgagacagagatcaacatgttggctatcatcaccaagtatcaataagaactaagtctagccacagcccacgagcatagggtggcaaacgagtatgcccaagtgtacgcggaaaaggaggctagaggaagggtgatcgactcgttacaccaagaggcaaccatgtggatggaccaatttgctcttaccttaaacgggagtcaagaacttacccgattgctagccaaggccaaagcaatggtggacacctactccgccctcgaagagatccacagacttctcgactattggcagcatatg

SEQ ID NO: 155392 - DNA, 336 bp, Glycine max
tatagatatataataagagaacattgactttctaataatcatccatgtgtccttggatgagtctaatgctatttccacaagaaagaatgattttctagatgatattacagaatctttataacaaacgcatattcatggacaagattcttaaggaaaaggagaaggaagcaatgaagatcctcccgtagaagtcacagcaaataatgattttccaagagagtggaaaacttcaagagatcatcctcttgacaacattgattggtgatatctcaaaaggggtaataactagacactctctcaaagatttatgcaataacatggcctgtgtgtctatga

SEQ ID NO: 155393 - DNA, 325 bp, Glycine max
ctaaaaaatagtacgaatgtatacagatcatagggcagagtaattggtgtgatgggttggagataactggagctgggtttcttgggtggcgtgctgatgttatggctgaaggatgacaaacagataacgtgtctctccgactccgaataatgggaagaacctaaaggacaaaagcgacttttgacggtttgcattaatgctactttccttctttttcttcacatgaaagacagccaatgacctgctcaaaaaataaataataaacagtccatactactatttcagtccctggcgccaaaaagaattaaaatgactcctaaaaaaa

SEQ ID NO: 155394 - DNA, 267 bp, Glycine max
ctttcacggtcactgcgtgtaatgccccataatcaacacatgatcttcatgtgtaggccttcttctgtacaaacaagatgggtgaagagaagggactgcggccgtgttgtatcactcccttaacaatcatggaggacatacgtgcctctatgactcactcttgacaatggcgattacgatctgggcgaacatttgtatgcgcggcgtggggacgaagatggatatggtgtttaatattacctgggggaggtactgtggaacgatctg

SEQ ID NO: 155395 - DNA, 384 bp, Glycine max
atctctaatcacctgggctgcagcttccgccatggtatttgatgttttatgataccattattttctttagatttaaggaaaatactatttatcggtgtatgtatctgaaggtcagtgggagtaaggttattttctaattttgtatattgatgatatcttgcttgcagctaacgatcttggtcttcttcatgagactaagaaatttctctctataaactttgaagtgaaagatatgggtgaggtaagctatgtgatagggataaaaatattccataatagatcacaaggattgttatgcttatctcacaaagtatatatatcgataaagtgctagagagattcaagatggaaaggtgttaacatcgcttattctaatttataaat

SEQ ID NO: 155396 - DNA, 351 bp, Glycine max
  unsure (1)..(351): unsure at all n locations
cttcatgccccactttggagcactagcaagctccctttcatgtttgctntatatactccttctttcatgcagaagctcttataatgtctcattaaagtggcgacttttccaagttgaacatcttttgttcctttatagttgacgctcaacaagttcaaaatctctttggttatgttcaacctgcaaatcttatcgtacttatatttggacaaggagcatgtcaaagtacaatgggctttttgttaagctccattacgacaaggtcaacatctatccatttttctttatacctagttatgccaccattcataatgatcagccagagtctgtaccgaatgaacttgatgtaca

SEQ ID NO: 155397 - DNA, 238 bp, Glycine max
ttcacatatcaacaatattggatagggtctcaatactgatactcttgcatactccactcattcatatatgagaagcatccaatgctatagatggacacgatcaatctgcctaacagcctaaggcaacaatattgagggattgcatggaatttaactgcacggtcaattataaaaaataataacacaaggatatacctgtacactatacatacccaatcaagcaccataacatcaatcg

SEQ ID NO: 155398 - DNA, 285 bp, Glycine max
aacgtgggaagtagactgcaaactggggacacaaatggtgttctcatgcaattccagaattcatatacacccttatcctaagactaacacacgtatatatgcatggtatgcaaccttcacacttaactagtaacctttccaatgaagagatttaagttcctaggaaaatttattgtatgatcagatcacatatcaattaatctccatcaatattcatgtacatgacatgttgcgtaatatgttaatttacccaattacataatatgtgatcataatcttagacac

SEQ ID NO: 155399 - DNA, 461 bp, Glycine max
  unsure (1)..(461): unsure at all n locations
ctaagaaactaagccttatatgagctntctgttcattgctactagcatcagtattagtattaggcttctcttccaatatagcaagatcaagatccaaaacaccgagatgaaattggacttgctcattccagtcagagaagttaagcctattaaaaattggtacagatgatacatgagaattcaatgagttgggaacaggtactgcataataaaacttcacataagcattgtggtacatgaaacacaagtcatacatataatttactcaaataacaatcaatgtatattgatgttctcctttgggtgacacaccaacacacaacatacaaacattgatgatgctgataaaatttaacattatttgacaattaaatatgcaccaattagtagtatctatttccttggggtatataaataaaactaatgatacacacaaatcgcctacaataatattcattaat

SEQ ID NO: 155400 - DNA, 353 bp, Glycine max
agcttgaatgaccactcaaacacattactttcatccctcattaaacgtgggaagtagactgcatacttgggacacaaatgttgttctcatgcaattccagaattcatatacacccttatcctaagactaacacacgtatatatgcatggtatgcaaccttcacacttaactagtaacctttccaatgaagagatttaagttcctaggaaaatttattgtatgatcagatcacatatcaattgatctccatcaatattcatgtacatgacatgttgcttaatattgtaatttacccaattacataaaatgtgatcaatatcttatacacaaatttaagtcaaaatatttattac

SEQ ID NO: 155401 - DNA, 450 bp, Glycine max
ctaaaccatggaagcgcctaatatctcttacactttttgtggagggccactcttggatggcctcgatattctcagggtccacttggaccccatttctaccaactacaaaacctaagaaaactatattatctacacaaaaggtacactcctctatatttgcatagacggtgttgttcctaatgactgaaagaacttgtctgagatgacctaaatgatcatctaggctcctactatacactaaaatatcatcaaaataaacaactacaaatctacctatgaaatccctaagacatgatgcataagcctcataaaggtgcttggtgcattagtgagcccaaaaggcatcactagtccatcatacaaaccacacttggacttgtaacagtgttccactcatcaccctcgttcatcctgattggcgagaccactttaagacaattttgagaaaat

SEQ ID NO: 155402 - DNA, 250 bp, Glycine max
cataaaaaggggaaatgtaatgttgttacatgatctgatgatgtcaaaaaaatctacaaggctgcttcaaatgataagcatttacttcaaaaataattcaagattgcttcaacaaacaaagccttgtttcaagattcactaaagaccaagccttgccttaaaacaaagtgctttcaagacatgcaaggctctggtaatcgattaccacgaagtgttatcgattaccagaagacagggttgagaaatagct

SEQ ID NO: 155403 - DNA, 210 bp, Glycine max
  unsure (1)..(210): unsure at all n locations
aaaaacagcgggaagccgaagagnggcgactgcgttttacaacacagacaaagggggggccgacaaagggaaggcacaacaaaataccacacccaacctcaccaagaacaaggggaagagcacagccgccgaaaaagcgaagcctcacaaaaagaacgggaaggaacaggggggcgcaagacccccacaaaagcgcaaacagattggggc

SEQ ID NO: 155404 - DNA, 353 bp, Glycine max
gcccaagtaattgatgcaagacttcaagatcaagcatcaagaatccaatccatgaatcaagattcaagagaagaaatcaagaagcaacaagtcaagacttcatataggataagtattaaaatatgttttcaaataccaaatagcccaatgttgttttacaaaagaattgtctcaaatttctaagttaccagaatgattactctctaataatcgattatcagttggcaggaatcgattaccagtgaccagtttggctgtcaaaatggtttcaaatggtttacaacgttccaaaatgattgtcaaatagtgtaatcgaatacactatattatgaattgattacaagtgaatctga

SEQ ID NO: 155405 - DNA, 355 bp, Glycine max
ttggagcgactcattctacagcggttcactcaagcgtgaggatagagacttcccaagcaatatatcttctctctcagagaggctctctacttggattgagtcaccctatggtggctcactcaagcttgacgatagagacttctcaagctatttatcttctctctatgagaggctctctacttggattgagtcaccctatggtggctcactcaagcttgacgatagagacttctcaagctatatatcttctctctcagagaggcttactcaagcttgatgatagaaaccttcccagctatttatcttctctctcatagaggctctctacttggattgactcactctactgcggctc

SEQ ID NO: 155406 - DNA, 280 bp, Glycine max
taacacctgccctcagtgaattagaagtacttgaatcacaacatctccagtactttgctatcattcctactgcctaacctgagtcttctggtgctatacaattctgaccgacactactagctgatatggccatttatgggttaagaaagaaagcagatgtctctgggtcttaacacttcactgaaactgaaactggatctacttgcagacttactgagcatgtcacttgcaaattaagggcaaaaccatccctagatttttaacacgagtgtgtggtgct

SEQ ID NO: 155407 - DNA, 403 bp, Glycine max
  unsure (1)..(403): unsure at all n locations
tgctgcaccattgacaaatttacttaataaagaagcatttcattgtactccataggcagagacaacattngttcaattgcagaaagtcatgacttcagctccagtgttagctctccctatattccagctgcccttcattctggaaactgatgctttcggcactggtattggagcagtattacatcagaatgaccatccaatagaatttttttccaagaaacttgcacctagagtgcagaagaaatctgcctactttagagagatggtagcaattgctgaagctatagctatgttcagaaactacttgctgggacacaaatatatcatcaaaactgatccaaaaagcttgagatcattgatggaacaacacctacagacacctgaacaacaggaggagttacac

SEQ ID NO: 155408 - DNA, 331 bp, Glycine max
atcttaacgcaaaaaatgtcatgctaatccctctgattttagaacgaactcatgtaatatatttatgcacacgcgtacgtgtggaatatcctaccatttatatcaacatagaggccatccaacacattctaattgtcacacacatatatgcatttgataagaacatacattcttacgctcaaggcattgcgtcaaaattcacacctatattatatcctatacatttgctattacaaactacctacatatatttgaaatatatatcatacaaatttttattgtttcactcacatttattcatattggcaagctatgtacattatgcacacac

SEQ ID NO: 155409 - DNA, 334 bp, Glycine max
  unsure (1)..(334): unsure at all n locations
actaccgggactngaaccgagccagcccnatagacaattgtcccctgccacgcaatgatagagagggaggaaagacaaccaaggtcgccctcatcataagtatggaaggcgtctcggcgcataaccaaataaagatggcacccgaacgagtagagaagaccactcgacgcaccctatgggggacatactgctataaagtgaacgccacacgacgagaaaaggccggggcaaccgagcagcgggtcatggcggcgttgctccaagagacgacgcataacgaaatagagggccacctagacgacaagaacgccaaggctcgaactgaggaagaaca

SEQ ID NO: 155410 - DNA, 425 bp, Glycine max
  unsure (1)..(425): unsure at all n locations
gatggaaantccccatgaaatatgtaatgttggcgatttccttctctcaaattgagcctgcagaaagtctttctatttaatgcaaaactacagaccggagctgattttgatgatgtaaaccatcttttttctggttaaatctattacaatgtatgaattgatgtattatatctacgattgaaagatagatagctaggcatagaattattcattttgtaatttgtacatgagaatattcattgtcattgacttcagttataaattgtaattgtatcgagaaaattttgatatgaatgggcagagtaattcatgttatgtcagctgtgcattaaacatatccagtagatactatgaatcagatgtaatgtcatttatgaggctgcaaacagaattattatggtcacatcatcttatgttgtactatc

SEQ ID NO: 155411 - DNA, 426 bp, Glycine max
  unsure (1)..(426): unsure at all n locations
tctaagctggaggcctgatgntagatgatgaggaactaattattttttttctaaagnttaaacataattgggttgggcacagtactaatagtaatgtatttaaaatgagtctgctttttgacccccttattaatttgaggagccccacattgcccaagaaaaatcaataaaatttgctaaagagacagaagcaaagactgacattaaatttgaaacggtaataaaagagtgtttggatgttgaagggtctgtagtctgtaccttaagggacccccaaaatntaaagcatcactgactaaaatcctacaggattaggtgcatcctcatttactggcaaatgtagcaacccaaagctgtaacgaagaaacgtctacttccttccttgcttggctttccaggacttaatttcaaacacacaaacaacac

SEQ ID NO: 155412 - DNA, 412 bp, Glycine max
  unsure (1)..(412): unsure at all n locations
cttctcgggccttcctgcgaagtttttttggaagttagtttacaagaaatacaacaatcattacaaacaagggccaaacaacacttctcatggcacgagcgtcaacatgcactttataaaataatcatattggcgtcgtgctatgttatgacacatacgtatttgcacacataaaaaaaaatgtgtgtgaagcattttacgacacctattcatgtacatatgttttgacaaaccttgtcatgctacatcctatatatatatacacatgttttgaaaggcttctttcgttacctactcacaaatacacatattttgaataacactgttacgctacccatacaacaatttgaatgcacttcatgctatatatattcatattatgcaaagcattntcatgctatatatattcata

SEQ ID NO: 155413 - DNA, 329 bp, Glycine max
gagtacatgagctcaatgaaggtgggctactggggatggtgggtttatgtgtgatctgtggatgtggagaattgacttgcaccatcatcctaccgccacctaataccgcatgtgatggataccccataatcctacaagcttgaaatgaggaagtgtggaatggtgagacttcctacttttattcgttgaccacagaatggtaactggagatatgtgccggcggtcagaatacctctgggacgtcatgtggggtgctattgcgcgaaaccaaacttgaccaatcccgacaccacccacgcattagcagtcaatgagatcctgtgatgacc

SEQ ID NO: 155414 - DNA, 294 bp, Glycine max
tcaagaaagcggcgaaggatatatggctgggggaaagaaaacataggtgaaagataagacacagggttgggcgggtgtcttctgaaacaagctgtctcagttctataagtaacaaaaggtgaagttcgtttccagtcaatacatgattaatttgggtttcccaataactctttttttcaatctaaagtgaaacacacgttattttacagacaaaatattccatctaatcgcttttcgactttcttaattcattattccactcgatttaacttaacattttaattcgatataatc

SEQ ID NO: 155415 - DNA, 373 bp, Glycine max
tacttgtgagacattagaacttgattgtaaatttactcactgagtgttgtaaagaatctttgattctgtatcaaacttttgtatgtgaaagtcaggagtggattagtaacaaaacaatacttgagtattcctaaattcaaggggaatctaagggttgtgtcaatagtggcttgagaatacttgtaagctagaagtggcttgaaagaatacttgttgtaatcaaatttgattagtagaatcctttacttgttagtaaaggagaattggacgtaacttaagttgagtgaaccagtataaaaataagtgtttctactactctgctttagctggtcaaaatatttgtaaagcgtattattaacacatctttgcacac

SEQ ID NO: 155416 - DNA, 350 bp, Glycine max
  unsure (1)..(350): unsure at all n locations
ntccattctcttgccttaagagagagncntgtgtcttctcattgtgtcnaaaagacataaaaatgatccatggttattcttcagagtcccaaaagcatgaaattgtaatagaaaatgacttgaaaaaattgaaaagtgatgggacaagggtgttggtgttgtgtatttgttaccttcatttgagttcgattttggaaccaaaactttactcgtcttgtttccaaattaagccttttgctgagttcaagcctttgtttctcatccgggcgaggaaactccttgaagagcctaaaaaaacaccagaaaacacaaaaacacagaatcaataaacccctccaaaagacagtcat

SEQ ID NO: 155417 - DNA, 353 bp, Glycine max
  unsure (1)..(353): unsure at all n locations
agcttaatataatccatccttgtttatattcttagtacttgtgttacattagaacttcattgtaaatttactcactgagtgttgtaaagaatctttgattctgtatcaaacttttgtatgtgaaagtcaggagtggattagtaacaaaacaatacttgagtattcctaaattcaaggggaatctaagggttgtgtcagtagtggcttgagaatacttgtaagctagaagtggcttgaaagaatacttgttgtaatcaaattngattagtagaatcctttacttggtagtaaggagaaatggacgtaacttaagttgagtgaacacagattaaaataagtggttctacctactc

SEQ ID NO: 155418 - DNA, 178 bp, Glycine max
ttattcctatggagggtgctttaccttttctttgcttcacgcattctggggaaaataccattaaggactcttgaagctaaaatcacctcataaactcacagcagctcatagcattcctgatttggccaatctactggagggttatcaagcctcggttgatgctatcctccctggaagg

SEQ ID NO: 155419 - DNA, 265 bp, Glycine max
  unsure (1)..(265): unsure at all n locations
ctcctttaattgagataaatggaattttaaaaatgggaacattgggttacttgttttcnggattttatgtacgattgggatgtattctctgcagaatggtttgtgatagtggcttgtgtggtgcctggtgtttggttcttgtatgccgattgtgaagcatattcttgttttcaccttactttgtatgcatattgctattatcaagttgaaagataagacttgttactccctgtaatccttttttatcatatttggcacatggatc

SEQ ID NO: 155420 - DNA, 296 bp, Glycine max
gaatgggactatgccaggttcacacacgttgctgataaatgtgtggcactgttgatgtgtgatatggctcatatcaatggtcttgtagcggctaaagtgatttgatttttctgtcttttctcttggttctgtgtgaattatgttatcgattttatggttggttatgcactctgatttaattttctttggagtgtaaaggcacttgtattgtatgctttataactattaaagatggagttgatataacaatttatgtgcctgtactatgaaccaacatcttcagacctattcctgtc

SEQ ID NO: 155421 - DNA, 263 bp, Glycine max
caggtgagaatgtcaatccttacccttggaagcggaaagaatagaagggaaatttccaatcaaagaaaaggaaagaaggaagatttccaatcaaagagaaagcaaaaaaagaaaagaaggaaaattccccaatcaaagagtgggagaaagcaaaaagaaaagaaagaaaattcccaatcaaagaatgggagaaagtaaaaaatgaagaagaagaaggatagaaagctcctgatcatggatcgaatgaaaacataagaaatgtg

SEQ ID NO: 155422 - DNA, 385 bp, Glycine max
  unsure (1)..(385): unsure at all n locations
tgagagctcttgctgtgcgaagactggcagagaagtgagcttgaagaggaagccatcctaagagcatgagatgagtctatgagtgattgtgaggttctagaggtggaggagacatccccactacttgtatttcttcaatccttcatttttctcttctctttgttgtaaaggaagcttcccagatatggagagctaaatcctctattggttcttccttgtaggtacttgatgtaaatacctctttatgtatttattgatgttttgtgtgttctctgtgctatcaatacgtcattttagtatgcttttgctttgatcacgtanatgcatgctttgttaggatcatttaacaatgggaacttgtctaattcttanaatttgataggac

SEQ ID NO: 155423 - DNA, 237 bp, Glycine max
tattaaccaagaaaaatgcacccatatacaatcaagggagcttcattacctaaaatatttacatgtacttgcaaggtgtatgtggtatttacatcacacacgcctccttggctaaatttacatacatgcatactcaaagcatttcggggtaccaataattgcacatgcgctcatcttggtatttctaatacctatacatatacaaacttcatgatgaatcttgactacctacgcaat

SEQ ID NO: 155424 - DNA, 296 bp, Glycine max
agctttgtctccctaaaagccttttaaagggcctactcctttaaatgtgtctttccgcagttattgtctaaacatagatttctaaacaggcctaaaatcaacacgtagctttattacctctctcaaaaataaagagatcattaatggtccaatgccttaatgttttctctcttctcaaaaagaatcgaaagattgtgtaatggtccaacgccttaaatgacctttcattcgtaaaaacacatcttgcaaataggatgaaaaataacttaaccaaacgctgtgttcacaaagaacta

SEQ ID NO: 155425 - DNA, 395 bp, Glycine max
  unsure (1)..(395): unsure at all n locations
cttcgtctgcacaaanaccataacagagtttaagtatntttttattctgccatgaaaaaatagataaatacacagaaaagaaaaatcaaaaaaggagggagagggaggatatagaaggattatataatgggagtatcaaaaaaatggtattgaataggctgaatgaacaagctgggttcttcctcagaaaaggggctctctagctctgttttttttttgtttttttttcttggattgcagccttgtaacagatttatacccctatgatacagctctaattcagtatcaacattactntagttttaccattgcaatatcaaaagaaatatntacatctaaaaaataccatggttatttacataaatactcagcatcatagttattaatctcggata

SEQ ID NO: 155426 - DNA, 362 bp, Glycine max
taatcaaccacggcagagcaattatgacctttccagcaacaaatacaaccctggatggatgaatcaccctaacctcatatggtccaaccctcatcaacaacaacagcagcctgctccttccttccaaaatgctactggcccaagcagaccatacattcctccaccaatccaacaacagcaacaaccccataaacagccaacagttgatgcccctccacaaccttccctcgaagaacatgtgaggcatatgactatgcagaacatgcagtttcagcaagagaccagagcctccattctagcttaaccaatcagatgggacaattggctacccaattgaatcaacaacagtcccataattctga

SEQ ID NO: 155427 - DNA, 391 bp, Glycine max
  unsure (1)..(391): unsure at all n locations
tncttagaagattcctagagaagctagagcttagcttcacttacctctctaataactaagctcacctccttgagatgagaagctggagcttanctacacaccccctataatagctaagctcacccccatgccaaaatacataaaaataaaaaaagtccctaccacatagacaactcaaaatgccctaaaatataaggctaaaaccctatactactagaatggccaaaatacaaggcccaaaagaaggaaaaatctattctaatatttacaaagaagagaggaccaaaccttggtccatgggctcataaatctaccctgnggttcatgagaaccccaatgccttctttagcaactctagcccaatcctcttggagtcttctatccaatactc

SEQ ID NO: 155428 - DNA, 366 bp, Glycine max
  unsure (1)..(366): unsure at all n locations
ttgagatgatttcgcatatccaatctaattggtatcccaaaatcactaaatgcctatggtgggtggttatgtttaaatcatgcactaaaatctcgtcacatattcgagggaagatgattatcaagttgtctatgctctgtccgtcgatcggatatataccaaactaacaaagtgatgagatcacggatccaaactatagacgactgaaagggtacacatcttataatttcaagtgtatgaaaaacaaactaatgtgtttaggatgagccaatcaaacatgaaaggggtacagattgtaattataatantaaatatatttatgtatttatgatatggtatactaaatcaacatcataggtctagcac

SEQ ID NO: 155429 - DNA, 435 bp, Glycine max
  unsure (1)..(435): unsure at all n locations
atactaagctaagcagctcgttgaactatactacgcagaatggtgtttaaattgttggaaatatttcgcgtattagtgctatgcctatttaaaatgtgtatataagtggaagaaacaatctctaccatattagtntaattaatttttagttgaattagactcaatttattagtggacttatgtacaatttaggatgtgtacatatatntctgactctgataaaattacaagtaaatatcttgattttttatttttattttgccttctctaatttattactccaatttaggagtactantattgaacacattggtttccagttttcactccccttgaagtatttaatctttcaccaataatagtagctgctacatagctgtcttgcccctaccgactcatgatcttaatatgtcacttattcaaatgcaaatttaa

SEQ ID NO: 155430 - DNA, 245 bp, Glycine max
  unsure (1)..(245): unsure at all n locations
gagacgcncgaaattgaaaacagaagctcgtaacaaatgcaaaccacaataactnttaactatgatattcgattgagtctcgtaatataccgagacgctcgaaattgaaaaataaagcttgagcaaattcaaacgataataacctttaactccgatgtccgattgtgtcccgtaatatatcgagacgctcgtaattgaaaacggaagctcgtagcgaattcaaacaacaataaattttacacaga

SEQ ID NO: 155431 - DNA, 219 bp, Glycine max
caccatccccttgtgcccaccctcaactgagctcacgtactcccacgtatcccatatcctcgtttctctcaacaccgggtccccatcaatcctcccaagcttccccaacatcaaaagtatacaacattcacacagcacaagctatcacagccaagcaaaacagggcaaaggcagaaaactctgctcataacaccaaacacaatcacagcttttctcact

SEQ ID NO: 155432 - DNA, 325 bp, Glycine max
  unsure (1)..(325): unsure at all n locations
aagatcaagaggagtntagggggtaaaaccataaacaacttcaaaatcatcaaaagtgttagtggtcaaaatcttgattttgcaaaacaagatatatagtgactgtttagcacgaaacaacctcttgacctcactttttgtggctaaatagctctccctcacttcaagtgtttcactcttcttttgttcactctttttcctctcaagtgtttccctctttttctcactctcaagtgttttgctcactttttctttttcttttttctcttgaagaaagttttctctcattttctctttgatctcacacacttcttgtggactcaat

SEQ ID NO: 155433 - DNA, 304 bp, Glycine max
  unsure (1)..(304): unsure at all n locations
ttttttgttgtccgacatctactaaacggaaccatctttttgtctcctaatacgcttatggtatagatatatgcatgcaacatggcactatgcgatactttaaattatctgtacgtgatgcgaatagaagaattgctctagctaagattgatgaagggggtgccggatgggactggaaaagaattctcatgattctanatatacaattcatcccgcagatccgaaaaaaccgccgtggtatctggagggtttcggaactcaaactataaactttaaaagtaccctatataccctattttaacaa

SEQ ID NO: 155434 - DNA, 307 bp, Glycine max
taaatcaaaagatgtaactcttcacaaagtcttcgactctctcaaatagtgtttatgtgtttctaaaagtcataactcttctaaatggtcttcttgaccagacatgaagagtctataaaagcaaggttttgttttgcattttaattcaatcaattcaatactttcacattcatttgatcaatcctttacaagccttgaaactctttgaacttcttcttcttctttgtaccaaaagctttccaaagttttctggttttctaaaccatgaaaacgtgtgctattcatcttttcattctcttctcccttt

SEQ ID NO: 155435 - DNA, 480 bp, Glycine max
  unsure (1)..(480): unsure at all n locations
tangaacccaaactcgtagcttcaatgcaaggtaactttcttattgctaggaatccaaaaaatagttntagaattagaaaagaatgaaaatagggacttgtttgtaagaatttgggctgccccatgattagtactttgcacctaagtaacatgggaaatgcttttcaatggtgtgtagatatatgtgtaaatataaaggacatgaatttctttgcaaagggtgaaggaatattgaggtcacttcctaaatgaatgtatgatatcacgtgattccctcttgaatgcaagaatgtgcataatgttaattatcttgccaatatgcataagtgtgagtgaaacaatgaaagtttgtatggtatatatatttcgagtgtgtgcaggtagtctgtgatagcatatgttacgacatattaagtgtaattttacgcattgctaaacgtgagatatgtgtctttcaaatgatattttgttatattagat

SEQ ID NO: 155436 - DNA, 334 bp, Glycine max
  unsure (1)..(334): unsure at all n locations
gatccttaagtcacctgcngctgcaagcttggaatcttttctctattgttaattgatattaggattgctctgaataatcaaagatgtaactcttcaaaagtttttgactttttaaattggtttatgttttctaaaagtataactcttctaaatggtcttcttgaccgacatgaaaatctataaagcaagtttgtttgcattttattcatcattaatacttacattcattgatcaatctttacaacctgaaactttgacttttcttttttgaccaaaactttcaagtttggttctaacctgaaactgctttatcttcatcctttccttgcaaaaa

SEQ ID NO: 155437 - DNA, 375 bp, Glycine max
  unsure (1)..(375): unsure at all n locations
aaaaaccacnncgacaacaggccgagggtcacattgttcggcatttattccgtttgttacttttataccccctgttgacgagcttaagccattttacttaagtcatctctcgcttaacttaaaagtaaaataaatttccaccgaacgtatgaattgtattatccgctaacttcggctaaaataaattccgaccgttcggtcgtgccgtaaccaccgtggaaatcaaaaaagagggtagaaataatataataatccaaaagacatcttttagtagaataaagcgggaaatcaatcgggacgcttctctttgtgagttctcattcttaatcgaattgagtaaaacctaaagggaaaccaaaggctaaatcaattccc

SEQ ID NO: 155438 - DNA, 417 bp, Glycine max
  unsure (1)..(417): unsure at all n locations
actccttcaatgtggacctctctagcatcaccatcatcattatctcttctcctcctccttctacgtccatcatcatcgttattctcttgattttctaattgttcaattctcccgctattctcttgattttctaattgttcaattctcccatataactcctctgtgtgctccctcatcatcgtttccatttgagttgtaattgaatcaattagtaacatatagtctcccccaagaggagggttaccgtctccagcatctaccataattcaagcaaaaagaaacacaagtgataggacctcaccactcttactgattggttaccctcttagaaatatattactcngtgttgctgctctcaatangctcttgtgtatgtggtctctttcttttaccactcaattactctcttgacttttt

SEQ ID NO: 155439 - DNA, 387 bp, Glycine max
  unsure (1)..(387): unsure at all n locations
atccttatagtcacctgcngcatgcaagcttgtaaagaacttttttaaatctttttcaagctngnnccacatcgttcgcgtgtatgatatccactccacattgtttgaaatagaggacagcttcaaccctataacgcatcgtggcggacaaaagtgggcagtaaacttgaatggtcgtcattgtcaatgcggaatgtattctgcgcttcactatccatgttcacacattattgcatcttgtggttacgtgagcatcaactactaccaatacatagatgttgtttacacaaacgaacacatcttaaaatcttacttcgcacaatggtggccctttgtgaatgaagcggctattcctcttctaatgacgcatggacacttattcctgac

SEQ ID NO: 155440 - DNA, 295 bp, Glycine max
  unsure (1)..(295): unsure at all n locations
atatctagctcatatgtaaaagtcgctctcatttgttattatgtcgcgaanaataagatgaccaaattcctggtcttaagatttgagtctaacaaacgcttggctgatcgtatttgactttgatgtaaatcatgcttaatctgaggcgaacaattctttttggcttaattaaagggcacgttaagttcctaattaatcatactcgaatgaaacaaattgggtgttacatattttagagcgataacactatatgtccacacaaacatgatgataattcctaggggtgaacttccag

SEQ ID NO: 155441 - DNA, 334 bp, Glycine max
aatctgtacctgttgcaagggtctgtggtttgtgctcctctgctgaccaccatacaaacctttgcccttccatgcagcaacctggagcaattgagcagcccgaatcttatgctgctaatatttacaatagacctcctcaacctcagcagcaaaatcaaccacatcagaacaattatgacctctccagcaacagatacaaccctagatggaggaatcaccctaatctcagaaggtctagccctcagcaacaacaacaacagcctgctccttccttccaaaatgctgctggcccaagcagaccatacattcctccaccaatccaacaacagcaaca

SEQ ID NO: 155442 - DNA, 387 bp, Glycine max
  unsure (1)..(387): unsure at all n locations
tgcttgtggagcttctatggaggcgtggatcttgatcttattgatgtcctttaatggnggntttccaccattgagatgcagcggaagacaaaggagaagaggggagaggaggcgccatccactatggaataagccatggaagaaggagcttcaccaccaagatgagccttggataagaagcttggaaggatgcttcaatggaggaaaagaaagagggagagaaagagagaggggggagcacgaaattgaaggaagaaaaaaaagggagagaagttgaactttgagttgtgtctcacaagactctcattcatcaaagttacaacaagtgttacacatgcttctatttatagactangtagcttccttgagaagctttcttgagaaaac

SEQ ID NO: 155443 - DNA, 342 bp, Glycine max
  unsure (1)..(342): unsure at all n locations
ctaattcctcttgacatcatcaaaatcttcatgatttacaaaaagaacctttaatcctttccttgaattgacccttgataatgcaatgcataattgtccatggctaaagactggttgtggcaaataaagtccaaccataaaaagtgattggccttgagacttgttaattgtcattgcatgagatagcatgattggaaattgtcttctcaaaagtttaaaaggccatggtgattgtgaaggcaacattgacattcgtgggatgtaaacattatggccaagattnttgccagaaataatttcagctgcaattacatgtttgactagtcttgtaactattaatct

SEQ ID NO: 155444 - DNA, 349 bp, Glycine max
  unsure (1)..(349): unsure at all n locations
ctgagttgtatgataagttggtgaagggagatttgtctgatgaggaggatcaagagaagttttgtgtggactttttccgtaagggatatgagcacgatgagttgccaccgctcctgcagccactgagccataatgtgttggtggaaaatgaagatggtgctgttaatgatgatgattctttgatgtctaaattgaagactattgggcctgtgcgaaaggctggagctgttgacaatgctgattataagcgcaatattaggtatcagatttatgttnttgtgttatagggtataccatgttatgtgatgaaaggctatggtattagactacatagattggatggattctg

SEQ ID NO: 155445 - DNA, 437 bp, Glycine max
tcttatccaaggcccatcgagagggtgaagtctcttattctctggcttattccttaatggatggcgcctcctctcacctcttctcctttgtcttccgctgcatctccatggtgaaaaatcaccattgaaggacctcattgaagctcaaagatccagcctccatagaagctccacaagcaagcttccatcaataacttttcacacggatgtccgattcggcgcattatatgtctagaggcttgaaaatacggaagcgcttgataaatgccatgggcataacttttccaccgatgggagctaatgcgcatatatataaactctcataatgacactgagctccggatattaaatggctatattttcatgtgtcgattcggtaataattaactctctattaacatcgacgctctcgaaaatcaatgtataactttcccaag

SEQ ID NO: 155446 - DNA, 371 bp, Glycine max
  unsure (1)..(371): unsure at all n locations
ttctttctcaaccaacctgtctactaactaacaatttttattgtngctcacattcntagtctttctctatctaacatacacgctagctcaaacttatgaaaagggacacaatcttcatcacaatcatgaattctatccaaaatcagtttataacacccatttcacaaaaagataaaagtgtttcactgcatattcatcaagatcaagtcaaactgttccgtatgcttcaaaacatgcatactaactattcacaaaaaacacaagtatatataaacatcaaccaaaatcactaaaacaatgtactgagatataataggtataataatttccaacaagcaaaatcatcatgaatttaaaatcctgagacagat

SEQ ID NO: 155447 - DNA, 362 bp, Glycine max
  unsure (1)..(362): unsure at all n locations
gcttaacaatcaagcttatgaataagctcttactttttttatcaacaaaaatatagtagtattatatataatatgaagatcagtacaagtggtattgttatatatacaacccagcacaatactttgcaaagctatggtgacctaatactagcaatacatcaagaattatgtgaccatatgtttgatcgcaagctatgcacccaaacacagaaaggctatatgctaatccccccctaaacaacaaaaccttccctaatattgctagaccagaagtggaatggagtatgagatcctntntccaaaatcttaaaccatgtccaacagaagaataaagaatccttcatcaattttatgcattaaag

SEQ ID NO: 155448 - DNA, 297 bp, Glycine max
cgatgaagaacgacaaagaatgttcatggaattgttcacagaaacgttattgaagcgttacagaagcgcctcaaccttgatttttcttctttttttctccttcttctcactaatttcagtgaaatgtgcatataaatgatgttgaaccccttcccttcaaccccacacctatttataggaaaatggggggaggaggttacaacatagctcgcccatacgagctggttgcttcctccaaaagcaacttgctcgcccaggcgagctggttatttctccttgaagtcttctaatgagccc

SEQ ID NO: 155449 - DNA, 464 bp, Glycine max
  unsure (1)..(464): unsure at all n locations
aactcagcttanggtgctcattgactccagattgctgcatagaatgtctattattgtatggngatctgcagaagaacatagaccacaaactcttgcaacaggtgtagatttctaattcatggcaagctgagttactatgttgaccaaggcatcaagttttccttcaagctntntattttcagtagatgaagatgaatttgtggccacctcatggactcctctaagaacaatagcatcatttcttgcactgaattgttgggagttggaagccatcttctcaatcaaattcctagcctcagcatgtgtcatatcaccaagagcttcaccactgttagcatcaattatacttctctgcatgttgctaagttcctcatagataaattgtagaaagagttgctcatacatcttgtggtgaagacagctngctcacaatttcttgatctttcccatactattacaactct

SEQ ID NO: 155450 - DNA, 369 bp, Glycine max
  unsure (1)..(369): unsure at all n locations
gaagaacgatgaagaacgacaaagaatgttcatggaattgttcacagaaacgttatagaagcgttacagaagcgcctcaaccttgatttttcttctttttttctccttcttctcactaattgcagtgaaatgtgcatataaatgatgttgaaccccttgccttcaaccccacacctatttataggaaaatggggggaggaggttacaacatatctcgcccagacgagctggttgcttcctgcaaaatgaacttgctcgcccaggcgagctgtntattctccctgaagtcttctattgacccacgtgggcccatgggctgaaaattgccctaattgatcattgtgccccatttggaggatttggttggtt

SEQ ID NO: 155451 - DNA, 300 bp, Glycine max
cttctcacgcccttgtctttcatgggtttgtgaagtttctcaatcacatcaatctttgccttgtccacctctatttcccttattgaaatcttatgccccaacactattccttcttgaaccatgaaatggcatttcacccaattgagaactagatgggactcttcacatcactgtaatactctttcaagaatggataagcacccttcaaaagatggcccaaaaatagggaaatcgtccatgataacttcaatgcatttttccaccatataaaaaaaaatagccatcatacatctctgaaat

SEQ ID NO: 155452 - DNA, 420 bp, Glycine max
ctaaaggataaaatgggatgtcccacattatttccatgacacacatgcaacaatgatgatctggaaattttatgctaaactagtcatgcatgcacctatgcggacactcaagtgtcgaaattttttttggtcatgtgatgctagggctcataattcaatttccctattttagtcaacccagtgtttccaaaatatgttcttttatcaatttgcgcattcatccgagcctatcttgggtgttcgaaaaactgttatagcatttacccttcatgtgtatacacgctctttaaaaaattggttataatcagagaattcttctaaagaaaggtggaagtatctctttcacaacatgtgtttttaacagacaaatttattatataattctttttcctccttcttgcttactactggctccttcct

SEQ ID NO: 155453 - DNA, 443 bp, Glycine max
  unsure (1)..(443): unsure at all n locations
gcaagcttgcccaagcttctagcaccacctcccagtcttttccttttcatgagnatcttgcattgtgttcttacattcttacaaatgtgaaattcacataacaagttggttgccgaagggaagacaacctctaatgcattcattagagcaagaactctatcagcgacaatcacccgaggcaacacattatccttcacaaacaatcctttaaccttatttaaagcccattaaaaattgttcgtcctctctgattgtaaatcagcaaatgcaacagaaaagttatttctattgaagtcacaccaacaatctccaacaatggaagacgatatatgttcatcctgtaagtagtatcacaaatcaacattgttgggaatgcatttaatagctcgatggaatctaaatgagaccacatgatgtncttgaccacatcttaagtgtccact

SEQ ID NO: 155454 - DNA, 370 bp, Glycine max
  unsure (1)..(370): unsure at all n locations
ngcacacagagtatagagaactatatacataattctaatatttttttgtatttaaaactccaaatcaaaattttcattggtcaatgtgttctatttgctattaattctcatgttagtctcttatgtgcctgaaacgaatccatgccttccttgtactttttggcaattttcaatccaatcttgtttggggcaatgatggttcccttgagctatcaagtcaaaccataagttaaatattatagtcatttgaaataattaacacacgtatcatagatcgttagaagactaagttacacaactcaatgtgtaggagacatttaaaatgactatgaccacctccatatctcttgtatactaccaatctatatac

SEQ ID NO: 155455 - DNA, 411 bp, Glycine max
  unsure (1)..(411): unsure at all n locations
gcgagcctntgatggtactcggcgggaagtaatgggggaaatcgacattcccattcatataggcccccacacttgcaatgtggtgtatcaagtaatggatataaatcctgcctatagctgcctcttgggaagaccgtgtattcatgccctgtgagtggtcccttcaacgcttcaccacaaattgaagttcgcagtgggtggacttttactgatagtgtccggtgaagaggatatgttagtgagctgcccctcctccgcaccgtacgtagaagcggcggaagaatcattggaaacggctctccattcctttgaggtggtgagctgcgcctctgtggaaccgagtccgtcgctaccttctctctcacagtggnataatggtgcgcgtgtatgctcatgacggattgaccccga

SEQ ID NO: 155456 - DNA, 475 bp, Glycine max
catctatcattggagaatcgagagtttcattttcttctcttccatccgagaagatggcaaactcaatattcattttcctccttacatccacatcaagaaagaacctctctgagcatattaatctttcacgagtgagttccatgtcttgatgtggaagaactcgattagaatcttcacttatccattcatgactataatgtttacaactaacaataaatatatacatgattaaaatgtatgtaattctaacaaaaatgtcagtgaaaaagtatagagttaattacctaggatttaaggaataagctaaacaatggagtggagtgttactctctagccaaccgtcaattaatatggagtgcactaccctcataaaggttgatccttcactctcctcctctctctcatatagatacatggcatgctccaccttttcaatcattggatcccgcatcgtcttatactatatggagagatg

SEQ ID NO: 155457 - DNA, 467 bp, Glycine max
  unsure (1)..(467): unsure at all n locations
agctntactntacataattcgctcagatacttattcttattctgcagcctaccataattgggagctgcacgcaattgctgttcaaactccacccttagctcttctatcttatccttcagcaatggagcaacaatttgactatctgcatctgctttggaaacttcctcccttagtttcaacaaactgactgtcaagcccgtggctttaactgcctcagagtattctagaccgacctcccttgccagttgctttagcatctcatccagatctagttttggaggaacaggagaagattccttagcttccaaaacctgtggcttcagtttctcaacctcaacttctagtctagcatgacgaatcttagcaatagatagatccctcttcttcatgtggccgtttctcttgcgatctataggaataccttcctggaatccacaatctttctgaactaacatgcgatggttaac

SEQ ID NO: 155458 - DNA, 335 bp, Glycine max
  unsure (1)..(335): unsure at all n locations
atcaaaccagctctcctgcctgttttgctccctcttagtnaatcacttaggnnaaaggccctgacgttactttgaagctgttacgagattgccgtaatgaagtagtgatttggcttacagctggcgcctagcgcgaagaaacaatgactcttggcagctggcggcgctgcgagacatcttgactgaccttttaggttctacccgctacgactgctgctcgctacgagtactactaaccatatgcctgtacagaatactacctgactttcttttacctgactgagggtcacatataaaatgaaatcacgtgaatctataactgaaatgacatctaa

SEQ ID NO: 155459 - DNA, 471 bp, Glycine max
  unsure (1)..(471): unsure at all n locations
ttaagcaccgcagctgcagcttattctttaaattgaagctgtaaggaaatgatntaccatttctttatgattgcaggttggaaatggtttatcaaaagatgacaaagctcaaaaacttgctttgcagcactagcttgaagcagttagtcatacacccttccccctcaaaaaacaatcaagatagcagcacaccttcttagagagagcaatgttatctttcattagatttgaatttttcaacatcattaatttgaaatttaagactttaagtcctgctctatgcgctttcttcttggtatctatgcctttagatttatctatgtgcagggtcatatcaaaacatttgtactcattagttntgtcttggtttgttgcaggttagtatttatattgtttggtattattattttttatatggctccttacaatggtgttcttttatgctgaatcctaattttatattatgcatac

SEQ ID NO: 155460 - DNA, 418 bp, Glycine max
  unsure (1)..(418): unsure at all n locations
ttttttggcatttacgtatatgccacataagtgaaaaaggtctnagaaatttaagcaagcaaggcttacttggaaatcttaaggtagaacttcttcaatattgtaagcattttgtctgtgggaaacaacatcagacaaaattccaaaaggctatgcacattacaaaggccaaattggtctgccttcattttgactactatggtccttcaaaagttccatcactaggaagagcaaggtacttcctctccatcattgatgatactccaagatgacatgggtattcatgacaaagtagaaatatgaagatttcaaatgtttcaagcattggacaattcttatgaagaatcaaacaaaaaggacaataaagtgtcttagaattgacaatggcttganattctattacatggaattcaatgaa

SEQ ID NO: 155461 - DNA, 449 bp, Glycine max
  unsure (1)..(449): unsure at all n locations
caagctngcatttggctattcaaccattgtacttaggagtaattccaaccattgtacaatgccattcactctttactctttaataacactaacatctaggtgttcaatactccatacatgttcacaattacttttcaaaatttgcgaaacacacttcacatctttgaatgtccactacatcgcaatgcagttactgatacctatttacaatagtatttaaccatatcctccttaactccgaactctgtttcaaaaatcatcaaacttcattgttaaacaaattacactgttaatatcttcgatcagcagctatactgttcttatttcatttctattcctttcaaatgtacaattgctatgcacaatatccgtagtcattaattaggtagtcctgtacagaatacagttatcgccaaacaagcaaaaatagaaaaatgttcacaatcaag

SEQ ID NO: 155462 - DNA, 351 bp, Glycine max
  unsure (1)..(351): unsure at all n locations
ggatatacttctgggagttgggaccttccttnttgatatattttctttgggagatatcaggaatgattcattaatatgttaccatagtttctccaatatgtcgactgacagagttcagttcagactcttctggaagaacgcgcttgttattctttatcaccacttactgtagttcgcgcttctgttgttaacgaggcattatcttctccttgctaaattaaatgattgttgtattgttcattcatatgaactatgaactgcaagtatttgtgtatgtgtgaatcgtggtcatgatgattgcatatatgaatttataactctcttagattattaaatngacatgctttatat

SEQ ID NO: 155463 - DNA, 462 bp, Glycine max
  unsure (1)..(462): unsure at all n locations
agcnntttgagtttgcccttaattgggtttttattcttctgtattntatactttnttttctatagttcatttcatcatcattgtaactatagctgcccattataaaatagcttagacaatctaggtctactgcttctgaaccttttatttatccttgaagtagtttaatttttttttatttgtgttcaactagtgaagagtgaagactgaagttgttctatcagactcgttgattttcctttcatttcgacggaagcctaagcaatacactgccactgaattgccagtaagaaaaattggtcatgaaacacacacacacacacacaaaccctaatgacacacacacacacacacgtatgatagaaacacacagacacacactgatgacacacacacactcacacactcatcatacanagacacacacacaagtgtgataacanaattgttcaattatacatg

SEQ ID NO: 155464 - DNA, 453 bp, Glycine max
  unsure (1)..(453): unsure at all n locations
nttccttgagccttcaagtttggcctttatgttgttcaccatgttgctcatgttgctccccctatctctaacaatctctccctttttggctntgatgatgccaaacttgaatatgacattgagtgaatttagagggtttgagtcttgagattagggacttgatccttagtctatcctaaagatacttaacacttaagaagagattaattcatcatcaacatcatatattatacttatatattattgatattaatgcagggctcaatgcttatcgcaatgcaaccaatatgcaaatagtcaaatatgcaataatgtatattctcccccttttggcattaacaaggcaaacaaggttgaatattgatgcaagccaagccatggatgcttggttcggatagttccggatgaaaattcaagaattaccattgttgaccttccaaganatcaagaaca

SEQ ID NO: 155465 - DNA, 456 bp, Glycine max
  unsure (1)..(456): unsure at all n locations
agcttatgatnganaatgaaattatatatgttatattaaaaggctcaagtgtcataatggaactaagtatacatgagggaaattaaaaaaaaaatgtgaacaaattagattctaacatgaattgagtcttccttaaactcctcatcaaaatggagtgaaagaaagaaagaatatcaaaatgatgaaatgtcggatgtttactttttgagaaaggtcttcctaagactttttgcattgaggctataaacaccttaatatatttgatgaatttattgcctaccaatttgaaaggaaaaaaaaccctttgaagcatgtgtgaacaaaacaaacttcagaggaacatttgaaggtatttgataaattaagatgacaatttataagagataattctaaattaagatgacagagaaagttatgagctgataaaaaatagagaaagttatgacagtgacatta

SEQ ID NO: 155466 - DNA, 491 bp, Glycine max
ctgtaggattatggggtacccatcacatgtggtactagttgtctgtcgggcgatggtgcacaacaagttatccacatccacaaagcgcgcataaacccaccatcccctgttgcccacctccaactgagctcacgtactcccacgtagcccatatcctcgtttctctcaacaccgggccccccatcaatcctcccaagctttcccaacatcaaagtaatacaacattcaaatagcacaagctatcacagccaagcaaaacagggcaaaggcagaaaactctacccaaaacaccaaccaaatcacagcttttcacacacaaataccccagaaacatttccttcgttccggttcattaaccgctggatcgactccaaaattttactggaagtctatagtgcataagcctacattgtgaccgttgggatctactagcatacattcagaactcattctgcactactctgtccacacgcaaacacacacaagcattt

SEQ ID NO: 155467 - DNA, 450 bp, Glycine max
agcttcttatccaagcaattcttggtggtgtatctccttcttccttggcttattccctagtggatggtgcctcccctctcctcttctcctttgccttccgctgcatctccatggtgtaaaatcaccattgaaggacctcattgaagctcaaagatccagcctccatagaagctccacaagcaagcttccatcacttctgacttgctatatgaggtataggctgaggaaccttcctcttctctaccctggttcctcccactgttcagccaccacccacatcggtgttgaagcccttaccagcaaccctcaaatatgcttacttgggggacaaggaaaatttctagtgatcatctctgcctcccttgctgctgagcaggaggagaagttgctgcaagtgctcaagaagcacaagaaggccattggatggacttttgcaaacatttttggtat

SEQ ID NO: 155468 - DNA, 450 bp, Glycine max
  unsure (1)..(450): unsure at all n locations
cttatgcacggaaatgtaattatgaaattgagatgcccgatgtaacaccatttcctagttaaccatgcattaggtaccatgttcaattattntgttnttaagtgaaacgggtttatgatcccaacatggttggctcgtggtgcctaacacatgaaactaagaatgtagtgtgaagtttcacgcttcccccttntttatttttgttttgtagaggaaaacgcaaggatgagcaaacatgaaaacaaatggtatgcaattttgcagatcaaaaagtttgttgaacacatatgcatgatgatgccatgactcatgcaaaatgtgaggctggaatatgataacggacaaatgcaggatatgtccattatgatgttatgaagagatgcttatgcgatgcatgatatgaatgctntttacggacacgagagcccgggaaattatcttgtcttactt

SEQ ID NO: 155469 - DNA, 442 bp, Glycine max
agcttccatcaagaagtattagagcacatgagcttcaagtaagtactccttaaacctccattaattttcagctttaccttctccttcattgttgattcttcatttttcttcatgcatctcctcacatgtcttgtgttgaatgttgttaacatgatgttttagaatttctaccgattaaacttgctataaatgctagatttgattttctatggttcaaatttcttattcttgttcttgaaccatgaattgtgttgagtttaggttcttttgagttttggtatagggtgagcttagctattgtgaagaacttagtgactattatggaggaaggcataggtcacaccctaaacctcactcccataggagagaaaaggaaagaaagtctcaagaggttaacactaacctcccatacttccatgagaaggacaatgtagaggcttat

SEQ ID NO: 155470 - DNA, 432 bp, Glycine max
  unsure (1)..(432): unsure at all n locations
tcgagaatggcccaaactcccttcctaaatctgatttcatgcttgaataggtggctntgtttgtgctagcgtgcttagcgcgactatggaccgctcagcatgcattagtggattttggcttagcgcatgcttttctcgctctgtagatggactgaagcggtgcgcttagtgggatgacccttcgctcagcgcaaatgcacagatcaccaacaaaactagcaaaaccaaagaacactccccgccccccatacttaaacaacacattgtcctcaatgtagcacaattaacagattaaaaacaattaaatcatcaaagagaatcagacaagtgtaataaaagcaaagaaggagataggaaaagaaaaactccctaagtcatggtggaggaagagtanggcggagtaaggaagtctcttccaccactacgtccact

SEQ ID NO: 155471 - DNA, 426 bp, Glycine max
  unsure (1)..(426): unsure at all n locations
agctngaaggtaagctagatggcttggttaatctggtaacccaactggccatgaatcaaaaatctgcacctgtcgcctgactctgtggtttatgctcctctgccgaccaccacacagacctttgcccttctatgcaacaatcagaagcaattgaacagcctgaagcttatgctgcaaacatctacaatacacctcttcaacctcaataacaaaatcagccacaacagaacaattatgacctctccagcaacaggtacaatcccgggtggaggaatcatcccaaccttagatggtcgagtccttcacaacatcaacagcagcaacaacaacagccatatttccaaaatgttgctggcccaagcagaccatacgttcctccaccaatccagcaacaacaacagcaacattcccagaaacagcaaatag

SEQ ID NO: 155472 - DNA, 363 bp, Glycine max
  unsure (1)..(363): unsure at all n locations
catgctgggaacgcctctagttcaacacccgtgtattctaangcacccacccagagggaagctacccaagttccgactccgaacacgactcgaccggccggtaattccaacacgacaaggaacttccctccgaggccatttccggaattcaccccgctcccaatgacgtacgaagatcttctaccatccctcatcgccaatcatttggccgtggtaactcccggaagggtcctcgaaccccctttcccgaagtggtatgaccctaacgcaacttgcaagtaccatgggggtgtcccggggcattccgtcaaaaatgctggcccttaatacaaggccacattaatggagcggatgctgactttc

SEQ ID NO: 155473 - DNA, 461 bp, Glycine max
  unsure (1)..(461): unsure at all n locations
caagcttgtaaagaactagaaaaattttattattcttgttcgcacatcgntcgcgtgtataatatataaagcattatttaaatctattccataaataaattaaattacatgcaaaaacaaattttaaaaaaataacataatatatatttacgaccaaaaatttatataatatatatataaaattaatacaaggaattatataactaacctagcatagcaaatttaaatatttgtaactagaactaaacctaacatacaaaactaatatcatttaaaactataactaatattatttataactataagtaaaactaatatcttttaaaactaaaactaaaactacactaaataatttaaattatcaaactaaacctaatttaccatttaaaattaaaactaattaaacacaaatttttattaataacataatttatcatttttaactaanactatagtaacac

SEQ ID NO: 155474 - DNA, 487 bp, Glycine max
  unsure (1)..(487): unsure at all n locations
acactataaaactaagcttctagacaaaagtcagagaaaagtagcaatttttctatacatcncatgactagatgaaggagaaagcgaaaacagtgactgaaggtccacatactggcccagaaactctaggcccaaattcatcgacccttaacttaacttctccacagctaccaccaccaccacaaagactggttccttctctaactctctggtacttatcttgcctctctcttctaagcagatactacagcgaaggagcatctttcattgtcaaaccttatgttttacattctatctacaagggcatgggaaatttttttatttttgttttcacaggcataataccttagcgcacatattatttttgcaagtatgcatgtaagtttatactttatacaagtaccaagttacaatgatcatataataaacaagttcgatttatgacatttatggtcaaatgcaattatgattctcacttttaatcctg

SEQ ID NO: 155475 - DNA, 419 bp, Glycine max
  unsure (1)..(419): unsure at all n locations
agctnggagtcattngttgtgatttgtttagtttgttggatctggacaggagcgattcaggactataacaagcagttattatagaggagcacatgtttttgttgtccttttatattttttggtacttgtgtgtcttgcagttgcagtgttcaaatgctcaggttttttggaatatgttacgactctcccacttttgccactgcaatgtttgatttaatccctgcttttaccttcatacttgtcatcgtcttcaggtttttattactgttctcatttgtaacttctgttttctcttgaaggcactgaaacatatcaaagagcttgtgacttaagatctcagcaatgaacccttgctaattattgcagtgatcagtgcaaccaatttccaaagatattaatttggaataccttatagactt

SEQ ID NO: 155476 - DNA, 447 bp, Glycine max
  unsure (1)..(447): unsure at all n locations
agctntgagccaaaatcctgactcaccataattcttgttcttggtgagaatgtcaatccttaccctcagaagcaaaaaaagggagagggaaaatttccaatcaaagagaaagcaaaaaaggaaagaaggaaaatttccaatcaaaagaaaaaagagaggaaaggaaattcccaatcaaagaatgggagaaagcaaaaagaaaagaaagaaaattcccaatcaaagaatgggagaaagaaaaaagagaaggagaagaaggaaagaaagctcctgatcaaggatcgaaagaaaacagaagaaatgtgcagagaggtctctggaccaaacaatatctgaacaaatacggaattgtcaccaaatgaacaaaagaaagaaaaggaaaccctaacctaaaagtggtcttctccctttgattaccaaccaaaatcctgtgcgtcggtgacttgt

SEQ ID NO: 155477 - DNA, 453 bp, Glycine max
  unsure (1)..(453): unsure at all n locations
agctngtacctagagacattggcccatctcctttattttattgctcaagtaccatgttcactgaccaattgacgttgagaagcgtgcacagtgcacaggtggcttatgctacgggcaaagaaccttagttattttgaaaaataaatgttagtcaatcagaatacttaaagatattatattagttaagaaactaagataagaacatatttaatgtgtaaataataagagaacataaaaaaaattatatataattttttattttctaataaaaatatttctactaacgaatatcctaacatttaccaacaaaaaatcatctcaaaatcagaatcacatgcccatgcatgttccctcacatgtattacaattaaatcagaatctagatccactataagaagaaaatttccatttctttcatgtaccaacattgtacccttcgaacgttntactttc

SEQ ID NO: 155478 - DNA, 270 bp, Glycine max
  unsure (1)..(270): unsure at all n locations
gttacagttaaatggatataggccaccttgagtcattcttaattagctcttcattggaaacattttgcanaaagggtccgttcttgttgacattccagttggttctagtttgcatgattcacataggcaaattgcataccacattagtgatatacctttcattgatcagacttactatggtggggaaatatattattttcaacacgaacttcaattgttaggcgttgtagttggattcatctcatacgttctactcaacatttaatatca

SEQ ID NO: 155479 - DNA, 485 bp, Glycine max
  unsure (1)..(485): unsure at all n locations
cggatccttaagcaccgcggctgcagcttgagcaaattcaacgacaatactnttatcttgatgtctgattgagtcccgtaatatatcgagacgctcgaaatggaattccgaagctctgagcaaattcaaacgacaatcactttttactcagatgtctgattgagtaccgtaatatgtcgagacgctcaaaattgaataccgaagctctgagcaaattcaaacgataataacgtttcactccgatgtctgactgagtcccgtaatatatcgagacgctcgaaattgattatcgaagctctgagcaaattcaaacgacaataacttttcacttgcatgtctgattgagtcctgtaatatgtcgagactctcaaaatggaataccgaagctctgagcaaatttaaacaacaataactctttactcggatgtctgagtcgagcccgtaatatatcgagacgaacgaaaatgaataccgaagctctgagc

SEQ ID NO: 155480 - DNA, 428 bp, Glycine max
  unsure (1)..(428): unsure at all n locations
ttacaacagattttagtantgacccactaacctagaattaatatatcttaatgccattaacctanggaattaanaaaaacttaatggttgagtgtaactgaaattgtggcaaccaaaagtcacccccaacagcaaacaagtcagccaccatttggtctcccaaaaggttgatgcctaggttgccaattgggcccttattacaactngaactaaacctaactaaagcccttttagttgattaacccaaaacatatttttggtcagccaactttacaaggattgggccattatttagacaaactaaacactctaaaattgaaacaaagtggtgtcatttagtcctcctccatttgggccatgatacaactgacaaccttggacttttctccttgaaacttgggcttgtattcaaatagtatggacaacac

SEQ ID NO: 155481 - DNA, 408 bp, Glycine max
  unsure (1)..(408): unsure at all n locations
agcnttgagcaaatngaaatgacaataactttattttctgatgtcaggttgagtcccaaaatatatcgagacgctccaaattgaaaacagaaactcttagaaaattcaaacgacaataactttttactcggatgcccgacagagtgtcataatttatcaagagatgctccaaattgaaaacagaagctggtatcaaattcaaacgacaataactttntactcggatgcctgattgagtcccgtaatatatcgagacgctcaaaattttgatccgaagctctgagaaaattgaattgacaataactctatacacggatgtccgggtgagtcctgtaatatattgagatgctccaaattgaaaacggaagctcgtaggaaattcaaacgacattaactntttactcggat

SEQ ID NO: 155482 - DNA, 282 bp, Glycine max
  unsure (1)..(282): unsure at all n locations
gaccatgcncccacctcccaacgaagacagctattggtgttgagaggcaaaactagcaacacaaaggcattcataacaacccaacagagcaatcactatagcgcatgaaagcaaacagcaagagaaagaaaaagcagacttcccacttgtgacaacagctacccttatattgactcccaaagtggacagaaaaagcactcacgcggattacactaacacaaaaaggaattatctcctacatgcgcatggagactcatgccctcaccgttcaatgaagccacc

SEQ ID NO: 155483 - DNA, 473 bp, Glycine max
  unsure (1)..(473): unsure at all n locations
agcttctagccaaatggacttaccttgatatttatttatttgatagcccctttgagcctatgttcccctttctttgttttgaagttcattacaagtcttaagtgaaaaaccatgatatcaccttacccttaaggaattttggagctttggaattgttttgggaataagctgggaataagtgtggaggggtatgtttcattggaagatataacttttggccatgcttaatgttttattttggccatgcttgatgtatatatatattgcctagttcttgctttaatcttcaaatttgtactgttaaaaaaatgatgaaaaaaatgaaaaaaaaaaaatcaattgctgcaaattctgcaaattcatactgttcaaaaaaaaagagaaaaaaagagaagaagaaaagaagtgaagttgaataaatgaggtcttggtatgaggacttgattngggagcctctggttgattttttgata

SEQ ID NO: 155484 - DNA, 361 bp, Glycine max
  unsure (1)..(361): unsure at all n locations
ntacagaatctagttgtatttgaacatcatttactcatttattgttttatttctagttaatntattttaaatttatttnttaaccttttggccatttaatttcaattaaagagaccaatacaagattttgtggactttaaacaatgaagaaaaaaaattaaatgataaaatttaacttcacaatatgggttcaacccaaatgaataaattatctaagaatttgaaataaaaaataaaaaatttaagcccaaagtgtcttggaccaatccgtttggatccaactgacccatctgcaacccccgcaacctgaagataaanaatagtcaaaaatagacctaaatggtacttatcggattagctc

SEQ ID NO: 155485 - DNA, 458 bp, Glycine max
  unsure (1)..(458): unsure at all n locations
agcttaggaacccaaacttgtagcttctatgctttgaaacatgcttatggctaggaatccaaaatntggttttaggattagaaaagcatgaaaatagggattagtttgtaagaatttgggctgccccatgattggtactttgcacctaagtaacgtgggaaatgcttttcaatggtgtgtagatatatgtgtaaatataaagggcatgaaattctttgtaaagggtgaaggaatattgaagtcccttcctaaatgaatgtatgatagcacgggattcccttttgaatgcaagtatgtgcataatgttaaatatcttgccaatatgcataagtgtgagtgaaacaatgaaagtttgtatggtatatatattttgagtgtgtgtaggtagtttgtgatagcaagtgtttaggacatagttaagtgtaatatttgacgcaatgccttaagcgtgagaatgt

SEQ ID NO: 155486 - DNA, 293 bp, Glycine max
  unsure (1)..(293): unsure at all n locations
tctcatgacaatgagaggctaaaccgccttagttattgcttgtttagcctaanangccaaaagatgtatggtatgcttcatatctatcaatgcaaacaagtgtgttctttcctattatcctttcttattataatttcatgtatcattcatccttgcatcagctttagggattagtcgctctggagagggtaatttcttatagaactcaaaggaagagatatcttaataaaattattgctaacatggagtgattgcattatgcacatgcatcaaagcaataatgctaattataa

SEQ ID NO: 155487 - DNA, 409 bp, Glycine max
  unsure (1)..(409): unsure at all n locations
agctntcacacggattctcgattcggngtcatanactttctatacgctcaaaacttaacaacggaagctctcgagaaatgtgaatggtcgtaacatttcacacggatgctcgattcgaggacataattcatctagacgctcgaaactgttcaacggaagctctcgagaaattcgaatggccataacatttcactcggatgttcgattcatggacataactcatctagacgctcaaaatttaacaacggaagctgtcgagaaattcgaatggtcataacttttaacacggatgttcgattcgcggacataatatatcaagacgctcgaacatgaacagcggacgctctcgagaaattcgaatggtcataacttttcacaccgatgttcgattctgggacataactcatct

SEQ ID NO: 155488 - DNA, 380 bp, Glycine max
  unsure (1)..(380): unsure at all n locations
agagatgatagacggngacccggcgttgagagaaactatgatgtggtttacgttggagtacgagatctcagttggaggtgggcaacatgggatggtgggtgtatgcgcacattgcggatgtggaaaactcgttgtgcaccatcaatttatcgagagctagtgccacatgtgatgggtaccccatattactactagcttgagatgaagaattgttgaaaggtgaaactacctgcttttattgttgaccacatagtggtacctggagatatcgcgcaggggtcaagagaccttgaggacagcatgcggggagctattgtcaccatcaaacttgatcaatagccacccatgccggacatagaccgtcagagagaacctgggat

SEQ ID NO: 155489 - DNA, 404 bp, Glycine max
  unsure (1)..(404): unsure at all n locations
agctngcaacctcatccataatgtttgttgcttataatntaaaaagattagagtaaaagtcagagataactctttctacatcatcttcctctttataaagaacatcctgatcatttgtaattgagaagatagagtttacctagcccctctaagatgatttcctatggaagaatttggaatttttttctccaaggttcagccatgatgcgcatgatctctaagcccacactatctccttctgtttcagcaaatcgtctagttatttgtcaatggagtgggtttcctgaatgatgctcatagattgaggttgagattggaggaactcctataatgcccttaaattttgataactaaaaataaatgtttgatgtatttcttgtgctatttgattacttgattaattt

SEQ ID NO: 155490 - DNA, 430 bp, Glycine max
  unsure (1)..(430): unsure at all n locations
tcctctctaatcttcttatccaagacactctctnggtggtgaagctcttttttccatggcttattccctagtggatggtgcctcctttcagcttttctcctttatcttccgctgcatatccatggtgaaaaatcaccattgaaggacctcattgaagctcaaagagccagcctccatagaagcttcacaagcaagcttccatcaagtggtatcagagcacaagagcttcaagttggtgctccttaaacctccattaattttcagctctaccttctcctccattgttgtttcttcattnttgtccatgtatctcctcacatgtcttgtgaataaatgttgtaacatgattctttagaatttccaccgattaaacttgctatagaagctagaattgattctctatgggtcaaaattcttgttcttggtcttg
